United States Patent Application Publication US 2014/0057251 A1 - sequence listing, part 105

SEQ ID NO: 190626 - DNA, 2688 bp, Cannabis indica
gaaaaaaaccaaaaaccataaaaaaaatgagcaaaaagttaaacctaccatatttaagtaaaaagcttttaaaatttcttatttttaatattagaggctaatacttataatactatagctatactctcacggagtcttacaaaaataaaaattattcaaatttttacttaaaaatatatagtatttttaaaaattactaaaatattgtatatattttttttaaaaaaaaaaaaaaaaactgggggactctgggctaggtgagctctggcctaaaacgttttagtccatatccagtcccggccctagtcatactcatatagtatacataatttaatgtaaccttagaaaggtattccattttcttaatttctttgatgctaagtccttcctctattgctgctctttttaacaaaatttcctcttgctctgcctgaaaataattcaaccaaactaacattaatcactttgaaaacaaaacaaaacaaaccaatatgtgttgcatattaagtaagtgcatccatatgtatagattccaaccttagctttttggagatactgaggattttcatgtaagaaaagagttgcccacaaagtggcatgagctgtagattcatgaccagcatttaagtacatgaggatcacatctatgatttgctcattctctaatttatggccattctcatcctcaacatccattagtaagtcaaccatgtctgttttatcctctacaataatattgttctctttccttgcttttcttccatctataacatcttcaagaatcttcaccaagttctttcgagcctgtaccatataaatatttactaccaaatattacaaaggacatatatacaaggaattttttgttttacaatatgtagcacttattcttccaaacaagttaaactaaccccaaataagtaatgtaacaaagttgaacttacaatttttctaagaacaaaattccaataattactagttaattccagtttttctttaagaaaaatattattttggcttttgtattttaagcgatattttataaaatagatcaaaataattttaacaagacataatttcatggtatatgaaatgtgtcaacagttatgaactaaagaagaacacaataataaaacaataattgtgatatttaataaagcaaattaatatgacctgtagtgctttataataagcaaagccaggtagattgatggccatggctctaagtccacaattgagattaccatattctttctccatagtctcaatcaatgggccaggattactctcacagctcaaaaaaatatgcatgattatttgaaaggtgatcttcctaatctcagtcaacaactcaactggcttctctgcctttgacaattcatccaaggaactcactatcacatctttcatgaattcatggtacattgaaagagccttctgaccgctgattggggcagcggtcaggcgacggagacgcttgtgttcctcttcagaaaggcctaagaatgatttcctccccatcaatagagaagttgatttaggccacccttgcttaaattgtacatcatccatcaagattggtctacatgtttctggtgttgtgacaatgattgttgggcttccaaacaagtaggccttgtaaattcctgttctaccaacaaaaaccacaagagaacatataaatagttagatctagctcaaacatgacaacaaattaaattgagacacttagtttagttcttggaatatttttgaaagaagtacaaagtattagtctcacattggctgatgatatatactcgatccacgtaataagatgaggacagttttctcctaacaagtcggctttattaggttgagttagatccaataaatttcttaagtcggtatcagagcaaatccagttttacaacgtttggtgtccctaatatcgatttgtttacctgatgatatatattcgatccacttaaaatgaggacaattctctcctaacaagttgtttaggcccaataattttcttaatacataggcgatggttggttggagaaactatgtttgagctttcgaaatttaaaaatacttctgttattggttggacaaaatactatttttgagttaggtcataaacttgactgactaagtttttacttttgcttttatgatctcaagcattaattctcaagaagttgttaaagcttacttgtaaaaagaactttttaaagttaaaactaaaattcattagaaattcaatcaacaatctttcaaaaaatttaaagtaacttttataagctcagccaattagtcgttacgagaaattaaagtaagcttaaataataaatcttagagagtaagttatatatgttttgacatattgttttatagacaaagatatatgttaggaagagaaagataaagacctggaaatgaagttggagatgaatgaatcagggtgaccaaatttgaaagcaatgagaaaagagcacatattaccaatgaaaggccaacccatatcacctggaggcagagaacactgtattcttctactcaccatgcttatgtgataccactcattagctctctttattaggaccaaatttaatgcaacaaaaccacctatcaaagctgagaaaacccaaagtccaaaatttattaactccattttcaaataattgtttttgaatttcaaaa

SEQ ID NO: 190627 - DNA, 2038 bp, Cannabis indica
aaaaaaattaactcaatgtggaaaatccaagaaggtgcaatttgttgaaacaaatctaaagtctctaggcattttgttgaaacaaatgcattttaattatatgtttgattcaactttgaattgtccctcgagcacatccgataaaattggaacgatagcatgacccttgcgcaaggatgacacgcacaaatccagaaatggtcgaaaaaaaaatgattcaactttgaattattattattattattattttgttcagcataaactcttaaaataaacaaatactattctttgtttcttttcctttatagtgtatattggtgggaaaagaaaaaaaaaaggttatagaaagacataattgcatcgattttaattcaatggcgccattaagaattgtggctaagtaagtgttgctttattttacagcagggtaactttgttcccaataataccaaaaaaggaagcataattgaatacatataatctttgaacaaaatttccaataagttgatcatatactacttaccagacatgtgtctcttctcatcaatgcctttacccaatttactgtatggctatgtaaacacgcacatagttctctcttttcatttgttctttttgggcactttgtatttgaaatagaagagaattatcaacaaaaaacaaacatatattaactagtggtgaggacaggcacaaaagacattaagaactttctgaagaaagcttccaagaatttttattatttaacctaattgcccctaatcttaatacccctatttaagtatgaattacttttctcttcttatcaaatatatatttatgtatcaacaaaaagttaatgggaacacaactctaaaaagccaaacattcatatgactgatctttgttatgtggaaaagggccattaccaacttttgaaattattcaccaatccatttaatatttttgtttgaccttttactttagttcctgaaacccacatggtgctacttccttttctaagtttttacagaagtgtatagctaactaaattaattctaattgtataatttttttttttttgacaataagcatttttagaaggcgccctcatagacagtaagagtgcaaacacaaagtaagtttggcatattggcatacatatttatcttaaaaagtttggcatatgtataaattataatgaacttgtggtagctatatattcaaaaaaagttaaattaaaaacccttcaaaaataaaataaataaataaataaaacaacccaaaaagaggcccagcctgcatgataattaatttgtaacaaacaataacaggattgtcatgtaatcataactgagttgtctagaattgccccctttggaatttaattacatcattattgtttcacgtttttcttagaggttcaatcagtacgtaccttcttcttcttctttacaaaactctttaacacgacagtacattattaatattgtttggcttcttcttctcaaactttggtttatttgtcaatcatcttactatcatttttttaaaaaataaaataaaataatgttcttcctatcattggtgaagctctgtgtttttttcattattattatatatctctctttcatccctacaaatggaacatgttggtcttcgattctgttcatgaatacatcacatgatttgtcaactgtgacaacctaataataaatattttttatgcaataatgatatcactacgattatcatgccttatgatgaaacatacaattttactccaaaatacacctttttttagaaaaaacccaattgatgcatttaattaacatcaaccaaaatcaagatcgaaaaattcaaatgttgaaagaaaattaaggaccaaagtataattagatgataatatttattggacatgttagcaaattagcaatgatgaagctagaaaattattttagatgagacaaatcaatatgtactatctactttttttttttttttttagatgatatgtactatcaattaaaagaatgtatatatgcaaaaaaaaaaaaaa

SEQ ID NO: 190628 - DNA, 4160 bp, Cannabis indica
attatttataaaatattgttaaataaaatatataaatataactaaagttataaaatatacatatactttagtagttgtgaaagaaaaatatgaaaaagtaaagaacgaatacgaaaacggattagcatgtttaagaaatacgggttggcatgaattcgagcacagcacgaaaatactgagcctacgggtcgtgtcaggcctaccctttaaaaatattggcacggcacgacacaacccattttttgaaaaacgtggataaatatgtgtcaggctagcacaacaagcacaaacttacaacactattcatggttcgtatctctgtattttcctctcatcacaagaataaattttataaaatgtgtgatcaatacaaaattaaacgaagcgttcgggagaagtaatcagcgagcatctagatgtcttgtaccgttttccatttattaattacgaaatcccataatattagaaattaactctcgaggatctcgtccaaagatcatatcttactaaatatgaaaataaagtaattaacaatcaagcatttaatatgtctgtattcttcacgaatataggacatgatttttggcaactgtcaaccccttagctgctagtctagctttgtatcgcaccagctcatttttgtttctaccttctttttgtatgaataaccacttttgctgcactatactcttccctttaggtttaggaacatatatctaggtcttattcttctttaattaaagagtccatttcctcatccacaactttgttccatttcctatcatccttgcacttaatagcttcttcataggtctttggttttattttttgtcctcctaggatgcttagcaatgtataggttgtatcctcattctaaatattaaagttgtacttaggattaggtctagtagccctagccaaatgatagtctaaaaggttttcagtttgtgcctcttccgtgtttcctgttgttccacctgaacagtgtcacctctctgctccacctaacatgtatcatggtctagttcatcttgatcagcttattccaaattctgaacagttcctagaatgactggctttagatcaaagctcaatgtatttcttttggggttagtactcgagctacttcctgaaacaaaggaaaaatgatttcattaaaaatcatatctctattttttatagtttttaaactagatttctctcttactcaaggtctatatccctcagtaccttcggggtagcccaagaaaatacattttagagctctaggctctaaattaccaatgatttgtaatgcatatgttgcacattcaaaaaattcaaatgagacaagtctggtggtatatcagactacctttttttggtgctttgaattcaaaaacacttgatggacatctgttgatcaagtatgctactgtaagtagtgcttctccctagaaatcattagctaaactagctagaaatagcatgcaccttgttttgtaatcctttctgacacaccattctattgtggagttagcctaacaattctgtgtctttgaatatatgctcttttacaatatgtgtcaaacgtatcatttcaaaactctagtgtcttgacctttttgttagtaagatttccattacaattttccattcttggaacttagcgaatgcatcatttttatattttaacaaaaaaaaaaacccaaaaatttcctagagtagtcatcaactatagatagaaaatagctacaactcccatgagtaggtactttttctagacctcataaattagaatgaacttattcaagtatatcgttagatctttgtgtcataaccttaaacttaagcctatgatgcttacccaaaataaaatctcacaaaaattaactttacttaactttatatttgcataaaatattttgctcactcattagttagaaacctcattcactgatgtgccctagtcttctgtgttatagagttgctttatagtcttcaggtgagtttgctactgtgttgtggaaattagaaatgggttcccctctgaggaagtacaggcccccttctttgtagccttttattatagtcatggaatccttgcttagtttcattgtacatatttcaaatttattcataacaccaaggtcatctagaacacttatagaaattaagtttctagctagattaggtacaagtcttacccttgttaaagactttatgacatgtttgattgtttcctaggatgaccttccatcctttagattccctgaaatcaataagtaaacatgtatcattttgtcatataaaaagtacaacctgaatcaagaatccattcgttcttaaatttagagctagcaatataagcttctccactttcatagccatcactcagattggcttctgtttgtttattgctctgttttgagaagtaattatctccttggtttgcatcatgtcttgatcatcaggtttgttcttcttatttcttttccagttataacagtccctcctaaagtgccctagctttctacagtgaaagcaaccatttggatatttgtgtcccctggattaagacctgcatgtaccttattttccacctctgttgagacccctactatgacttctccctctattttccacggcttcttctaataaggccatcctctgtttaggttaagttcaccattagaactgcccaacttatcattctttacttccaaatctataaactttaaggtagaaataatttcatccaaagttatggaagtctttccatacatgatggttattttgacttttctataagattctggtagagaattcaagatgatgattgcctggttttcatcacttaaagattcattctatttagaattatccaactcaatgtccatccttaggaattcatctaagttctcaatgtccatccttaggaattcatctaagttctgctcaagattcttagatatgttcatcttaaaactaaagattattttcttaagaaagatcttattggttaaagactttagttggaatttctcttctagttttctccaaatccttgttggagtctcatctttatctactaatctggagattgcatcactcacattaaatatgacaattcaagttgttgtttctaggtattcatcttgttgaatgttagttgtattttctggccattcaataggttcttctaacacccttagtaaattctattgagctagcaaggatttgattttcctcctccatactctgtagtcacctgaactatcaaatttattaatgttagtattaatactactcatattaaatctgtcagaattcaaatcaaggatagggttaaggatttctagtagatcatttagtggtatatctaacaaatcacaccaagatcaaggccatcttcttgatccaatctttcttgtgattaaggatcaacctcctcctgatattaaggatcaattgcttcatgaccttgaatatcgatttcttccagtattgcttgttaattgtatcaaactatacctttaattcttggagaaaaaccttgctctgataccactgttaagatctgcagttcctaacacgctcaagatacacaattaacacaaagttgattttatgtaatttgcaaatttgttatacgtccaacaagccaagcctctcacgagaataaccctagcaagagactaattactcaatccaaaggttcgagattcaactcaatattgtatctctctgaaccagagaagcactagggttccaagatcaagtagatctaacttgatctctcagatcaaacacacacatataaatcatagtatacagtatcaagaacacgaacacacacacaacacagaagagattatggttagagatttagagaaacagacagtgtaacgaagaagagaataccaaaatttgatctcagagtttaccccgaatcagtgggctacgtctccatcaagctacctcagagtgcttgattttcactatgaacaacaggtaattacaacttccttttagatttcaaaccacagtttcttttggttgataatcaatgttttctctttgtttttctttctcttctcttctcgatctaattctttttgtttctctcttttgtgtacggttacaaatgagctagctcgagggcttctctctctctctct

SEQ ID NO: 190629 - DNA, 1276 bp, Cannabis indica
atctagcgtttcttcctcgtatcgtttcattggaactccactataccatatcatctcaatggaaatattgttcgtggactttttgtttgtcctttcataaatgatctttggaaatgaccttgggatgcaatgttactgtagttttttatttttaattttttgaaaaatagtgcatgaaatcataagtagagttaataagatttctttcatcattgcattaagatttctttcatcaatgtaagattttttgatccttgtatatgaacttctccaatatatgcttctccctaatatgcctccacttacattgtttagtgcaggagatttacgtcgttctaatgctcttctttctcgatatggctttttcctccgtgaaggagggagtttttctgttacagcgtataacttactaatgaaggttctgcactggcattattgtttttttaagtgagctagattttggtgttgaaagcaaaaatctttacatatttgagaagacaactgaaggattctgcttttctcatttcagggatacataaaagcaggttctcctgaaagcaccatatccatgcatagagaaattctacgtctaggattaatccctgatagacacacctataatactttaatttctgcatgcgtcaagaccaacaagttggatacagcaatgcatttcttagaggaaatgaaggtcccaagcatgtatatcaaaggctagtttagagcctgaagttatatctaattgtcttcgtaaagtaattgcattgatgaagaaactagatttttgtttttcttaatctcttcaggagaaagcagagacatttagtgaaggtgatcttttcccagatgtggtcacctacactacattactcaaggtatcatcttcaaaatggactaacattaataatattagagattctttccccttcccatttatacctgcaaatagaactgaatctcatctgaggccctgatatttttgtttttgtctttgctttttacagggttttgggctttcaaaggatctccctacgattcagaagattgtattggaaatgaaaacatacggtgattgttttatagatcgaacaggatacacagccatagttgatgcattgctaaattgtggctcatataagggtatgtcacaattcgtgattgatttggaagctacaaactttaagcttaggccagcaggctagctttgtttgtagtgaggtttctttatttaaccaccttacttctatagagtgcatttaaaccttcggattttttt

SEQ ID NO: 190630 - DNA, 5645 bp, Cannabis indica
tcaacaactctaccaattatgcctctataatctaaagatactctgattctccattcaactctaacttgtgtagttgtgagaatataattggtaatgtggagttatataagtgggcacattttaattgaatttaaaataaagttatttttgattaactaatgaaaaaaaaacatgtatgtttcaacttacccgtaaattaagttattttctcgacttacatgaatcataataagagattaaactacatgctatgtattttctttagaattaaaataaataaattttaaattatagagacacccttaagtttatatttttctctaattttaagagttttttcttttagggataattttatcttttctttgttgcttttaaagcagttaattttgttatcaaattggcaattactaataagaatgttctcttaatagatccatgatattgaacacaattggctagccaagtggtttgaaagcctaaaactttagtgggctatttttgattttggtgcaagggatttaattagggaaaattacataattgctattcttagtaaattttttgaggtgttctataagtataaaaaaaaaaacaacaaaaaaactacatgagagtaactgaaaaataacaacaaaataacatacaaataataaaaaatcgacaacataataataaatttataacataaaaatatatcaaaaaatcgtatttcacataaataaaatcttaaaaactgtaaaaatatttaaaattccatacaagcgtatttttatatacatatattttttgaaataattccatttatttataaatccacttatttggatttctcattatctcagtccaacaagggaatatgctgccaaataccatatgttggaaatgtttacttaaataatttacaaatatgtaaaagttattgggtgtttttacaatacatctccttaaaagaggtgtatcgatgcacttctatcttatttccgatgtagaatgatttttcagtctaatttttttcatggtcgtcttcgttgtagttatttaagacatctttcaaattttgataaattaaaaaaaaaaaattaaacaccgaaatcaggattcaaatagtttgttgcactcaagactttttttatattatacgcatataaaatagattgtttgaatactgcttaaaattgtaaattattccaaattttttaaaattttacagaatgtcttaaataactataacatacataacaacagaaaaaattagactaaaaaattctttcgaatgctgaaacagataaagggtgcatcgatgtacctttttttaaaggtgtgcaagcaccccaaacttagaattcatatttttgtaatattccgtatttttaagtgctttttaagctttttggtatttttgtttattgggcttaagaattttaggcccctttgggaaaaagtccagctcttcggcccatagattcatcttcttcgttgcgaaaggaagtaacgttcttactctttcttcactcagttcagtcgggaaatggcttaaacacaaaggcttctcaaatcaaagccctaattccaaccaccatcgccatggctcctcccaaagttcttatggtgtgtggctttggccaaggccaagggttcttccttttgtttttccctgtgaagaaaacaactcattctttttgtttttttttacaggttgctgagaagcctagcatcgctctctctatcgctaacgctctctctcgcgctcatgtactctctctctctctctctctctctctctctctctattttgtctatatatatgtgatatgtatgtattgatgatggattcagtgtttggatgcggagaaagtgtttcttgttatttagagtagagaattactgatatgctgaaactatgatgtttctggttaatcacaatttatgaattactgatacttgttttggaactgttgaatctattggaatttgaatttgtaatgttgttaagtttttctatggctgtgaataagtttgttgatcttcttatggcttaactaagctgaaattatggtgcagattactgagcatagttaagaatagcagacagttaaagctttgttttttcttgttattttttgaaactgataacaaggacaatgataagttgaaaatgctgtgttctttaggaacactcattcttctttctctttcttatcgattactgtggttacataaacttgagtatcacttaaaaacataagtgatatatgcttttcctttgtatatttatttggtgtagttttatgtagttgaatatgcctcaacaccttattaataagtagtggggattagttttgtgttcctgctagtgcatgctttatcttagtttttctcatgttatgtaaatgattttcttttaattcttttttatgtcattatgagattcatgatacaatgaatgtttgcattgtacagatgagtacaaggaggggtagtacagatgttcatgaatttgatgggaattttcttggattcagagcacaatatagagttacatctgtgattggacatgttttcaggtccttgcttgtcatttactatttaatagggagagataaagtcattatcaactactagtcttatttagagggtgtgcagagcttttagagttgttgtcactattggcctccaatattcttaaattatgttctttagattagtcttctcaaattttactatcctaatactatctttcattatacttttttcttttattaataaatcatctgtagaggatgttgcttatcatatacatcaactggaatgatgtaaactaaattttgttgatgacagaggctcttatttcattattacatttctagcaagtttaacatgtaattgatgtttcttttcaccttgaaatagatgatattacgattttccttttgtgtgtttttctagtaataagtttgcctctttccaattattgttacttttgtttgtcaatctagtgtagattttccacaaaaatatcaagactggaatttgaccgatcctctagatctttttgaagctccaatcgttaagaatgaatcaaatcctaaggtacttttgctgttgtttgcttttatttcattctatatgtttttcccttataatttctttgtcttattttattaaacaattgatttcctattgtacatttgttccttgctgttgctttgagttatataatgcttgggaccttatgatttcgaatctaattttcatgatgcatttgctgtcatcgataacatcaatattacatcaaattaaatcagtccctcaagaaatgtggaataaaatataaaataattgaaacccaaaaatcacatgcattttgactgtttcttgatgtgtaggctcatataggtaggcatttaaatcaagaagctcgtggttgtagttacttggttttgtggttggattgtgaccgtgagggagaaaatatatgtttcgaaggtagcattctgatactttattagatttatcttttaaatacgtattttatttagttgatgcttgttgtgaaatacttcctaatgtagtgtaacaataataatattgaaaaaatttctttgactaagagaaacggtatcatgatgaggctgtttattaaattcttctagattgaaaccacatgccacattataagatgatgttgaatgttgaatcttcttatatcatgaaatgtccgatttacttgacactttcataatattagttatatcaacccaaaatcatgacactaaatcacatgtgagaattattggagtgatagctctattgggtctttaagtacatgaaaagatgttgaacattctttgaccatatgatatggtttttgaagacgaataaatgctggtaacaagttaaagtacctaaataaatttattattgcagttattgagtgcactggctttggtgtaaatgatacaagaagaaaggtttatcgtgcacgtttttcctctgttactgaaaaagacattttgaaggccatggaaaatctagctgaacctaacaaggatgagtcactagcagttgatgctcgacaagagattgatttgaaagttggggtcgcatttacacggtttcagacaaattactttcaagggaaatatggaaatcttgattctagagttatctcgtgggttctcttatttccttggcatattttacgtacattcacaattatacgccactcttgctttttcactctattaggcataagtcatttgttgcgataagtgtgtatatatgtgtctgtctcttacaatattaaaattcaattagattttgtaattttgtgtcatctaattgaattaatgaattttgttaccttcagctatggaccatgtcaaactccaacccttgggttctgtgtacaacggtatttacagatcggtacatttaagccagagaagttttggtcagtacgtccctacattttacaaagtggctatgagcttcaactagattgggaacgccagaagttgtttgacttagatgtgaggcacttttcttgctttgaaattaattcttttcaccttccctttttacagttcttatgttttttgctttccaggctgccacaatgtttcaaaagttgtaactgaagatggaattctagaagtcaatgaagtatcagaaaagcatgaagtcaaaggtcgtccttctggtctcaatacagtaaatcttctcaaggttagaaaaaaattcacaaccctttaaaatcaaaaaaagcaaaacccgaaatatatgtttttcctcaaggtttgtgtaacttttagtaagaaaagaaaaatgatattgaaaagtattggaggacacataagggaggacagtgaatccaacacacaaacacactcactcacaaaaagaagatttgcatgaaacaaaatgaatgtggccggtctttaaaagcttgcattttgcattttcaactctgttcaaagttgaatcttttgtcattgccctatataatcctcttatgcccacctaacagcatagtgttgtaagtaatttgcattttttttaataataattacccaaaactatactcttttatgagagtccattttcttgcttaagtaataactattcttttgaattgggaagtaattacagtgtggtcttttgaagttttgtttctcttctttaggtgaaagtattttcaagttgtttagttatattgtagaattatttctaatttgctctgtaggactaactaaagttggccaagctcttcaaataagaacggattatctcatacaatccctgtacattgtccttttattttatttttgtttcatttttttttcttaatttgattctagattgctttcaagtgcattaggccttggaccccaaacactatgcaagtggctgaacgcttatatattcgtggtttcatcaggtagttgccaactcttctctactgataccaatttcattttattttcattgtaatacttcaattttattgcatcgatctccattatgtggttggccatgaactcattcactttttgtgttcccttgatcagagtttgctctactatattactgtttcaatgtagatgtctaggtagatagatgtctagtctatggctggcttc

SEQ ID NO: 190631 - DNA, 2086 bp, Cannabis indica
aaaataattttatttacatttttatggaactccacacaaaaatttatatagcaactaacggaatgttgccctgattttctcccaatgtacatggcaagcccattatgtgacatgtggcagattaagctcaaggactcggagataattaaaagaaagtcattacataggcagaataccttctcgacaactcaacaactactctgggagccacgactggtctggaaggatccagcttttattcacctctgggagttgggtagcgtcccattcctctggatgcagggtattgaaaatgaactatcaactagcatttaatgcaccatggaggaaacatctataaacgtatacaaaaggagtgtcagacgcattaaagccatccttcggcaattacgcgctaatcaaggatgtaagtgacgacttcataatgagcaatcacatcaatcaaggacgggttaagagcttgtcccacctaaactctacatatactactacgtagggagtgcataccctacttcataggtttgggaacttattcacagccaagttaggcacttaagacaattgggacttttcttctcttgaacaaatacccccaactaaattaatggtgggaaagagaaaaaaaggaggtggaacattctctgtaaaaaaatacatatacattaatatcagagactcatggaataaggttcattaatgtcacaactacgtaaaaatatttgcgttaactctcttcaaatcatctttattacattaatgatttagttgccaaaaatctcgatcaacacggatattcacactttgcgaattagattgaattgcatgaattgaattaaattagatattttatgaactctcacattgactaaaaataaaaaaaatttaattaatagtatataagaatggataatatctattgatataagccattttaggaagattcccaaaaaaaacaaatttaaagctcaaaaaacaaactatatcagtggagatatttttggttgataaaatttaattgttgttaagtatatatttttcaaaagaaaattgttaaaggtgtctagcacccttcttatattgttattggtataattaagtagcgataaccatataacttagcaaaataacctttaggaaatatagctaattaatcatgtaatgatacctataaaaaatactcgacaccactaatatttaataacaatactctttttaaaaacaggaccatttcatctatttttgtaacgcttggatcaataactaataagttattcgataattattagttactagattataaagtatatattacattaaagttcgaagtagattatacattaattaaagtatataaaatgaaaaataaaacttatttcattttatacgagaagatataataaactttatttatctttattgttcatttttatattttgggagtaaaatcattctatcattctcgttaattaaattttaattaatttttatatttttatctgaacttttactatataaaaatgatatttttattgagttataatcttatttgttgattgatttatagtaaattaataaaattttcaatttgaattcaacaaaaatttaattgatcaaagtaggtaaaataaaatttataatccattcaattttttagaattggagatagtttttatgtatatttatttcatatttttgttgtattaataatgttattaatgtgacaattattattcttggggagtgagggtaaaaccgtaatttaagaagatgagtggagaagaatctgactgacccacgcacccactactatcaccatggtcaaacttcaaactaattatatttatttcatagttttcgtctctttccttgtcagcattccctatttacccaatctctgactttgaccgcttaatcactactactacaatactatactactctactattattattattatgtgactaacactatctcctctgcctacgtgtacactttcttttcctgccacgtcataatctcaatctccatccttacattttgacccgatactgaaaccccaacggccgatcctaatatagtaaccta

SEQ ID NO: 190632 - DNA, 3005 bp, Cannabis indica
caagtttatgaaaaagcacttacagaacagcaagggcctgcattaaaccaataacctacaaggtatcttccctgttaatctatttccttgaagagacctgcttaacaagtattagatggggattctatgttgaaccatgaccgctagcattaagaaactgcagagttaaaagaaaaaaagctggaaagcttacaatgtagccacttgtaaaaatccaatgttatatggaatttcgccagtaatctgattgtaggaaatatccctaaactcctcaaattaatgccaaagaacaaaatcacaaccaagccgtatttagaaattaaaaattaaaactcagatggaacacgtacaatatttcaaaactagtacagttcccaatgttgtcaggaatcggaccacttaaattgtttccccgcacatcactgcaaataatatagaaaacctccacagatcagaacataaactaatgaaatcgtatgaagaacactatgggttaggaagaacaggtactcacaaataccacaagccagataactgacaaatatcaggtgagagggttccagtcaatgagttgtctcgcaatcccctaccaagaagaagacgtacaaggcattaaataatcgtaagtcttagcatgtaaacaatgatcaagtggaaaaagaaaaaagcaacacttaagcagtcccaagtttaaaacatgatatacttacaagtactggagtacttcattccaatacagtattcttggtatctcacctctaagctggttccgagcaagatcactagcagatttcaaggccagcaaaaatatcagcacaaacaattaaattaaagaaacacattcaaaggcataatataacaatagagctactactacttcatacagcaaatctaactaacaatgcaaaatgtgagtagatatgcaaacaagcaatgcgcagatcaagctaaatcaattacgaactcacagagttttaaggtttggaatctgggtaagggttgatgggattgtaccgaccaattggttgtttttcagattcctgaataaattaagcagttaagctattaaaaactcttctctccacaaactcatatgtagtgaaacattacaaataaaagacactcacaaaaactcaagttgcttcaactttgatatagaaaaaggaatatcaccatgcagtaaattatcagataaatccctgcatgaacgaatcataacatcttcggttaatgtagaaagacaatgagtactggcagaaaataggccaaacacaacaggataaatcaacacaaaagaacaaatagaaagagaataatatattacagatgcaccagggaggcaacgttgccaatctcatcggggatttggcccgtcaaaccattgccctgtaaatctctgcaatttttcaaacacaaaaaacgtgtcacctgtatgttcttgaacttatattgttgtactaaaacataatatgcttagggaaacaagtagataactcttacatcgactgtatatttctcaaatctcctatggcaggtgaaatttccccacccaggtttaaatttgacaaattcctaccaggagaaaaaaaaaataaacaagcttagagaaaaagtgatccatcagcgagtaacttcgaaagcaaaatagaggtaccgcaaagattagacttacagtgaaattacggagaggccatcaccattaccgtcgcagataactccccgccatgaacagaaatcgtcaccttcatcgttccagtcaagtaacacattcgctacgttgctaaatgaaactttgatcgataacaaggcatttcctgaatcaccattatttaaaacaattttttagttggatattaaagaatgtaactaattacagttcaaaatatattttaatttaaaaataataaaatattgattaaagaaaagagcgcagttccccgtagtaagaaaaacacagttgataagcatgagaatctggtaaacgcgacattctcatagagattctgtaggtctcctaagaaaatggacggagagaaaaagaaaactacatgggaaggaaaaccaccaaaaagctcaacaggcttgacttcactcacgagccgtacaactttgaaaaagctacttttaagctcaaaatcggaccattttgcttagcactcttttggtccaacccaactacacaaaaagtagctaccattgtaagagaagttctggctacgattttctcatgctcacacacaatgtgacctacacttctctctacacgacagagtccagctacccacatttccaaaaaaaaatggcaaagcaatagtccataaacagaaaagaagtaaaggttagagtagaaatgaagacaaaacaatcaacattattaccctcgtcgttaagagaggaagaaaccggacaaagaacgagcagtagtactgcaacgacgacgaagtggacctcgttctccttcttctgtctccaccattgcaagaaagcagactcctccattgaagagacagcaatgaaaatgaagtgagtcggtcaaaagagagacgatatggtatattttttctctctctttctctgactgataatgatatatagagagagataatgagaacaggcgtttagcgtgatctgtaaggcagagagagagagaggtgtaatgaagagagagaaatacgtaaacggcggtgaagcgacgttagtgatttctgaaagaaaagtggcagcggccgtcattcgtactaataatactattagccatttcccgaagcacttttttcgttttcctttactactacagcgcgtgttttccaccttctttgcagcttaacctttctagtttagtttagaactatgtaaatacttttggttaagtttacattacacctgcgcctcatttacgtcctaaatcactatttatctttttaaatttacgtcctaaataactaggacctatacattacaatccaaaaactttcgaacactctaaataactatatatatatata

SEQ ID NO: 190633 - DNA, 2699 bp, Cannabis indica
acaagaaaaaaaaaataaaaaaaggctgatggtatagcttaatatataatgtactgagttttaaaatacaatctgtactatcaaaaaaaataaataaataaaattacaatctacacagtttctaatcacagctcagattgaaagctataaatcgaaatcacctcactgtatctgtaaccttttctcctgaaagatttacaagtaccatagctccggagataatcttatcctgaatatccatctcccttatcctgaatatccatctcccctttaaatggagcctgcctgctttttaggctttagctttcttctccactataccacgttcatgccaagaacccgagtcagataagtgataactactgatcattgatgatctgatttgaaagctccagtaatgagagcgagctttctttatcttgtaagattcaccattgctattttgtgagatcaaatgcaattgctcaatctccaaatgagtcgtcagttggcaaaaccatgaaattacttaactttcctcatgttcattgtagtaatcctcatcatcatcagcagcacagtcatatggctcaagatatggctcatccccctcatcatcctggttcacaaattcaaattaagaagaaaaactaagccacttaatacgtgatttaaaggtaaaatataacataaaaaagatcatagaacctctgtttcttcttcttcggatgacagagaaaattcctctgttttctgcaacgagtcttcagcatcagtcatgttcccatttcttgtttcttccacctggatttcaaataaaaattactgtaaggaaggttctatcaaaccaaacctaggttcttgtgagccagtaaattatctttaccatttcagacttcactaactcaatcctctccatcaagtctgagatgtaatgccgcaatgcctggtatgataaattacaatcagattagaatattttgaattgaactaaagttaagacctaaacaccatggttgaaatatatgttgtcacctctcgtctttgcagttcaactgactgagctaatgcctgccttcttgtcaataaattcttaggtctaaaagtaagaggggactgatagttcttcccacgatagacaataattgcgatccctttcgtagttttatctatagatactagtacccctttgctctcagcttccaatgaaatagcaatgtgttttacttgtgctacactctttcctctcacaaagattttcaccaactcacgatatttccaatgcaagtgcatgttctctacggtaccaccataaactcctcgccttcctgagaaaacgcaacccagatgtttgcatatttttcaagagaaccattatgttcagaatcatagcaattaatcttacctagaaccaggaaaggtttcatgctcagacccatcttgcggaacaaaaatctctcttcatcagttaaggtttccaggtcatcaggaagctccgatggatccaaatttttctgcacctttgctaaagctttatcagctatttttagcttcccttttgcctaagaccatcaacgattataaatatgttaaaagttagaaatcgatagaaaattatgggttctcatagagttttgcaaaacaattgtcagcaagtcacttacaagagatagtctcttctcaagatgtctgagtatggatgcacgtcttgccaaagttgattcttttatcatttctttaatatccgcattgtttggctgtttaccccagcgggcaattgctgcctttgattctgcaagggttccagcaaccaattggtcagataaaactttgcttttcaactcaatgaaggctggggccatctttcgggcctgttcttccttgtcttgctcaagatctcttagctttctcctctctttcaaggcatgcgttacaacaggcggcaagaagtcatttcccctgtaaaagacgataaaatctttgtttctagaaagtactgttccgcctgttaacgtctgcaatcaaaacaagaatagtcataagcaagaagaacaaccagacaggagtgttcagaacccaatttatcatagggttagacagctttaggataaaagattaacttaacacccccttttttttaattatttttatttgggtaagtcatggtcaatctgttatgagtataaaaactgaaaaggcttcacattcagcagtgatgtgttagtcagtagcagcagcttccggggaatataaattggtttcattaaaagtgctcaaaaaattaaaacatgaaaaccagcttagactaaatttcttggagaaaatgtttagattttataacagttatgatggtatacatacacctacacctcaccttgagttcttccgccatcctctcattacatgtattttgtacacctcgtttgatggctatcttagcaatggcactcctttcccacagcttcaccacagcccgagccaaaccctgtagttctcggtttctccctatgacaatttataacatacaaaatacataaggagaattgatcaaatctgtaaatacaattacatgatgcaagtatttagtacctaaagcaaaatgtggaggaattgttcttgcaatcctacgaaatgctgtcatctccctgtttcgcagaccaagttttactccatgagggagaagtctgaatggaggcttatagtttggaaccactgcaggt

SEQ ID NO: 190634 - DNA, 2029 bp, Cannabis indica
tattttttttttatttttcttctatattatgcttttttttataaattaattttcattatatcttaatttcaaaaaaattctaagtctaccctttcaacctaactgtgaataaagtcacaataagtaatgatatatattctaaaaaaaaaacttctttggatttaaattcgtgtgcatgttttcctaagcacgcctatatatatttatatatttatatataaaaatgagcaatgaattaaaggccatatatacaattttacatgtggcttgaccatctcgaaggattgtatgcatgtttttggaaaaaaacatataataatattcataatattgataaagatcagcactatatattataataattaacttaactcctatcatcttgtaatactatttgatcatatatatatgctaattattaaattgttatttttatatataacaatgtggcctacacatctagatcatattatatccctttcatgacccatataatcgatccaaatatacacatagattttgtgactttatttaaattgaaaagtagtatatttaaattttgtgatttatgttatgttgtttaattttgtttttttttttcatgtaaaacaatttacgaataaggtcgtgcatgctttggccagcgtgctcaggcttttctatatgacgctgatcatgtattagtgaggactttttacctattattttgataatttgatttaatgaaagttactaaattattcaaaaaaagaaaaaaaagtagtgtttagtataagtaatttagtagtaccttttaaatatgtattttggtacattcccatttatatattttggcttttaatagaattttttagtttaattttttcaccttaatttttttaagaaaatataaataatttatattaccgaattttaaaaagtagcttatcacgaaacttctttcatctactatatataaatataatgaaaagaaaaatgtgagtttagtagtaagatattttctttcctttttgaaaatgaagatccaaaatgattattatttgagaagaatattaagtcatacatatatatcgtatctaatggagaatataaaaaccaatctttgaaagatacgaccaagaaaacctaccaaaaaaaggtagttaataatgatatgaggtattaattattttgtgtgtaaaagaatatgtacccaaaaatttgaggattttggtcaaaggttgtcactatctttgagatctttagctaccattatatatagattatagtcaacaagactatcattatttgaatttcaccaatactacaaaaatagtattattataaaaaaagttgaagatgattgtttgattgattgatttattttatttgttggtttttttttactatacatggagataattaaaatctagaccttaaattacattattgtagcacgaacgaaatgactgcatgcgcacaaaagaaaaaaaataattaatatatattaattttgatgtccaattgatcaagatcaataaaacttgcttttcatgagaataacatcacataagctcttgcaatgtttcatggcatttagttgtgtcttcggttagggtatgtcgagaggtagatgttgaaacagattgttagcgcgcgtggttttacttctctctaaaaaagagagctgtttaacgaagttcgacttgaatttgcatgatattcttataaacgctgcaatatttttattgcgtttaagtttatgttttgtaattgtattactaatgacattgctcataataaattcgttaatttagttccttaaaagttacgagagtttagtggttggaattacccgagtttgtttaattaagtctttttaattatttttacaagtgtcaaataaagtgttttttctattaaaaaaaaacatcacagaaatttgtgtaaattatgctatatattcttattaacatatatattttatttccaattaacatatactaataatagcatatgcatgtgttaattgtgcaaaaaaaaaaaaaaa

SEQ ID NO: 190635 - DNA, 2573 bp, Cannabis indica
tgaaaattgagaattgagttgacattatatgtatcacaacagttttgcttcacctccaaacacacatttaaatgtgagtgaataggtagggtacctttggctctacggacatcgggcttgttgccaaaatcataatcagcataacgcacagtgcatccggaattaagaacacgaccctcggcggcgggtaggcatgcaacgcaactatctgcggcattttgtatgcattcctcgcacaatgaactattgagagtcctccaacacatagcaacagcaaaaaaagacacttcaccagctttcttatacactgctccaaacccattattctccattgttaccctcaccaaattcccaatttgtttccttcctatctccgtgtattcctctctcagatcaagtccatcactacatctctatatataaaaaaaatcaaaagaacataataaaaaaaaagagagagaagattttcataataattaatgaattaattaattacccttaaatcatcaggctcaactgtgtgattaaagaagttataattctcagctctaataaagcaaccattataaaaaatacgacccccagaagaaggaaagcaaccagacaagatatccttaatctcattaaaacacatgctgcattccttgttgttgagatcacccatgcattgagagaagacgaacacacgattaggtgggtctcccatttccccaaacgaataacctttaagagacataccttctgccaatctattcaatatcagatcgtagttttgagcataaacagtattgttatccacacgatcctctctgcacacacgtgtcaccaactctaatagaggctctgcttttgataatactaccattacatttacataccaaaccattacaagaaacaacatcaataatggcctcctaaccaaccctgccatacaagacccgattctgattatggacgatatttaacagagatactctgcggttttctttctcttcatttttatttttattgaaaagaaaagaaaaataaagaatttgctttgtctgttggtatagtttctttgcctactctgttttattggttatatttggattggtttatgtgtatggtgttaaaaagataagcttctgttatttattgttattagtattactattattaaccattcatttttagaaaaattaaaataagataattgttagtaatgttaactatgaaagttactaataccaaaaattaaaaactaaatatatattaatattactaagcacgaataactaactaatttacataattcaaattctattgtccaccattaataacggcgattctcacttcttagctttcttcgccggtgacttcttaacgctctttggcttcttcacagggacggctttctttgtcttagccaccggcttggctgcctttgacggcgtctttctagtcgatgatcgggctccggctttgacaggcttaggtttcgcagcggcttttggttttgcgacaaccttggctttaacagctgcttttggcttggcagcggctttggcctttggcttggtcgcagctgctttagacttcggcttagcggcctttgatttaggagcggcgggcttcttagccggtgcagaaactttctgagaagcggatttggccgatggaagcttgaaggagcccttgacctttacgagcttttcagcggcaacaagctttttcaggtttgagagaaccaaccttttgaaactatcaggcaattgtttgtgtttctcctcgatgaatttcgtgatagcgtgttggcttgaaccagttctttcctttagagacacaattgcttccgaaatcatctgaacaaacaagaataaacattttagatctaaaacaacaaaaattcgaaccgtttcaaaggcgactaatacgaatagaatacctgagcaaatggaggatgagaagcggtcgatttggctttcttcgccgttacagctttcttaggcttcgaggctttagttgccttctccggcaccgacgcgacgacatcaacaacagcttcggaagtcatgattgattcaactcagcgagtcaactcggaaactcagagagatgttttttgtaaaggaagagttaaaggagcgtgatttatatataataaaaaggtgagctgtgattggttgaaattaatgtgacacggttcagctatataccgtgagtttaaatgtgggcctttggatcttttgcttatcgacggtccataagggtatcttgtgggaaggtgcggataacggttggaagtaatgtttgagatggggatgatcttttggggtgtgtttttaacttgatttctaatcggtataatatgagattgtgtttaaatttttttattgggtttggatatgttttagattaggacgtaagctttctattgaatggttttttgggaaatttggttgaggggactgggaggaatttgatgtcaatggtagggtgatctaaactagggtttgatgtgagtttattgagtgttttgtttattttaagataatcatttgggggaaaacctcccattctcaatactttct

SEQ ID NO: 190636 - DNA, 1830 bp, Cannabis indica
atcaaaagctttactcatatcaattttgagggcaacataacctttgctacctctattcctatgtttcaaactatgaaccaattcaaaggcaacaagaacattatcaatgatcaatctgtttaggagaaaagtactttgagtttcagaaatgaccgttggaagaacctctttaaagcgattgaccaacatcttagagataagcttatagatgacatgcattgcactaattggatgaaagtctttcattgtctttggtttttttacttttggaatcaatgtgattaaagtcttattaaaagctgctggactaataccattgttcaaaacattcaaagcaactttagtgactaagtcacctacaatttcccaattatgatgataaaacatagctgacattctatctatacccggacttttatcaaatcccatcgtccttaatgctgataataaatctgaggcagtaaattctttgagtaaaaaatcattttgctcacctataattgttgcaggtattgtagataagacatgaggcaaagccaaatgatcttcttcagaagccaagaacagattttcaaaataagatgagaccattgttgttattccatcctttgaagtgattacatatttcaaatatcatcgcggatagccttgattttgttgttaaagtttcaagctgaagcgctagcatggaaaaatttggtgttacaatcctctgactgcaattactgcactctccgacattgttgccaatattgttcttccttagctaaaagttcatccaatattgattcagccaattggatatgatcggattagaatttgtgtttcaaagagttaactctttgttgtgctactctttgaatatatagattctttatacacatatatagataaattgatacattaattttttagggcccatttggcacaactttttgaaaaagttgtgataaaaatgtgtttggtaaacagtcaaaaaatagctttttgaaaaatttttggagaagctatagctaaaagctaaagctgctccaacccaacttttagaaaaagctgttttgattaaaagactataatattttttttgtactaaaatcatatttacttatttattatatattaaaaaaataaatatttaaaataaattaattatataaaataaataattattaaatctctttttttttaagcaaaaataatttttattttatttaatattgataaacgacatcaacttaaaatttttcttatatacatgagtttctaatttttatagatttaataaaacataatataacaatactataaattatttttatcaaatgcatataaatttatatttgtaaaaaagataaaaattatagaaaataaaatattatataaaataattttttttacatatttgtgattataataaactagattataatattatcattatcattataatagatcttaacagattcacagtaattcaaaatttataatttatcaaacactcagttcagcttttttccacaattctgctgcagctgctctttcccacagcacagctacaattgctttttcccacaagcacaattgtgctaaactggcccttaattgtactgaaaataaaataatattttaaataactggacttttatttaatattgaaaaaatcaaatatggttccctactagagtagtttgaccatattatgtgtattttccttttatatttatttttattaaatttaaataaatttgaacgaaaaaaaagggtaactaaataaatacctatatatataatagaaagttaatcttaaggttgtatttttttttttttttt

SEQ ID NO: 190637 - DNA, 6081 bp, Cannabis indica
agtggtgattcgtgacgaggggggttcgattctggctctggctgcggagaagattggcttcatctctcctatccacggtgagcttcaggcagccatttcgggtcttcagattctgagaaagcttaatgcgactaaagccgatctcctctccgactcccaagtcttgatctctgctatttgctctgcttcttcgcctcattggagtatcaaccgctctttccttaatttgcttatgttgattgcttctttggatgttgatgttttttgggtaccaagagagtctaacaaggctgcccattttcttgctaaatggggtcttgatcatgactgctctgggcttgtgaacttttgggaggtgagtccccatgtactcaccaacatcattttgtgtgataaataaatgttcatgttttcagtagcaaaaaaaaaactcaactgatatttatacggatgtaaaaaaaacgacaatcttatctggagaaagagacaaggcaaaacgacgataatattccacgtcgagggaacacaagttgccacgtttcaaagctatatattactccttttttctcttctctttagacaaaatatattactttcactttggtaaagcaagatctactttttttttttaatttatttatttgtagtgtgtataagttgattaataatcactctgaagttggaaaaatggcgctcaactactttgtgtgaaatccctctctctctctctacttgttttcgttttcatcagattccaccaaagttgctcaatttacactatcacattctctgaatctctctttctctctctgtgtttgtgaagtttctttctctgaaaccggaggtgtggccatggtgaggccgactagggatgcaatcgagacctacatgtccctcaccggagcgtcggagtcactcgcgcttcagaaactcgaggttcaatctcgtctcaccttccattttccagtgcaagttcttaattgttttgattttagagccagttttcagatcaacatttgctgcttatggctttgttcatgttcattgtgcgagatggtgaagttgtctccttattttgactagtagttttttttttttttttttcagatcaattcttgcttgctggtttaaatcgttcgttactagtggcatttttattaatttcgttgtctttggtaaattttgagcaccaaaacatgtaaaagagtgtatagaactgagtagctagaccgaaaagagaagagattaatactaatatattataatataaatgcaatgatattgttgttcacttccttgaccccttacattagccttcccaacctttagaatttgcattataagtgttgtacaggttctgctactgagataaagttggtgtgctttcgtttgcttaattgtgttacgcttctttgatcagcttgagtttggtaactcacgttttgatatttgaacaggaacatggaggaaatctgaatgaagctgtggaggcacactttaacgatggaattacagacatgaatgacggtggaactttgcaacaaaacacatacatgtatgtatgacaatggcgctttgcttttgatgtgtgtgtatatgttttcctggtatttggagagatgatataatgagaatgtcgttggtccttttcaaacttattttgattttttgatttgtggtccagaacgaatcctttaccagctgccttcccacaacaaaattatactgataggaataatgagcctcaagttagaggtggattttttccatttctctctgctgctagaagcttcaggccttctttattacttgatcctaattacagaagggatctttgtaatcgtattggtgctggtggatttactagtcgtgagccactagttacacagccagcgccagtgccagtgccagtgccagtgcctttcactagtattcctggggacttctatagtaggcatgatcagattcagcattcaggactcagtcctaaccttggcaatgatcatatgccaacagaatataacacctcacaagtggacaaccatgtggaggatgaaatgcttgaagctgcaattcaggcatcaaagcaagaatttgaagtgagtatctggattagaaattatactcccattctatactatcttccctgtcctaactttatttttcttgttcttgtgctgaaacaatgtttttttttattcaattttgtaagaaaaattcctctgcggatgaggacattgcgcgagccctctcattgtctttggaggtttgtagttcttatattcagtagtttagattatattatttttgttcttgttttcttctaaaattaggaatttagacagctgagcaagagcaagcagtgcgtgaggtgcaaattaaagattacgatcaagagcttggaactcatagatggaaggtgtgatattcttgcttatggtgcatttgaaaaaggaaaaaaaaaaagaatcttattttattgctgcttagacatacttgtttacaagaaaaatggtctgatgcattaacacaaatttggcatttctactttgatttgtacaagcaactcattgttttaaaatacaggcatacttctacacataaattaggtttttgaaaaaggaggagagtagggttgggggctgggtggttggtcatgtaggttaagttatgttcaattcaaatcctattttctagaggggaaggagcttctgcactgtaacaaaattaaagctcctgatttcccccataaagataaagatatgtttgttataatgaaaaggtatttgtcttacaggcaggaagctcatcaaaccaaaatttagctaagaatgcagaagaagagcaactaattaggagaaaatctaacagcagtgctagtaatcttcctccgcacagtgatggtgcttttcactttggagaggtaatattgtttgctgacaacattttgaaatgatacacataaaaaagaaattgatctgactgttttctggaaatgaagtggggtgacatttcttccaaagagattgatgaagcactaatgcttgagagtgcgatttatggtggaatttctgaaggggcttcaaaacagtcattggatgcacctcaagttcaaagtcatccagaaagaaatgtgattcccaatcttcctgtacacagccctatatcaccttctctctcagcaagccgattacttaaagagcaacaggttttagctgcctgctcttttttttatttgtattgcaatactattgaccgttgggaatgaattaaatatttctttggcatggcaggacatggaatatcatgcatcattgttacttgacaaagagaaagaagaagaatcccataagaaaattcacagtgaagtggtatcttttggtttttgttcaaaatttattccagtgtttgatgagaaatcgtttgtgcacctgattattatgtattttttttgaagtagttatgtttccctcacgttttatgtgttttaagaggttaaaccaattattgctcaacactagaatttttgcccaagtttctgatcaattgttttgcaatttcgataatgaggttcctaactttatatttctcctatagtattttggttcacaggtgttataaggtttgttcatagttgattgtttagttgaaataacatatgagcaaaagagcgtgaatggtactgaaatcctgagcataaatgacacatgggaggagatatcttaactcaagattttgtgtgcatttggtcaaaattgctgaatattttgctttcaccttgattaagtggtgttgaatccccacatgagtactacagcggtgaacaagtgacatagaaaataccttaccttagaaatgtcatgtactgaatcaaaataaagaatgtcctataagtactttacatggtatttgattttactaatatgctttaatgtactgatcagaattgttttccaatataacttgacatctgaaagttgtctcataaaattactatgttgaacattgattgttactgctccctcaaagttcggtgtgattttaggttgagatattcttatgaagtgtatgttctattctatgatgttgaatttgcaacccaacccaatctattctattttattatttctcaataaaatgctaaaaaaaaatatatatatatatttattcgtgtcttatgttacaggaacatgagagaaatttagctactaagaaagcttctcttccgtctgaaccagcattagaagatgagaatgcagtgactcttcttgttcgaatgccaaatggaagtcgcctcggtcgacgttttctcaagtccaacaagcttcaggtaaaggtcagaaatatgttttaggtttaatttcattctcttatcgcccaactaactggaaatttgtattatttttagcttctatttgacttcatagacattgatggggaaatgaagcctggaacatacagagtggtaagttttcttctcttatcagcagctgtcatattaaggtgaactttcaccagttctcatgtgctatgataaactcatgcattatatggataatctatttattttcttctcctttttcgacgaataggtaaggtcatacccaaggcgtgctttcaatgtagataacagctcactaactttgagtgaagtaggcctgacaaacaaacaagaagctttgtttctggagttggtttagccccatacaacttcttctataaagacttctgcctgagcatgttgttctacagaaatttgtaggctaatacaacacttaaaaattgacatggttggtcttttaaaacctcaatataatttcccaaaagattgtctgtttgatttaatggttatgtatatattgttcggttcatgttaaatggaacatcatcatcataccttgtcttgaaatattttaaaaccaggtaaccattatttcttcatttgttttttcttcttatccatcctttacctctcaagtcttacactgttagaaacgagagggttggagggagaaggatcaagggagagataaaattccttgtttggaaagagagagggaaaggaaaggagagatggagggagagttttttcctccaattcttcaaaattcaatgtctctattggtgctctattagtgtaaaaattcaagaaaatgacaatatcaacaataatttctctctatccttccaactttatctccaataccaaacaacacaaaagagaagtgttgaaaagttatactctctatccctcttaagttcttcaagcatcgttgtctccattctttccaccaaacttatcttttaatagaaacttttatacagattggtatagacataactttcaagataggactttagaaccaatagtttaatttgtgtgatgggtggtctcggaactagcactagttggtattttttttgttttttttttttttttttttttgacaaagtgattaaaatcactcgtgaatttacgacgcccacgtccgccaccggcgctggaacctcctcgaaccaggatagctcatcgtctaaccgcagagcatgctttgccaaccatgggccgctaaaatcttagagcaagccccatgggacaaaactgcccccggaaatttagacaataaagctataacatcttcaaacaacgctcctaactcaataaaatactgaagttccacctgaaaaaaacaaaaaacagcataaaactttaattagaaaactattcaaactgaagagaatcaaccaaccaccaagactaagcaactagatctccctaaaaaatactagaactagccaaagggattaccctttggctagtaacaactaaattatagcattctacttcataaccttcataggatccctattccttacttttacccttttaaaatcaaacataaataaaattttccttttaatacccattattccttaaatattcaaaatattatatactaattatttcattttatctcttaaaaatattacttatttatagactaaaacatgtcaaaatccttaataagtcaaattatttattattttatttatagcgtaaaacatggtatctataatctt

SEQ ID NO: 190638 - DNA, 2380 bp, Cannabis indica
aaaagtgtttcattaattaataaatctggtatttatacaaggatacagaacaattgaccaatataactaacataacagaaaactgttactaactaacttagtaacagactaactaaataatagcctataacagattctagcttaagagtttggagtctgttccaacagttgctaccaaatttagtagcggaagttcaaactttcattcaaaaaaaaaatatataaaaaatgttaaaatatattattagtggtacgatactccttgaaaaattaagtatggggttcatttaatttgagaaaattacttttaatgaaaattataaccaattataagagggcatattactcaatatcaaaatataaatttgtcatccactcttctagataaatacaaaacttaggagactttccttttaatttgttcactttatcgttcgtagctattatcctttcaagtaaggaatctcttcatctgtattttttattttctctttttctttttcaattcctattattattattcataacaagtttcaatcgtatgatcacttaatccgccgtcgaatttgctttacatattttttttctgtgttgccgagaaattcaatatagaacgatacacaaatgtattttttttttttttcaatttttttgttgaaaggtttttcttttttgttcagatggttgtttgtcatgttgacctaagtgacttattttactaaatttgaacggccgaggaaacccagtactagcttggtgattgtgtgttgaatgatttgtttttttttttttgcttaacacccccaaataattttgattccattgttttctgaattcacctgcgtacctttttaacaaacaaatttggatttaagtgttggggactttattgatgctatgaagggtgtgataaggtctaaaatatgtatcttttccctaaaatttatacaatatttcttatcgtacacaggtaggtgatctgatctgattgtgtattgatgggtggaagtgccattgatgatgactgggagcttacctccctttccaatgtggttcgtactgttgtgttagtaggaagaacagggaatggaaaaagtgcaacgggtaatagtattcttggaaaaaaggcgttcaagtcgagggcgagttcctctggtgtaacaagcacttgtgagttgcagagaactgtgttgagggatggccaagttattaatgtcattgacactcctggtatattaagattttaagacttttcaaaagttttggtaggcattgtattgtttagtctaagaactttattgtttttctgttgtagggctttttgatttttcagctgaatctgactttgttggcaaggaaattgtgaaatgtataaacatggctaaggatgggatccatgctgtgcttgtggttttctctgttaggacccgcttttcacaagaagagcaagctgctcttcgtagtttgcaaactttgtttggtaccaaaattattgattacatgattgttgttttcactggtggagacgaacttgaagaaaatgatgaaactctagaagattacttaggtcgtgaatgtcccgagcccttaaaggtcagctggagataatattgttgtgtcttggttgtttggtttggccttgtttacttcttccttttactctatgtttgcatgtcaaatggaaaatctaacatgttttgttcttttaaaatatctatatgatataggacatcctcagtctgtgtgaaaatcgcctggtgctttttgataataagactaaggatgaaagaaagagggttggtcaagttcatcagcttctctcccttgtaaacaatgtcatagcacagaatggtggacaaccatacacagatgagatatttactgaagtaaaggtattatcattgttgtgaacaaagcatatttgttaattatttcattaaaatttcctgatgcaactgtataaaattgacagcaaggggctatgaaacttcgtgatcagcaagaagaggttaactccttaaaggggtattctaaacgagaaatatctgacttgaaggagcagatgcatttagcatatgaagagcagcttaagcgaattactgagatggtatattatttcctagctatttctccacttcacctgcattattgggtgtttggatgtcttggtatttatgtttcttttcaacaagtctttattctttaaatgtggacaggcagtgccgcttcactattatttaattgtaccatttaagactaccttgctcctaaaatcgtagaatggtacgggtacggcataccagtttagaccaaacataatttgttataacttgatacaaagaaattagtggtgcgggttgttaggccctaggattagtat

SEQ ID NO: 190639 - DNA, 1793 bp, Cannabis indica
aagaatctgacaaagccacataaccacatcttgtaccaacaaccactgactttgtcaccaccaccactatcatcattatacaatactctcctctccccttactcctctcatcattttttctccctgcaaaagagatttggtgttgactcttcatccacaactaaggcccaatgcccataatattcctactcctactactctattcaacatttctctaataatattacaaatccaataatatatattctttcttttctactgattactgttgcagggtactactccttcttagcagtatagtagtaccttatatattctccgtaataatgtaacgcagaccaattttaaaagagtcatatttatgcacacactagttggatgttgaaaatcaatatgacacttgcagagatatatcactcgtgataaataaatagtactactaccactactgctacaaagacacataacaaaacattgaaggtcccactagaatgatataatgaaggagttggattgattagagggacccatgaaaacctaacttggttttaaataatcatcctctttaggatccacactctcagggatgagatttcttttgtaaatgtttcatgcccaagatattcaaattattatcattattattattattatacggtaagtacaaagtatatacaaagctatatatatatataatgtatgtattattggatcaaacttgacttgggcatgtgatgtatagatgacttttttggatcccaattacctgtcaattgcataatttgtatagattgactactctcaatattctttatttttaatttagttttaggaatactatctttaaatattattaatcatgttattataatagctatataattaaattatttattagagaaattcttagtacacgtgactttgataggctttttatgggttaattaatgactttgcagtaccatcatctaagcatgctgagttatatttggtaattgtttattaatttccacacccaatcacactatcttcttccttaagctagacataaatgtgcacttgttctttctcacttaatttattgggaaaaatattagagctatttttcgtattcaattccattactttccttacccctcaaggtgatcatcatcatcattagatctaagagatcacaaggctattacctcttaatttctcatatgaaataataaggggatggataagagggaatcttgacttagcccacattgaatgagccatatgtgtatactagtaaacataaccgcgccttgcgcggttttgtaataaaataaatataatttcaaaatttttattgtgtaaaagttatcggtgatatcatttttattttgttaaatgttaattttattaggttctttgttttacaaaataaatattgatgacactttgagattgattttggtcaaatatttttaattatggtcctaaaactttctttcttagcctctctagctaactattgtgatccaaattttcatgtgaatatatttatactgtataccattttataaaatatattggactaagttgtcattcagtagtggtcataggcatagaggaattcaagtttgaattcttctctctcaatgtgagaaaaattaaatttatcatttcacactaattcttctctctcaatgtgagaaaaattaaatttatcatttcacactatagaagggcatccacttttattagaatttaaaaagtgcatattaatttatttcaaaaaaaaaaaaaaaaaaaaaaaacgtact

SEQ ID NO: 190640 - DNA, 1894 bp, Cannabis indica
taactgacgccatatgtgtttttttagtaaaattaaaaaatcatctatgaagtcggctattacaaaataaccgactccgtaggatttttcattaagattgaaaaaattattacctacggagtcagttattacaacataaccgactccgtaggtgttgttattaaaattttattaatttgctggaaaaaaaaaactaaaggcttattttgtagtagtggctggtgaaaggaagtcgttaaatcacctattaaaagccatgatgcattttgaatagtgtctccaaggcgatttaaaagttgccatgtgttagagcaattattatgatgcgaagctccataaaagccagtgaaagtgaaatgataatagttaggaaactggatataacaatgaaaatggcttatattatatgaaagtagagttacattaccatcctgagtccattacaaaagcaggtattgaggccgacccgagggacttcaaggccattggcaaaactcagcttagacggaaacttatttatagcaccaacagggagtgggaatgtgatagttttgacagtgtgtaaagtgataggaagttacggcccagaagttgctgaggtgctagctcttagacaagtagttgctcagtgttgcacgcttggattaatcaagatcgatttttaaatggattgtcagagcattgttcataagattaatgaccaagttctgcttgattcatctttggtctcacttttcaagatataattcatagttgtaatggtttctaagattatattttttttttgctataattgccctatcctatagcatgtggtagttcatttttttaagctaaatatgctctatttgctattattagcacaatttggtggctttactattctatttgtatcaagtactttatttttgctgagtctattattaaatgatacgtctaattcgcggtcttatttgaggttattgctattttggtgatgttttctaagtctattcttctaaaattgttagatatagttagtgtttggtaggactgttagtgctagttttgtgttttggtttttgctaactgttatgagttactacttgtaactaattctttctctgtataaataccattctcgagtttgttctttcttataattaatgaagcacgtcatcaagttcttttgtttgaaatttgctttgttgcacctcaattatactttatttcatttttatcacaggaagaaactcttttttttcttcttgaaaaatcgtactttgttttggcattaatggaatcttctaatgaaaagaaagaaaaaaaaaaaatgtgagatgcataaaatattatctctgagtctagatttcctatatcctatctatataacactattggttacaagtctaagtaagtaatgagtaaatcatacggttggataaataaatagtcaaattatgtttatcaatataataattgctcatctattctatgctatgactaataatattttctttttcatctctttctcagcatcatccatgacgcgtgggagaattttaattaggttttatatcacactttttctttttttagaaatgttaaagcgcattagtggtgcttagcgctctcctatgtgtcaatatccaactaagtatcggattccatataatttaatataataatttttagggaatattactagtcaatcgcaacgcgacatgtcgagaaggcgttaagcacaactaatatttaataacaatgctctttttcattttacattacaatcaattattttctacgtctaattaaaattaattaatatatagtaccgctacatttattatttatgacagatgttaaacatttcctttgctttgctttgtattactcataaataataataaaaaaa

SEQ ID NO: 190641 - DNA, 6403 bp, Cannabis indica
ataactcaacctgaggcacgactatacagatcaagacatcgttggaccgctctagccgaagatctagaagcacaccaaaataccacactgttttacattgtgttttgaaccaaaatcataaatttatattatattttttttttggtaaatactattttagattatatgttctgtaaaagttagtgattggacttatattttgtaaaataacaaattagactatatttttcaaaatggtacaaaatagtatcatgaactgattttttgtcaaaataaaagttaataataattaaatttagagttgttatgacgaaatttggtagattttatgcatcttttcatgctataaattgtctttaagttagttgtattaaaaacaaattattaaaaattgagccaaaaaaaatactattttgtattactttataaaatatagagtctaatttatcttacaaaacagaaagtttaattgataatttttacaaaataaatacttgaattaactcttctttttaatcctttgtttatttattttttttaaaaataatttgcgtataaatatctaagtttaagttataatactaaaatgggctattaaacattaaataaattgtcatgtgaaaattttatttttttttttttttttgacgcggtgatcaaaattacacatgattaacattgcagcaatccacaaacggcggcaacatcaaatcgggctattaagtattaaataaatgggataattacactatatactaaaatttttaatttttttacttttatattgtgggcagattttttttcaaaaatactgtgtaagttttatactgagtactgtgttaagttttcacttttgttttattgttattttttaattgttccattgttgtttttagttgttctgttttgtgttttactgttttttttataaaaacacagtatttttgaaaaaattccataacagtctttttgtaaaaattaactcaaatttcagtatatattttttttttatatattttcctaaataaattgtagaatttttaattagtatatactatttttttttaaatattaatttaaatatagcaataaaaaattacctaaataatgagtttttactttttttttgaagaaagagtttttacttggagtttcaaaaatatatctcactcaaaaataaaaaatagaagaaaatttcttttcccaggtcattgcgattttcattctcttctcacttcccgcctctcagtctctacctcctcctcctttcattcctctccttcaggccgcctccatcgccgtcgacaccatcgcagcaggctttgcagcttccgaaattcagtaagtgatgtttcatatttcaggtcatatattgttcacaattcattacgctgattcctctgcaactctagaatttttttcataaataattattagttaggggtaatggatgtttattttgtaagtatgaacaagctttaattccttttcgagtcaattattgcagaactctgctgattgaaattttcaatttccggaattcggactgagaaatcagctatggcgggtaaatttaattactttcaattctcgccaattcgttcgggatcgattaggttttgttattttctttctctattctaagagttgtttttgtcttttgaataatttgcaaaggttccgaaagagaagataaggtctcattggagcttaccgaggaaattcttcaaagcatggaagttggcatggctttcaaagattacgtacttttctctctcttttcttgtatttatatatcacgttgtttcattctcttgctaggttttcttttgagtgaggtcaattatgtggctctagatttttcaaattctaagtttaatgttaatgttgatcttatggcagagtggtagaatcagttcaatagactttcacaaaacatccacttatctagttactgcaagtgatgatgagtccatacgcttgtatgatgtagcaagtgcaacgtaagcctcttattttcttgctcccaattcatgaacattcttacttgaactagatgctgtacttgctcctttgttgctgtttttgtgtttatttttcatttttcttaagttcagtaactcttgctctattgttcatttagaaattgatacgaattttggggtttgttttgccctttttattttgggttttaagtagtttgaatctctttagttctatccttgtagttcttatttattttgccttactgaattatgagagtcctctatggccagttgcttgaagacaattaacagcaaaaagtatggagttgatcttgtttgctttacatctcaccctacaacagtcatttactcttcaaaaaatggttgggatggtatgatatctcaacataaagttctgtttgcaattataaaactagtttgagatattgatgagaattcttgattcagaatccttgaggcttctatcattacatgacaataagtacttgcggtattttaaaggtcatcatgacaggtacgatttctcaaacgcataaaatgaatttcgtactgaaatatctacattggatgctgaatatggatgttcttgcattcatttccagggttgtatctcttagcttgtgtgctcgcaaggaatgctttatctcaggctctcttgatcgaactgttttgctttgggatcaacgagctgaaaagtgccaggtttggatagcagaagatagatgctctttccatgttatagctattcggaacttattttcttgtctgttatccatgtcagggtcttttacgtgtgcaaggaaggcctgctacagcgtacgatgaccaagggctagttttctcaattgcctttggtggatacatacgaatgttcgatgctcgcatgtatgaaaaggttggtttagtcatattagtctgtttgaatgtataacagttcacaagtattgtttttgttttgttggaactaagcaatgactattgcattcttttagggtccttttgacattttttctgttggaggagatgtttctgatgctaatgttataaagttcagtaatgatggaagactaatgcttttgacaacaatggatggacacattcatgtacttgattcttttcgtggtacacttgtaagttgcatacttcccactcaaatgcactgagaagcttacataaataattcataatttgctcatatgtaacatgctgtctgctgatttgtgtgtggtttgtcttttctttatacttcttttttcatttggctaaagtctttttctttccgattgtgtttcagttatcaacatacaatgtaaagccagttttcaaaaaattccacattagaagcttcattcagtcccgaagggatgtttgttatatctggttggcactctctctctctcattattagtttttagctaataatacataactactaattgtgctcactaaattcatgtcatactccgtaccacaaaaagttccaatagaccattttttgtagttagaacaagatgtgtgttggagaaatgtacctcaggatcctttacaaaaactctatccgtgttctctttttctggacttactagataaaaaatttgcaggttccggtgatggtagtgtctatgcttggagcgtcagaagtgggaaggaagtaagtttaaattatcttaatcttgcatctgtttgtatatatactttttattatattttcctgtttggttcctaacaatatgactgatgtatttcactatcttgaagttgtttgttgcctggtaagtattagtagtactccagttggaaaatcattaccattacacttgtctttgatatggtgtatatcaaatttaaagaaaatagttcgactgaaaaagcaagtaaatgtcattaatgattttgttcacagagcttgctaacatatgaattagcaatatccaattcaattttaatttcaagtaattatggcttcctatcaacttctagacgataatagtatagttttaactctgcatgcacacccctgtttacactttaacacttgtgtccaggtcgcaagttggatgagtgctgaaaatgagccccctgtcatcaaatgggctcctggaaatcttatgtttgtgactggatcttctgaactatcattctgggttccagatttatcgaaactcggagcatacgttggaaggaagtagagaaactctgtctcgaatctcgaccccaaatacttaactactcagctgtcaacaagaatctttcctatattggtgcaagttgaggttatcgccacacttacctgtttcttacttgcctccgtaaatttgttcccttgtcggaaaattatagcaccagagaaaatcagatgtgtaattgtattgagaaagaagcaagttttgtagatgcttacacctaaaacagttaaaaagaatgaatcaaaatccctagaaatgtagattgtacagttttctctaacaaatatctattttgaagcttttttcacaagttcttagttgtatcatgagcaagaacaatattcttaatctgtatgaatactttgaaaatgtattaatcatattttatttgcttcaacttggcttttgggtgccaatttcataagtccatacatagttaattatgttcagcagtttctatttatgacaagggttcatctcataacaagacaatatgagagaagtcaagtcaagtcaagcctgtcttcttgaggtgagtattttcaaaaagatttctactttttgtgattgcttctgtaaaattcttaaattattccatggttagaaaacttaatatgtactttcataaaatctatgctgtagatcaaatcaaataatgacaatccattccattccatccaaatggccctatagaaactttgattatctttggtgtggagcctgcttgcctgcctgccatggacatttaaggtacatatattataacaaaaacaagtcttgaaattgtacgcatgttaataatgtctttgcacatatggcaatgatgtagtacactagtacttgcgtgaaaaaactctctgctctgatagaaaaaaattaatagataggaaagttggcaaaagagagaaaacaaacaaacttacttttggggaagagaagcttttgagaaaaactttttaacatgaaatagggctcaacaaatcttgatggagtgtcatgccttgtgttttataaaagatcttcttggatcttctactaaatctctcttctcaatcaataaaatataatagaagctttgtctattgtttcctttataagctcacttttttctttctttcaccctcttttagggtcattcccaaacaaaataaagttatgaaatttttgtcaaacccattctaagggagagcatccattaaaatcttgttgatggggaccttcttaaatacaaagctactataaggctaaagaaaacaatcaagtatatctttaatgtctattctttttttttgtcataaattgatttgtaacaaaccttttatctgcaccattcaaatgtatgtatgtacaaacaaaacatgccaaaccaatcagacttgttctgtctcttatgtgataatatttccgtgtgcttgaagctttagtcgattgaccaatagttactttgctatatttttatttatatatattatggtttactaagtttgtttaatagtgtattgagtgttgttttacacgttggttttgaagtgagtggttttacacggcacgtgcgaagtatattaactcagtctcagtttcattaattgtctgttcaatttttggtcagtgcatgatgagtttgaagtttggacaaaaataattttgacccatacttgcccaaaattggacaaattagcttcatctaatatttgaagtttataaatggaagactctttataaatagattattattatgccataatttttaatccccgtatttttgcaaaccattattgcaaaatacatataattaaaaaaagaaaaaaaaaataagactagtgcactgtgcacatctctatgttgaaaaaatataaaaaatattgtgagattgttccttccttttactctctctggacaggaaaagttattaattaattatattctgtataggaccaaaaggaaaagaaaaatagttttgtggtatttacgaagtgggtgggttcaaacttcaaaatatatacccttctcttctctatctaactttacaaaaacggctgggtattattacctttctcactttcatcagtattttctctgtattttcttttctttatacctttggtatcattggcaaatcttttggattatgtacacaagaaactacacataatggcacctagagttactctaacctcaccttttgttgctctctctctctctctacaaata

SEQ ID NO: 190642 - DNA, 2648 bp, Cannabis indica
aaaaaaaaaagaaatataataagcaaataataatacagaatatctgattggttgatcattgtagctgagaatttcaaacaaattaaattgataatctcagttttacctgtgtacttccatttcctcctcctttatagtcagaaccctttgttccattaccagctagagtacgcactgtctcattaacaaaatcaatctccctacattaacaggctctaaataattacaagtcattacagaagataataaccagacaacaataatttaaggtactccaaaactgtagtgaggataacattaccttaaagcatgattttcagtatctgctacataaagtaaatttttctttggattgtacgcaaggccctagaaatcacataactccagggttagcgtatttatgtctaatttgaaacatgaaactcaaatattaatgatcaaaaataacaaagtacttgtgtattcatgcaagcattcatgagcaaaaatgatactcacaaccaagttctcattattgttttcagttcaagaggtaagcaaaaatgtatatatctttctagcctaacttcgatatgcatggactgggtaaatgctgtttttggtgtaattaaatttctattagaaaaaaaaaaactttgatatgcatgggctagctatgctggaagttcatttttcagtctaagggccatgattatacttgaagctcctcacctgcggccgattgaagacagcatcatcaaaggtaccatcacgtaaaccttcctcccctgtgcttccaatttggacaataaaatttcccctgaggtcagtcacaacctgaaattcaaagaccccaagaagaataattcagtatcttgataggaggaaccaaatttatatatatatgtacacacacacataaaacagagagagtgagaaagagtactatgcggttgtggttactatcagagatgaagagcctattgttgaggacatctattgccagcttccccggaaacttcaatggagatgtaagcaaacgaggatcgttatctttttctaaactcaatggtaaaggagtgctgtttaagattttctttccatcgtagtactgaagagctgcctccacgatatcgtcaagatccttcaagaagtttcttgtttattgtacaatatggtttttaaagacaattcatgcattgataatcagatacaattaaaaaatctgtacctttcgacgaccttcacctgatagttgtgcaatgagcttaccatctgggccaacgacagcgaacgttggccatgaactcacacctagttcacgccatagccgcatctctccatcattcacaacctaaattattcagcaaaaagtaggaaaatgaaaacaattcagttgaatgtcaacatgtagttaagctaaaaataggattgtccgtcagccttgtataaagtgaataggttgatagaaattttcaaagttcactgatcttaggaatttggggtagtattattaacagatgtgagtgtcaaacactaagatattctacagccaacaacagtgacatctgtgtagatagcagtcggaaagaattgtggcggcactacatgcagagtgagtagaaagtatttttcaaattcttgggaaaaaataaaaacaaaaagatgaaaacgaaaagaagaatgaaacaaagatgaaagttcagaaacactgatagaaatcaaatagcgacatatttgttttaaccagtactatctaatattgaaagttgaagcttactggatgattaatgccataacgtaacactgcattgcgaatggcttctaaatctttctcattatcaaactttgctgagtggactcccacaactgtgaactgcataacaaaggatgctttacaaattacacactaaatgtccaaatgaataggtaattctcttccacgagtcataaaatcacacaaatttatgattttgtttacttaattaggagcaaattggttaaaccaagactcaacttgttgagaaatttatattttccaacaactgaacgcatctaaaacacaaaataataattaccggcatatctttgtatttgttctctaaaaattccagatctggtagcacatgtatacaatttatgcaacaataagtccagaagtcaagcacaaccacttttcctttcaactcctgccaaaataaaaataaaaattatactctgtaccatatatcctgtttcaccaaatctaaatgttcaagtcagctagaatttacctggctaaacttcaggggagctgtattcaaccagtccagtcttggtggaaattctggcaccataggagcagttccacttccacagtgaaggattgtttactcagaacaggttacacatatataaatctcaagagtaattactgaacttgaacagaaaagaaacctaaccaaaaactagaaaatatgcaaatcagaagaggttaggatgagaatttattacctggtttctaagtcagctatatatttcacaagttgttggattcttttagttcttgattttcctacaaccaacaaaagaaaaattgaaaaaactgtagttccaaaataaggacatgttcattatccaagagaagattacacatggaaataccccacaaaaaaaaaggaaaaaagaaa

SEQ ID NO: 190643 - DNA, 610 bp, Cannabis indica
aatatatatgtgtttatatatatgtacataataaaagagtgatgaaatgtgggagagagagttgcccagatgactaaacggacaatcaaacaaacacctaatatgctttcaacatttcaaatttaatgatgagataaaactaaacagagacaaacaaacaaacaaacatctaatatacattattttgactatcaaatcatttaaatcacacatatatatatataaatagatacacaatatgggaattgcccagatgagaaaaaccatagaaaattgagtttacctgttcttttacggggaaacttaggtaataatggtgtgttttgagaatgatgagcttctccaactccaaccatggcgtctcaacctgagattaattatatcatacaatcacacacaactcaacagatatatagatatatgatatgagtcatcatcatcatcatcatacgacaaagaattaatttctattaattataatgattggaaggatacaaaagagaacatacgtgtaatctgaagtatattctagaaaaagctataaactttctctctctttatgtctttatctcagtgtctctgtaatgagtaatgatatgattgtttattc

SEQ ID NO: 190644 - DNA, 2363 bp, Cannabis indica
gcggcttttgtttcctagttttatcataattcttatatccttttaggtatctaagaaagtgtagaagcttatgcaataaaattattattattgaataattttatgtaacttattatcaggcataatcagtgtaagagtgatgttagttattgggagagattaaggaacttcatgaagaaaacttgtaagaaaggcttcatataataattgaggtacattaattcattaactatattactatgatatgttttcagtttgttaaaattaatatttcaactcttaatatatagtttattattgttaaaatgattattattttatcttgtgtttcaggtacactattcttatcataaacacaataaaagactatttgtcacatttgttcccaaaagatttgagattctattatcattattattattattagtgactcaacaacaaagaaataaaccatggtgaggttttgtgaaataattttcagtttttttttttaaaaaaaagaaaatcaaaaactcatataatacatagcatatagatacattagatttttcttttttgacacctataggctaggctatattaatatgtgaccagtttgaaagccttgatcttgtaaaagaaaataactctcttttctttggatttaaccgataaaaaattattattatttattacttaattaatatgcttcaacactttgaatttgcaaatgaaacaagctaaattcaaaatagtgattattattcttatttcatctacaaattttagtttcttaagtacaatttttacaaacaaaaaaacaaatgaatgagaattttgcctttttcttttcctttctaaaaatcatattattagttgagcttgtcatatataagaaaaatgtacaaagtactcttaaatatgaggaagtaaataatcttataaacaaaatcaaacaacacaagattaatcaatcattctcaatgtagataattaagaaaaatcattaataagttcttacaatacaaactaggccaatgccactctcagaaaaaaaaaaaaaaatataaaaccctaaaccctaaattctaaaacagaattaaagtgacacacatgatataaaaaccctcacatttttgtaactcagtgctacaataacttctccaaagcacaacaacacaataaatccttccataaatatatctataatatttcttaccactatgcacattcttaagatgtgttggagcatatagtttcatccataatgatagtagttcttactattgaattttttcgcaatatcagtatggagagaatatcatacaatacttgccgaccgaatttctccaagaataccaatgatattcactaaagataaacagattatggtgtattgtattattacgtttacaagctcgtatctacactctattgtaaacgacttgaaattcataagggtaaatagaaacccttcaactatcatcacgattttaaacatttcagcacattgagattcagacttcttcaatcttttaacttcatcatcctctagtttcattgagtctttaatctatcataataaattagtaacatgaaagttagaaaaaacataaatataaaaataataaaatgatataattatataaatatatatgtatttattaatttatatgaaaaagttacgtcaaaactactattttcaaaaatcacaaaaatttataataaagataataactaattgatagtcttattaagaaaatacacaacaaatttttatccaataccacttattatatatatgtatattacctctttaccatcaataaacaattggtattgatgatgatgatatagaatgatcaagatttgtttgacgtgttgttgtggtgcattgtatgatgacgttcataagaccgaatctacatacaatgcgccacaacatcacgtcaaacaaattttgaccatcttgaagattgaagatttttgcgaattgaatttcacactcctttgttctatcaacttcattctcttctagtttcattaacttattgatctatcacaataaaataaaaatacaagagttagaataatacatttttcaaaatattaaaaataacagagtaatcatataaaaaaaaaaagaaaagaaaactacctgttcaccatccattattgtagctgttgtttctgttatagttatcattagatgagagtgtttgagagctttgaagatatggtgatgaagcagaagaagaatattgatgtatgttagagaagagatgtggaaaattatatgtgcgtttatgtatatatatacaactccacagtactacagatccagtttcttggtttcacatccatttgcttattcattaattggt

SEQ ID NO: 190645 - DNA, 5615 bp, Cannabis indica
taatatgttgttacagaaaaattaaaaaatcatggacaagtatttgttcatccacattctcctgtactgggaacagagcttgaaagctagtgggcaacaccattcatagattacgcaatagcactgaaataaccaccaccaacatcagctaataaaaaattaatatctaataaaatagactgaaaaataaaaattgagtgagggttatcaatccaaccaatagtcacattaaaatcactattaataatggagatactgaatctaaattgatgcgcaagagtcaacccagtctaattgcaagcacctttttcacattaacagaaaaattgcctaacacagcatatgatcaaaccagccaaaccacacccgtagtatcctgtatcactccacctagcctgacaaagccccttttaggaaccattgaagaaatagttaaaagagcaaaggactcaggaggttgtggcatcgatcgagtagctcgctggccaacttggtctagaatgcacagtctttgctgaagattctgttgaacatgctctttgaattccgataagtgattatgggttaaatctcgaacaatatctaatcttgacatcatattaccaaataacagtgagttacgatcatactaaagccaccataaagtaacaatcattaattcaaaagcctcctagggtaacattttaaatagaataaggagacttatcagcattgatccatggacacaccgggggaggaccgaccatacccccaatcggtgctatattggaatcaagccaaagtaggaaaataagcatgttccagagttttagattcctcttcacactgtgaacaacaaagagctacctgaacctttcggtagataagttgtgcagctactggcaacgtgaaaaaacttttacctttagtggcatggcaagattccatatgcccttccaccaacaaaccagttggctaagtctgatactccttcatcaattaaaaaatttcttaattaacttataaacttaatttaataaatactctcaatatggaattccatctttaaatttacaactggattacaaaatatttcactacaaaagttgtctcctagcgactatcaaaataaagccagctgtcatgaagatcgaacactttatgtctaactgtctccatatttacaatatttaataggtctaactcactgatattcaacctttgccttgcccttaactacgcatgtaaacaatatctgtgatttaacaaacttagtaagaaaagcataatcataacataataaaagctagattattactaggccatacacctaattataaccctattctgcgtctctgcatactaagtctagaacgtttgtaccacagtactattgaccataatgtctacctacactcgatcctctactcgtatcgatgtgacagcgtcaatcagtactacgccaaacatatatttgtcggtagcagtatgttaactagcagacattgataaatatgcacactgaatatgtaataagatatgatattcctatactaacttgccttgatttcttagtggaaactgctgctcgacgatttacaagcccctaagtctcaatatttgaaaaactgataaatgatacagtaaataacttagaagtttccctatcgatagatatcgtggcaatacccttagtataaataaaatacaaaaaactagggttcaaaactgctaaaactggtaaattggattccttatacggtaaattgattctgggggtcttttttgggaaaacatataaaatcaattaatgggttctctacaaaaaccctaaaacttcactacatgctcaaaactagcccaaatcgtaccaaactcttcataccacctaattaagccgtaacaaacatattccaagcaataaaaacaattacaagccccctaaaacaaaatttaccattaaagagcaaagtttgaggacaaaagctcaaacactatctaagctcagcaacaaacatcaaatctagcttagaaccactcgaccaatcataaaaaaacttcaaaaagaaaatataaactcaaccaaaacatacaacagctaaatctctaacttgcatgcaaccctaacctaaaagcttgaaaattcaaagagaaaagaggataagaagctcaccttggtttaagctatcacaaatcctattttccctttgctgcaacaccttggatgactcagaattgaaaaggatttttttttgctttgtgagggttaacccctaggaaacagaggaaaagagataatggatttgtctaattttttatttatttatttccctaagtgtgaattgaaagataataggtaattttttttctttcaaatattcatcatatacaattaaaactgaaaaggattaatacaaatccatcaactttcctaaaagacaagattaaggtaaagaagacctatttgtcctttttttctctaagtaaacccataacctagtgctaatatggtccaaaaccataaccccaaaaaaactgtgacattccaaatatctaactatattgctctattatttctaaggtaccaaaccatatttaagtgactatacaggccatatgtcgcatttcattgttacgagacataaaatatgaaatttataaaatttcacatgtatcatgattaatacacctagaattcaaatatatctctatagtaatgaaaataataatttaaaagtctatttctaaaattaaactctagttatttactaattctcatattaaaggaagcgatcattacatgaattaacaacttctgtaccacgctggatttgctcatttatcaggttagcaatttaaaaaatttctataaaatatcgctccacttcaccaataatctctttctcaacacaaattttggccaattttcattataatctcagtaatgacatttttcttcttcctcgccaatgctttgctacgaaagtattttgtatttctatcactagccatcatccgagccgatcttgatctctgttcccaatataattcctctttattcataaggtcctccaatttaaattctaaacctttcacctcatccattcgaacattgggagcattaatattcaaaagtttatctatctccttttgagttttcacaacttactttgataaagacccaaatcattgcttattccaagccaaaagatggtttgcacaatattcaagagagacacgaagtcccaaagggtctgtcacatctaacctacaactttggcacgcctcaaacataatggattaacattcatcttctttaagccaatgaggttcaaatcagaattgccattaaacttgctgacagccccatatgacaacattctcaagtttagtagctataggaaaatgatcagagcaaagaaaattaccatgtcacactcgaactgatgaaaacaactcaaacaaggcttgattgcacacaacttgatctaactattcttggacacgagcaatcccatgtctcttatttacccaagtgaacatcgagcctttgtaccccaaatcatctagcaagtagtcatcaagaaatttctaaaacaaactcatagccataacatttcggtccctaccctccttcttcttatgcatagataagatctcttgaagtgcccccacagatacacggtaacgtaaagaactgcttaagacgccaaagaagtaaccatgaatctttccggaggtgagtttttgcattaccataaaaacatatgaatttccacaaggaaatccctagacattgcacaagagtatcaatatgtcccctagtgtagcttttcacaggaacatcccaatcatcattccacattaataagagtccaccactactcccatacgatccacatgaaagctattagcgaaatttctttgtcatcggatacatgcccaaataccacaaagcttagtctcaagcaggaagaccaaagttggggaaggcttacgaataatagtccacaacccatttattgcacttgagttccccagacccgggcattttagcataagatactcatcgggcctagcgagtctgctccgcggactgcgccaataagacatcaaccaccataggtgatataaatggtgtaatattcaatttcactcttctctcttccatcgtaataataacatcattctccctcataacaccattaggaggatatgtaccatcaattgaatgtgtagacatctgactcattttctttgtactaactggcgaactactagccccatatttatcaagggagattgtacacctcttccaagtcttctttggtgtgctttgataataggctcaaatgtacgttgaaataatttaaccatctcagcctctaaatatgtaatagcctttcttttatcacactttttaattctagcaggcatttggaactcaacacaatgagatacctgtttaggagggcaagagtgatgcacctccaaaaatggggagatggcgtcacatgaaccctcccccaaattactagtggaatgcagctgaacatcatgtagtggagtatccattacattattgtggcattccatagggagtgctgagaacacctcattagcattaagtgaaataggtgttagcggtgaggttgcaaccctcacgtttggattgaaaggagctccccaattacatcatcactttccaaagtagccaacgtatagttacgtagctcatcttctcattctcaactttttaagatggatgttgtagcaaactcttccactgtacttcttcttgatcgggatcgcttaacaacatcaactattctttccagctctctcatattgataatatttgactcaccctcacgtagaccaacacgccgaccctgtgtcctaggtcgagaacttggagcacacatccacgatccatagagtccactttgaagtggccttatttcatcatcctaaaagtcattaagagggcagtccaaagctttatggcctataataccacaatcataatagaattttgggaggtgtatatattgaaagagcaaagatacctcattacccttctcatcaatagccactcttaagcaacatttgagtgggctagtaatattgatgcagacacggatcttcataattctattagccactctcacatcctcaactttccctatcatacttccctattcccgagcaaagacctctgacatacacacaagcgacacattattaattgaaatccaagaagaaacattgtaaaaaaccatctttgaaatttctcttaatcccatcagtttcacaaagcacagtaattgtttctcaatcatccatggtccacctccataaacatgttgtcgatcctctctacttccaaaaaagaatcaaaagatactcatcacactcaattcctctacctgaaaatggtgcttaatcttccagaaactcttcatagcattctaacctcctactttattagctggcttaggaccaatgaccttccccaccaaaaaaatctccaatctctttctactttcttcaaggctatctttattcaatttgacaacgggatcatctgtttcgtctaatcttagaacctctgtcagtttagtcaccaattctaa

SEQ ID NO: 190646 - DNA, 1954 bp, Cannabis indica
agcttaaccaaataaaatataaaataaaaaaatggtttttttttttggagtttatatttatctacaaatattaaaaaaaattgcacttatttaaaatatattattttttatattaaaaaaataggaaaggataaaaaaaattaagcaaaactaagtataaattaaacatatgcttttttttaatataaaataaaattattaaaccatatgttttttatacaaatttatacggagcaaatttaaaaataaggtttggataattaccagcgggagaaaggttgtagaggacatgtgtgaatttcaaggaactgtcactaacgcttatggtgggtgtgaaaaagtggtgttgtgacacgtgtgacaccttcggagtctcagacttcttggccggatctcctctcaccacatttggtccagtttctcttgccgacgacgccaaagatgcactgttacaatattattcataaataacaaagttggatcacgacgaccatatcaacaaaactttactccaaaataatttcccagaaaaaaaaaaaatacaattatcctcacaatttccaagaaaaatattatcgaagaaaaactttatatgatgacgtgtcaaacaagtgatcaaacggtgggtcccactttgagagggcagagataaaatatactttaaatcagaaaatccctattttccatcggattctcggaacatagccaaagcactgtcgtttagcgtatggcacacactccaaaacataaactatatctggtgggtcccacgttttttcatgcttacgtcacaaaatactggagtttaaatccaactcatcacaggagtggagtcttttttttttgtccattttaagtaacctttcatttcatatttaaattttttattattaattaataaccaatatatatatatatatatacctgattgattggagctgctgcttctggcggtcctcgtcggagagaagcggtggtgcgaacgcgccctgagcacccttaatgggagtggttggagcagacctcttctgctgcagcgaatggagttcgtcgatggtttgggccttcaccgttggcgcactgtcatcatggcatatttcgctatgtttcttctgcgtctgaattttcgacagtccgttccgtgctgtccctttcccggtcccgaagctgaactcgccgttagcgttaccgttagaagccatatctgttcatgatcacgagaataaataaaaatatcaaacattaacacaataaaatatcatatgatcaaaataaggacaccatgcaaaacacgatcagtaatatcaatattagaaaaaggagagacgtgccttagttcggtagctgggaaaatggatagagaaagaaataataagtacaagagaaaaggctaatgagaaatgagataggaatgaagagagtattgagaaaccatcaaaatgcaagtaatggattttctcttgagagaggtaaaagtaaatgagtggggatgatggagctacgaaacaaggcgagggactccttataaagggttcaggttcatcgatctagttgggtttcttaactagggtttggatctaaccatggttaaaccctatccctggtcaagacccagatgagagaaattccaaaacccattaaacgagatgcggtagcctgatatagactaggaatccgctggtcctcacctccaccatagctggctgctcctgcacctctcaatcaagtactttgtcacacaataataaatgcataaataaattttggtcaatacctttttatttattaattatattcgtaagaatttacatagctcgtgagaattcaatattctttgagtttggcatattgatttagaaagagtttctataatatagaacaagttttgaggataccctactaattattaaaatctatgtattcttatgttgcattttatgtttcaatttttttt

SEQ ID NO: 190647 - DNA, 1260 bp, Cannabis indica
cattataaaagatatatattatgtgatatattaggcaacacaattacaaaatagctagttattaaaaaaaatatacatttatccgattactaaaatttattttcaatagctagtaaaagaatttcgtaagtttgattaagcattagaaaatgtacactttggtattctaatattataatttggcatattcaatcattattgatgagtgtcaaattggtcaccaactatagcatacatattacaagttttattaactgtggtgatgaaaaatttaaggtcttgttatacaactcgaaactaatactacaatttcacaacggtattaataggaatacacacgagtttgaagaattagtataaattgatttattgttcctgttcccattttaattttaattatgatccttgcctattttatgagaagggagagaggaggaatctttttcattggacaaatactcatgtgaactggtttttaaaaataagttttgagttaaaaatagtaattacataatgttaaaatattgtaaatatttataatttcatatattaaataatcccaaataaaatttgaaatctttaaaagactcctaccttaagccgttcaacatttagaacaaaaaataattctcctccccactttaccaatccctcaaaatgttcatggctaacaacaactattggccttctctaaccatggtttgattagatgtgacctatagatcaacaatatttgatgacgctttaacgatgaaaggttgcatctcacgaaaaaagctaaaacgaaatgattactgatggtagtgaactagggtagtggggtgccttctcagcagcgatcttggatacaatctctctgaaaaaaataagtggtaaaagtactatctgttggggaagagaaagggtggttactatgtatcaactatttattcatgaaaaagaagagaagtggtcaagtatcaatatcatcctaaatataattaaaccaattattgactagaaagaattatcataaattgttcaatgcgcctcatattcacatgtaagaaagtggacacaatgactgactagaccccaacttgaagataggctttaccatctattttagagttgggtccttcaatgagcccactttccagttaatgtctcaattcaatgaaactatcgtcaatgcgcctaataactacaatgaatgcatttgcacctttgttttgaacttttattctcattcaattatgcagttctctttctctaaatatc

SEQ ID NO: 190648 - DNA, 993 bp, Cannabis indica
atataataagttaatatcttctatgcatggaatatatatttacaaacttgattatttgtgactatgtatatattaaggaatgatatataattaataatctaataatgaaatattaatattgttaattatttgcgttaatatcggcagtattactagctatagtactataagtactactgatcttacgtactattaagtagtactcataaatgtcccatgcatatattaaaaatttcccaatattttataatgctataaattaatttaatatcgtaccataaatattaacttatatatatatatataagattgccacgacaattaatagcttaatttaatagatcataatattttgattaattaatataaataggtgagatcatacatgattatgataaatataagataaagcgtattgataaacaaaaggacagaaggatattacaataataaatttatctcatatgatacattatacataatatacatacatatatatatatatagcatgcacatacaattctaccaagttagcttttgtataatttagtcaatattatatattccataaatattatagcaacgacatgataagaaagaaaagaagaaaaattattactcatttcaccaaatatattattgtcacacgttaatatattacgtactataggtacttataatacgtatatatacttctcacacatacatatatatttcatatataaaatacatatatatatatttacagtttttgttttctcttttattaggtcatcatctctcttgttatttattactagaccaccctagagtataactttagttttggcttcattattattgttaattaatttctccttagacaaactttcacacctaaaggctttgccatttcacacgaaagtttcaacacttcagaaagatccaccgggttaagaaccgacccgatccacttgaattcatggagcagtgtacccacccaaaaagtcactg

SEQ ID NO: 190649 - DNA, 1857 bp, Cannabis indica
attgataaaaaaaagaaaaaaaactgtgtaatctaagggagtacttgcttgtctaaagttaagaacaagcaccaacaccaccattcaaaacaaaaacaacaaacgactctcttttactttctctgtttccaactctttctctctctctctcttgctcgaaggatttgggtgggaagaaaaccctagatagctccagagcagaggcaatggaagacagcagcgacagcaccactaccaatgtggcccgagccatagcagtagccctcgactggagttccactccggacgctcgcaaagccgccgtctcttaccttgattccgtactttctctctaacctttaaccctatttattacttcaatgtaaaaactccattggtgtactaactttttgctatctagtacgtttatgaactttctgattcttcaattcgtggtaaattgatgaagtttgatggttttttttggttagtattgtaatttttgttggttaattgagtttgttagatggaatttgaatggaaatttcagtgactatggcgatttgatatgtacatttgtatatcatcattatttattattttaaggttactgcttaaatagtacgcgttggatatgttaagtgtttaatcgagctctaggatagtaggatatgggaatgaatgtttggtttgtcattggcctataaaagttgtacactaatttattacgtcgcacaaaaagttattataagtagcaaaatttgaattctcattttcttttggcttatggtttagatcatataagtatgaatgtcaatgaatagaattccgtagagtaattattgtgactataatatgtacttataaaaatactcactaatgaacttttagtgtagttgaagacattgtgtaccgttgagcttagatcaaatttcaacgttttattgagtttttaccctcatgttgcttgagatataattagtggctaggcttgtggtgtctctgatgctgcttttagtgctgtgaatgtattctcagtggtcttgttgaactgtaagattatggtatcacggcttacaaactggttttaataggcagttcgacttggctgtgtctagtttgtattggccttcttaccttgttatttattattattattattattatttatttatttatttattttttttcttgcagattaaagtaggagatgtacgagttttggccaacacatcacttcgtttagtaaaaaaggacttttcttcagaaattcggttgcatgcatttaaaatgttgcaggtatgtgttcagatggaaagaaaaggaaagtcttcagttaccaggataaatgtaccaaaagggaaagaaagaatttttgaaggaataaagaaaaaactaattaaataatgtagaattatttatatgccaatttgctggtaaagccgccaaagtattttatctaattgcatgaatgtgagatttttcatattgcagcatttagtcaggctaaggtgggcagaattaagctcaacagagcatagaaactttgctaatgttgctgttgagttgatgtctgatatggcaaacccctgtgaggaatgggctctaaaaagtcaaacagcagcccttgttgctgaggttatgtcatgctcttaacttttgttaatttaattacaataatacttcccttgtagctcattcatgttttctgtgttacagatagttagaagggaagtagacctatggccagaattgtttccttctttggtttctatatccaacaagggacctattgaggtaattactttttcttacttacaaccttttttaactttaagcatgtatgagaatgagatggttatatttttttttcttttt

SEQ ID NO: 190650 - DNA, 1359 bp, Cannabis indica
acatatctcttatttcgattaccagcacaactgactacaattggtaaaaatagcttaaatggctaccagtaacattgacaaaattattaccaagtgttcttacctacattgtggaacttcaggtccaataaactctatgtgtacatccaaaccaggaaaaagtggatgcaactctgcaaagacatcaagttgtagaagttctttctctggacctgcagtgtttaatcataagatttcagtaaattcatgagattatcaccatgtcaagaagtatatttactagaatttagtaaatttgataggcaagtaagagatcaaaccataccaagatagtgtatctgcaacttttgattggtgtctgaaattcggtttcccataacggtttggattgcgtggtagattgtaagaggctgaaatttttacaataaggaaaagaaaagattatattagaattacaactggttttacagtgtctgagatgatttgtttaagactgtaaattctaagatggagtcttatgaggaatatggaactttgtgtgaattatttagagtaaaacattgctctagggagatatcgaactatctcgaaaagtttagaaatttgtaattcttactttgatatcaataaaatgcctattctctaatttttttcaagaactaaaactggatcaatagtgtagtatagtgcactgatttaagaaactaatatggaacaaaacaacatgtgcaataaaaagtcaatgtcttcaaaaaaccaagaagcttagaagcagggccgactctagcttttatgagcaacggccttgaccgccctaccctaaagacgaccctgcttagaagtaaactatgagctattgcatgaagattaagatgaaagaaaagaaggcttatttacataagcacaaacaagtcatgcttacccaaaatgtcaatgtcttactttatatcaataaaatgcctattatctaattctttcaagaactaaaattggatcaatagtgcactgatttaagatacaaatatggaacaaaaccgagaagcttcgaaaactaaacaagtcatacttacccaatgaagaagcaaagcaacaggtgaatctaatgggatgcacctccattcatagtactctttccaatcactaaaatgttttgatggtggagaagaaacagtctctgcattttcgaattatacagatattcaagttttacccgaaacaaggagaacagacgacgcaaaagatagtaccgttacatggacacatggtatctggaagatcccaactattatccatcaaactgccaatttggtaaaaacttatgagaagtggataaccaagttagtgttaataaactgtttt

SEQ ID NO: 190651 - DNA, 3728 bp, Cannabis indica
gatttcattctctgggtgtggctccttggagtagtagtgtttgaaagaacactaataccacgtacaattctcttgtgtcaagtgatttaattttctgcaattatttttatattctgccagttctgttttgtctctgtaaaattggtttctgcagtatcataattactttttgctgctgcagacgcgtatatatttttatatacagtatatttttgtattaattattggcatttgcaaaactaggtttttcaaatcctttaaagattgcagcaatatgatctcaatcagaaagaacttctcctactgatgcaagaaaatcaacatgttgcttgactttgaaaagatactcattaagagaggaggttcttttttaaagattctgtaatttggtgtgaaactcaagtatatcttagatgaaacttgaagggtaaagtatttttccagggcactccagatttgtcgagcagtggaacacccaaccattcttgtaagaaagctctcagtcatggaagaaagaagccatgacaagcagctaatcttgtacctcccattccacaaagccagggttctaaacagaggcagctcgatcagcatcgctcaagaactgaggtggtggagcaatgtgttggatgaactttattacattcaattcccacgaatggctgcttgaacaaactgcttctatagaagaaaattatgatcattaagtttgatcgacaatgtatggttgaaatagatcggactattgtcgatcttacgagatcgatttcttcctgaaacttgagaaaattctggtggagctattggactggggtttccttggttgttgttgctagaggaggataatgcactgataccatattaaagctatgattgtttctcaccactgttgcagagaacacaagagcagagaaagaagaaagaagaagaataaaggaaagaaatagagtaaaacaaaaataagaatctcttcaattgattatgaagcaatgcacattatatacacaactcgaaagagcaaacaaccaaaacagaaactatagcaaactcctaaccaaatgtatacaatcaaagactaacacaatgacatttagaaactaactgtcttaacacacccctcaaattttgaatatattgattctgtcaataattttatgtttttatctttgaattggttgaatcttgagctcgtgattgcctttgtaagaccatcaattatttgagcataatgtacaaataatattttttatatcaatacttctattcatttatcactttttcaattaaaaagtataatgaattagtttagtctaataaaactattcgtatataaaagttttacactattattgatatatagatacaatttattatctctcaaaaaatgaatgatgatattaatatttctttaagatatatagggaagatcatatcatctcaacactattttggggaacttcaactaaatttaggcacaacatgaagcttcgtctcagttcaagccgagatgacaacctcaagatgtctctttgaccttatgtggggtattcctcaccttgtgcatcatctcgacccaaggagtgatgtgacacacatcatctcagcccaaggggaaagtcaacaaatatcacttcagcacaacatgtcatctcgaccctgtggggtgctcctcaccacactatcatctcagcttcagtttgcactaccaggacatcacctcggcccaagccaagatgacaacaccaagtcatcatcttggctgaagccgagatgacaacccaatatgctacttcgattcaaagagggaagagatcaagaccccatcatctcgactatcatcttcttcctgtagacatcatcatctcgatcctatcatggatcccctcaccaagcactaggccaagatgcacactactagtgcatcatcttagccctagtcgagatggtccacacctttgcacgtgcttcttacggcttaccaacattatgattcagcgtgtgttcctcgtgaccaaaataaggtagcacgtgtggattaaaaatatcttcaacaattattatttttccagatatttattttgaaatataatttttgttatcatttatgttttaaacctaacccaaccatagttgatataggaaggtgcttcttaggttaagagatattaaaccctaagagagtcctagatgaaaacctatataattaaggcgatatcaattgtaaagaggaacaactcattctcaccaattctcactagctctctcattttaaaaattcacttgatgactaaactcttgaaaaatataactctatagagaatgggtgaaccactataaaattctcgtattcgtctttgataaatttcttttcgataaatctatttatattgattgacaaatacttgtattcatcttacttgtttacgatgtttaaattcattaatgaaaaatcgcctcaacacaattaatatatatcaaatttttgttgagcaagcaaggagacagctcactatattttcatacaatatacaagacaaagtatatacataacttgataatactcgcgcatgtaataataataatgactatagcttatgatctagtacccacaatcgtaaatagtaattttcaaacgtacaaagacacacacacacgcatgcatgtaattataattacactattacataattataaacttataattattaatgtttcttggaattcaaacgagtacaaactcttgcttccttaaacaatttcccaggcctgcagaggtagcctttggtaggagcacaatgagcatcctcactacacctacacaacccttccaaagcacaaccctccttcactatactcaacccacccttaactcccaaaacttggtcactccactcacttgagaacaaccccaaaggatcataaatctttttaacattcaaaaacttctcaccatttttcttatactttttcaaagctccttcaaaagctacattcctattcttcccccaatggggcaaggctccgtacttgatcacagcaatttgttcaatctcttcaagtatgtcttcgtaaagtctaggagccaacggatctttgcttcgataataagtgatatcaaagtctactgcgtcctcttgtttacccaaataagcagttgaggaggtgacatagcgcatgagaatcccattgtaaagttctacaccacacaaggcctttggttccaacttgactagtgcttgaatatcttgaatgaaggccttgactgaggacaaggctacactgaatgtggtttggtgaaagaattcgcccttaattctgtgatcccatgcgcatgctgtgatttttgcgtcgttgttactgtctaaacatgttccagatgcttgaagacggtgatgatatccaatcactgggtagcctttaaaaataacacctatatatatatatttaaaaaccacaaataaaaataattataatattatgttgtaagttaattttactgctacctctcacaactcctatctaatttttctatacaataattcatcattatatttacactccaaacacttatacatgtaagcactctaatattaattttaattttatgttaaataaataatttgtttttatattgttatttgcatatatttttatataatttttattctaataaaattatatatattacaattcaaatttaggaaatattactccatatactatttttt

SEQ ID NO: 190652 - DNA, 1610 bp, Cannabis indica
tttttttttgtgtgtgtgtgtctcgcaaaagggcctaattttatagttaaatttgcattgtggcctactctcaaaactatttagttaaatgacatttttttaataaacttttgttattatcctttataccctcaaatgaaattaaataaaataaactctaattgtatcatcttcttcttatttacttaaacaaagtaactctcgtcctcacccagacccacacagggaacttcctcctttcggctacttatgacgataatcatcaacgatgaacgatcaccaacctgccatcagccactaccaacccgcccacacatgcatattatacccatttaaaagaaaatttatatgtttattgagattttcgaaaactaaatattaagagcctcaaaagtttataaaacaataaataatgaatagatgattttcacgtgattcgggtgttaactattcctagtccacgagtcagttgtattggcttcacatgcaagtgtttgattaatacaatatatgtctacagtaaaaccctagctttgtattcctaatatttatcttaaagaagaaaaaagcttataggaattttagtagagcatcgagtagagcaaatgtgcttaacccctttttcctaaaaatttggggtatttataggcacttatgtgggtaagggcattccctttacccacctagggttttgtactaaagcatgttgtaagggcaagtactacaacatgaagatctgaccgtctgttggtaataaacctccccatcgtgtggtgcatgactgcagtgaaggattccacgtagacgaggacatgtgtcactcaaaagtttcatcttgaaaagttattgcctagacaagtcgtcagacaaaaaagggagcttcaaaggcacataagtacactaccatggtctgacgtaggggataggatctgattctgtgtcagagggtggataaccatcgcttcgggttccaaatatgatgtttgtgaatgaactcgaggatcaacgagccaaggccttccccgttcacactagtccattacctttttgaaatacttgaagcagcgaaaggatagtaagactcctgaatctctatccttactctccaacactaagaacatttgatcggcttccaaaatataatagtctctttcgcatctttaagtggtaattatgtactaatcatggaatgtccagagtagcaccctttcgtgattgccacgtattaggcatccgagaacacggataacatttacccctaagctcttaggactctcgagtggtgggagcttacaacctcccctcggatgcttgagttattactatgatacgcaagaaacatcttgaaatgcggatgtagtcttccatgttataggacaactgaagggttaacatttctcgttgtacaactgttattttgttgaatcgtggtgtccattctgcgggtctgtagggcttacgcgccaagcttaggtgcgtttattgtggaaagtgaatggcggcaggatttgaaaagatggctggtttatggcgcattaagtttgttgccatgaaacgataagtaatgaatgcctcattctctctcctaaggtgcattaaatgcaaactct

SEQ ID NO: 190653 - DNA, 3546 bp, Cannabis indica
caattttcgggcttttgattgattagcattttgcttacaattttggcttttaaagatttttacagatccatctacattcctttaattatgtatatccaattgtttccactaattatagtgagatgaatatggcaccagtgtgtaggcattgtttgctttcaaggcacccatctcaatgttcatggcttgattctagactttagctttcaaggcctcttcaatgcttctagattcctcttcaactggattctatagagcttacccaacatagactttcagtttgaaaatgttaacacttggctcgagttatcatcggataagactgcacaggagtaggttcttgttcttattgaacatcctaaagttgtgactctagagctgtatcttcaatgtcatcattgccaaaattagtgtgttcagtacctgaaattatgcgttcacttacctcttgcaaaggggattcaggtgctgctccatgagatacttctacatcaatagaatttgtatagtattcggtagtattttgaatgtggagatttggtaattgagaccactgtgaggtttgaacaacaacctacttttctagagtataactatttagaaaaccttgtttaaaagagaattctctttcattgaaaatgacatttattgtgatataaacccttccaattgaacttaggtatttgtaccctttatggtaatcactatagcctaagttaacacatttaagtgaataagactggaatttatgtgattggtaaggtccgacacatggaaaataggctaacccaaacactttaagaaacaaataatatgattccttactgaatagtgtcttataaggtgatttaaagctaaaaaataggtgtaggtagtctatttataagaaaaatagtcgtttgaaaagcatctacccaaaattttaaacgtatactagcttgagctaacagtgttaaacccatttcaaatatatgcctatattttctttcagatcttccattttgagttgaatggtgaggacatgagtgttgaaaatcactcccatgttctatgacaagattagataaagcttggtattctccacctccatctaatctcatgcacttaattgactctttgaattacttttcaacaaaggttttgaattggacaaaggcttttagagcatctgatttgtgtttgagtggatagatccacatgtacctgctaaaatcatcaagaaaatagatatagtactggtaattagtgttagacattactgaggctggaccccagaggtctatatgaatgatttcaagtacttttgaggttctacttgatgacaatttaaaaggcaaagtatgattttccatattgacaagcatcttacaaataaataactctttcattaataggtgtttttacattatgggaagctaggacatggtttaattctttgattgaaggatgtcctagtcttctatgccaaacattatgtagggaataaaatgttcatcattagcagattgagctacagattttatttgcaaaacagaaacaccagtaagtctttgaggctgatttaagttacttgtcacatgaggaaaattgagatcttactttgatagaggtagattgagctgatacattccttccttaagcatcctttggagcaacactttccttgttgctttgtccttcacaaaacaaacatttgagtgaaattcaacaaatacattattatcgactgttaatcttgacacactaattaaatttttgacaatttttggaacatgtgacaaataatttagctcaagaaaattattattttctgtttgtaacaaattagaatcaatgtgagaaataccaatgtgatttccatcacctatatatggtaagtttttcttaccaccataatctgatttttttattcaaatttgatgcagcaaagatgacatggttgcttgctccactatcagaataccacatgtcactatccacaacttctgttgtggctatgaaagttgcatgacttctagattgctagtttttctaaagaccaagatcttgtcccatgtaagcttcattgtatctgttctagcagtaggcagcactatgaccatacttgccacagacttggaaagttggtttagaattgttggatcttcctcttcctgatgttcctccacctctgttattattgtttgaagaagaacctccccatttattgggataatggttgtaatgtcccctgccccgatttggacattgtgggttccctcccatgttagttgctgcaagatttgtagtaggatttaaagctgaagtaaaagcaattttatttccccctttgttgtttcattctacaatatgaagcctagaaagcttgttgtcaaaattgagcaacatatcttgcatttcctgccatgtaatattaggtttagcttctatttgaacaataattgctaaatatttagtatccaaaccagatgtgacattagagatcaagagagcttctaaatatgggtgtccagctaaagcaagtttattcgatcacatcttcttctgctttagatatttagtcatgggagtggtaccttttcgagtggtttgaatcagggttctggtctcatccatcttttctcgtgagtgtgctccaaataggtttttaaggctctccaaagtgcagtagaggtaccatatcccattactttagttgctacagattcaatcatggagctatagatccaccccattagaagttgatcactaactatccattgttcataatcaaggttcataatgactccaaatccaagttgtccatttgttgcagttgttgcaggaatttactcatcagggtagattctagttccattaatgaaactatctagccagtgaccatagatgattgtggccaccatggttttccatagtatgtagttattcttatctagtttaagagaaaagggttggttaagagtgttgaaggattgggtgaaatttggagtgaaggtggcaaagctgttaataacagctactcctgtaccattggagttttgtgttgcaaggtttgagttggcacaattttggttgacctgaggtgaaggaggagtctgaaaattgtcagtggacatggcagcaacatatagtctctgataccaagtgaagaaaataaagaaattgacaattgtatttcttagctcaaattaagactgagtaagggattttattatataaccaaatggtaaataaaaagacttctaaaatattgccaagtggtattacaaaaagaattaagacagtattctctctagtagaatggcacaaaaagcattagcatgtaatcccatttgtaaccctattccaacaacttgggaagacaattatcgactatgatgtagagaacagatacagtgcagcaacactaattagtgaaggttctcaacatatagagtatacccttgaatatgcactataatctcttgctaatatgcacttacataataatgtgacacaacttttttaaatagttgcaaataccttttttttttttagaataataat

SEQ ID NO: 190654 - DNA, 1609 bp, Cannabis indica
gccgttggaaacctctatttcgactcgtatgttttatcagaatcaagtctgttcgtttaccctgataagatcatcatcaagacttgtgggaccactcagctgctcaaatccgtccgtccattgattcatcacgctcgccacctgggcttatctctgtcgtccgttcggtatacccgcggtaactatatcttccctgagtcacagccttttccccatacgagtttcaaggatgaggttgtatatctcgaagattctctcccaaacagtcttcgcttcaggaaagcctctgttatgccttcgaaagtttcaactcattcatggcacgttttcacagcaagtaccgagatcgatctaggcgacgtcttcacgatcgagatctgcatgaccgacctcgataaggtctctgccggaaagtttttccggcgaccgagtgatggaaagaacggtgattccgccgggaaggagatgacggaagctactgccatcggaaacatcaatccttccgcattaatctgtgattacgctttcgatccttgcggttactccatgaatggaatcgacggtgatcgttactcaaccatccacgtcacgcctgaggacggctacagctacgccagcttcgagacagtcggttcccgccacggtggagacgacatcgctagggttttgaagaaagtagctcagattttccgaccagcgaccatgtcggtttcgacgacttcagcaggtagagatgtttgggggcgagtcgcctcagctctcgaaccactcgggttgaaacgcaggagttgcgccgcggatgagtttccatctgccggaaccgtcgtgtaccagactttcacgactcgccgaaagtagaccgttacggcggagatgttgaccgttgagtcagtggtggtggtggtagataatcgaaatttaaaagacaagaaaaaggagggagatgaaagaatacttagtagagtgatcagtcagtttagagaaaccaaaagaaaaaattaggtcgggtgatgagtgacaagtggaaatttgttttacacgtggcgaaatggtattggttaatgagggatttgacttgtgtaggtggatatataaatataaaaaaatggtgatgacgtggtagcattttgaaaaatatatattatatatgttaaaaagaagaaccaaaaaaaaaaaaagagaagaatatgataatgtggcctgtgttgttggtactgggtatcaccatgataatgcaccccacttaggcttgtcacgcctaagattttggaggttgtgtagtgagggggggggttaaaagtgctctgccctcttcttcaacttaaatatcaaaaaaagaaaaaaaaaacttactgtattcttttctattcttttttttttcttcattaattccttcttttttttttcctacttcctctcctcttattgtctcctaatgtttttgttctctagttaaattattattattactaatatcaatatcaatattaaggacaattcacttcaaacacttgaatttcttcgtctccattgtttttttctttggttattatactatatatgtaccatattgtattaatgaatgagtagttaagtagacttaatataa

SEQ ID NO: 190655 - DNA, 2968 bp, Cannabis indica
aaagaaacatatattattatagttgacaggtaatactgatagtgatacaactcattgtcgtataccaatgaatgcgcgggaagagtaaagcagttttgacgcgacatccccgcgtgccacgtggcttcattccaaccgacacggcttcttcatccttcgctcctacgtcttctgaaacttgttcatcataaatacttggctaaaccccaaaccttttcagttctcattgctctccttcactcgattttccacttattcctcatcgttcaaagccagtgatgtctgcttctaaatcttccgacaacgccaaatctctctacccagaagtcattctcacaaacccagaagctgcttctgctaatttgtccaaccccacttcttcttcgtctttgtacccttccattgacatgatagaccttgctgagaatctcttccccgaagacgaagccaccgcttcgcagaacccaattccccaatcttcagaagaagtactgatcaagattccaggcgccattgttcacctcatcgagaaggagaacagcgttgagctcgcttgcggcgatttcaccatagtcggcctccgtcaaggggagaacattgtcgcagtccttgctcgtattggggaagaggttcagtggccgctggcgagagatgaggcggctgtgaagctcgatgactctcactatttcttcgctcttagggttccggcaaacgaagacggcgagggttctgatcatcacgatcgtgaaggaggtcagttcgatgaattgaattacgggttgacgattgcttctaagggtcaaggtgatttgttgaaggaattggataagattttggagacttacagttgcttttcggagcagaaagtggaagaggggaaagggagttgtggggttttggatgggtctgtggcgagggaaacgacgccgtttgagttggaatcagaggaggaaaagaaggatttgattagggagaggtcggcggcttattggaccactttggctccgaatgttgaggattacagtagccgggtcgccaagctgattgcgtccgggtcgggtcaactgatcagagggattctgtggtgtggagatgtaacagtggatcgattgaagtgggggaatgagtttttgaagaagagtctggggccttgctccaacaaggagattagtccagaagccatgaggaggatcaaaaggtttcatctttttttggctgcttatcttatttcatacttgatcaacattttacattgggctttgacttattacagagtagatcattttttgttgcaactaaatattgtgattgcatttcagagttaagaagctgacaaagatgtcagagagagtggcaagtggaattctttctggggtggtcaaagtatccggctttttcacaagttctgtagtcaactctaaagtgggcaagagatttttcagcttactgcctggtgaaattgtccttgcttcattggatggatttagtgagtagctcatcttaaaactcaaaacactactttatttttttaatttgggcttaaaagcttggcttaatacactacactaaaccaatgcatataatattaatcatgatatggttgtgtgtacacaggcaaggtctgtgatgcagttgaagttgctggaaggaatgtcatgtcgaccacctcagtagtgacaactggacttgtttcccataggtgattcaaaaaatcttattcaaggatttacaaagccttatgtttggtttagtttagttttactaattgtgttgagtaattctgattttgcaggtatggagaagaagcggggaaggtgacaaatgaagggcttgatgcagctgggcatgccatagggactgcttgggctgtgtttaagataagaaaggctcttaatcctaagagtgcagttaaaccttcaactcttgctaaagctgctgctgaagcaaattcgaaagctaaatccaaaaagaagtaatctttcccttctttatttttcattggtgtgttttcctccgtacaaggatagcagatgtaggttagagtggaaacctttttgtattaatagcagatagtactagtctactacaagacatcatgtactgcattttattcacatgtaacatcatttttatatttttcattcttgcgtttgtttgtaaattaaagatgaattatgtaatttctttaaaaaaaataataaaacagaacatgttagattaaaaatgtcattatggttttttcttttttttttaattgggttaaatgtaatttaggttgttacttacttttatgtgctactataacagattgttaacggtaaaatttttatttttatatttcaattaattatatatttaaagtaaattaattttaattaaaatatttaataaagagtgtgtaaatatttggtatcttgtattttatttatttacaaatgatattttatattttcaataatatctatttggtacctgtattttaatattatgataccttaaatttaatttttttagtaaaattttatcaatacaatcaaattatttaaattttataagttttgaatgcaaatttaattatttgattacatataattaatttttttttatttaacttgatagaactgtattgattaaatgttactttagggtactaaatatgtataatttgaaaaaatattaagtacgtataaaaaacacagggtaccaaatatattttccataaaaacacaaaatactaaataaacatattctctttaataaaatatttataaaaattattatgtatatgttaggctatttttagcttaagtttcgggctgattttatagttgtttctctgttaatgttattgttgacagaggttttcggcaaccaataaaatattataaaattcgagaactgtaagaaaattagagaaggatttttacgtggttggggcgttaatgagccttagtccacgagtctgtgt

SEQ ID NO: 190656 - DNA, 2841 bp, Cannabis indica
tttctttattttttcttttttttgcaaagatttatcctcatgagatctcatccctttaatctatatattactggatatatatataatgtgattatatgtatttttccatatattttaatctattttattttatttttggggggatttaagatgagtcatgagtagtgtacgaaattgagacatatatagctggaaaatagtgtactagtctattaaaactgcagcctttgaggtcatatatcatccacacatcaatgaggttctgatgatattttctcctttttcttaattccattcttagcctctgtgattttctttttgttgcgtggttttttcttcattataattaactcatctttcactgattccacgtattaaattcttataaagagagactaagagtaggtcagaaagtcaacttggttatcattacttaggtattattagaaaaatttaaagtagctagtgaaaagaaacatcattatatgtacactcttctaatatgtattacctagcctagaaactgtataagtatattatgagctgtaatattccaaagacaaattgggtttttattttgaaatactaaacaatgagagattattgttcatcagattaaaaaataagattatacggtgaacttaccaaggtattaataaccaataaaaagccaagaagattatacctggttataaaagaagttattagcttaaagtagtgttataaaacaactgatgatattgcttaaaaaaaagatgacattttttagttaatttaccatatagctataatacatatttataagtgacacaattaattaactcttggaatcttatttactgttttcaaagaggtaactctgggaaagagactgcatgctgtactttgagctcttataagtattacataatttctattttctaccattatttttatatttactgtcaaaaataatgataaaaatgtatttttacttaaacttattaatattggttattatgaaaagatgtgttgcatttcttccaacactcctgatcagtctcttatataacaaatatttgatatatatttgcacatattgttacgtacgtgtgttctgattatatttgaaaagctcgtctatcaatgaaatgtattcaaaatttatattatatatatagttactccaacttttttaatgttttcactaacctcttaggttccaaccaaaaatatctgaagttattaaaaaaaggaaagaagatattccaaactaataggacttttgatatatacaattaaacttttaatactcattgttttcagctttaatctagctacaaatctatagctgtactgtgtctaatagctattactagctatagcctctatctctagctaacatatgtaagctaatatacatatgtttgtttgatattgagattttctacttgtacttaatcatttacatatatatacgcacataaatgattctcactacctaaatcaaaataattaaacagaaaaactttacttatataaagttctaagagacgtaatagaaagattatcatttctcatactgagaaacaagtatacggattaatgacgtttgtactcttcatctttgagcctttattgaccatatgatatcgatttattttttctttgctgaaatgtatgatatcgacttttgaaaaatcttttgttcttattacaaaattggcagaacttttcaggttcatatttttaagtattaacaattaacttctacattgattttacatatatgtagaattttagctggtaaagtctagcgttagttaatcacagtagtataataatcaaatatttagttcttgatgagaggatgtacatagtagcgtttatcttttttttcaactttgggtagggagattcgaacttgagaatttttctgtgtgaaaaaaagtgtaaaattactaggctatatatgtttatgaccacttatattaatatttattgagttcttatatttcatggtttgatgtatcatgtctagcaaggatattataataagatcttagatatcatgcatggggaatatatttacatctaactctacttctatgccattcctttcacaaaaatgattcatatattttattacatagtatgcatgttcattaatggatggatagatatattgaactaaataattaagtatagaaagtaaattgtaatgattttcaattattagtatatagtcccaatattaaataaatttatttgaattgacatgtaagagtagacacccctgatgccttttaacatttctcattaagttactttttggttaattcattatagctttcaagataattaattaatcacatggtttctctatactctacgggttttctaggagggtgttacgatgtatatgtgtagttgcttttttttctttgcatatatattagatcttattaaaaaaaatccagccataggaatagtttttgctttctgtctgttagggaggttgcacccttttttgcttccatgacttatctttgtttggcctttttgttctttagttctggttaatgaaattttcagttatgaaaaaaagaaaaaattgtttttgctatttggtttgtacttatgatagtaatttctttatctgttatttggtttaatgtcactcaatacattaattgcatgtgttcctactttgttataattagatatattataaatagaagaagtgacttgttttcctaatattagcttattcttaaaatgccatgtagtgtttcaaagaagatgaatttgagtgccgctaactcacactacaaaaaaatgttacctttaatgataattttt

SEQ ID NO: 190657 - DNA, 3327 bp, Cannabis indica
gaacaattttatgaaggttatgaaatgattattaaggttatttaggactgtttagaagttgtttgaatttttgggtggttgtagcaaatgttttgcaagtttgagttcaaagaacttaaacttaacttggttgtgataacttgaattctcttgcaaaatgggttcgtttttcttcatgaaatatgttcactatgatgtgtttagattctctgcaaaatttggtaatgtttggatcaggattggatgagttatgggatttccaaactcggacagggagtttcaggccatccaatttaggcagttttaggatggccattttgtttgatttttgttgataatttgattgagttttcttcataaaatatttaattatgatatttttagtttcttgacaaaatttggtaatgttttaattagttttcgatgagttataggatttctaaactcggacaggtatggttcaggccatccgatttagggagttttagaacggccatttagtttgatttctattgagaattggattaagatttctgtataaaaaatgtgcatcgtgatgtttttagatacactacaaaaaattttaagtttttagaattgcatgagttatgaaagttttaaaatgagatagtggagtttcgggccatctgattaaggcagaatttgggggtccattttatgatttttcccaggatcccaactgcgtgttttctcaatacatatatatcaatagggaaagttttagttgtcaatttaagtccccataagtgttagggcaacacttattggtttttttggaaatgtgacttagggactttgattttcagcagctatttccactaaagttgaccggcacacctaaaataaaaattgaggtaagactagtatacacatacatatgtacatgtttagtttttatgtttgccacatgtatgacatatccgttacaatgatagttggtgtatatatacttgcatcttgatatcgtgaatgtatgtgtttggcaattcaggaagtatgaactaattctacaaacactagtacacaagattaatgagtgcatgtggtattatggctggttatacttttgaaagcatgaactagtgctaccaacactaaaacaatagaatacttagtacatgtgctattatggctaattgtacttatagtatggattgatgttaccaacactagtactactagagtactgattgcatgtggtattatggtcaattatactatggtcaacaatattcgagactcaattatacttgtttgaattgtttatgacttattcataggtgtatgggcacttagtcgtaggtcggttatatatttatgttttatgcttttcttactgagtctgtcgactcacatatgctatgttatgtgcaggtaaaggcaaagctattgttgaacgtcagtgagttttaagatggatgaagattgtatatatcgagacagttcgacctggagtgtgggatcttcgggataactagagctcacaattttgtagtcgctgtctgacatcttttgattatgtaaatttgaaaaatgtagatatgggctcccagattttataaatgtaatacagttatgtttatttattaaagtttaaattttatcacttttgataaaccctttgcttagcaaaggttgcacagtaattttaaattgtattgtagcacgcctaaactagtagggtgttacaacctgacaccagacaaaaattcgaggtgcaaggccacctccagtacttgcggcctgcagcttgaaagcaacattcttttccctagggatgcccttgtattccaagccattaaagccaataaataccctcctcaaatatgtgagagggtgtttgaaaaataacttggtgtaacttaggtcttaaattcaatagagaaagagcaatatttcaagatcttttcacctttatcttcatcacattttggggtatctttgcattttctctctcttgcttcagctcaaccaactaggggaaaatcaagccttctttcatcaatacagtggttgtttagcaagattgaagtagtgtaatccaaagataagaaccctaaaacttactcctttaagctttgttaatttgtttttagtttttaagcatgcaagtgatgtaagtgttactgttcgagttagggtttaggttgttttgtgtttctgccgtttagtagggttgttcaaagtttgtttgaagtggttttgttgattatttgttgagttgggaaattttgagtttttgaactcaaacttggctcaacaatggtgaaattttcatattaagtttattgttgcgtttgttgcttggcaatggcttattatgatgtgtataggtgtcctagagcttaatgcggagttcggggttgttttgagtcgaattggagactctttgtgtttttgtagtgaaaaacgacaggtcgtttctgcaataacattctaccatttttactggtgcaagcccaaaaaaatggctcgccgttttcacagaaatgggatactatttttaaggtaatttccccgtttagagtattttcttgtgtttccttaatatttagggcttttcgatgctattattgatagggaaacttttagttttgagtgtagatcctctgaaaggatttaaaaaagttgtttacccattttacgtgattgtgacatagggcatccgttcagtgcataattttccatttaggtcgaccaacacacttgaacttagaatcaaggtaagactagcatataatgtatatgtatatgtgtatgtattttatatgcatgctgttatatgattcatatgctaccaacacttgtacgatagcgctagtgagtgcatgtggtacatcgtatgatgtttaagggtacaatccaatgttaccaacactagtacaatcatgtacgaagtgcatgtggtgcaacactaagtggtactcagggacagttcaaacctatcacagaggttgtaactttgttaagaacgttcataatcatttgttaaaccttgtaagtaggtgtatgggggcctaaatacaagtctgtgatattttgtatgtttgattcatttcttactgagtttgttgactcatagttattgcttgcatgtgtaggtaaagggaaggctaaggctgagcaacaatgagtccaaagcttgaagatgattgtacatgtcaagatggtatgacctggagagtctggtctcaggataacttagccttactttgtatttgttgtgcaacaaagttgtaaagtttattttgaacatgtaaacaagtttaaaagcaagatcctgaacctttttgtataattatatat

SEQ ID NO: 190658 - DNA, 1586 bp, Cannabis indica
aacttcttgaacatagaaatagcacatcacgtatatagtaatttttcatacccaaacattaccaaacgttacatgggaaaatagatggttatttttagcaatgtaaataaactttaccaatacattaaaatggtttgtaatggtgaattaattataaattctgaatggctgtcaccagcttcctgtcaagatgcctatagctacggttaaaaaccaatagtgtctaacctgatgaggaaatacgacagaaacttaaccttataagacaacaggacagctaataatttattttcataatttatttacagtaatttttttttcttctactgaaattattattaaggtattaattgtgctagctcattattatttctataacaatgataacaaaattctaattagttattcgtttttgttcaaagtttgaaatgtatggtggtattggtaggttttctaaattcatgaggatcatgtttgtttccatgtatagtatgtacataactaacctttattatatggatacaaaacttacacataattgtttgtccaaaaaataaaataaaaaattatacatatacataattagtaagtagatattgacaatttgacacactataataatgtttgtttatggtaaaaaaaaaataatcaattagtgcatttatttatttaccgtgagtaagtaattttttcttttttacataattatgttttaaactaaatataatattatacatatgatgggttaaattttaagtaaaagaatatatagatatatattatttagttacataagcacaaagatatatataagacacggcacatgtatatataattaaaactgagaaaagtcacgagtcatgagagcaccataactactcccgtgaagacgacaaagtttatttccacacttgagtccaaaatatcttaaatttagttcaatctcccaactaaatgacccaaaagaaaaatctataaaggaaaaagaaaacctaaaattaaatccagaaacttacatcttatacactggttgtgttagtatcgctttcaccacattttaattagatcaattttttgtagagagggtaagaaaagtcagagtagggtattttggtaaatgaaagtgagtgtttcaattcccaattataataattataaggttcttttttgtttattcttttgtaaattaatataatttaattgacctgcttccaggaagatagagtacttcccattcattcaggtgctctttttgctaaattgcaatctcgcacgttgtcacaccgtctttgtcggtatcccttttacaaaaaatattattattatttttatatttttgcctaccaaaattgtatgcagcactcctattaacttcttctttttttttgttttgatgaaaattatcatataactttattaacagttaaaagggttgggacactagtaaacttaatgttctgtttaatcaagaattgctattttaaaagggggtcattcctctggacaaagtagggataggtgggttggactctggaacggaatggcaagttctcatgtaagtgtgcttacctaacccaagctttgga

SEQ ID NO: 190659 - DNA, 2242 bp, Cannabis indica
cctaatttttgtatgagtcctactacttttcttctttccaaaatttaataacaattgtattggaaacaactataccattcattctcattcaccttttaagtaaatatactataaaaattacctaattccatatcacacagtaaaaagtaactttttctttaaaaagaaaaagagagaaaatttcatatggctttattttatattaagcaacacttcatataaaattagtcttttaaaagtagacaaattacatatgtggcaagatctaagctgtgataatatgtttagccattagggcatgttcaatgtagttaccccattagtcttactttcctacatttaaccaattatatttttcttttgttttttttttttttttttattatttaaaaatattgaaggccactatagtgctcatttatgaatcattctaccatctctcctggcacatcacgtttggtggcccactaaattttttggttgtacaattaaggatgttcgcggtacgggggtggtgcattttttaactattttttcaaactaacatgcacatacagtttttctaattttctaaattgtacctgcaccacaaaaaatagtatagtgtggtgcagttttgtagtttaaactatcaccaataattaaattatcacaaatataataaagcttgagcaacaattatcaaaaatatcttcaggggtaaaaataaatatgaaaaaaattaagtttcaataatacaataattagtgggctttggaatggacatttacatttagacctaaataaatataaaaattaatatttttataatgtgcacatattaacaatttaaaattgcaaaccgtattatttaagaaaaattcaaaccgcgactacactgtgaaagattttaaagatttttttaggatgtggtgcgaacaatttgagcgagatgaagatgcttatatacaacgcccactgcaaatgtagtgagagcaacccaacccaatttaggagacatgcataatattgacagcaagccaaacccaagagacatgcatcttacatgtaatcatacatatatatatttatagaattgttaaaaagtattattagtatctaatattattggtataattaaataacgacatctaatattgcttaattaaaaaaaataaaatatgaataaggaaacataaatgtcacatataaaacataatgctctcatatatataaataaatatagccatatatatatatatggaaagaaagatacggctaatgaaagagttgttgggggttagcaactattaatttatatattatagatatattatgtatatttttttgaccacattaataatacatatatattgcctcgctaatttttaaatcgacctttttatgtacacaactacaaattctacgctttcaagaaaaaaaaaaaaaacctacaaatactacaacaaattacatccctaaactatttattttattttgtaattggtacccaataaaccgttcaaacctactcatttggtcggttagcggtttgcttgagtactgaaaaaacaatattaaaattaacaaaaacgtaataactaataagaaattccatcttaattcttggctgttccttccacatatttagaaaaaaactattggctatttcaaaaaaaaaaaaaaaaaaccgctagtacgtgaaaataattactatataattaatatatagaacaaatatattaaagaaaaaaattatatcaatcaaattaattattagagtattataatacttgggtatatactttgagaataatacagaacaattccatatacattgcacttttttcgaacttgttgtgaaaatacttaaactgacttgtaaatatgatttaataagttagtctcttataagtagtttggtataaagaaaatgacattacaaaaaagtatcgaatccttcttatattattattaacaattagcaatatataataaaggaaacttcaatgaaatttgagcatcttcaattgattgcgtagtgcgtacgtacatacgtacataatacacgctaaggctgcatatatataagtgggtggtgcctatacctgacctccttatctctctctaactacttttatgatcatatcttatatatctttccttcaagtagtgatttcaaagttgtattaattatcactattctggtttattaccttgatcatgtgaagccttcacaaatatagtatagtttaattagacc

SEQ ID NO: 190660 - DNA, 1501 bp, Cannabis indica
atctcagagaagagaaacagaccctcacataaatgaccattttgagcatatccagcaactattgcattccaagataccaaatctcttttgctcatcctttcgaaaactacacgacttagttgcagacgcccacacttcgcatacatggttacaagagaattctgggcagggatatctagagttattccttgccttaacacatagcaatgaattgatgttcccatatcaagacaacccaattttgcacaagctgcaacagcgctagccacggtagcagtagatggctctattcttgattttaacatctgcgagaaaacagttaatgccctatcgacacaatcattctgtacaagtcctgagatcattgccgtccataaaaccacatccttattttgtatccgcttaaatatctgaaatgcagtatcaataccactgcacttcatgtacataactacaagtaacgtttcaacatggctacctgattcaaatccatttcttaaaattttcccatgaaccaattttcccaatctaagattaccctctgtcgccgctgcagaaactacaggaccaaatgtctgcttatcgggctctataccttcgactctcattttatacaaaaggtgaaatacttctctgacattcccattctgggaatagctcgacaacaaagaattccatgaaactaagtctcttcgggtcatattaagctcaaacattttcctaccttcttcaatgcctccacatttaccgtaaacacttaatatggaattcatcaaagtaacatcacattcaaaaccatatgaaattgaacaaccatgaaaacacttcacgtggttaagctccgaagctatagggagcaagcttagcaatgtaacaggattgggcttgatttgttgcctacgcatttcattgaacaataataacgcttgatcaaagtcacttgtatgtgaataacatccaatgatagaagtccaaggaacaacattcctctcagacatattgtcaaacactttgcgagcatggcgtacgtaaccaaacttagcataaaagttaatcaaagaggatgcaatgtaagaatctgacgaaaacccattaacaacaacagattgatgaaacgaaagaccaagaggaaacaagtccagatacgtacaagctttaagcaaactagggaatgtgtgagtgtctggaggggtggttattttgaagcatagatgagaacgttaaaagaacatgatgatgagatccttgggatgcaaggcggttgatgatagcattgaaatgtatggtgttggtggcttttgcatgttgatgaggcactgttactgatgatggaggtttcaggttcagggcgccattaaagattgacacatttagcttgttcataactaaactcgccggcttagaaaacgagaatcataataaataaataaatacatatgtaaattacaattcacatatattatatatatacaattcatggatgcggaagtggccatttctg

SEQ ID NO: 190661 - DNA, 1672 bp, Cannabis indica
tatatatataaaaaatattgttaaaaaaggggttttgagctaaaataggtcaaaattattacattaaaatttcttaattttagaggtttggacttggaggcaaagtagaggaactttagcataaagatccccatacagcaacaaaacctcaaaaaataactaataatatatttctcttcatgaatccaatccatgcgtgtgtacgtgacttgaattaaataatataattatagattagacctctaccatttctggtcaaagattcaaagaatgtatagcatttactagggtttacccctttccaacggccactaatagtcccaccccacattgagccccaaaactccaaacccaaaatcccactcttcattatatcttcttcttcttctccaaaaaataaaactgaaataactaatctctctccacaaccaacccccccccccccccccaaaaaaaaacccttttaatgaaagatatatgtatatatataacagagcagaggagagtgagtaaagtaaagggtattcttctttttattaagttatatctttctctgtcttttttttaaccatgtcaaacaaatccccaatatttcccatgcctcaacacttcagtgactatggttttgaccctcaaatcgactactttcaggttctttttctcttctttcttttttcttttcatcctttttattattattattatttttataatcatcacctcattattgtttttcttttaggtattagaagaagcaaggaagcacaagagagatacatcaagatccattgactccatacacttcaagcttcaaaaacctatctctaaggaagattctaagaaaacccagaaggtgaagaagaagaaatggtggagaagtgctctgtttttcttcaaatggaaatgggttgcttacaatccccatggccatggccgttctgatcatcattatcatcatcatcaaggttttgataacgatgaggatgttcaccaggtcagagctcgggccttcagggcctctatttcaggcccagtttacataaccgagagcagaagtggttccaccactccttaccggaccaccagccggcccacatcaggcccaatagccggaactttgagttctcccaataaggatgagtttgatattccttatctcagtctcagacaccttaatatggagcaacatcagagagtctctacctctgctttgcctatttacttagtcacttaaacttcctctatttactttttttttctttaaaggccatattagattgattttcagagcctttattatgcaaagctctaatctttcctaagtttctgttaatgggtttggctcttttttttttgggttttgatttctaccactgaaacaacctttgttgggttttgcccccttttttttttgggtgcttttgtaaacagcaaaagatccattggagtggatgaaaaagctggatcctcctcttttgtgcatgttgttctcttttattttttgtttggttttgtggaactaatcaactattgtttgaccaagttattttccccaactttctccatcccttctttcatatctttctttttaagttttctttattgttttcttatggttaatagtaagtagtgacagtgaaccacttagttcgttggtaatatcattaaaacc

SEQ ID NO: 190662 - DNA, 4146 bp, Cannabis indica
aagtgaaataccaaaaagctagcacaatctgtttcagagctggatgaggtatttatagttttgtttttgtttctttcctataccaggtttcaagtggaggctgcacctttctatagtttatggtttttttatatgggatattgagttggttttgatgaaacaggttgtgtcaacctttaggagattcaaggaatagcgaaaaagagttagaagaagccaaaggtatgttgtcagctctagcaaaagaagaagggactgatgaggatatggcgcagatgatagcttccgaaattgattctttgtccagtcaaataaaagaactcgaagacaatcttaaggtattttcacataattatatcagaaataaaattgtggctttaaaaaattggtcaacaattttgtttgggattgttcgctgcaaaaatgctcttttttagtccaaagtttgagtcaattggcaatttaaaatctataattttcagttgtcttctgtgctgccttgctctaatgaccatgtttgatgttatattgctagatgctacttctgccaagtgatcctctagatgaaagaaatatattgcttgaaggtaatgccactgtttttctgaagaatttattcaaatgatttggtaatatcatgaaacgagaatcaaattcttccgtaagatggaaagtgactattttgtacatctgcttgtttgtttgatgcatctagaatatgtaattgtgatgtatttatatctcttttgttgcataatgttctctgagctgtagtatgtacatttttatattttctgtagcatattgtctacatgctttggttgtaatgtattacaagttaaagtaaggtggccctttttaatgattctattgttgtgttatcgtgtatctagctagaaaatttgcactgctgaacatgtataagtttgattctgatatactactttagaagttggccttaaattctatctccttcggtacatttaggccatatttcaaatctaatacttatggtttatctttggcaattgtgtaaacaacatgacactccaagttatttcttagattgatgttgttagctgttttatcacctcgcagtcattgagcttagttgctaataatggttgattgtttctgtttcattgaaatttatacttcattttcttcagtgagggctggtactggtggtgatgaggctggaatttgggcgggtgatcttgtaggtacatgtttgttttgtcattccagttttctagataggtgtcttaggaaatatactctttcttatactggaccccaaggttgaaactaaagctcagaaagtgattactggatttcttttcccctttccccttttccccaaaagatttatccaggatagttggtttagcttacagaatagatggatatagattgaatgcttttgttatttttaacaaatattatgaaatggcatctataatctataaattattttcctgatgttttgtttttttttttggtgtgaattctaggttcgtatgtatcaaaggtactgcgagcggaattctttgaagtttgctccagtttcatgctctgatgtgagtcttcttgaatatgctcttttgactctatattatttataattagtgaagagaaatttatatcttattccctatctttgtttgtatttatttttcctcaggctgaaaaaggaggcttcaaaacttatgtgatggaagtcaaaggaaaacgtgtttacagcaaattaaaatatgaatctggtgttcatcgggttcaacgtgtaccacaaacagagacacaaggtcgtgtacacacatccacagcgacagttgcaataatgcccgaggtagagtatatttaatcaaataaatatccaatgtctttattgcttgagacatctatttccttttaatacatgacacatttggatctgtacggttatccatctgttaatgttgttcaagtgttttgtaacaagtgccttgatatttttcacatttatctttgataaaattgcaaagatctatatttcgttgatgagactacaaatgctatatgtgtactctctctttgaacaattacttagtctttttgttttaatgttatgtgtgatataggttgatgaagtcgaggtggtaattgacccaaaggatattgaactaacaactgcaagatcaggcggtgctggaggtaataaattgattttttgagatttatttgttccccaggtaagttggtttctcttttttacttgtctcttatttaagaatcctactttgtgcatctcatgcaggacaaaatgtgaacaaggttgagacagctgtggatcttattcacaaaccaaccggaattcgtatattttgtactgaagaaaggagtcaacttaagaacaagactcgtgctcttcaattgctacgagcaaaattgtgagaattttctgagctaataatacagttagaatgatttatcaagatgtgcttttttggcctggttcattgatcaaatcaccattcatttaatctgatggttatggttttgaattgaatatgctgcaaaggaatatattcataaatagtagacttacgagaaacaacttaaacatactccacaactttgcttgctgcttattaaatgttttggttattatataacatctctagtttctactgttgagcaatgaatgtgacccataaaggtttttttagctgttttggttcacttaagatgaccaatgatgttgctacagatatgaaataaaactgagggagcagcaggaaaagctaaggaatcaacgcaaaatgcaggtactaattctcccgatgctcttgcaactttaagatttctagttgatttctatgattgtaatttgttcggcattactgatgatgtatacactagtattttgttattagtttctatgtatattttgatttcatatttccttgctgtatttgtcgatgctaagcctggaccacattaccatcgagtatatccttaaaaattgcaggttggtaccggtgctcgttcagaaaagatacggacgtacaattataaggtactgtaaacggaaatcttttgtccacttgagcttaacaaataagaagcatttcattctgtccctcgctctctcgtttacacttttttttactttattcacatcaaccaggacaatagagttactgaccaccggttgaagatgaactttgagctcacctcttttcttgatggcgatatagagaattcagttcaggtatagtttttcatcggtattctcgtcgactggcatgccttttttttcgttcttcttgtagatctttcaaatttgaatataacgataaaaatgaatttataaagttgcttgtgagtgagttgatgaatttgcttcttgcaggcatgttcggccatggagcagaaggagctcctagaagagcttgcgctatctgcgatggcctcagcaagctgataaattgatgaatctactttcagatgaacgttgaatgatgaggcacccatagaggcacctatttggtgttgtcttacttgactagccaagtaggtcttgtagaagcattggatttgtaaagaaaaatatcattatagggtagttttgttcttctgatttttgatctatgtatttatttattattagtattttttttgtatttttgatctatgtatttatttattattagttttttttttttttttgtaattgtataacaaatttgaaaattttgaaagccaaaagacaactattatagtttatggagataaagtataatcatcccaaatagaaaattggctggggaacatgtcccaatccttgtataatcattgtaaagtaaattcacaatccttgtataaaaaaaaggattttaagcgctctcaaaaaaatttctaatctatcttttaagatatttcatgaagtccctctctcctcaaaaacctcattttgaggtgtcacaaacctcattttgaggtgtgtgacacctctaatgagacaaataagttttaagtattgcaaaaattaatttgatttcctaaaccctattttgtaactaatagtacaacttgtatcactaaaatcattttttattagccctttgtatttacaaaatggaatttcatttattatacttaata

SEQ ID NO: 190663 - DNA, 765 bp, Cannabis indica
aatttatgttccaagtttaattttgtgagttttagtttttgtaccaaaactgttaatgtagtggctgactctcttgctaatatttttgtattgaaagctacttctagtattgtctggtggcctggctatccatcttgcattcagaaatctattttggttgatgctaattatcaataaatttgttagctttcggcccccttaagtgatttgttcttggatggtatttcatgagactatttttttcaaaataataataataataataatatgcatagaaagtgttcgtagttttagagcatctaagatagagtaccacatttgtgatataaaagcaacattatattttagaattttgtaaatgatatttctccaattgtgtactaaattagaaaatctcaaaaattaggtcaaatattagcaaatcttaaaagtttcactaaatttaacaaaaatattttgttaaatttagcacatcaataaatacacaatttaacttttacaaaattagtatatatatatagtataattcatgagtgaccttaatatacttttttaaccgtaacattgtacattttaatttttatgaattttcttttaatttattagttattattaatgataattggttttatattaatttacattttaattttctattatatattggagcaaaccatggaataattgtgctcaatgtaacatttgcttatttttttgctaaatctttagatgtgaaaaataaatcaaaaaaaaacaaaaaaaaaa

SEQ ID NO: 190664 - DNA, 2506 bp, Cannabis indica
aaaacaaaaaaataaaagtccctttgggactattttaacccatcttcaaatggggcctaaattagagtatgggataattttgtccattcccatgaagtataaaaaatgtaccaaacatgtatggactaaattgtccattcccaccacaccctaaaaaggaaaacaaaataatgtatagaattgataagaaattatttacctgtttagacatctcaagagctatgagctctgctatgccagttccagccttcatcagccaaaacacaaatgtcagaacagaaacactaggctgagacatggactatagcaaagtatatgtacttaatacttaagtgctatacaacatttccatcatcagacagagaactaaataaccagataaaagttattcatggcccaagaataagaacacttatagaaaattttcatgcaagtaaaatattttgagcctcacctctccagcgcccaagaataagaatttatggtcagctaacttccccccaactaatttcaaagctgcaataactccggacagaaccacggatgctgtaccctgatgaaccaaattgaaggaatcatagttaatggggagatattctcacaaaataagagtttaaacttgaaattaaaatatatttcagttatgttaacctgtatatcatcattgaagacaaggtggcttgaactgtattttgatagcaattcaaaggcattgtggtttgcaaaatcttcaaactgggaaacaaaacaatccagaataaaaatcagttcaaactatatgaaatgagcttggaaaatcaggagctcatggaattagttagcatgttagatccatcaaatcaaatacctggactaggactttctctccataattctgcttaacagcagtcatgaattcttctagaagctctgcatattcctaaacaaggaaatgaaaccaccaccttagattttgcacaaataactaagactgcaaatggcttggattaaataagttaaggttgagagaaagaaaaataaacctgcccagttgctcttttatgcttaagtccgatgtaaaattcatcattcaacagcttctgattgttcgtgccaacgtcaatggttacaggcaagcactgtaaacaaaagatttcatcatattctattagaacaaacattgtcaatgaaagtaaaactcatgataacaacaaatgcctaataagaataggaacaaaactcactgcagaaggacgtagtcctcccaatgctgtatacaaagaaagttttcctactggaatccccatgccctgaacaaagttcaaagaataggacttgttagattaacagttacctcaaatgatataaactcatgtctagtggagtccatagtagttttaaaaataagaacactggacttgtaaactgaagaaaaaaaattgaaccaactttacctggcagccaaggtccccaagtcccaaaatacgctcaccatcggtaacaactataacttgaatatttctctcaggccagttcttaagcacttcagagatcttacccctaattaaaattaaaaggaaaaaaaaagggtcaatatcttgttaactcatataatatagaccaaaaaaaaaaaacccataaaatattaaacatacttacttctctttcaaactgatgtaaaggccctgaggacgcttgaagatgctaccatacttttggcaagcctcaccaactgtcggagtgtatactataggaagaagctcctcaacgttatcgatcaaaagtttgtaaaacagcttttcattcctctcctgcagaatcaaattaaatgcagaattctaatgagactgattcttaaatattgaatgatcttgatttactcaaaagtacaaacttattaaaactgaataattacctgaaggtccattagggccatgtatctatgcaatgggacatcatattggcgaagattgtgcatcaatctcttctccttttgtatttgtacccaaataaatgattacttgattagttagtagataataataatttaaacatgaaagttttgaaaagatgtactaagttttcttacctgaagctcttgattaaatactgctggtggcagaaggccacgcaagtagtgagcatctctctcattttcggtgaaggccagccctttgttatggtgtggatcacgtagcagagtgtacccactgcacatttaaatcgatcgagtaaacattatttaggggaaaaaaatcaaataattcatgccaatatatgaactattataaaaatgtgtttcctaaaataaatattaaggaattttctcaaaaaaaaaaaaaaaaaagaaataaatattaaggaaaagatatagacatttgttaattattaacggaataaccaatacataagccagcatgcaaaataacaacacattcttaaaaatacagatgaaaacatagaaatgacatgcattttattatattactttcttttgtaaaccatccaataaattgtttagaagaaa

SEQ ID NO: 190665 - DNA, 2280 bp, Cannabis indica
gaaaaattgctaattagcctaaagaaaaactataataagatgctagtgacaatacttttagatggaaaaactattttaattgcgaacgagtattgacatggtcggctaaaaggtggaacagccaggacctacaccttaggtcccaaaaaaactaaaattaatataaatatataatatatatatatatatatatatattcagaaaactataatatatacaaacattattcacaaaattatataaaaaggtagtagcacacatgatagatgttctttattatatgtatgagttaataaatttaattcttaagtactctttcaataagtttttgttttttagctggttttaaaaaataagtaatattttaaaatatgctaaaatatgttcaatgtatttattattatctaaaaaaaagttaaaacacacaaaaataaatatcatattatatatttagacatatattttttttaatatatagagaaatgttaaaagatactatagtagtgtttaacaatacttttaaaaatatcatatgcctattaatacaaataaataatgtatctcatataatttaatataataacttttttgaaagattattaataaagtaacaatacttatatgtataaatatacatctgataagaaataatagtacaaatttttaaaaaatcactctaatatataatgtatacagtaagatttaaagataattgtgtccctttaccaaaaaaagagaagaagaaaattatgtcaagatttaattaattagtatttatttttaatttggttaaaaaagggcctaatttcatattttgctctaaaccccataataccttgagacggccgtgagtgtcgactatttcttttagagacgaagagtgtataatataaaccaattaaaaagtatgttggtataattatagcaaagatatattagtattagaatttggaataaaattaataaggttacatctcaaaattaatagacaatggaaggaatagtacattcattttatatatgacaatttatttctacacattatcaatgttggactaaccaagatattaaattgcacatacagatacattattggacagaagttgaaatgctattattgtcacaaatggagaaatgttaggcataatttttttaaacaaaaaaaactaacaaagaactttcaaactctaatctcagtcctgtccattgctccatctatagcaattaagattattctaaatcatgttcatagcagacaaattgaagaaatttttctagtatattggctgttttgtccctcttgatcacctacccaaatggcaaacagctttgcaattaaagctgcagatatcgacttgttaacaaaattgcgaaaagagcatttcaccaaactagtgtttaattcccttatcagtcaacccgtgctgcaatctttccagccaatagcggcagagtccaacttgttcctgttatattaattttctacgtcagaccaattattaactatgttccaatattatttgattcctaacaaaagttaaattgaagattaaaaaaaatgtgttgcatatggttcaagttttttggtttctcagtgtagaaaacaatgagcgttgtcttctagtaacaataaataaaaatgacaatttgataattggagccaagtttaagttgggtcattttggctaaagctcgtgaagctagtattcatgcagtgtagtagtacacataatatagctgaaattggttgaaaaagggataaccgcggttggtcctaagccaaaaagaaaaaaaaaagaatagttgaaggggatgaaccgaacaatttataatatattattcaagatagaaagtgataataatatatattgtatgtaaattaattagggaagccttttttgactttgaattttacggaaactggagtagaccgccgatgtagattttattagcaacaagaaaaagaatcaaaataccatgtgtgcactgtgcactgttccaatatctttatttttaagatatataagttagataattctcgcatttcagtatgggttacagatatataaaattattagattgggatgtaaattaaattattattattattattattattaggggagttatgaagtccctcacctccatttgaagtttgtgacacctctaatataggacaatcacaagctaactgtaactccttataaccggttttcttacttaatagtacaatttaaagtgtcagataaatagtttattattaagtaattttatttacaa

SEQ ID NO: 190666 - DNA, 1452 bp, Cannabis indica
ttcttaatctttgactctatttaaataggagatcacctatttaaataaaatactaaaaaaattcttatctcttcttcattttctatcgttaaattataatattttataatttatattattgtactcatttttatttgataatccaatcatcatgacataatttttaattaatatatcaaaattttattaaaaaaaatattgatatctataaaaaaaaaatgataaataactcctattgtatactctatgcaagatttttctaaaacaaaaaaggaaatagtaatataataataattttctaaaacaaaaaaggaaataataataattataacccacaaattggggaatatctaaatccaatctttagatttagaatggttcaacttcaaacacccaatttagtcatttctttaaaaatatattaaattattaaaaaacaattaaagtctttaatagcaaactttttaaaaatgtgagaaaagtttgaaaaataattatttatgagtaatattaggaccacaaagaagctacaaagatctgttaatagcctcatacatagccttgccaggcttgagacagataatatatattatcaactccaaaaattaattaaatttggataattgtcatcaaaatcaatttaaatacaatgacccttatgaaataaatgcatttttggtttaaaataaataaataaataaatatttttcattttattttatttttaattgaaaagaaacagattacttatttattaatttatcattataatgctcctgttattttggaaaatcacaagcaatgttttggttcaatgagattttttattatgaattcatgtatgttcctggaattgaaagtaattccccacgtgggtgtgcttttttctagttttattaatttaatcataaattttaattagattctataatatattatgtactttacattctcttaattatactcttctttatttttttaaaaaataataataatcattataccaatactaatactaataatactactactactaataattattctctcaatcaatggcaatcagagaattcacatatagaagcgagtaggacagttgaatctaaaaacataaatcgaaaaaaaaaatatatatgcattttaatttgaattagttacagtatatatttgtaataaaaaataatacgtataggcataataatattaattttagtataattattaagctagatagtttatagattagagcacaaaattttaaattctaccaagagtattgttttaataaataataaatatattgactggtatatgataattattgggtaattggttaattgttgcttcattttgattttccttctttcatatataacaaatatattgactggtatatgtgttaattttataagtttatgagttgttattttaagaatttgagttgatgatttt

SEQ ID NO: 190667 - DNA, 3067 bp, Cannabis indica
tttgaaaccctagctctctttctcttctacacgcccctaacagtatagaagagactaagtcttccccatctcaccaacttgagatttgcctcttgattgttactattgtaatcttaagagagctactttagaatccacaacacttgtgatatgagtggtattatctctaatatcaatagaaccaaaaggggagcaagtcattacccgctaactaagggggtcgaacctttataaaaatattgtgtccctttcttattgtgtagacatggtgatatcagtcataaatatgagtccgctgtcgattggccaaatttgaggtcagtaaacttataaattaaaagggattttaaataatatttaataattatgacggataatttatttataatttaagatttttattataaataaattaatcatatttattaaaagagttaatatatattaattatgggaattaaaaaataaaacatattaatccttaaatagtgaacgagagagagtacatgtcaatgtgacctacagtctccattattggtcaacaccaaaggaatatagattggcctcacgacaattttgtttttgtccccctaaggaaggtattagtctgcgttgttgttcaagattgatctcttgaataagataggaggaagtgatatattttagtatgatcgaccctaaggtggtgttactaagttaagtcatagagtttgaaataatgggttacactcacaaagtacaactaagcttccatgtcgttagttgttaacttgaccaaacacaatttatattttgaaaaggataatttgagatgtttaggtttcaaaataataaagatgagatttaacctgtaggcctaatgaaattaatttgcctttagctgtttgtgatagttcttattcatgcgtaagttaaaagtttgagcaatttgcattaagacggacttaaaaactgaaaccctagtccatgtgtcaacctggcagtgggtgaaaccctaggcacctaggttggcttctgagatgttacattgacatctttcacttttcaggcttataacttggagtcttcttaacttgttggttcaaaatagtgaaggatggtgatttgaaaacaatttggtgggatctaaacacccattatggagcttccaaagtcaactagtgcacatggctagggacccttcccagagttgactgctataactcgaggcacttaagtactccatgaatatttttcttcttgccatgtgtcaaatattgatgtccatgtcataagggtcagtttcctggtaaacaccatccttcaatgttttgaactaataagtcaagaagactctaagtcacaagtgtggaagctaaaagatgtcaattttacatcccgaaagccaacccgggcgcctaggatttcatttacaatctaggttgacatttgactataggttttaatttctagccccatcttagggaatcctactcaaaatttgtactcacacaaataagacgtgccacaagcaacctagagctgtcagaatcagctttggagcacttccatttagagcacttgggcacccgatgcctaggttgacctggtgcagccccaatgcctaaattaacaaattgtcaagctggggcacttccaaccatatttctaaagatgttttccatgcatattctatgtcatcatccaaaatgaggatacaagttctttgggggaacaaacaaaggcaactagtggccaaaacacctacccaacacccatcttgacactggggcaggaaaccgacacccaggttgacatattgtcaacctaggccacttccaaggaatttttttgggaagtattccaagaatttactccattttcataaaattcaaagatacatgtgttcttgagaaacaaacgagatttggaggccaaaagacctagccaacgcccaagttgacattcaacctggcacacgtggtttcgtcactcagatgtaaatttcactttagaaattcttcatattttagtccaaacttgggggatccctcatttcctaactaaaatatcatcaaagtgccaaaacgactctcaaagagcctcaaaaggagcacccaatgcccaggttgacatccaatcgggcacgggtggtttcgagcatccaatttcagtattgtcagtaaatctatgttagttctccatcacaaacaaggtgtagcacttgtggaaaatcaaattcacactatgatattttagctttttgaaaaagtggaatatcgaaaaactagtcgcaaatcaggtagttttgagtctcccaatttcgggaaaaattacaatctttaagaattggtgaacgacatcaccagaataaagaaactagttaagtgatgagataatatcacttagaatttttaaaatattgtttttgcacgatttctcaagttactagttgccaggttgacatcgaacaacttcttaatcacatgattgttaacctgggcactgaatgctcgactgtctacagtaaaacacccataactcaccgaatactactttgattgatgtgattccaagtgaattagaaagctcttttcaagttctttctatgcatgtctcacactcatatctcaattatgaagttttcaactcgaaaaatcgcccctaagtcaaagtgtaattttttttcacaaatgacctaaaaatgatctaatggacacgatccaatctctaaaaattgacgatatcatccaaagtcaaaattgaacatctcaaccattgaattttaatctatggtaaaaatcacttcagatggaatattctaggaatatttcatattcatgtaatattttattattatcttaatggacctccttgcgtgtaaaaggagagctccacaagctcatttttcacattctgctaagtctccataagatcaaagcatatctctagtgtctaactctagaagcttgccttgtaattcttgtgagaaataaaaactcaaagtaaacgtagttctattagcatcgcgacatggggagtgaactaatataaattttggtgtctttcttatttactatctttcttc

SEQ ID NO: 190668 - DNA, 3577 bp, Cannabis indica
tatgatgcaagcattcacatgtgtgctttacaatatatatataaacatacgtataatgtgtatgtgtggttttattcaagtaaccttgcccccaatatgtaggacccctataggcccaagtcattaaataacttgttaaggtatacatacaaaagaaagaaaaacaatatataacacatttattaagctttttatatgaaactatagctagactatgtacaaaaatgatatactcaatctttatatcgaagttttatcatatttaaagtaatttatccttgtttcatgatcgaaagtcaacttttctttcttttatttttctcttcatgtactgttcagccatcgatgagcttgtcatcgctctacacacgttagtaaaagtcgcacaactgtaaattttgactgcattttctagtgatcacccaccccgaggtcgaagacaagtaccatgcgacgagcatcccaagagaaataaaacataaccacacacattttgctaaaacttattgtcattcgcatgtgagtttgtgagtagtttagttaatttagaagtcaagttccaccaaggtgacctataataagaatctaagaaagaaagaaaaataagacgaccaacattaaattaaactgtgtgagagctattgtgcaggttttgtgcccaatgtagaacctactttcaagattagaatactaagtggcacttttgtaaatactattagtaaagttagtttactataataataaaagtgagctttgttgattgaatactctctttctcttccttactctattttcatactctgaaacattgacatgtagcagtcgtctttgacaagtgttatcaatggagtctatttccatcggttcgatccccaatcccaaagctccaacaactcaatcggtccttcctcaggctaccactactcccttgaatccgatgaactccactagccagccaatcattggaactcatacacacagacatgtggagaccctctcacattaaatccaaatatagatatagttattatgttcactttcttgatgattatagtcgatttacctgcatttaccctttggttaccaaatcccaagcttttgaaatgttcattaagttcaaaagcatggctgaagaaatagttcaacttacctatcaagagagtccaagctaattggggtggtgagtcttgtacctttgctaagatcttgactgaccaaggcatacattttcaacattcttgccccaaaacaagtgagcaaaatggaagagaagaacgtaaatatagacacataacaaaaatgggcctcattattcttgctcaatcttgtttagattttacctattggtggcatgaatttcacactatagtgttcctgataaacaggttaccaactctaattttaaaatagaaatctcaaattgagtgtttgcttggataaatcccagattacaccatactcaagccatttggatgtgcatgttaccctcacttaaggccctacaacaggcacaaaatggagttcaaaactcaacaatgcataagggaggttatctttgtgaaaactcataagggaggttgtttattgctcaaaatgtggtgtttgatgagaacacatttccagcatccacaacttcatctattcctcagatacacacaagtaatcccactattttccatttgttgtgttttccacttccccatttactcaacctccaattaatacttgtgttaatttcactggtgcttttggttcaactgtcaatgagcaaacacaacctgcttttcctcccaatctagtttcaaacacaatcttagaccccacttcctctagcatacccacccaaactcactcttgtactgttgtgcaaccaacacctcctactacatatccaccattaccatgaccttcattacttacaactaaaaaccaagtacatcaaccctctagtcaaacacaaaccattactcacactgaaaatctcaacaacagcagtacaacacctccaaatcagccataacatcatccaactcttgaaaataaaccaagatttgtcatatcaagaactaaaaaacacaacatgagcaccagatcacaaaggaacatctcaaaacctaagtcatacattgccaccaagcatcctttgccagaatctatgctacccactgaactaaagtcactcaaggctgcattagccaatccccactggaacggtgcaaggaacacagagttgggagctctgcataaagcaagaacatggacacatgttccttatgatttaaacatgaatgtcattgggtataagtgggtcatctagtcaaactaaacaaagatggctctataggccaatccccaatatgtaggacccctataggcccaagtcattaaataacttgttaaggtatacatacaaaagaaagaaagaaaaacaatatataacacatttattaatctttttatatgaaactatagctagactatatacaaaaatgatatacccaatctttatatcgaagctttatcacattttaaagtaattcatcgttgtttcatgatcgaaagttaacttttctttcttttatttttctctctttctctacatgtactgttaagccatcgatgagctgtcatcgctctacactacatgttagtaaaagttgcacaactgtaaattttgattgcatttcgagctctacccaccccaaggttgaagacaagtttcatgcaacgagcatcccaagagaaataaaactcaactacacacattttgtcaaaacttattgtcattggcatgtgagtttgtgagtagtttagttaatttagaagtcaagttccaccaaagtgacctattataagaatctcaagagaaaaataaataaataagacgacttacgtacattaaattaaatcatgtgagagctattgtgcgggttttgtgcccaatgtagaacctatttccaatgaaaaaaatactaaggctatgtttggtgggaaggagggagaataggatggatggagaggttagagatgatggagagtaagagggatgaagaggattgttaatatactttgtattgtttggtattaggtgtgaggtggaaaggatggagaaaaaattgattagtaaaattacaaaattgttcttttaaaaataaaattttattatttttttaagggtagttattgtattttgtaaaatgtattttatctttttctacaattcttccaaacttggagagattaaattttgaatgtttggagggagaatgtctccctctatctctcctctccctccttccctcttgccaaacaagtaatttaaactctccttccatcactctccctccacccctctccatccacccatctccccctcctaacaaacatagtgtaagtggcaccttgtaaatactgttagtaaagttagtttagcttctctaactgttttaccgaactctttctttacctttctgtattaattgttagtttagtttattcatcttatcttattgtataaaatatttttttttaataataaaagtgggctttgttgattcaatactctctctctctctct

SEQ ID NO: 190669 - DNA, 1585 bp, Cannabis indica
ttttttttttgtttatgttttaatctagattgaagatggagaagaaacatgaacttaatatttatgttaaaaagtgaaaaagagatgatcgaaatgttccttcctaaaaaaatattgttctaccctcatattaagggtttatttttgttttgatttttggttttattcttttgtttaagtttgtttttagtttgtatattttttcattaatattttatttttttagttgcatctaatttattgttattctttttattattattattattattttcttgtttaagaggataattctgataattttgttagagttattgaagacccctggattaatagaccaaaaaacttcaagatcttcaataagccttccatcccgagagacatttatgttattgctctgaagctatggaattgtgattgagattctgagttcatcaggaatatctttcatgaagaagatgcaaacttaatcttgtccatcccctcatcctttgatgcttcggaggataaggtgttgtgacactattctaacaatggcaaatacacggttaaaagtgggtacaaagtggcactggatttaaaagaaagtgtggaggcttcgaatatgttgataactaaatccttttggaaccatctatggagattgagagtccctccaaaaattaaacacattttatggaagcttagccattcgtggctaccaactaaccatattctttgttgcaggaagattcaaatttatccaaattgtaccaggtgtggtgtgagtgctattgaagacaatgttcatgtaatttggaagtgttcggtgacattagaaacctagaaaatgagtagattttggaacaaattgaaggagtgcaagctcaaacgacccattggagttccttcaatacatgagatcgtttgtgtctctaaaggaatttggcttgtttgttgtaatttcttagcatttatggaattgcagaaataaatggattcatggggaatccttcccgaaggcagatatggctaccgagtggtgtttcagttttcttggtgattttcttgctttgtcatccaagggccacaagttaaaggatctaaaggcgccccaaaggtggcgtccacctgaattcaacaagctaaaattaaatgttgatgtcggtgtgtgtacaagcttgaagtcaagcagtgatggtgcagttgttagggaccatcttggtagggttctttgggcaaagatggagtactgacaacaacttttatctcttttggcagcagagtttgctgtgatcatgtcggggctgcaaatggtggcggagctcaagttgcagaatgtctctattgtgtctgattgtttggctgctattcaacttattaattctaattctacgggttgtagagatgttgatagtatcctgttggatattgataagttgcgatctgttttgattggttgtagtcttagtttcgagcgtagagatgcgaaccttcttgctcattgtatcgctaattatgctttagagtcgaaagcatttgcttgttggactggggtgcttccctgtgtcgctagtcctttagctagggctgagcatgggttggg

SEQ ID NO: 190670 - DNA, 2651 bp, Cannabis indica
gctctaagcatatagccccttatgatggactgttaccacgtcatcactagtgtcaatggtcatctccatgggcacgccattgtaccacgtaagtggaggttgcgtattatcaagcataaggttgcatgggcaactctgtctatttttccatgactttagaattacacatgagctccaccaaaaacataaagacatttttttctctttttttgaatgtcttctcttagtttaataggccatgtcacattttccaataaaaaataagtaatccccttcttgccataatttctttctcaggtcctaactttctttttgtttttgttaattcttaatttaagggaaagatttttctacatagatatttgaattgcacattagttgattttaagttgagtttttatttttcaaagatgaagtagtttattgatcttagtttaatttatgagtactggtactgttctttttagttccatattttatgtttaattagtattgcttgttaatttttggggtgattttcaggtgttgtgcattgtgttgtttctatatagttgcaatatagtttacttatcgatgatctaatatggattaggtgtattatgtgaatgttatgtttattagtttaagtatagttttagggcagttttattttggtttctatttttttatatgtatatattatgtttagttttgtttatttatatatgcaagattggaaatgtaacttttacctatctgattatttcaggtccaactgcatgttttatcttttaggttcaccattcatgaccttctttgttgtaacacttcaaacagacttttatttataagtttcacctacatgtttaagtataataatcaaatattaaacttaaatgaaatcgaaaaacaacgataacaaaattgtataacaactaagatgttagtaaggtaaccattggacaacgcgtaaacaacggactggcaactatgtatgaactatgtatttagatattgttaagaaaatatttaatcaattgtttttaaactgataaataaagacttgtagtttgaggttattttacaaacaatcaattgtaaaaacattgtaaatcaacatcaactcaactaacgttaaagtaagtgttggatattgaaggatattgaagcagtttgtaggtcctttctataaaaaggtactcaagagagtgcaagtcctggattggtagcttgggaaagtatctgtaaactaaaaaccaggtggtcttggatttagaaacatcagaaactggaatattgctgcaatgggaaggtatgtttgggatattgcaagtaagaaagattgcttattcgataagtggattcataaggtgtatttaaaagatgttagctggtgggattatgatccaccttcagattgttgttggtcatggaggaaaattgttggagtgaagaacaagctgaagcaaagtattgatcttgctggttttgtgcagcagagatataaaattcagcaaagttatcagcttctatttgaaaacaatgagaggctttcttggtctaagacagtttggggtaggttgatcccaagcacaagtttactctatggcttgtgttttaggaaagattaaacaccaaagagaggataagcaaatacaatacaagcatagacctgacatgcttattatgtgggcaagagaagaaatcgaacagccacttattctttgaatgtaagtatagcaggatcttcatgaaggagattaactcttggctgcagtggggaacgaggacaactagtatgcagcagctagcaaaaaacatcagcaagagcagagcattatcgactgctaggaaaagcattctgagaacaatccttgtcgggctggtgtatcacatttggaaagctagaaatgaagttctttggcatcaaaaactgtggcatacaaaggttatcacacaaagaatacaacatgaatgtaagctcaggattttgggactgtcaacccagctcaaagaagaagacaagcaatggattttgaggatctaactgtcatgtaaaaactgtaattactgaaatataattgctgtagggttgatatgtagaacttaaatgtggctgaaattaggataatagatagaatgttgtataattgttaaggtatagagctaaaagaagcatgatggaagtgtgatgtaaattgtaaagatttgtttgagcaatacaatgactcttattcatacaaaaaaaaaaaaaaactaacgttaaagtatgaacaagcttatcatattagaattgtgtttatgagagtcttgtgtttgattgtctacatgaaatgcctgttaataacaactaaaaacattatagcctaatcagtgtgtaagtattgatacatcaattatttcaacgtccataaaactaatatcaaactgtatgacaattatattgtaacaaaaatatcaaaattacacaatcaggtctatgacgcgagatgaattcaaatttagtttattgctgtaattggaattgaaaaatttcaagattgaaattctaaaaaataatgttgatgcaacaaataccttaaagattaaaaggaaagaaaaaagaaatatcataattaattggtaccctaaacaaattcctgatacatatcatacatatatatgtatatata

SEQ ID NO: 190671 - DNA, 4117 bp, Cannabis indica
attgaaattgttagatttaaaaactattgtccacttttaagaaggaaaatctgatatagatgaaagtttaagcaacatgatttgttacatgttaaaattcgagggatatgatttgctagatgtcaaaatttagaaagcatgattttgtacatacaccatttaccggaaaagtacacggaacgtgattggtacatgtcaaaatttgagacaaaaatcctaattaacttatattttataacgactatatttaattgataatatgaggtactaaaaaaattgataaatatcattgtagaactgtgttttgcagaaattattaattggactctgtgttatattagatgacaaaataaattcttattttttaaaatagtacaaaataatacttaaactaatttttgtcaaaataaaacttaataataacattatctcctgcgaaaagttattttcaagttggttttattaaaaaattatcgaagattgaactcaaggtactactttatactattttaaaaaatagaagatccaatttatcatttaagagtaattactgatgattgaattctggcttgttaaatgttacatgacatgatacacattggatccatatcagatcaagaactaatgaaaacaataacaaagtaaataaaatgaaagaaacacaagaaatacgaggttcgaacaaatgtagtgtctgtcacctgtctactcctcggccagaatagcctcaagggcacccattcgcaccgggtaccccttggggcccaaacccaaatgtcaaagttgcactctttatacccttgtaaataagggttcatatcccatatgagactctttccacttcacacacactatgacacttacatatttttcttaaaatattcataaactttccaacaggaactttatatgagctgatcaatagagttacaacaatattgtacaaattgttacacacaaactcgagaagttgcatcgaatgcaagttctccctatttgcaatcttcgtaaactctctttcgcaaccacattctcaatctctctcggatactaattgtcataacagacaattagttatgtctgttgacccctaaccgtatacttagttcgcttttaaagcgaactaaataattgacattcagatacaatactaattttaaggagatactacatcattgttaacatttcgatgtcttatttcataatcattactatgaatgtcataaggcgatgcaaagtggtctaagttttcgggatttatttcataagtcggcctctctccctctccttcttcttcaaatctctgatacgggtgattcttaatgcgagatcctgtagagcttccttctgtgctagttgtggcaaagtcatcaccagttcgaattgactcggtcatcaaagattctgatgatgaagttgctgcatcactaacaaggagtggagttgtagattgtgaatgcttggctttaactcttctctgccaccccattagtgattttctcacactatcggttattacagtttttttgaaccgcgaacccatctgagttatgataacatagagcgggaatgtcacgaagctgcaccagaactgcgatatcaccctgcgaaaatgcaatgaaaactattgtaagaagaaacttaaacagcaatggagaacaagaaaatgagaaatgtatgtttgtttttatacccgaatgacaagcgaaccacaataaattttcggttgtccatgaaacaagaaggctctctaatttcccactaaaagaaaaaaccaaaccaaaagaaaaagggtattgtaaatggtgttgttaattactaatagaagaaaattatagcaaaacttttcgggttttgtttttcttacaagggaccaaatgaaagtagccatttcaaatgcattctgcataaggacatgaagaagattagttgcgaaatagtgtttcgaaaatactaaagtgaatgatagtgagttacttctactaacctgaaatgatattagttgtatacagtgcaaaagaagcttaggccttttaaaccaaaataactcatcccttagcttaaactggtgattttccatgtatggacaccgatccatgatttcgacagctaactttaccaccactcggtgaagtttagtaccgatgagcaagatcaactacaagattacatttcgggaaaaacaagaaaagaaaaagaaagaaacattttgcagggttaagtatacatattaatgtaagataagtaaaagtttcacttttgctcggtttagctaagcctcgacttttacttataagaaaaatggaaaaagagatgaaaggaaatgacttacaatggcaggaaagaaagaaagccaaaaataaatattgcttcctgaatcaagtaacacaatttatgctattataactcaaaaaactgaatgtaacaaattataaagatgggaaataagttactagttaccatgaaaatctagaaagatgcagaaaatggtgtagatccatagaggaatactgcaaaagagggaattcaattatatctttggctgaaaaaacaaagaaagggaagggaaatgaaattacctgatgccaacaatgtcgcgaaattcttcctccatgctcctaagcatataattatgaaaatcgtatgataaaggaagttgatggttctgcaatgaggattaagaataatcaagcaatcaacactagcaatggaaaaaagataagttatgaagttccagcaatgaaacatacagtgatgaagcctaatcgcaaagccatgtaatcagatcggttaatagagctccagaactggcgactgaaacaaagctgcaacattgaataaacacaacagctcttgagcctgttcttcactaatatgcttgtctttttcgtgtttgagatagcttgaatatctaattaaaaatgtacaaattcttaagtaaaatcagagaaagagtggacatgagaataccagccaaaccagaatcttgtgttggctccatggatgagatgtatgatgatcaatgaaagtagacattcttttcatttttgcaccttttggccgagcttctggagcatctgagttcagtaatcgatcaatcaatcttacactgaagaccctataacaagctttattacgtggaacttgaacctcctaaagattaactaaacaaactaacttattctttactcggaaagttagttgaacagttagacggttatgttctataaaggtacgtgcttctcctgtgaaaaagtctgaaggcttcatcgccttcttcccgctcgagctcacagacctctctgagtcaattccaaatgattgaagctagagtaagggatagtccacctcatcgccccgaagagcaaggggctttcctatatgtcaggcggggaatcctcattgtgtactacctagccgatcaacagagtatatctagtgtctcttaatgcaactaggaagggtttcgtttataacttgagaacacaagagctagtgtgagttctttgagattaagcactttggtgtactcgggtaaatgggagtgagctgagattgttctttcatagaagattgtacaagttcagattgatcatagtggatttgttcattactttcatgttttacttttgttatagcttattggtcactaaccattgttgttaaatgaatcttggtgttcttaaattcaagaattacaattgacaaaaacaaaactcggctttaactagagaaaagtgtgtacctactatggtgtgagtagctagagatttggcttcattttcccacactctccagctataaatctgcattataaacttaattctcaattaagaacacacaatgcaagcattattacatggtatgaacttgaagaagacgcgaatatcttaatctcaaccttaagcatggctaaagcaatggccgcaaagctatataaaacatgtgtaatgccaagaacaaacatcgaacgatgaagctgttcgagactttcgtatgaagcaaacgattcatgaccctagtaacaaccaacaaaaaacaacaaaccagttattgacaagtttaagatttcttaatttctaataaatgattttcatgattatataaaggattaata

SEQ ID NO: 190672 - DNA, 1972 bp, Cannabis indica
atagcaaatcatataaccatgattcaaactttgataacttatgatttcatagcaagaacttgttatctaatattcaatttttgttttcaattgttaactgtcagttagttggagctccaaagattttcacaaaagatgtgtcaattgtgaactattacaaggatgttcctgatagctgttgggtaagagacattgatttgaccccatcaagcagcattgcccaatcatctgctctatgcttggagattccaactaatcgccgccttcccgattttcgggatggttttgtttactacaaagaagttgaaggccaattctccattgacaaaggctcacctttctcttcttcaagttcaaaacttgttccaattgttgttccaccaattgacttgccatacaagattttgttcaagatcaactcattggttcaacatggatgtcttccgggtgagttacttgatgaaaagttttataagttagttgatccaagtagaatcaagattgactacatagagtctgcacttgacaaactctatcagttaaatggttgctgctacgatccactgagatggcttaaacgccaatacatgaactacaggaatggtgggcaagttcccaaattgcccaccattgctgtagatgatggacttgtgtatgtacacagagtccaaatcacaccttcgagagtttacttctgtggccctgaagtaaatctctcgaatcgtgtgttgagaaattatgccaatgatcttgacaactttcttcgtttgtcttttgttgatgaggattttagtagaatgagctcagtggatttgtgtgttacaagcaaaaagtctagaaatgttggaagaaagacaagagtttatgatagaattctttctgttttgagtgatgggattgttattggtgaaaagaggtttgagtttcttggcttctcatcaagtcagttgcgcgataactcggtttggatgtttgcttcaagagaaggacttaatgctgatgacattaggagatggatgggggacttttcgagcattagaaatgtggcgaaatatgctgcaagacttggccaatcttttggttcttcaagggaaactttgagtgttggttgtgatgaaattgagttgattcctgatattgaaatcaaaacaggtgaaaacaagtactgtttctctgatgggattgggaaaatatctgaagattttgctgatcaagtagccaaaaaatgtggcctcaataggttcactccttcagcatttcaaattcggtttggtgggaataaaggtgttgttgctattgatcctaaatcttcaatgaaactttcactaagaaatagtatgtgcaaatacaaatcagagaacaaaaagctagatgttttggcatggagtaagtaccaaccatgtttcttaaatcgccaactgattacacttctttcaactcttggagtagaagatcatgtctttgacaagaagcaaaaggaggcagtgagtcgccttgattcaattttaacagattcaataagagcacaagaggagttggagatggttgcaccaggcgaaatcacaagcattctaaaggaaatgcttatgtgtggttacaaaccagatgaagagccttttctatcaatgatgttgcagactattcatgcttctaaattgctcgaaattcgaaccaaaacaaggatacacatcccgaatggaagagctctcatgggatgtttggatgaaactgggacacttgaatatggtcaagtgtttgtgcagtgttcaacaaggcaagtagtagtcttcaacaacaacaattcctccattgtaactacctttgttgttggaaaaaaggttgttgtggccaagaatccttgccttcatccgggcgatattcgggttcttcaagcagtggatgtgcctgaacttcatcacatggttgattgtgttgttttccctcaaaaaggagaaaggtaaaaaaaaaaaaa

SEQ ID NO: 190673 - DNA, 1943 bp, Cannabis indica
tatcacaggcaaacatattattgcgtgatcttttgaatgtgcgcatcaagcttgttactattgatcaatatcataattgcttggtttgttttttcagtttaatgaagaagcacgttcaccatttgtaaagaagtacaaaaccatcattcacccaggagaggtatgcattaaaaggttaaacaaagcgtaaattatacttgataacatagtttaggtttgatggggtcctgggactgtttacattcttgtgtgaattgcatgctcaagctcaatgttttagctttccaaggtcagtggacaccactgattgtacttactgatggttgatgcagagttgagggtaaataaaattttcagagttccactattatttgtaatttgtatcatataggcctgatgattctctgtctctgatttgcttttaccaattgaaaaactgataattaatgtgttttagttgcacactgttatttgatcattcttctaaggtctaataacactttctctttcaggtgaacagaattagggaacttccgcaaaacactaagataatagctacacacactgacagtcctgatgtaagacacccaacttttctttcctaaataaattgatctgcgctaccctattcttcttctttgttttttttcctttgtttggattttgactttagaatatatccaaacaggtttttatttgggatgttgaagcgcaacctaatcgacatgctgtgtttggtgctacaaactctcgtccagatttggtttgttaccctataaactttttcttataactgtacacctttttaaatttgtaaatatagttaatatagttattgttgtaaatcatattatttactaactatattttgtacaattcttttaagtggtacaattggatttagcgctatacaaactgctcctagaaatttattatctttactagcttttagcaacttatctttttggcatgaaatgaagcaactgaatttgcatatgttctgcccaatgttgagtggtattatgtggtggatagtggattctagttaaatagtgaaaagggaagaaattaatgatattggttggagttagggcctgttgaaaacagtctcaagccagctttaggaaattcaattatttaaagtcatgagtgcttaaggttttggcaacagttggtggtttattgaattacactgatctctcttttaaatgtatcaatgttgaaaataataagaagtatttgattaatttcccacattatattttaagataggtaatctcttcgcgtatattataagatatgaaagttcttcatgtgccttgctggtggttatatagtttattgattcatttgtgatttccctaatttcagattttaactggacatcaagataatgctgaatttgcccttgcaatgtgtccaactgagccatatgttctctctggaggttggctgtctatcctttcctttcttacattttttgtttgtaaaattaatttttccctttaatacatgatataatgtactgaaattcccatcaagtttacatgtgcagtttacgagttctgtttaacattttatgtcaaaaattagattttaggtcatctgggcacacctaaaatattcggatttactttcaagttttcttctcctaaaaataattatggctgcaggtaaagacaagtctgttgtgctgtggagtattcaagaccatatatcaactgcagccactggatctggtggatcaattattaaaaacaccaagcctggggatggtaacgaaaaagctgttgatgggcccattgttgcacctcgaggagtttactatggacatgaggatactgttgaagatgtgactttttgtccatctaggtaacttaaaagtggtgcatgtgtttcatttatatgtcaaatttatgcttgataatgtttttttttttttt

SEQ ID NO: 190674 - DNA, 1728 bp, Cannabis indica
aaaaacaaacaaacaaaaaaactcatattgaagaagcacatgtttgaaccatcaaaactctcaaatttcaatcatcaaatgaagataatcccacaatatgaatgatcaacattgttgacagcagaagctggtaagttatgttataaacattatgcatttacattatccaagaccaaaatatactccaaacccaatcattgacaatgatatatatatatatatataaaaatattttttaaagtaaaagcgtttccttgagaagatcgacaaccaaaatctcaacagcgttacttgtaaggcacacattcacattaccattcacccaaaacgccttgatgacaagtttaaagccatcatctactacaagaaactcaaccaaaagagagggaatctcagtggaatcacaatcacagtaacaactaatcaaatttgatcaaaacaaagtatcaggcacagaaacaaaagagatttatcaatatacaaatatgtatgtgtacatagattacaatattccctattattattgaacccaccaattaaacaaatcatctgagtaatctttatccgatggtatcctcagatcaaaacaattaaaacccagaaaaatatagatgcaagaagtgatttttagccttgttctgttgtggggttgaaacttgaagagaagaaaaagggtgaatgaatagacaatggaaaatggaaaatggtgaaatgggtttggtggtatatgactttgcggttgtagggcaggcagacccaagttctctctctcttctcttctctttctctttctctttctctttctctctctagctctaccatgtttataatcccaaaataccatcgtcatcaccatgcctacggagaatttctttgctgtaattttaaaaaagaaaaagaataaattagaaataaagacttgtactttacactcatagttcataccatatttattcatgttattattcacgtttaatatttttattatattacaattttttctccctgttattatttaccattcattatctcattcctgtcttaaaattcattatatttacgtacacgcgtgctaagttccaaatttctatcttcttcttctccttttatttttcaaattattcaattgaaatcataaacttatccctatttttttttttgtctgtttaatttgaactgtaagcttatcttttctgtaaaaaaaaaaaaaaaaaactgtaagcttatcttttttttttcgaccaatgaaactttcacgaggcccacatgttaaatatatagatttaaatataaaaagaaattttagttttgatttcaaaatagttgtgataaagttaaacgattatagggatgtaggacacgatagatacgtgtttacattgggaattagactttgttaaaatcaaatcatgtacaatatagaaactttgaacattcattaattcctaagtgatgactcatttcataatttcaaaagaaaaaaaaaaactgaaaaatgacttttcagttttcagtttttggtgcttcaataatcacattagtagattttgtcccttataaatgtatatatatattagttcattatacctaccaccaaacttgtgaattatatatatatgagaagttatggattctattctactataccaaacttatatactttttcctatactatacgttacgctacacatttggaatggtcacattcgatgatgactatattatcac

SEQ ID NO: 190675 - DNA, 1113 bp, Cannabis indica
ttttgttctttagctctctctctctcttctaattaacggcagagatatagcaatcaaaaataaagaccgacataacagataagggtagatgattggagcaaggtgtagcgatttaggaatttttttgcttattttattttctaagataataggataagacgaaaaagaatgtgaagatgaaaagatgatactgatcggcgataaacctccaccatcaagaatggtgggtgataaatcgtagaagtttatttatatataatattttttaatctttaatgaaaaaaattatataatttttaataatttatttattatttaaataattttaaaataatatttatgattaaaattaataaacttttgacacgtggcaattctaagaactacaaatataggtgttaaattggatacctactgactaatgagaatatcgagcttgggaactattgttataattttttgagattaaagactaagttgcattaaagtgattgttttgaggatttatgccgcaaattaatatgtgatatgtttgagaacaactaactgttaaaatgaggaacgacagacttacaagaatctcgaatatggatactattgccactatttttcaatgttagagacttatctacatcaaaatgaaatttttagagacttttaccacaatttttatttttacaattataaaaatcttgactagagaaaaaaatgtataaaaatgggtgggattacacccaacatttcaaaatacataataaaaggaccaagtgaaagagacattagttgaacatttgttctattagaaaaaaaaaaaaagacattagtttggtgatttagcataatgtatgaaataatcaaataaaaacaacatatattattgagattgacaatctgaaaatcaagtgtttgattaattgaacatggataattgacccatacgtttgatattgattcaaggtatatacccacgatgcctcagctcgccgtgttcaacaatcgcatctatgttagttcgaaaaaaaaaaacaatcacatttatgttagcttacaaatcaaaaccaccaaccttttaaaattggaaagcattaatatctttttaaatctcctattttt

SEQ ID NO: 190676 - DNA, 1000 bp, Cannabis indica
tctaaatagaaccagtttcatagcaaaataagtaataacaaataacgcatagtaactcaaaatataagataaagaaactagttacatttatcaactagttaaaaatctgagacaaagaagctgattccgtaaagcaactgaaataaaatctaaaataatgtaaaaagaaaagttgggagcggttaaaattaataaaaatcactattttggtaccttttttcggtgcataattgcgccgacaaaggtgaaatcgtgcccctaaaaatgagcaaaaaaattttgatgacctatttgcacagacaaaagttttcccacctatcactttaaccacgcgggaaatttctctctattgtttggtaacttttgtcaacgcatatatgcaccagtaaaagtgaaatttcacccttaaagacaggtaaaaaaaatttgataaccttttgctagtacatatatgcgctgatgtcggcaaaagtttttctccaacactattgacacaccataaaaattcctccccttttttagacttttattagtgtatgattgcaccggcaaaagtctatgaaccaatggaaatggttcgcgacatgaggcggtttattttcaaacttttattggcgcaacaatgtacgagtaaaatttttggctgaatgtttttgctcttcatttagctcctttatttttaccgacacatttggccaatacgctgataaaaatcgcatttcttgtaatagcattaaagtgaactttggggaaatttttgccacaatttccaaaaaaaaaccatctagaagtccgaggacgtttagtagtgtaccctacttttgaaccagcagctttcgcgccagatagtataaatgtaaaaattctcatacaaaatctgacaagattataaaatttggtgtaaaggcaaagattgtaaattttgttgaatgatctgtcgttgtttaattggtacccaaaatttgaacttactatatatatcacatcagttcgactccac

SEQ ID NO: 190677 - DNA, 3012 bp, Cannabis indica
aataataaaataaataaatagtggtctcatgcaattatgtaaaatgagtttgcacttattaaagtgaattaattaatgaacaccattttttttgtttttgttaagaaagaatgaacataacattgaaagtacagaaccagacggaactcactcctccctaatcacaatctcaccgcccactcccaaaactctcggctccgactggagtttccttctattcacagttatcctaaaacgtaagtgttctccaactcgaaactatttcaattccaaaatttgttagttgcttacattttccaccacttttcattagggtttgtccttcaatcaatagactgaaattttaattttagtttatgatagtttttatttggaagaaagtaattatttaaaggttttagatttagagcctagacttttcacccttcattttctgtttagcgagctgcgaaatttggatgaaagtttgaatttttaagtgagagtttgattggattgaagcaatttatttaggtatagagaaagattgtaatttgtaatttatgaagtgtcaaacttgagtcttgaataacttgctgtaaaaattttgagtatttagtttttacaagaatatgtattttcattctttacagagttgttggtaatgtttgttggtttttatagtttattaagggttttgggggtttatctgttttccagatggaagaagctcctcttagtagtgagcaagttcttgatccagattgcaaagaggttcagatggatggagatgatttaactttaacagcagaattagagggtcaaaatggtgtttctgagggaaggaaagaatttgttgcacctgctcttggaatggagtttgagtcatatgaagatgcttatagttattataattgttatgccaaagaagtgggctttcgggttagagtgaagaattcgtggtttaagcggaatagtagagaaaagtatggtgctgttctttgttgcagcagccagggtttcaagagaattaaagatgtaaatcgactgagaaaggaaacgagaactggctgtccggctatgataaggatgcgtttagtggataccaaaaggtggaggatacttgaggttactcttgaacacaaccacttattaggtagtaaggtctacaagtcaattaagaagatgggtaatggagttaagaggaattgccaaccgagtaatgatgcagatgtaagaacaatcaagttgtacaaagcacttgtgatagattccgggggtaatggaacttctaatccaatagcaagagaccccaccggcatgtttcctgatcatcccaatcagttgaacattagaagaggcgacacacaggccctttacaactatctctgtcgtatgcaattgactaatccaaacttcttctacttgatggatctcaatgaggaagggcgtttaaggaatgtcttctggattgatgcaaggtctagagctgcatgtggttattttagtgatgttatttacttggacaacacatacatgtctagcaaatttgagattccactcgtggcttttgttggaataaatcaccatggccagtcagtgttgctaggctgtggcttgctagcaggtgagactacagagtcatatatttggttgtttaaggcgtggcttacttgtacattaggacattctccccaaaccattattactgataggtgtaaaattttgtcaagtgtgattgccgaggtgtttccaagatgtcaacaccgatttagtttatcgctgatcatgaaaaaggttccagaaaaattgggaggcttgtgcaattatgatgctattagaaaggcattagtgaaagcagtttatgaatctatgaaggtaattgaatttgaagcagcatggggatttatggtccagcgttttggaattggtgatcacgagtggcttcgctctttatatgaagacagagttcaatgggctctggtttatctgaaggatacatcgtttgctggaatggcagctgcacgcccaaatgaggcactcaatccatttttcgataaatatgtgcacaaacagacacccttaaaagagtttcttgataagtatgaattggctctgcaaaaaagacacaaggaagaagcccttgcagatatagaatcaagaagctcaaaccccatattgaaaacaagatgttcttttgagttgcagctttcaaaagcttacacaagagaagtttttaagaagttccaatacgaagtggaagagatgtattcttgtttcagcacgacacagctgcatgtagacggcccaattgttatattcttagtgaaagagcgtgttgtgagcgagggaaacagaagagagataaaggattatgaagttctgtacaacagaacagcaggcgaggttcgatgcatctgcagttgtttcaacttttatggttatctttgccggcattccctatgtgtgcttaattttaatggtgtagaggagattccttctaaatacatcctctcaagatggaaaaaggattacaagcgtctccacattctagatcatggttcgaataacatcgatgtttctgatcgtgttcaatggtttaaccagatgtacaagagcgccttacaaattgtagaagagggtgcaatctctcttgaccattacaaggttgcattacaatcatttgaagagtcattgaaaagggttcataatgtaggtgtgagacttgaataagtggggtaggtttgaagttctttgtagctgaagaattatagttcataatttttaattgaggagtggtttgctccaattctctgtgaataagttttaactgttccatatgtaagtaaactgtggaagctttttagctttttcctatgaaaataatttgattagaaaataatgatagatgctttttgggctaatttgtatgtagtagtgtttgtcgttgaggtgagtgtgaaaagtgaacaccattggttgaaaacttaaaaagaaacattgatcattgttggttgtgttttgacttttatt

SEQ ID NO: 190678 - DNA, 3139 bp, Cannabis indica
atgtattatgtacaaatattatgcaacatgtgaaatgatttattatttgtaattatatgcatatgatttgaaagagctgtacgtatacatacaaccaagaatgatgatattaaaattaatacattaattcaagaataatatacattaatacatatatatattgaggtacgtactatccacattatattgtcatgtgctggaacaacaagcatgcatgtggtcaacttagctaatttataatttgtaaatgaatttagtgtgagagatataaattgtatattattgttaagcttagcacatgatatatattaaacatataataatccgaatgattagtttgtgttagaaatatatacgtgacgaaataagtatctttgaaatataattttctactaactttttagttagcacatatcgtatatatacgtcacaattatttcaaatttttaacatgtgcaatgtttacttaaaaaaatattaatttttaatctgaaaataagactagaaaagtattaaagaaaaggatactcgtatagacattattagagttagtcttatattgttaatgtgtggaaataaaatatcttataaattgactacttctctcattgtcaattagttttaattaagataaaatctcatgtatcttattctaaagttttagaactctgaaaaaaatgaaacaatttagaccaattagtctatgcaactttctctataaggtggtggcaacaaagatcatctctaataggttacgctctataatggatgttttggtttcccctttgtcagaggctttcattccaggaagatggattaaataatctactatcttaacccaagaaattattcacaagattcaaaagaagaaagctaggaaaaggaaatcttaatggcgatcaagttagatatgttcaagaccttatggtaagatagaatgaccttttagccatagagttttcttagctaataggtttgatgagagaagtttcaaccttattatagcttatataaggagtgcctcttatttggttttactcaatgggagtctgcttaagaaaatagtccaggggatccactatctcttatattatctattccttttatgttaggaagttctttctaagctcattcaaagagctgaaatgagtgggacgatacatggggttaaaatagcgcactcaacccccctatttctcatcttatatttgccgacaacactatacagccaatgaaggggaagctaaagcattcattcaatgcttgtctctttacgagaagtggtttgtgcaggagtgtagcaagtcaaaatccagcgttctctttttagtaatatgagtaattgtcaaaagcaatctttattgaaatgcttggaaatcaaacaatccactggagaagaacaacatttgggcaatccgtttgtttttaaaaggaggaaaaaacacaactatcaaaaactcaaggataacatgtctaaacgtctggaaggatggaaattgaagttgttgtcttatgctggtagactcactcttataaaatcagtggtgtcttctctgccgatttatgttatgtctaccaatatgatccctcttttaatttgtcacagtttggatgccatgattagaaaattttggtcgacaggaaacatggacaagggtaggttcatgtcttttaaatcttgggattgtatattgtcaaccaaaaactcatgggggtttgggcttaaggaggtttgaagtggagcataagtctaatgattctggtatttggaagggcattcttaactctagagatattattctcaaatggtcaatttccttggatgccggtggaaattccattgactgttagaaacaaccttaattggatcccttagttgaagattaaggactttcaagagttaatgaggggtttaagaggtagtagttttacaacgaaaacagtggtagatatctcaattaacaattgttggaataaggagatggtcatacagatcttttgaaccttccatggccaacaaagtcttggaaattctaagaatcctaactcctttcggtgatcagctggtttggaagcataggaaaaatggacagtttaccgtcaaggatgctcattacgtggatcaagttttgagattcaagtcgaagcaagagatttggaaatggttatggaaccttttaattcatcctaaggtgactgttatgttgtggaggatcctgaatgaagctcttcctaccaggttaaggcttccttttttagaagaaaaagagtgtcttttgtgtggcaatatggagaaaagttgtgttcaccttttcaaagaatgtagttttgtgaaagttgtctggttttctggccctttcctaagtcggttagatgttattccaagagattctttgtctcaggttttagaacctcttatactcatttttccaaacaccagtggatatatggtgttgctgtatgttggttgtgttgctttagaagtttgacagcaaaggaacactctcagactggaaagggggggggactgctgatctaagtctggtatcctttaaaattggagtctcttttactgaatttagtgcgttgcttcaatccccgactccaagattagataaaaattcagagagaatagtcgggcctagcagggagggtgttgatattgttatttgcactgatgcatcgtggaaggccggagttctgacatcgcagcagaaatgaccaatcttgctgatggcagttgggcgcacttttcagctcaaataaaagcatcttctgggttggaggctgaaacccgagcaattcaaatggctctctcttgggcgctccattcttcttggaaggaaattcacatcttctctgattctcaagtagtgatcaattttctggctcaaaacagagaagttctctgagttggagcttccggaatgtgtctttatcggttttagatttagttaagaagtttaatgtctgtaagttttctttcttattatatcgtaatattttaaatttttttgcggatgaccttgctagaagagctagaatctctagcctagaagtagatgcgggtttgtttcaaggggagaaaatttctcctataattcccattgtccttcgttcttagtgttaatgaactttc

SEQ ID NO: 190679 - DNA, 3087 bp, Cannabis indica
attttaattaatttaaaattttactcctaaatgtcaccattacatttcaattaatttaaaatttaaatgaattttttaacgaaaacttttatatataactcactatttatatcataatattttctcataattatacttaaattcaagaagggaaaaacaataaacataacatagtgtgattttattattagtaaaatatgtgaaaaataatattaatataaaaaataaaaaagaaatcttaataataagaatttaattaattgatgggtttttttaactgaaaataaaattttaataaatcttgatataattactaattttcttaaaaatatctaatttaattttattggccttgttcaagcttcacctaaggttgaaacttgagacgccctgcacatatttatgcaatattactatgtaattatttcaataatgaatgaaattacttgaccattgcccaaaaggaactacatgtaaaatatacactgcctttttatttacctctttgtttgtttgcgttgtttaacaacatttatagaagattgcatgttgaatgaaagaaccaaagtagaagaaaagccccagctattaagttggctctttcctatattattattcatttatagtttttatctttaaccttaaaaccagattgtccgattacccattaaagcaactaaaaagaaagctgaaaacaatgaagaaatactgatctcccaatggaatgattcatcaagtttcattgttacttctgggtcctctactcactgtagggtgccttgtaaacttgatttccttgtttcactgtccttataaaatgaaacttaacatgttcaccttaccaaattgaatatgatattcgcatgaacagtactgaaaaccatggaaattacacgtacaggcaggtttttctatttcttcgctgctgcgctctccaaattcatgctctgaagattcaacaacaaatcttccgaattcaagaaaactttgttgccggagttggagatggtatgtgcaatttctctagcagcttctatcttccttagtgtgataaatgctggattgtttgaaatggcttcaccaatcagcttggcactcgtggcttcaccctggtagaataatcgtgacaaagaaatgaaagagtcaagcacattgcttttggagaaaagtaagtgttctataaacaaagaaatcggagagaagaatgcccatattcagaaacgctctagaaagctgaaagcccttgaccaatatatccaagtaggaaaagaaaagtgggtatcagttaagatgtgataaactgacctctgctctgataatagcacttttcttgtcttgttcagctttttctacaacaaatttagctctctcagcttcttgtgcagctacttgtttagcttcaattgcagcagtaaattcctttccaaaagttaggccagtgattgaaacatcatccaacgccatgttgaaattggctgccctttcagttaaaaccttccgtatttcccggctaacagcctatacaatcaacaaaatatgcatttaaccatatatcagagcactctaaaagcctcaaagcttagcttccatgaatcaattggctgataggagctattatcaagtaacacaatgttttgcaccggatcaatgtcatgatcgttttatcatctttattaataaactgatgcgtacctctctctgagtaatgagctggctagcattatattgtgcaacaacagttttcaaagtttcatgaatgattgaaggcagcactcgctcattgtagttttctccaagagttcgatacactgtaggcaatcggtctgcgataggacgcgtaagaacacgaagaccaatttttacctgtacgaaattaatcaaaaagccttattttcttgcacacaaaaaataacataagaaaaaaaattacaacaattgtcattaatattttgtctgtgtgttaaaatttagaaacaaataaaaagaacaaacaaaattgaaaacagaaaccagtcttatatacagtgaactggaggggacagtgcttgctgatgggcagtgagagccacattcaaaaagttaccagagtaactatacgcattaggtaagcaatgcacatttgtacactcattcttggtcattaattagatatattattgttttattccagtgcttgctgatgaacaatgagagccacactcaaaaaggtaccagagtaataactacgcacattaggtaagtttacaattgtacactcattcttgtagataaattattgttttattctgtaaaatttgtatagatttgatgtgttatttgtaatgagcactattgagcgtaaagtgaaaaattgtacatatttgagcgaagtactgaaactaagtgaacaagtcgagaaacaaacaaaagtgaaaaaaatagtttgtggcactatagcgccgctcctgggatttaaaacttcggaaaatctcgcatggcgctatagccccgaccgaacaattcaatatctatcgtatttttaaaatgtcatattttgcatcttttttgagctataaaagaacattataacttcgacttttagatgactagagatagatatagaaagcaacctagagatcagaaaacttattgaagatgaagatcaagggaaagagatttcaaggttaagcattatctactttcattagagtccgtttctttttctttcttattcttctgtttagttttaattatgaacataatgaattgttttgattatgattgtcattatgaacaaaacatactttctagagtgagagtgttgatgaaattaatttaaattatgaattaaagtttttagattattctcatatagcattccaaatttctacattatctaatcaagtggctgccctacttgattaaaagaatacatcagttgtagagaatgttgttacatctacatcacaagaacttgagatgagtataaaacatgtacaatacatggctaatagaccttataaataacaattaccggggtgctccaatgcctaactactatcatccaggattgaaaacccacgagaacttttctttatggtaacatta

SEQ ID NO: 190680 - DNA, 3320 bp, Cannabis indica
agagaaaggatagatttatatttcatatatatagatatttgtaataatatttataagagtattgtgtaccatatgttgtaaaattatataaatatatatataaatcaatttcttcctagttttttctaagaagaaaaaggttgtacgttatgtatagtcaaaaaaacatgagatgtaaattatattctcattttcaaatgaaccgtacacctaggcatgaccttccctttccattcccacacgagcgagccattgaaatttcaacacattttcatactgacaaagatgtttaacaaaccaatccacaaaatattagatcaaaaaaaagaaaaagtactaatacaattacatttggtcaaacattcataataacattcccaattcccatctttatatatatcttcatccacaagaaaacatctttgaatttacaatagaaacttcacttgagagatcaatacttacatatttatatcccaaaaaacacttgaacaaccaaaaaactttccaaaacaaaattgattaggccaaaattatggctcaacctgcacccccattaatagcctacacaacagtcacaccagcagtccctgaatggttaaacaaaggcgataacgcgtggcagttgacggcggcaacgctcgtggggctgcagagtatgccggggctagtggtcatctacgcaagcatagtcaagaaaaaatgggctgtgaactcagctttcatggctctctatgcctttgcagcagtcctaatatgttgggtacttttcgcatacagaatggcctttggtgacgagcttcttcccttttggggaaaaggggctccagctctaggccaaaagtacctaatctctcgagccaaaatccccgaaagcaatgttcaacccttttacccaatggcttcattagtctattttcaattcactttcgcagccattactttaattttattagctggttctgttcttggtagaatgaacatcaaagcttggatggcttttgttcctctttggttggttttctcttataccgttggtgctttcagtttatggggtggtgggtttctttaccattggggtgtaattgattactcaggtggctatgtcatccacctcgcctcaggcatctccggtttcaccgcagcttattgggtaatattttgtcccacatcggttgtgtatatgtaaattttaggatttatattaacttctctgtcttcactctaaagaacaattggtattttgattcattaggttgggccgaggctgaagagtgatagggaaaggtttccgcccaacaacgtgctgctgatgttggtgggcgcggggctgttgtggatggggtggtcggggttcaacggcggagcgccttacgcggccaacataagcgcttcggtggcggtgttgaacactaatatttgtgcagccaccagtcttcttgtgtggactactcttgatgttatttttttcgggaaaccgtcggtgatcggcgccgtgcagggaatgatgaccggacttgcttgtattactcccggagcaggtaacaatttgttattttttttttcaaacatttcattaattaaagatttgattaattgaagggtccctttcttttttattttttattttagcacttgttcaacaccggggccaagtaatataatattaaatatgatgcataataatgcataatgtgatgttataaactaatcaatatctagtttactatagagtattaacaacaaaattgagattatttttatgtttattgttgacttaatttcagatgaaaataatatttagtaaaaataatagtaataaataaaaggctaattaagatttttactcctaaattttaacgtatactaaatcatgtcccttaaatttttttggccattaaaaattttccttgaactattaagattgttagatttaagaatttttgtttaatatcattcaattttactaatttagtaattgtttatgtactaaaccatcctccccagactttaatatctaccaaatcatgtcacttgaatcttgacatatactagataatctcccctgaattttcatccatgttagattttttcaactaaaattagacaaaagtccttaaatacaacaatctcaatagttcaagaagcatttttaacaaccttaaaaattcacatctcaaatttcagaagtaaaaatcctaatttttctaattaaaattagtttagtaattaataattgtattgtatgtaggtttggttcagtcgtgggcggctatagtgatgggaatactatcaggtagtgttccatgggtgtccatgatggtgcttcataaaaagtctaccctattacaaaaggtgagtcttctcttttcttttttcttacattaataataacacaaaaatgtgtgatgaaatagatacattttttttcatttaatcacatcaaatataacattttatttaattatccgaactcaattattgaattaaaattaaaaaactactaaatttaatataaaccccgcaaattcttcgcacatgttaaacatccactataaaaaataactacttttagtaaaaaaattttaattgcaatataaattttttgtgactaaatgtgacttttattcgtaataaaatattacttgtgactaaaatatagtatttaattacaaattttcattaatttagttttagtcacaacaggtattgtgactaaaaacacatttactcacaacgaattgtaatttttatgactaatacacagaccttttagttacaacataaaaacgatattttataattagtcataacttttttacttttagtcataattaaaattttttatagtgatggtttttattttgtcttaaaaatgatatatccaccatttaattgtcatggtttgcaggtgtgatagaataactaggaagaatagatattatgttatgtaattaacatgaaacaaatataggaagggttatatagaatggcatgagcatggccccctattttgttggtttgttcataccacttttattaactctaaagatgttaggtataagattattaattaatgtgggtccatataaacatgggaaatgggaatagaccggcatcgaattattagtgatccataaataagctttctttttagatgaattccttatttgttgtgttcttatttccctttaaattttaaaatataatcaatacttattaattaggtggtgtttagtttaagagaatagtaatagtaatagtaatagtaatggcattataatagaataaaaatagtaataaaagaattaaattataat

SEQ ID NO: 190681 - DNA, 776 bp, Cannabis indica
ttttatttttatttattaattatatgtttgaaattaggagagaaaaaacatatatgcttgtgatggtggaataataaaaagcgtgatgttctatggtgaggttgtgaaaggaaaaaaaagagggtatggtttccgattctttgcggtcagcttctcctttggtggagtttgacgtaaggtttttagtatctatggcctattgttagataatataatataataactctggttcgttggcttagcagagatcttttccagcaaggtaactattgagtgtgtattgccaactgccattgataaattatatgatccatatatactatcatatttcttatgatggtttctatttttagattctaaataaagaaaatgtattgtcatttgttcttcctttccttgttgcttccatttttcttctactatatattatacagatactgttattagcttctttaatggagagcgaacacaactgtgacactatatactcatgaattcatttgttactattttctttatttaccagtttgtcgttaatttggtcacttttgatatggttagatagttcacaccagtaactggtctggattccaaccatttaagcgccatctttttattatggctacagtccatccattatgtatatatttatatagtttagtgggtgaaatcaggcatcttctacagcttgtaccagtgctggcttatgcttttgaagataagcctacttgacaatgttccaactaatagcacagatatctatgactatcaaacca

SEQ ID NO: 190682 - DNA, 3903 bp, Cannabis indica
ctatgtgttgctttaaaagcccaaattaatagtccttacaccgccatgcatcactgattcgaatctacagttctcatttccagttcagccgcgagaattcgcagaaaaacttttcccgcgaaaatataatcgtcaagcgctacgcttcttcgtagttcctccatcctcaaaattcgctagtcgatcctgagtcatctggcactggttcttatttctttacaggcttcaatcgccaacaatttgttcaagttgatctctctgtgagttctctatcactttctctttaatttttcattttgtgtaattgatttgatttcgaattttgcttcccttttttcgtcgcagctgaataaaaaaaatcgctggcttcgttacggcattctttcttgatctcttgcctgattgatctctctgattctgaagacaagataaattggaaaatttcaggtaatggaagattgtgttcattctggtgtaaaatatttgcttaattttcagatagtgtgtctttagttttggtgtgaagaatcagattatggttaacttttcggttagtctaactaaagtgtaagagataattcatgtgtttggttgctgaaaatatttaggaaaacggaaatgcatttaaatccctgaagcataaaatattctttactgtttagggtgataaagcataatgaaatacgtagatgaacatgatcactaattaatctttccttgcgatttcaagacatgccatcattaaacttgaaattactttgtttttcttagcttaataaagtttatttgactgccagtattgctttttttctttttttggtacttttttgacttatctagataagaaacttttgttgcaaaccgatacatacaaaagcacttactgaaactcagaaagatcaatggaatcttgattttttaaattcaatttcatgattgcacttttgagaagaattccggtttatatcttgtctggtttcagttttttttttcttcttgcttttaacaccaccagattgatgtttgatgaatacttctatgttatagttatggaatatttttcaaattgatgaatttttccaccttcatatgctaagtattatgttgaatgaaccaattctgtatcttctgttgatgtattttcctatgtggaatatcattgtttgtttaatgatattatacttgattatatacactttgtcattgatacacttagtttggcggagtgttgttttgattctctttctggtgaagctaccctgcttttgtatgccacagaatgccatggaattgttggtaatctttaaaggctgaaatgagatgcaatgcgtgctggcgagagctggaagggcgagccgtttccaccacatgtggtcattttttatgtatgcatagtgaactctgcctcagtgttacaagtaaatcgtttttccttgtggaaacttgggttcaatattaatttataaaagtatgctttctgaaaggcacagaagatgccagcaaaattcttagcaacgatggagcatgtcctatttgtgatcaagtgctctctaagaggtaaaagagtagcaatgatgatgtttaagtttttctttttcttgtcttaattgaaatgtttcagtctgtataattctagatgatttttttttggacctcaaaggttgccaagtaaagctaaatatttaagaatttagctactatacatattaggaaaattcctctgttttaatggcattcagatgctaaaatagatgtcacttgcactatgtttcctcaactgcattcagcagttctgaaatccttatgaacttgactaattcttgatttactttggcagccttatgaaagctgtggacgtcagtccacctgatgaatgggtaaacgtaagtattattcctttcaaagcgacatgcacttgagtggatttttttgttacttatgcatgcttaagcttgttttctgctcgactcttaactcacttcttatgttaactggctatgctattaatctttggaacttatatgttgcagatggctctcgcgggattgaatcctcagatatgtatcctttctgtagtctgataatgcttattttttttttttccaaaagaattaatatattgaaggcattgctacaaagtgctctccttggatagaacagtgagaaagtatatggtgcatgtcttatataacttctttgtctggaagtaatcaaaccaattgaggtttgttgtccggcttgagtacagtttttttcaagaggattctggggaacattccttgaccaatcctagtgatgaaggctacatacaaaagcataatgttctatgttggacaaagggacttggaaatgcagtacaagatgaacagattagttgctcaatgcaggcaaaaatgcgaagcaatgcaggaaaaatttacagaaaaactggagcaggtacacactgcataccagaaaatggtaaaaaggtgccaaatgctggagcaagagaatgagagcttatctaaagacaagcaggagctccaggataaatttgcagaaaaatcccggtatgtatttaacatttcttgagggtcaacgcttccattttgaaaaccttgacgtttgagttccattaaactgatcttctcagacagaagaggaaattggatgaactgtatgatcaattaagaagtgagtacgagtctatgaaaagatctgccatccaacctgcaaacaacttttattcaagaaacgagcctgatttgttttccaacccaacaaacattggaagcaacagagaaggtccgcgaagaggtaattcttttctcttcaaagttacagaagacttcctaagacctgacctaatgtccaagtttacaaaattactatttaacagactcaagtgcatgctgagaagggaaagaaacattactgtagaaactccttcaaatttaaaagcttatagttttggcttgttaacactgtcttgacactaaactaagtaccctgtttttgcttaaatatttccaaaaccatttgacttatttgttgcagatcggcgggttatgcctgaaactccagggcctcgagaggatgtatggacagcacggcagaatagttcaaactctggtggtccctttgatatctctgttggttcaccagcaaaacaaactggtatgcccgtcgatggtggaaacagaagacccggtgctcattctatatttggaactggaactggaagtggaacaggaaacccctcaatgactttgaggaacttgatactctcacctatcaagaggcctgaactctctcgtaacagagcacatttgttcacgtaagccacaaacttaattctgcttacttggtttgaccaactcaatttctaaatcttcatgacctccttttttcaggttgtaggatcaaggttgaaggtttactgtctactagagtaaccaactactttaagaacttttattcatcctctttgtatgtatccttttttcatgtggaaaataactcgctacctttcttcttcccaatgagaattgtgttgaaaagggcagattgcagaaactctaatcagtagttttgtttttggtgaactacgatatggcggcttatattctcatagatatttgaataatgataatagtctgatccatcgtttattattacttcagcatataaaggttgtttgtgggaatgcctgagtgataattactcattactgcttaatcattaaacgcagttgagttttagtaacttgaaaacgagttcaatagttgctggttgctgcctagttcatgaaagaaagctctgtaatcgtattcttctatgattgctgttaataaatagtttattgccttctgtgattctgatcattttgtcaaaaaaaaaaaaaaaaaaaagaaaaataagtca

SEQ ID NO: 190683 - DNA, 3987 bp, Cannabis indica
aaatcttaattagcctttattattcacttgctattgttctactgtttctgttttccattttgcttggataagtccagaatcagctagagaataatagaatctatgatcctgttttactgaatagaatctatgaaaaagaaggaaaactaaaatgatacaaatataatcctaatcattagtgcaagattaggtggaggttaatgggagaagaaataatcatatgatacccacaccctaactataactgtaagatgatatttaaattaatcaaatgaaatggtgatacatacatatgtaaagatatgtcatgacaaggcttaatacaaaatcagaaggaaaacccatgtaagccaaacaccattcaaacatcataaatgattttccatactattactaccatttttgttatctaattttcccacctgcatcttttgcaggaagggttccaaacaccatgtcccataaaggtgaagtgatcccaaatcccacagttcgagctttaaagtgatgcctcaagtgatatctctggtaaagagagaaattggtgtgaggcacaaattttactgcagaaatagtaacaacatagatgtagaaataataagagtttcaattgttaccttcaaactttgtgtcattcccgttaatggcttcccgtgatgtaagtagtagtgagtaacatcatacataacatatcctaataaaatccctccgaacaatgctggagcaactgatggtgatgatgaaagtctaacaatggtccaaaactagagggaaaaaatcaggactaaatcagaagcagataatgcaaatcatatacaagacagctaagataactcttaaaaattaaaaatacaagaagtgtacacaaatatacacttatgaagtgtgacaatataagctgatttcagaaattaaatctttaattcaaactagggaaacaaagtatgctatgtagcatacagaatatgtaatttcttttgaaattaaaagaagataaagcaagtgaaacttaaatcggtgttagcaacccaatgatgagaaaatgataattggattagtacaaagaacatactggcacacatagaatagctgctgccacaggagggaatacaagtcgcaatccatccatggggtgcttgtgatggcaaccatgaagaagataatgaaaaagtgtttcccctgcaaaaagttataaaatggataagacttctattggagaaggaaagatatagaagtaaccaataacattaatgtttccatatgaaaaggagaggaagctaaccagtagcttgttgtttttatgtggaaaagaaatcggtgcaaactatactccatcaatgtccaaaggaaaattccaacaaccactttttgagctgccagaggaagagtaaggcccatttgaagagacgtggtgacaagccagcacacaaccggcagccaaataagtggaatcacccaccatgctgttttggtgaggagctgtttcaagtaaacaaggcaaaagaaattattacaaagaaagaaaaagaaaactcaaattgcatatacattggaaagatatcaaaaacacgactttactaagtttcaatgcattttttaaaagaaaattcaatataacaaagttactccttgtgtaatcttttcaaatgttttaaaaagacttcctcacatgcaaacatataaactggtatgtcaaaaattgggtccttaaagtttatctcaatataatcctactgtcttcaagaaactattctcggtatttttttttattgttagacacagttcataagtgtactgggtcaaacgaatatgaaaagagcatgaataatacctcgcaaaagtcattcccgaaaaatctggggccttccttgctcactataggctgatgaacccattgatcgtaagcttctccaagatgaccaacctgtgaaaccagttatgagaaaggacaagttaactagggaattttacacattttcaaaatattgtagcaaagcaattatgacatagggaaagaaaagggtctatctctgttgccaggcacccgagtgaatataaagcatatacatgcggatatgagaaagaggacctttgtaaactatgaagcaatgtataaagaacaaaattacaggacactagacaataagtccatagtatagaaaatagaaatgagaactgacctgaaagactaaaggcttattcaaatccacagtgaacggtttattcaccatattgatgacttgatacctacttataacacaaatatcgaaagaggaaagaaaacagtaaaatataacagatgtgcaagatttcttctcataaatgcaaataatatataaaggaagcttcaaacatactgagaagaatagatcgaaagttgaaacagtttttcattctatgtttgaaataaatatatccaaattttgatggtattcaattgtttaacaagaagagcgtcatgtaaacaaaatgaggattggaaatattgtaagattctaattagccttctttatatcattgatggaaatatagaaagaccagctatggacctagggtcattaatattagtgatcaaaccacttgaggctacctgaagtagtttaggggatgattgtgtgtgtgtgaatggtgggagttctggttcccttatctttttttctttttccttttcactaggaacctcaagggtctttccaatttgattgtcttaacctgtttctcacaccatcatcatgaggacaagattaaaagagtcattgtctaagcgaataataaatttgaatactgaacccagttgatctatgctattctcttccttttgaaaatcagatagcttaatcaatttctcgttccaaaaattctcaaaaaaggtaaaaagtatatcctgtcggatactcatgatcttgcttctcacattgtaggaattaattaccaaataaataactgcataatgtcaaagaaacatagattgcacaaccaaaaaaaaaatgtccacacgactccagcacctatttggaagtagtttagctaaaggggcaagcaagtgaaccacaaaaatcatgtttaggtatcaaaattatagaccaatcatcagcattggtgttttatgtatgctcaaaaccaaaacatacataactggttttctacattgaagctcataaaaggtaaattgatgttaatccactctcatctcatatttcaaaatcagcctagtgaaagatttggttaaaggaagcagtacaattgtatcaacaaccctgactaacttgagacattaaatcgataatcaaaaaaaaaaaaaaattaatagtcactactcaacacatcatttttgtttatcaaagttgtgaattgtctaaatgaagaactttgacagaaaaaaaaaagaaaattggaaaatcgaagaaactgtcataataagcacaagcacaatgtgagatgaaattgacaaaattgtgagattcccccccaccccagatttatacattgatctgtaatatagcattgttgtttattctaaatgaagagcagattgtgagattttgtcttttaacaagattcgacattcataatcgaaatctaaatgaacaacacaaagagcacattgaatgaggttaagtttcagaaaacacataagagaggaatggcgaaaatggaagattttgaagcatctgagaataaagagaccaacctttgtggttttggtgaagaatgcggttgaatgagcgagctccttccttatgggtggagattggaggagttgggattgtgggaaagtgaatatatcccaccaatgaagctttcacaggaaaacaaaccaaaaattgtttgatatttatttatttatatatttcgaaattacagcttggcctcacgttgtctttctcagtttttatctctctctctcacgcacaatatctactacttttcttttttcttaaggaaaagtaagaaaattattgacttagaagaaaaaaaaataaaaaa

SEQ ID NO: 190684 - DNA, 1913 bp, Cannabis indica
tattttttttttcttttttcttacagttatgtaagcaaatgtctattttttttttttttattctctccttttgttcataaagttgctgtttttgcaggctctctgtgatttttctagcctttgacgtggtatttgttgttatctgcgttgtagttgcttgccttatcggcatagccgtttgctgttgtctcccatgcataattgcaatcctgtatgttgtcacagatcaggtaattaacaagacttttaattactttagttttggatatgctcatagtattctattcactaatgttcgcctgcagtttactaagcattccaatttagcactcttcttgttgtcataatccatgattgattttggtatttgagataagaatttctgtgttagcatttcacgattattgccactgtgttgttcactaagctttttgcttctgggaactgctgacaaacattacgattcgtgtagaaaaacacttataagtggggcatatttctattctcattaggccacaagcagtggatttatgtttttgtctcttctgcttctggcagttagattatatgttacatgtcacatatattggcaaggtatttgctggttacttgttataaataaactagaaagatagtaatgcatagagcatattatatacattaccaacatctacaaggattagtagaatttaaggctttttttttattggaagactacaaattcagatgatactattcagactttagtagttctaatagggcaccgtgaaccaatgtattttgtaattcataatccatgcttcactattttgatttaccatatctaacttcacatcatcttttaggaaggagcaacaaaagaagaccttgatcgattaccaaaattcatgtttcgcaaggtatctgatgttcagaaagttaatggagagatccaagaatcttttggaggagtaatgattgaatgtgaagataattcacccattgaacgtgttctttcacaagaggatgctgtaagttttcatgaaaggataacttgaatgtttgaaatatttgcttgtgtgtttgaagacaacaatttatatgccattttttacaagtattgctaatgggtattgcataccactatcaccaatatcgggtctcaattaaaatttagtattcgattttgaattacaccaataacagtatgccatatcagatggtattggatattatcttaagatgccctgaaagttatgcactttttcatcatagaacctatgatggattgttatcaccatctgtctaggtcttttaaggccgaaacattgacgttttatgcaccataacatgcaatgtagcaattttgttatcataacttcggatccagacctgtaattttcaaataatacattggaattgtgggactgtgttcgatttgttcattctagatttcttataaaacttagaaacataacatgaataagaaacaaagttactgatatattaattctttttggtgaattttaggaatgttgcatttgtctcaccgcatatgatgacggaaccaaactccgtgaacttccttgccgccaccatttccactgtgcttgtgtagacaagtggttacatatcaacgcagtatgccctctctgcaagttcaacattttgaaacccgccaacgaaagttgcgctgatgatgtatgaaaactagagtttttgttttggacactggttgtgtccttcatacctatttgtacatactgttaactcagtgagactttttgttgatttctctgcactaggaaccttttctcgtgagacaggatttggtgctatgttgcaagagcatctaattgttactcgctgtatcagcatcctttagtttttttttttttttttatttatatatatatatatatatatatatatat

SEQ ID NO: 190685 - DNA, 2807 bp, Cannabis indica
attttttttaatgatattcaaactttaattaaattatccaaacagtaaaagtaagtcaaaatttatacttattttatatttttaactatgaagttatgacccttttctatatacataagaaaataaatgagatgaattttgtaatttgtgtaggggatcaaatatatttagtaagtttgtgactttcttgaagagcaaggactcaaatgatggatcagaacaggctttgctcactgaactcaaggcacttgaagagcatcttaaggcacatgtaagaagatttacttctaaacagatatcatatatatatatatatataactggttgatattgatatttgatatttgtgtatgtcttgtgaatatgtaactgtattatattggaatggaatcagggtccatttgttgcaggtgagaaagtcagtgctgtagacttaagcttggcccctaaattgtaccatcttgatgtggctcttgatcatttcaagaagtggagtgtccctgctgagcttactaatgttatcaactacaagaaggtatgtggttcttgtgtattccattgcatttgtatctacatacatactcatttgagctagttgtgtggtgaatcataaaagcatattctagttctacccttgtgctctactttgtgtgtatgtatatatatagttcatgctttggtcctatactgttgacatggcttcttattcaatattgaaccatattctcttgactctgattccttttatgctaaaattagctattggacttttattgtgttagactatgaaaatacttaagattttacattagatatgtagaagcctattaatatgtaattgggtagctattattagatatagattgagagaatagaactttggttcaattgagagattgacactctctcgaagtgtgtatttctgagttatgctatcaccagtaccattcctaacatgtacaaacttctaattttcttctaacaaaaattttttgcttcatgttcatactttgattcgctaatttgattgcgattttattttttatagctgctattcgcgcgggaatcattcgagaaaactaaggctgaaaagaagtatataattgcaggatgggagccaaaggtgaatccatgagctttttctagaatataagaatttgaagttagaagagatatatgtaaccctctcaaatggcttcatctaaaagtggctttggtttatatgtagtcatgtcgaataataaatgtgtgcctattaatgtgttatatgcgacttgttctatttgtgagcataaataaaaaagggtgtgcttttccttctatcattttaagatgcactttctttttcttttctcattactattactagatagaatttacgtgtcaaatcacgtatacttagttatatatatgttaaaaaaatatcgtttgtaaatttaaaataaataatgttcaacagtgataatagtagaaagtatcgtagtaatttttttttttagaaaaaagtaatagattgtgtaaaatttaaagaaataaatttagattgtgtgaattttaaagaaataaaaattaaatttgttcaaatataataaaaacaaaataaatttatatgaaattaaagttaaatcaatgtcttcagtttctttaaattaaagaaaaatgaagtacaaaatttattgtttttaataattaaaaaaaattgctcctcaatagttgattaagcaaacaaaccaacaaacaagacaaaagagataaaagtgaggtttctttttgctcataggcaatgcaacaaaaagtagaaggcaatcttaaagagaagactactaagttaagaaagtttttttaaaaaattatatatatttaagaattgataattgtgtggcttgaagaaatacaaataataagatattatgtattatgaggtattttgttgtgtaattagttttattttaatttatatttcagtattttaggaattgatttcttctttgttttttaattgtaatcggtttaaattattacgtgttacttgttcgtattcattatgttatataacatgttctattttagtaatgactggtttgactatttcgtgttatttattttgattcattataacactgttacagaaccggttctattttaattataactggtttgagttatttttgtgttaatttgtatttattaagtatgttatagaactggttctatttttagttagatttgagacatctacttttggtgacttttccagtggctttttcgggaacgatgactttttcggcgacttttcttttctggcgaacctttattattattacaagttttatcaaatttatttattgttttttttttttccatattttaaaatttaattattttttaatctcatattttttttgcatagtgaactctattatattttctcatctttatgaaaaaaaaaatccctatttataaatggctcctaaatgggcctatagaaaattgccatttttttgtactttttaaataaatttctaattttaaagtacaaataaattgtttcaattacaattacaaaaaaaaataaataattacaattacatgtttaataactaaaataatattaccataatgttagttcattaataaattttcacataaagctattaatatcattcaacataatttctttcaacaaaaaaaaaatgttcaatatatcaaaatatgtcaattatggtcgttgatttataaaatgtgccaacataatttagaaccttcgcctagcaaaggatattttaaataataaatattatatatat

SEQ ID NO: 190686 - DNA, 3138 bp, Cannabis indica
cacttaatctgtagacttttgaggaaaattctaatggatagctcgagtcgtcggagaagttatcagagaacactacaaaacctattgacgatgaatctaaggattttattagggtcgaggaggcgggccaatacatgctcccaaaatccccatgttagttctttcttggaactactaggggttgggaagccctaggcagtggaggcgctctagaaaattatggttaggaagcggcctgatgttatatttttgatggagactaaaaaattagatttgtaaatggaggttattcgaatgaggttaggatttgctaatagtgtggctcattcttcgaatgaggctaaagagatatggtattgttttggcaaagagtttaggatgtagagacgtggacattcttacctgtgattttgatatggtaaaggcttaagtttagtttagaaaataatctgaaagcctaggtggggcactttttctatgggcctttgagacgggaagaccaccaagaactctggaataatatgacacaaaaggttggattattacgggaaacattaacttggttctatcccaagatgaaaaggttagaggtcaaccaatctcgatctcgaaaggttagggaatcagatgattcatttttgactttgggtttattgatattgaaggcacaggggttatgttcaccttgacaaaagagcaagattaaggttggacatggttcttggttctccggagtgggtcactcaattccacaaggcggggattaaaactaatggtactctatttttggatcctttgattattattttggataccttcagggattaggagcgtatttggaaacccttaaggtatttggatgcgtggacttgtgacccgaactatatcataattgccgaagaatcctagagtagggatatcttgagatttcagagctttattttatgttgtaagttaagaagtacaaccaaagctttgcgaaagtggaatgtggatttttttgagctttgtagaaggaaaatagtgttattggagaaatttttaattgaggttcaaaatccaaggccttctcctaataatgttcatttggaaagtgctattttgttagaaattgagaaaaatgagagaagacaggagttgatatggaaacaaaagtcaagagagctttggcttgaggagggagaccgaaagaccaaatttttccatgcctctgtgatcatttgaaggaaaataagttttatatgggccattaaagactcgaatgatgaatggattgagggtcctgacaatattgcagaatatttccacgagaatttcattcatatcttctcctcaactatcctcctttggatgaggagataaatacaatcattaggacagtgattacgcgaagggaaaaaaaattattgggagccttccctactaatgaggagatctgaagagtggtttggagcttagcctcgttgaagtcccctgctctaatggcttcccaacaaaattttacaaagatttttggaatattgttggacctcaagtttgtgactttgttggcattttttttagacaagaaggttcgtgaaagaggtaaatcgcactttctctgtgcatgttctgaaaaaaaaaataacgactaagtattttgatggttttagaccaattagcttatgtaatgtctattataaaatcattacaaaattattggcgaatgttgccaaagttaatttctcctaagcaatccacctttgtcgaaggtaactggattatgagaaaatcaattatttctcaggaggtggtttatgacatgagaaaaaggaaagggaagaaagcttttttaggtttaaagtgtgatatgtcaaaagcctatgaccgtcttgagtggagttttattgacaaagtgctctaggcttttggcttcagtgacaggttcagagagtatattctatgttgtataagctctgttagtttcaggtgctcctgaatggtgggttgacaaaaacttttctcttgaagaaaggtgttagatagggagactcctccctgtatcttttcattctatgttcaaaagtcttttctcgtcttctttttaaaagggaacgctaggggctgatagagggaattaaaatctccagacctgatccttcagtttcccaactgatgtttgcagatgatacacttatcttttctaaagcttcgacgaaggatgtggagtatgtgaagttatgccttttagattatagtagatggttggggcatgttcttaacaccaataagtctcagattttctttttgaagaactgtccaactagtactaaagagtgtatccagaagcagttgggttctctttgatgaaggataatgatacttttcttcaaaattggttatttgttacaggtaacaactataaatatttttatttccttattgagaaagtcaactcttgtttggaagggtggagaggaaagctgttatcttaggttgggagaacagttcttattacaagtatgatcaatgttttgcctgtttatatgatatcaatattttaggtaccagacaaagtaactaaagaattaggcaaaatagcatgaaggttttggtggacatatatcaattgaggaaaaatgttttctagctctcaagtcttgggactcgatttgcaagcctaaaagttatagaggactgggtattggaagatttgtagatattaatttctgccttttggccaagctgtggtggatgttgttaaagggtggagatgctttgtggatcgaggttctgctcaataaatattgtgttggttctagttactggcagaattctcttccccatcatgcctcaacaattgcgaaggaaatctagagaacacaatattttttgattgagaatgcagtttggcttatcgggaatagttcaaatttatattttttggggtttggaatggagatgcaatgatcaattcttagtgataggggaggcttttaatgcggtgcaaacaccttgtttaagtattaggaatttgatcaataatgagatgtacaattagaaggaatcagagattcatcgtctgttcattcctgagatagcctcaggtattatttctatgaatctagacactttatttagagaggataccatcatttg

SEQ ID NO: 190687 - DNA, 1599 bp, Cannabis indica
gaactagtgcacttgatcccattttcattagcattgtaatctaaaaaccattctttcctttctctcttcgtcttcttgtttgatacaccatcacacctactcccctcaagtgtagatttatgactctgtacttcaatgtcctgatatttctttctctcaccttttgtactgctcttgtctgcgcttgcaaaggaattttcaacagctaaaccaagtaaacacgtaccaaaacatttggctgaagttttggcttcaacatgaagaaaccaggtgcccctcactccctggaaagcatacttcataggaattgagtcaggcaggtaatagaagcgtgactttttcttaacctagcatacaatggagtgctacattagtattgcaaaaggaaggggaaaaagaggtgaatcatgaccagcaaaatagaaaatatacaatgaaataaacaatcaaatatgcaccattaacccacaaacttctatctctcctgatcctgcaaagtatttacagtgcactctctcaaatttccctgaaaaagagaagtaacagatattaactttctgaagggaatgaaaacattacaacaagaagaatgaaagtgcagaaccaattatattataaagatagtagactgggtattctttaaagccatgctacatctacttacacatatagagggtaaaattttgacaagttccacttccacatgtctcaacccaatgcttaatttactctcgtttatgtttaaattgttgccagttaagatatttctcattacagattggtaaagatgcgattgtgtgaacaatatgtcatactcaaataatatctttatctttctttccattcgaccaacacagcacaactgatagggtttaacttgtgtgtttgtcccacgttcatgattaatttatgggatttatattagattcatagctaccaaactataacctctcggattaatgctaagtgtgtgattgaaatctgaaaaaacaaaaatagcgtagacagggaaaatcacttgcacaaaaaatgcagccattgaaacaaaatgacacactcaatcagtacttccgatggggaaatcatacgaaagagaaattccaagaaagtaaaagtaaacaacaaaaacatgcataagaaaccactgaaatgagcgatagaaaagacacaatgagataaatgcccaccaatcacaagggtagaacatgcataagaaatgagcacataaattgacatacatgaaccaaaaacatagtcaccacccaaccaataaacaacaaaattggtaactatgaacacaaaatgccgctagtaactcaaattaaaaggccaaaataaatagataaaaattactaatgtagtgaaaatttatgtttgtgcggtggcatactcttaaaatctactgcagtgatctctggagggacggccatagctatgcgagtgcctaagttggtgtctgcgaaaattgagactttaatatttgatgtcattgccattgtcgagccctcgaacccattctcagactgatacagatggtaaaaccataactaaaaggcgcctcacccatcacaggacccactaagtttttttttttttttt

SEQ ID NO: 190688 - DNA, 697 bp, Cannabis indica
tatcaatatgcacatatttagtatatacatgtaccatattgtcatgtagctagcatattagagatagtgatatgggtgtacatagaggtgtactaagatactgatatctaatatgttgggaaatattgaatagtatggactaatgctactaacactagtatgattagagtaatgagcttaggttggtcttatggttaatcttactataggtaaaaacgttcagatctcaacttataagcattagatgcggttagtagacttatggtaattgggtgtatggacgctcaattacaagtcagatatatgattgtgttatgcatgatttttttaccgagtctatcgactcagagttgctttgttatgtgtagatttgagaaagtagaactgatcagtggtggttcaagagctctagtgaagattgtccatatttcaccgaataaacctggagagttgtgatctatggaagatcaactggtgtaactagtatttttatcgttagatgacattcttagaacattatagtatatatgtatttcttatcagaaatgagatcccaatagtaattttttatgtacattcttaagaatgttttaattattacgggattttatgtagatcatactttattgtaaaattatttgtttagcaaaagttagcaaaatgattaaactctcatttatgtatttttttttttttt

SEQ ID NO: 190689 - DNA, 4484 bp, Cannabis indica
aaaagatgaaaaatttataaaaaataaagagagaagccaaatacacaagcttcctctcttcataaatcatcgtttttttttttctcttctactcttttcatttttgtttttgggagcgaaattactttcttgaccttgttattttcttttcatttcaaatatacccttccattttttctcttcttcatctgagcatggaagttagagagcgaaaaaccacttcttcacaaggaatagtgagacccatttcgtgatcgaacccaaactcctcctccgctcgccggagcagagtttgaaactcgggatgagtcaggaacgagatgggaacaatgtacctcgttctgttttctccgacgtagactgcgaaatgacctttcggtacatcaagagggagacccccttcttcatcgctatacccattgttgttgatgttcttcttccccaagctcgaacatcttttcaagatttgtttcagtactgcggcttgaggaagcttgtttgattttctaatcgccatttttgaaaatttctgagcagagagagaagaaaaagaagaagagggactaaagtgcaaataaaggaaaaatggatgaagagtgtggtgtggtgaagaggagtgaagaagggggtatttatttaggagtaggagagagaaagagaagggtgtgatgacgtggcgtgtgggaagagagagaatatttaataaacataaccacgggtgttttttggggcatgtacttgcgtggcagggttcggtgggagccaggcccattgggccttactcttctatgttggccttctaatcactctacgggcccattatttacgtatatatggtaagcaatatcattttaaagcttaagtctatgttttattattattattattattgttaggattatcttggaatttttgatattaaattggtgatcaaccttgactaagactttctcataatgttgtgttgaatataatatatatgccattgaaatataaaatttatgtcaagaagaagcattgtctttgaattttgtgtgtttgagagacaaatgttgtgatgtgtttctattagttttgtttattgaaagatgtatgattaatttaaagtgattgatgactcatgtcaagtttgtgttatatggataaaatgaatgttttagttgatatatgtactttattacaagttgatatttttttcataacaaggtcaagtttgttatgagtaagataggagtaataaaattagtattaaacaaatgagttttgggtatttttattttttgtgagatgatctatataagtcctttattaaacaattcgtttgggttgatcttactaattctaaaatgatacaagaacaatctatttcatcaagtgaataaaattataaatgagttatattcatattcattagaattttatttaaaatgtaagatactgtattattaagatgaataattatcttagttgttgccaattttggctataagagtgaaataatctatattttatatataaatattaaattagtaagattgtgtaataattcgtatattaattaattaatataaataaaatataatatttttataatataaatttataataatacataatgaatctttataggtcataaatatgaccaataaatacgaattgccacttcaaaactaacatcttaatgaaaattagactagtcataataaattgtttacaatgcctaatttgtaagtagctcccatcccatcacatggatattattattattattatggtactaattagggtaattcaaatcttagatgcacataagaaatcaataatggttgttaaacaattgcaaaaataatctaaaacctgaaagagctagagatgctttatgcttacattatatttgtactaacactaactttatttatttatcctattttgtgctactttcagaaaacaaaaacattttcttaataaaccaaccttattaatataagatttttcttttgatcattatttaatatggattttgatcacaaacataatctctcctagtatctctattatttatttttttactgagatgtttacacagaaatttttctttttctattttctaccacacactctttaccaaaagtagatcattgaccacgttaattaaaatctgaaaaacccaacaaacaaaatatataaataataataataaaagatatatttacactgaaacctcttaatatttacaattgttacacatataactttattgaaaaaaaaaataacaacagaagtacgtacctgccttacaattttattgcagtcgtacatttttttagtccttaagtgtcaactcagaaacatgtggcaacatattattagactatgtattgattaagttaaacaaatataccgctacgtgcttttgagctggcacttaacgagcttaattaacacttaactataaaaacaaatgtaagattgcaacaaaatcgtaaaataagatacttttaccgctacaaatatccccataaataataataataataaaaacagtggggattttcctgtttttctcaacctgaattcacggactaatattaaggagtgtgtactcttcagtacaatactccaatgcaactgtgaaagattttggccttttctcaacttgggtcttgtgatttctgtggactcactcagtctcacatacaaactaactttattttttttttttaatttatttaccaatccaaaaaatttgtgcagaaacccatgtgtgtgtatttataaattaatatattaactctttgtatttgcaggttttgaccttaataaataccatattttatctttaaacggtcactcacccagaaaaaagagttacctaaataagctaaatctgcaaaagttaaagctatattttaataaccatatgcctaaacttattattatgttatctcaaaaaaaaaaacttattattatgtacttatttttaattttgaataatcatatgtttatgttgttttgctaagaagagttataggaaaaaacaaagtttgatattgagattctgggggagttagttgttttgatttttttaattgtcattattgctgtattgaacattcatttatgagagtttttaaactcattaagactgacattaattgagtttgatactatttgaatcttagatgaagaaaaacaaaggtatattacaagtaactgctgagtcattcttaactgaaatgatctcacacttttcgataaaaataaaaattagggttctaaaacaaatggtccactcttgaatagatgttctaactattttattgtttcaaaaaaattgattcacatttctatatttttataagaaaatgttaaaaaggatatgtctagcacaatttaatatgttttattgttattagtattaaaggtgttcatttaattaaattcctattattttactcataataattttaattttaccctttaagtagaaagctcctcatcctaatgctttcactattctcactaacacatggcgatagtgggtcgctcgtcatttgaagactcattgttcggctcttcctccaccacctttttgccttttctctcaacaacaggcaaaggagattagaccacctcgaccacaggctgatcaatccttgtagctaatcagattgggcgggcaagaggtgcatctttctttggagcagctttttctttattttccacaacccgagcagtaaaggactttctcttagcctctttggacttctttttactcgtaatgaaaggatcgtatttgtggaaattttcctccatggccaacttggggatgtcccttgcctcctcgaaaaagcctgaatatccagtgggttctacttctcaactccaaggtgactagtgggtagaggaacgtcgtgaaagttaagaaagaatggtgtttgcgtcagcatccttcactatgaagtagtcccgatcataactttcaatctttgttatattcttgtgtcgataagccatctaaagtccaagagggagaagtaaaagtacctcgagttgtgattgcagggttagatttgagatcaaagtaccaattgatatcatgagtagaaggctcccccaaccttgttaggcgtacgagacatacaacacaaaaaagtacattaaccccttcatgcttatatgcattgggcatatattgtaatagttggccaccatttgaaaataagggtggagtagaagaatggcaccctgtttggcatggggtccaaactatgcgtagaggcccatccaaggaaggtgcgccagttgcccttcaagcggaagaaagattaccgcttacttgaataaactagtagcatggaggttgttcaacttttttactgtcagcctggatggaggggattgccatagcggctagggcctgttagatttcttgggaacaggcatagccttcgagagtttctccttgctatagtccaccccta

SEQ ID NO: 190690 - DNA, 1827 bp, Cannabis indica
agagagagagagagaatataattaatcacataaaattgatacattgatggaaagaactatgaaaataagttgaatacacatacacaatgtgtatgagaaacaaattacacaattttagggcatataatacattaggcttgaaaagattcttttactaccttaatttctattttattttttatcattggcacgattgctgcctaattgggactaaagagtctcaatggtatttcttttactaccttcatgtgtcctttcaaccttaaaataaacttaaaaaatacgatgcctccttttcattcataaaaattattgttatttgtcaaagcagctcatatattaagagataacaaattgaactgcgacaaaagactacggctttgaattctagcagaagtgaaaattcttagattgtttcagaaaccatagatcaaatgtgactaacacaataacacttcttgattttgatcaccaactttaaggattagtaaactcagctggaatatattttaagcaagagacagtactaaacaggagccacatcgatttagttcaaaatatttattaattatttagtacaattttcaactaactaaataaacggttttctcaggacaaataccccgttcaaagtctaattgacgagaatcaatacaaagttatattttactggggcagctgtccaccttagtatttaaactcactcactacaacttttcaagatcaatattggtagggagctaagtgagtcggttggaagaagcatgggttaatgtagacagaagaggagttgaggagaaactaaattgataaagcaaagaaaaaaatcagttgccaaacatatgagaacaaatcttctttttatgtaagcagttcagcgatccgcaagtgaggcgaaaaatcgattacaagagatgccctcattgcgtaattctgctttgtctgtggtgtaaaaggaactagtcaaccagctggactactcacttaatcttctttctctgtcaaacatggtaagaaaccggtcagtgtagcaacgaagctgtaagtctcctctttttttttccttggaaactagactccccacctaaccctaaaaaattcagagtctaggaaactattgcaatagctatgtagacgatactagcaaaccatatgcctaacgcctcttaggtagcagttcattgaattaatcataagttaaccgaaccgaaatctattctttcttctatgtatcaaaacaacgaaatttccttcttgttgttgtatttattatctaataagccacactggaatctgcacttgcaagatggttgtcaacactcattgcgaaccacatacagacaccgtaatcagccattaatgggaaaacatttgcattttaaaaagtaatcatgtttagtttcagcaaaatatgaattctaagccatgggaccgatttcccttagaaaattacaataattcatttgcaaaaatgaaacatctaatagaaatattgttatcaatcctcttaatctcaattatattaagtcattacttaactccaaaaagatggaaataactcttctaattttcttccttttcaattatttctacgtgtttatgccgaacgaaaactagaagagataactatgtttctcataaatcagatgaaacacattaattttcaaaaaaaatcccatttttaactctaacaaaagcttccaaaaaattaaaaattgacggccaaaaccacatccagtgaatatcaataaataaacacaattgaatctgaaattagagaatacacgaatatgaatatttataaatagatatatataaatacatata

SEQ ID NO: 190691 - DNA, 1915 bp, Cannabis indica
ttcactattttatgtgtgtatatatattctttatatgtatataaacacatctagccagagctgcatgcatacaaattaaattcatatggaaaattctctttacatataaagaaaaaatcctcatttttttcccaaaaaaagagaataataatatcttgtaattgagcaaaggagattttgataaagattttgtagagcttatatattaagtagtcaattaaacatattaatacattggtcaattaggtggtgtgccagttgagcagctaataaaggaattaattcaagagggtgcctaacttcttatttcaatcttttagttgacctaaaatatatgtcgttatcgtaatactggttttaatttattttcacagcgatgttgttattgtttgtttaccgagtttctaagaaatctattattatgaaagagtaagctaaaaaaaataaaataagaaagaaaataatatacatattttacgagattcagcagttaatgagtcttagtcctaaagacaattttataaattttttagcaatgatgtttttaggctcgaccctaggctaaggcgggctaggcccgtgcctagggcccacccaaatccatggcccaaatggtatttttgtaaatttttgtgaacagaagcccaataatacccacactttactttagatatagtacacaaaaaaaattattggacctatattattactcaaggccagccctggacgtttttatagctcttggtatttttctaggtcatgaaccctttacaatggtttttgtacataagggtaaaatatattgtttaagcattattttaagctattgggccgagtaggcgaggtccaattcctaaaaacaatctgctatatgaagtgtaggtactgttgacggtgacatgcgagatcgtgcactatcattagaaaaatgaatgtcagaatagggatgcaccgggaaacaagtgatttcctttttgaggaaatttgattgcatacccattttactttacttgttttaatttttacctttaattttatatcctttaaaatatatccacttttatagatgatattcctattatacccttcaaatttatataaattatgtgctagacttaagtgaaaggtgaagatatattggacaaattactcacaaaagtaggtacatttgaatgaaatataatatgaaggtatttttgattaatagatacaaaaagcaagtattcctcaactttttccttcctttttttcgtgggccttttataaaggttggtggaagggacaaattctcaaatttcttgggaccgtatcaaaagcgtgacacgtaaataacttccgagactatagactgtcccatgcattttttcagcttccattcttgaatgacctctgaggacattcccgttcagtctaggattcttataagtctcattatcctttgaaataagggtgtaaatatcatatcaaggaagcttgaacatcataagattcacaatcctgacatgccatccatatttacttttacaaaaggcaaagattgtctcactggtcttctcgagctaggtgatgggccctttatctattgggcctctgtacgtgagaggccacgtgtcccccattcaaaaatatggataatacttataatattaagcttgtaaataaggttcagagagcaaattagcaagatagattataaaagattgcgacaaatcattaaagggagtctaaatttatataagtcaattgcgtttgtaatatttgatactttactaaatgatttcattctctgggcgtggccccgtgtgaactaggagtatttgaaagaaatttatgccacatataattctcttgtatcaagtttttgaattatgcactatttatttctacaaatttgtgttctgctgtaacaagattt

SEQ ID NO: 190692 - DNA, 3646 bp, Cannabis indica
ggagatgttgagaatatccaatcagagagactaccttcaaaatcgttcataaatagttatgagatttatggccgagatgatgagatgaacattttgaaagggatgttgctgttagataaggtgggtagtgaaaaaataagtgtgattccgattgtaggcatgagtggaatcggcaaaactactctcactgaagttgtttttaataatgatgaagttaacaagcattttgaactcaaggcatgggtttgtgtctcagaagaacttgatgtttgtaaggtaacacaaaatattcttgtagcattgactagaaatgcttgtgctgttgaggacttaattgtgttgcaagaagaggtacaagaattattgaataaaaaaagttttattagtttggatgatgtctggaatacagagttttgggataaataaggttgctttttgaagttggtgcacaaggtagcaagataataatcacaacaagtaacatggaaagttgcgtcaatcgttggaacgactggacctcaccaccttgagcttctaaaggaaaaagcttgtttcgagttgtttgtcaagcttgtatccgacaatgaagggtttaccacaacagattcatacttgggaagtattgctaaagaacttcttaagaaatgtagaggcttgccattggccgtgagggctattgcaagcttattgcgttgtacaagtgtgaaagaatgggaaaaaatagctgacagtgatgttttggatttatcccttaaagataaatatattcttccttgtttgggattaagttattattatttgccatcacacttgaaacgatgctttctttattgttctatgtttcctagaaattatggatttgttaaggatgagttggtcttactttggatggttgataatatattggagcattcaggtggaaataggaatataaaagaggtggggtatgaatattttgatgatttagtggctcgatctttttttcaacctgcagcatgtagattcgaaactaaaggtgtttttgtagtgcatgatcttatggctgagttggctgcttttgtatctaaaaacaagttcatttatgtgaaggaaaacatgatgtatgatattggacaaatcaggcaaataagacacatagcaattgatgtgttcgtcaatcgttgtgattttcatgagacatgcaaattaatttctaaagcagcttatttgcgtacacttgtacatgtcaacaaaaatccattcctttcaaattcgtatttacaagatgatgtgttgaaagatttcatgaagttggggcatttaaggtatttatctttagcaggttacgaaaatgttgttgaattgccggagtcagtaggtgaataaggcatcttcgccacttggatctctcccacacttcaaatcaaagagttgcccgaaatctaatgtgtttgttgtacaatctacagatattaaacttgtctcactgtatgcacctgaccaaactgccagaaaatttacaccatctcattagtctgagaagtctctacataagcaagtgtcgcgtgtgtaccttaccaccacttgggcaactacctgctctattaactctttcaattaaagggtgtgacgcaatagagaaggtgggtctcgatttttatgggaccagttcttccaaattgttcccattgttggagtcattgacattcaaaaagatgaaaaactggaaggaatggtcaatgccaaaagaaaatgtggaatcattttcaaagcttaaatcgcttactatacacgagtgtgagcggctggcgggagatttgccttgcatccttccatctttaaaagagttggaaatttcatattgtccgatgattgcttctccactcccagtgttgccaaatgtctctagagtgtcggtcatgcaatgtgcaaagattgtgggattcaagtcatgtagtaatttggaagacttatgtttaaagaattgctacaaattacactttccattgacctctaattcaaatccctccaaaagctttctgttgaaaatatctctagctccttcaaattgcttcctctagattccttgcccaacattatgaatgtcagagtttgtaattgtgaaaatttagagtctttctcattgttaaacagcttgaactctctctatactctttctatcgaagaatgtcctaatttcacattattgcccgatagcaaccttgattgtccaattcttactaaacttgtcatctattcttgtgacaaactaagatttttgcctgaaaaactgcccaatcttcttccttctttaatggtactggttatagatgattgtccagagttggaatcaattgctagatctgggttgcctttcagtttgcgcgagctcactataagaaactgcaacaagttaattgcgtctcgaaagaattggaatttacaaatacttcctagtctgggaagcttttgcattggagattatgaatgtgatgatatggagtcctttttggagcaagggtcattgccaactagtcttacctcccttacaatcgaggatgttgcttatcttaaaaccttagatgaaaatgggtttcaggaactcaaatccttgaaagaactacacatgtctaggtgccccaagctgcaatcactgccggtaaaagggttgccaccttcttttaatggcttactgccaccttcctttgaaactttcttcatgaatgattgccctttattggaagcaaattacgagtgggaggaaggtaacgatttgggtgggaagatttgttgcatccctgtaaaaccacaagaaagccaagccttggaaccatcaagtttagaactagtgtctaccaagaatactaagggtttgggcagggctccaactgagatttatgttgtcaaagttcattgtggtaagtctttcttacttaattatatctcttctaataactcctcctcaatatattaagtagtttatgtagtgtttttttttcatccataattgcaatgtatgtttttgcaactttttcttcatatcatcatcagggtgaaaaagttttcattatatttttagtatgacactcgcaagtgatttgtttccttggttgcattttgatagacatggttaaaagaaatggaacataatcatgttatagcttatctatgttagaaggaagaaacaaaaagagaattaaaagagtgagctggtaggtgagtcactactcactagagataaaatgttagtttgttaggtattttcttttctgttttgctgtaacagttgggttaggggagttgagaagggtaatgaaagggagagaccaggctctctaattcctccctagtgttctcactgaagtactactcttgtactgaagctatattttagcactatccaccattataattgataatctaagagcattttctccaatgaagtgccaaaaaggtgatgcaatgctatatttaagcactatccaccattataattgataatttaacctttcaaaaacaactcctttaataaaaagccaaaaagaaatggaagaatattatttaggctgcacgcatttcgttattggctatgagaaagacaatacttttcatatgttttccttacttaatttgactctgtttggttctcgttatgtacatatgctta

SEQ ID NO: 190693 - DNA, 4763 bp, Cannabis indica
gggtctgggtccgggtccacgtctggggttcgagttcgggttcagggttcgggtccggggtccgggttcgggtctcgggtcctgggtctaggtccgggtccgagttagattggtgttgacgccaaatcctttgtaaatattataatataagctaatacggattatttattatgtattaaataatacaacatatattatattaaaaaatttggtcataataattaataatattatttattatttaataaaatacgagcatacgagggatatgtgtgttcacacagaaatcgtggaaacaagtacattttacagattggtttctaaataaaaaactcatgacttataatatcatccattctatattcatgtttgaatttgatcgtacaatttttcctttttgttaaagaacaacttacttataaaaaaatagatatttagttagtccaaaatagatatttggttagattagtcttaggagtgatcttattttaaatgtttataagaaatttttatttgcaatcggcttttcaagcaaaaactattgcattgttagtaaacttaagatgagctctgaatgttatcattgtactataatgaattatgtatttttatttttagatattaaaatattattatctaattttttttttcatgttaattataattttaatgttgcgacttatgaattaactaaacatgtccttaaaaaataaatgataagtttttttggatggaagataccactcctttgttgctataattctttcttctgagactatgaccaaaaaaaaatatatttcaacaattgatttggttgacaaaactcatctaaccattggacaaatctcattctcaactattcactaaactagaatcaaaccaaaaaaaaaaaaaaaaaacaattatctttagatgaaattgaatcaagaagactatagaataagaagaacaaaaacttttttatatatatacttagaagaacaacaaaactgggaacatttgatcattatgaaaaaaaagaaaaaatgggaattttctctttctttcactttgaacttttggcaaaaagaataaccaacctatgagcataaattacaatgagagaatgaacaaggtaaggatgcaactcaacagtaagaaaatccaggaagaactcatccaacaaaatttcctggaatcgtttaatctgtcagcgctcaacgccttataaacactacccgccatatctacgaaaagcttaacaactgccaacaatgaaaaaattaaacataaaagaaatatcacaatattcttatcatctatcgatatctgcttctcccgcaccttctctacctcgtatctgcaattgaatcccacttattagaacatccatatgaacagtcagaagcacaattcgagcaaataaaaaccccgaaagtgtgacaagttcctcacctgagaatggcattgtccctggctaaattatccatttgtaaggagacaatggacttccaagaattaagatcatcaacttctgtagcctgtaagaaagagaaaaagattagcattaacttttgttctaatgaaaatggtattactataaactgatgagaattctaatgaaaatataaaagaggtgaaatataccaatgtcctgtgattctcaaggagattggttatttctgttctgatcttctctaaaagtatgtccttctctcctatatctttgtcgatttctttaaaaaagttgccatattttgaagttaattcctctaagtatcgttccaatacagataaatttacatccagggaacggactttctgcataagaattttgagaactgtgtccccgggcatccttccaacttgttgatgacgcacttcttcaataggatcgggcacatcattcttagaaatctctaggttctcgatcgaacttccagttgttgtttgagatcctgtttctttggcagttttttgattagtatcatgaccctcaaggggctctggctgggatgaaacaggtttctggtcaccttttgctccttccgacatggacttagtaccttgagcagatatcaagtcctcaagcattctttcaacagcatctacaccataaacttcaatagtactcagtgtacaatagaactcagagccatagtggcttagaagattcacctttagatatctcacccatttcggttcctgaagaacaaatctctgtgctagcttaacattaccagcagtgaagtttcctagtttaacccatttatctgatggataaaccaaactgccacgcagttcaaagtccttcaaattcgatgagtaatgttcgaaattagctatctctattgtgtcaactaaagtctcttccgaaagctctatatcaacatatttgtcttctgctgaacatggatttcgaaggtacttgtctttgtctctgcctaagatatttgaggcacctttggcttccttgttgaaagccaagaccttagctcctttcgatgctgatgcatagttgtattccttccctccaggctcaactctatgctttatacctccactctgatcaattccaggtttacttttggtactgtattgtttactcttaaattcatcgagaccaagtggcacaacatgagacaggcgatctgtcttcgaaatatcattttcagatttcgtgcctgcactggacttatccgccacaggttgctgtccagcaactgactcattacttatacttccctgagtcgatacatcatctttacatccttcgtgatcatttgatccatttactttattacttgaagcgtcatcatttacgcatggagcctcacagaaagggatagagttagagctttccactgggggatgttcaccagcaggactggaattttctccactttgcagtctttcagcttcctccaatgtcgatatgtcaatcgaggatttcacagttttatctgaaactaagagaagtacatagcagcccaataagatgaattcctgtacatatatatcttcaacaactatcaaaagtaactaatgaaaatgtttgaccaaattcttagtttcccaccaaaaaattggcccaagaagagtattgcccaaaactttgcatcagcaatataagaataaagcatctattagctaaataagcctagaatgtgcaaggaaagaatccagttcaaagattacctttgtgtccatcgccgtgacttatccataagctcaataggaatggaaggccccataaaacaacaaccaaagacaaagagactttatacaaatgactgcttctggtgatggtgtcctctaaagcccttcttcttcccagaagagctttacgagacttctgcattgtgcatcaatccagtccactgctgatcactgagcaagtaaagaaagagccaccctacaaaataatcaaataatttacttcctcaatattgtttaatttaaatcctccaagtagatcaaacaagagattacactaatgatcaatgcttataaaaatcaaatagctaaatctaaaacaggtagattgagctctttacttgcagagtttaaaatccatataagttaatgaagctgaatactgaagattctcttcttttcccagttattatattgattttcatcacaataaactgaaaagagaatccttaaaagaagctaactttaacttaattcagcaaaaataaaaaagctaactttaccttagcagtcaagcaaaataatttttttcttttatccctataaaggaacacactattccaccaaagatgactaatgaaaaagaatcccttcaaagcaaaatcatgaatacagaacaaagcaatggacattcaaacccatcaatcaaccaaccaaaaaaaaaaaaaacccaattgttattatttcattgcaatcaattatacacacatgacaatctttgattcaagggaaccacaaaattgagaaagtatcagatccagtaaagaacaagaaacaagaaagaaaggaatgaatcaagtggagagagagagagagagagagacccacctgtgcttaagagaagagtgaattattgggatgatcaaataaaaagggtttgtgaaaaagagagagaatgaatcgtagattgaggccaatttgcgcgttatggcttatgggtcggccaccattaacgttattgtcttcttctttgttcttcttctctctcttcaatgcccaatctttactcttctcttaagctaagaatttttgaatgaatgaatacatataaacaacaacacaaattttattcaactctttctctctcattattatttagtgaagaaatcgagtaatattgtgccacgtcggatggtgacagctatgtggaagttgtcttcttcttcttctttcctattataatattgttataattatttaaaacagacttatttgggggatttgtctgcacaagccactttccaatggaatccagggagacacccattcttattacgtggaactttcttattggacacccaatcactctattacgtgtcattactgcttttcttttttttttttattattaaccgttggccgacttctcaaatccatagtcagcttcacttaaaatatgattttataggaatttcaaaaaaaaatatataaatatatatatatatcccatttataaagaaggctaattaagtttttaatctcatcgtgtcacttaaattttcaaagtcgttaaaaatgttccctaaactattaagatgattgtagtatttaaggacttttatctaatt

SEQ ID NO: 190694 - DNA, 4625 bp, Cannabis indica
tatatataatatatatttttaatcactcaaaagcaagcaactgcctgttctttcaaaaagaacgcaactacctgttatgttattatccttaactcacttcacaagacgataaagaaaagaaatacatcattatagtagaattgtattaaaaaattagcattactcactcagcacatgcaaacggttttgatagtgcactctggtcaaatccaaccaaatcctacaattacaacattaataataataataaaataaaaataaagaattacctttggttgtcccactttcctgaaataaaatatttgcaaagttatattcttttccttcttaaacttccatactatctatctatccttacacaagacttggcattttcctttactagagtcttctttctttttctcgtcctcacctttactttctactcttcttttctcttctctgtctttttgtttttgatcttcttcaatggcgtctctcagtgatattggggtctctgcattgatcaatattttgagtgcttttgcattcttactggcctttgctttgctcagaattcaacccattaatgacagagtttactttcctaaatggtacattaatggaggaagaacaagcccaaggagttctagaaattttgtgagcaaatttgttaatctcgatgtcaggacttacttcaccttcttgaactggatgcctcaggccatgaagatgcgggaggccgagattattaaccatgcaggccttgactctgctgtttttctcagaatttacattctggggtaagtcttaactctttttcttctataactttcatcacacatatttataaggaaaatttacctatattaatattaataatcttgtatttctaccatctgggtcaaaattttgactttagactgaaaagcattaaattttgttaatttcgatttttaataattttgtcatttggatttgggtagctgacttgagctggctatgatgacatcttgcggattatagttgttattattattatgatgatgatgatgatgatggtgatgactgatggaatgatagtattctactattttagtttgttatagtgatatgagaatctttaaagaattattattgaagttgctttcacacagtttatgtacctttcagatacttttttttttttcacttactggagttaaatgatatcgaagttttagtcttataaaaaagagaaggaaggctgtgattttctgggttttctcttcattcttagttcttctaatgtagttgctctcaaaccatagctaagtatgctttaaatttgaaagcatctttgtactgggatggagtggaggttagcctctcgttgctacatcagcaatttgtgctcatatagccttcccttaagtgttctgttttatgtattttccctcaaaaataaataaataaatagatttggttttgaagtgtatgagctgtaatgtatgtttataactattttttcccctccatttcttgcagattgaagatttttcttcccattgcagtcacagcactactcctacttattccagtcaatgtgtcaaatggaacactatccttcttgaagaaagagttggtcatgagtgatattgataagctctcaatatctaatgtacgccctaaatcagtgaggtacgcttattgaataaatgctaatttgtatctcatacgagggaggtgtatagagtgtttaaccaatttttctttgctctaacttctaaatcactttgcgggcagaagattcaatattcttgataattatgatcaaagtaacttcaaaaagattggatgatcttttctgctcccttgaatattttctaatttataacttaatgtaggcaaagcaaaattccttacaaagtgtgattttctttttttcttttctctttcaggttttttgttcacataggtttgcaatacctctttacgttctggagttgtttaatgttatacaaggaatatgattatgttgcatcaatgaggttaaaattcttggcttcacagcagcgttgtgctgaacaatttacggtgagtcagttgttaacattccctatgattgtagaggattctgtgtaattagtttttgagtttgcaaattatagttattaggaccataattgattagttgaaatttcactttacacatttttagcttgcttgaaatggctggattgtattttaatgggctctgttggaatgaagattagtttcttacatatagtaggatctattttattatgttattttcttttttctataaaaaagaccagagaaagtgaacatgaaattttgaagtttctcctactcctatccactttttcatccaatgctctttgtgtgactcaatttctggtggaatcagatgttgtttaagcgttttcaaaactatacttttcaagactgattttgtctaccagtgaataatcctaagagtccctcatagattcaaacttttgtttctgtgatactattgacaatatacaattgacagctctagtctagaacagtaccataaaatatttctctccaaaaaaattctgaaatcataaccgctttgttaaaccttacattatccttattaagttaaaagatatagtcatcaagataactcttggaacttatttttccctttttatttcagacaacattgtgcagaattttgtgagttcataacctatttcatttcgcatgctttttatttttatatgctaattgggttcattttaaaatatagctccaaagtgaactagaatcatgcataatcattgctatcatactatttgatgagaataacgaatgcaaggtaaaatattagaattgttagacatcaatgcccaagctcaatactccatgtttagttatatttgtcaaaggtagttcccaatctgctaatttatgttcacacgtaaaaagattccaaagctatacaaccattataaatttgcttatgttttgcaggtagtcgtacgaaatgtaccatatactaatggtcgctcagcatccgatgctattgaccaattctttaagacaaaccacccagatcattatctttgtcaccaggtagtacaatttcagtgtcaattgtgtgaaactttatattttgtccattttctatgtctctttgcattaactcttgttattgtgtatgtttagactttgtaacatttatgctaaattgtgatttgtttattcaggcagtctacaatgctaacaagtttgctaaacatgcacgaaggagagctcggctccaaaattggctagattataaccagcttaaatttgaaaggcatccggacaagaggccaactagtaaggtagtattgcacttgtgtgcttatgtgctgattccctaacttacaactatgatccaaagttatttgagtatttcaagaacttacatatatacattgaaaagcttgttcaaaagacgtgttatttaattcagcccttttacaaatgtggaaagtttatggagtgcaaggatgccatctcccattgtgtagcccaactctgaaaaagagtgctgatccaatgtcatttttgtttggaacctttttttttaacttgtttatttgtttatgtttttcagactggatttatgggactttgtggtaaaaaagttgattccattgagtactacaaacagcagattaaggatcttgatagaagagtaagtgattaaaaattttgcacttcagcaatttcctcttattaaatgaaatgcgtgaatgttcttatatgccatcagttcctcaattggatgcattttctatagtcagagccttcttttttatgttttctaacattattttagcctaatacttgtatttcacttttgtgctcatcatattagatgacattggaacgccaaaacattattaaagatacccaatccatcctcccagtcgcttttgtctctttcaagtcacggtggggagctgcagtttgtgctcagacacaacaaagcaagaatcccacgctatggttgacgaattgggccccagaacctcgagatgtatattggcgaaatttggctataccatttgtttccttgagcattcgaaagcttgttatatctatatcgctttttgctttggtgtttttctacatgatacccatagcttttgtgcaaacacttgctaacttggatggtcttgaaagagttgctcctttccttaggcctgtgatagaattgtaagtgcagctactgtctcagtttttgaatattatgtagttcaatttctaatagagtaactcatttaatgaagtttcatgacaaatattgaaccttctatctaatcttttcaagtagaaattacaagtgactacatttgaatatatattatgatgcatcctggtaattgtaaatatgattgtgctttattttatactcatgttaatttgctcccatttttatcattacttgtcaatacttagatatgcagttcaatctcttgttgattgtgaagtgtatattttgttcctctgttcttattgtctatgcatgtctgcatacttgcacttgtgcctttatgaatttagcataatgattattctagtttcttgatagaagacaactaacctatttatccccccct

SEQ ID NO: 190695 - DNA, 3726 bp, Cannabis indica
aataaacataagaaaagaagtaataaaagtgtagtagaggcaaattgaagagagagaggttgcattgggtggtattataagtataagtataagataacataagaacgaaagaggcaaagggtggccctctttcccgtactcttggattggacttttctggaaagtctttccttttcttactattattctcatttccttttctgataccaaacccaaacccaaacccaaacccaaacccaaacccaaaccaaacccacctcttctctcttctcttctctctctcttttttttaactacctcctcttcactttttactatttacacaaatctcccacttcaatttactttttttttacacttttaattcaagtatatttatatttatatatatgcacaaacaaacacaagaatttaagcatatatatttatattattaggcaaaggcagtgttctagttaagtgcttgcgctgtctatttccatgaatggtagtattatagggagaggtcgatgagagagaaagcttttcgatttggttaacgtgggaaagttgtgtaagaaagagatgcttctttctttccaattttcctcccataaatatttcatattcttttttttttttttttctctctctctcacatcccaccaatcaaaattttaattaaaaaccataagacatacaaattgtatagcatataattgtcacatttataaagaaagaaaagaaaagagtttaaaaagtaaaagccttcttcatggtcatgtcttctaggtgagaggtggggttacgatattaatatacataaattaataattatatttaaatgagagagagagctgacaaatgggcagatataaaatttgaactaaaaaaacaaaatgattggaaaataaaaagaaatagcaataaaattatagaatacaactactgtattagggagagaaagagagtgaattatgagtgtatgtcattgaaaagaaaagagtggcaattagtggttagagagagaaacttagagagagaaacttagagagagaagtaagaagtaagaagaagaagaagaagaagaagagggtggtggtattaaggtcttttggtgaaactggcctcgtctatgctgtattgggcagtttagcttgttacaccaagatcttggaacttctttttttctcactctaaacaacaacaaccaacaaacgacatcaaaaactacctacttctcaatgtcgttttgatcattcatctcatataaatatctgaccttctttttctttctttctttctttcgagtgagaaagcgtttttttttttttgattgaaacccaccaacaccacgaatagtaattctgggtttttatttttctttaagttttgattcttttccgtttgtttctcgagaaaatcgaagagaaagaggaactcaaaaaaaaaatgtgggatcttaatgactgtcctgatcagagacgagacgacgaatccgaaggttgttcgtcccagaaaacctccgtcgatggagacgacgaaaagggtaaacgggtcggatccgtctcgaattcgagctcatcggcggttgtaatcgaggacggatcggacgaagagtacggaatgggtacccgaagtaacatgatgatgatgatgaagaagcgtagtggtagtaatagcaagatatttgggttctcagtgacccacaacgagcttgaagaagaagaagaagacttctccatggaaacagacccatctccagtaacccgaaacttctttccggtggaagaatcagaaatgggaccttcctcctccatcttagtcggcggccccaccgatgtgggtggtggaaatatagtggatgggtttccccgggccgcatgggtcggagtgaagttctgccagtccgattcactgggcccaggcccagtaaagccctcttctatggaagtttctcagcccatgaagaagagccgtcgtgggcccaggtccagaagctctcaataccgcggcgttaccttttaccggcgaactggccggtgggagtcccatatatggtcagtacagtaattttagttttttttttttttcccttcttttctataaatatgttttttatattggacaattttgtaagcatttgaatctaatcaattatattttggggtatttcttgtctttcttttttttgattttgtccttccttatacagggattgtggaaaacaagtttatctgggtatgactttgttataaatttttctatttttgggtgtgaaaattgttgtgttttgtaatataaaatatatatacaattttatgttttttttaattggtttttgttttgattttgtaaatattaataataatattaataggtggtttcgacactgcacatgcagctgcacggtaacaactaacatctacttctacttcttcttctttatatcttcattatcaaaataaattaattataattaatcaattaattaaaaccaattaactttggctattatgcagtgcatatgatagggctgctattaagttcagaggagtagaggctgacataaatttcagtcttgtagattacgaagaagattaaaaacaggtaataataataataataataataataataataataataataataataataataatcttatcttgaacagtgaatatcttatcttcaacagttcataaatatttctgggttttatttatttcgaatgtttattattattattattgtaaactttttttttttttctttttgggtgtaattaataacacttacagatgagcaatttaactaaaagaggtaaatttgttcatgtactaaggtagacaaagcacaggattccctagaggaagctctaaatatagaggggttactttgcacaagtgtggacgatgggaggctcgtatgggccagtttttgggcaaaaagtatataaatcttatctttctttttctttcttcctttctttttttcttaaattttatttttcttaattaagctttataaattcgttttattttcataaaacacaggtacgtgtacttaggattatttgataccgaaattgaagctgcaaggtaattaattaaataaataaataattaattacatattattaatacttttttttttattttcttttttcgggtcaataattaataataataataatagtaataattgttgttgttgatggtggtgtagggcttatgataaagctgcaattaagtgtaatgggaaagacgctgttacaaattttgatccaagtatttacgacaacgagctaaactcacctggtacgtgtcgtgtgtatatttattattaattgaagtgttttttccttttgtcattaatgattaatgaatttgtttattattattattaaatgttcagtagagaattcatcacctggtaacagtagtagtaatttgggggatcataacttggatttgagtcttggcaatgcaaatattattaagcaaaacaattatgtgacaacctctgccacacatcatggtcttattatggatcatcaacctaattcgatgccttttgaaactgattggcgcaatcctggttttaggcctaaggtaattattattattattatatagttttacatattataataattattaaatgtcacacacacattgatataaattattcttattattattatgattaggttaatagtggtgatcatgcgatgatgatgag

SEQ ID NO: 190696 - DNA, 3192 bp, Cannabis indica
tgtgattgacattgatgttcattatggcaatggaaccgcggaggggttttatcggtcagataaagttcttacgatctcacttcatatgaatcatggttcatggggttcatctcatcctcagaatggatctatagatgagcttggtgaggggaaaggatatggctacaatctgaatatacctttgcctaatggcacgggtgatcgaggatatgaatatgctttttcggaattggttgtcccagctatccaaaattttgagcctgatatgatggtcttggttgttggtcaagattcaagtgctgtaagtttctcttcttgttatgttatcattcattttaataactctgctgttcaattactcttgtcagaattctaatcaagctataacttatgaaactagattacaaagtttcttttgaaagaatttttaatcatggtaaagatatgatctcaactattgaactttagttttcatgttgttattggaagctttgctgtttccatttactatcaaaacctaggaagtaaactctgccacttttccagttgcatccatgtttgtagatactcgaccacattttaccgcgtctcgatcattggggacaatgagttgaatgtcttgacaattaacttattccaaattagaggagagggaaaatagagaaaattatcagttttagggaaggcatattgttgcacattgcatttaagtagaaacaagttgaactgcaatgcataatttattggaaggtcttcccaagcagactctgctcaccaacttttccacaaagttggtttgattaaattcttttattaaagttggtttgatttgtagtaacctttaatatattttattctattttatgcaattctaatactaaattttctatctcaaatcctaacaaaagcaagatcttcatcctcttatacactgcacacatttttatattataaaatgtttcttgtcaaaattattttcacttccaacagtttattgttgcgtataaagtgaaattttttagctgtaatggatttattataatcaatatatattttgatgatggcatattttattttacatatattcaaatattttgtaatttgaaaaggttttgtaatagacatacaaacagtaacaaaaagagcttcaacttttgtttgttatgcttttacagtctaaaagtaatagtagatatttcctatttctcaaacttagcatctgcagtaattgctctagtatacttcttaactgatatttacaaattttagtagcgctgtgcctgtaccgatcgtcgacatgagaagcattcatcaacatttgagtcttttagtccatgcatttcacagcctgcttgggaatatttagcttcttttgaagtttatgtgttgttgattagagtaaactggtgcttcagcaacttcatgtttctatcctttgacatgttacatcttgttttttcagtttgatcctaatggaaggcaatgcttgacgatggagggttttcgagagatagggaagaaggtccatagcctagccaatcggtattctggtggacgcgtccttgtcgtccaagaaggtggatatcatgtcacatattcagcttattgtcttcatgcaacacttgaaggtgtgctcaacttaccaatttctttattatctgatcccatcgcatattacccagaggatgaagcctttcctgtagaggttattaagtccataaagaaataccaaacagacaaggtaccattcatgaaacaagctgagttttaagtgaataaacctctgttaatattaagctggcattgtccatcataaacaaatcatatagggatggtaaacatgttcgtttccatggccctggtagtagcaagtctacaaattgtcactaatttagacttaatgttacgaaatttgttgggagtaaaataagattttttgtagtaaaaacatattacgtatatattttcatgggtagagcttattagcttttgcttcagtgagaatattgtaatttttttttacttaatggaagtaaatgtagttataatttatttctcttaagtaattatattataaaacacagggaaacatgattttcatttttcaatgttatgtggtttttatattgccacaacatacttttttgatgatagatagatataactgttctagtctcctaagattctgacacttttccagagttatttttaccaagaatgtgatgaattgcattgcatcggattagaaattgttatcatcaataggaaagaggaccattcattagtcattaacatgtattgtgcaacatgtaacgaaaagcttctttgtactaaaatgtgtaaattttcctttttatcttatctaatacttttgagtgattgttcccttgtgccactttatttgtctacaaaattatctaattcttgtcttttacaagtgttttaatttttttttttttgaaagaaacaagtgttttaattaataataataatataataaaagatggattaatttggataatattacataactttacaagattatcatcctctctatatttacaccctataacttgttttctcctaaattttatttttcttttggtgtacttttcgccatgcttatgaatatgcttctatggtatatcagtattaaacaattaacaaacaattagggtggtgtgaactagtctgatatttacaatcaacgcaagaaacccttatacaaagagttgtatatgacccttcttgcacgccataaacctcccaagaaagccataaaagtgagaagaagcaataatacaagtacaagatgacaactcactgctaacctagacagtaaaacacatttgttatttttagacgacggcttcttagtttcaccagtaaaacactcatcgctggttaatggtgcttccttcgtcaatctgattcttcggtttgcagttccctgggaagcaatagactccacaggctcttgagatttctgcacattttcgggtgtggcaacagtccgatgtcgcatgtgaaaaccagcaggcatgtgtgtttcatccagtttgattatgtcgtctttcagtatttccgcataaaagtcatcttcatcaacataatcctgtaatatgcaaaaaggaacaggaatcatgagtgatcatctaagaaggtttggatacaaagggaatctcaatctgg

SEQ ID NO: 190697 - DNA, 1673 bp, Cannabis indica
aggacgttgtctgtacgcacttgatcgcattatcttaatgaaaattgagtaaattcttcgagtagccctttgcattattcgatagaattcttttaatacatgcggatatttcgagatggaacctatcttttttagctttcaaaattttattgtgtccttatcgatgttattgtgaagttcaaattttggtatccttttacatttttttttcttttagatttgatgatgttattaacggttaaaaatggaaaatgctacaatttctatgtgatcccaaatgttacaatacagaaccctggcccgtaacaatgctgaaaacagtttgcttttgaatttttcgggtattaacaccccatagtatatctctgttggttggtcattcttagcacaattgtagcattaatttgatggcttaaagttggcaatcttatcataaaatggtttgtggcgatgcccatatgtatctggtggctggttagtggtgtaggatattagatatagcgtggagttgcagcttattcgggtttacattttttatttagtttagtttaggttaatgaatcatgcgaagttctggttcttttaacaaaaatcaataatgcatatcgactgacatagtatttgtaagatacattatgtatttgggttgtgtagctgctcatatatttgtttgcagtatacatatactgtttgattttgccttgggtttagtacagtggctattgcatgagtacttatattccttaatactcttggattttacacctgtgctgtgttggtttgtaaattttatcttaatgcatagatgtcacactaacctaccctgaagaatgaatgattagtttctccctctgctttgcatagtagatactaactcaggccagctactgagaaagggcttcttctttgtaaccatcatattatagaatgtataggttctggtagatttaaagcatctgtgtggaaaatagatgatattgttgtcagtggcatatactttataagttctgatagatttaaatcattgttatggtggatgatattgcgttcagtgtataagagagcaaaatatataagtatgacagaattggtctgcgagataaacattcgtatctcatttctatgaaagagggtttgagtttgatgcatcatgcatgttgctgaacaaaattagcatgctaataacatggctggatttagttttcaaagtaaaagaagagttgctacaggtgatttagaagcatcggacgtgtgtgtagtaatttagattgaatcctctgagtatttaataataattgtttgctcaaataattaaataaattatgccacttttgaggctagttcaagtggttagttgtgagtatgtgtctggctcgtcctcaattcaagtccatgtaatctatttaattaaatagataaaagaaagtgcattatcattataaattaacatttaaacccagattaggttttccattggtttcatatggtcttttgtttctgatttatattgtgctgtagttgatgaatgtgtgttatcggtagatgattgccttgttttccatttaattgatatgcagcttcaaaaaatttctcctatctgtgcaaatagtttaactaattctaatttatatcatatattattatgtgtatattttcttttttgtttttttttt

SEQ ID NO: 190698 - DNA, 1155 bp, Cannabis indica
gaacggtgtgaaggcttcgagtggccatttgtatgagcctcctcgtgttgaggagattcgtgttttcaaaatctcaggttccaagttcattaagctcaatcgtgggacttggcatgctgggccaattttcaaggctgagtctatggatttctataatctggagctgactgataccaatgtaagagattgtttttatatgctttttatttttcttcattgcttatctgaaatttctagagctagatttaactatgaccaaactttcattaaacaaattagcaaaattgaggaatgaaaagatgattttttgttcctacttgtattcacttttgaaaacccttttctttgctgatatagtaaaagtgccttagctacttggagctaggttaggttaagtggttagaagagtatttttaactaagtggtctcgttttgagttccttccagttggaaatggctaatatatactttttataaagtacatgtttctctgaattgctctcattgattttttttaatttttttttaatgaatttttatatatggctttcattacaaggctggaacgagatgagactgaaagatgcattgttttaggccccattatgttttagaaagccctttacttcactttggaatttgcaatttggtgaaatggtatctaaactttgagcccttgtcgttcaaatcaatcatcctgtaattgctttttcccctggttgaattgaaactaatgatgttcatgcattcttttccttttgcttctggtgaagtcgctcaaaaagctttcatatgatatgcattcactaacttttgggtactgaaccccacctaacttgtcaaaccactaaggtagtagtagctctatttggaatttggttgttatactctattatttgagcttacaaaagtagaatcattatttttctcaaggcaatgcttatcctgacatctggggtgtctgttgactttgttcaccattaaaaaatccatccttactttataatgcatcaataaattaaaggtcaaagtttgttggactcctttttgggttactcattagtagtaaatcacactagttacttgactcaaatgtttatagtagttttctctattctagttcaattgttaagcaattatttattgttcccactt

SEQ ID NO: 190699 - DNA, 2400 bp, Cannabis indica
ttattattattattaagttctgggtctgtctggtagtatactacttcgccattgtcactcacatagtggtcctggctgatgctcttaactagattctcgatcaagtggactggaattggccctgactttctaggctccctgtaatactttcccagcactggcttggctgccttggtctgcatacacatacaagtacattagataaatccaaagagcaattgtgtggttttgagttaattgtttattttttcttttttaacaaagggatagaaaaaattacagcttccacaagatggtagtgtgggatttgagggaagagatggtgtataacatgagttccaatgtcatggtggatattgttaaatattccatagtcacggtctactgttgttagccctccccttaggtaactccattcctatacagaagaaagaatggaaattgttaagcttttgatgaatttgaataaatacacaaacttttttttcttcatatgattttagtagtactcttaccttgccccggtaccaagggagtttttgctcataaccatggtgatgcaagtaagtgacaatgtctagccacatcacaaatatctgtggaagtaatgcataagagaaatactaaagaagaagaagaatgtttggattgagttaatttgagagaattagagaaattgagagactcacccaataaggaacaacataaagcatgagaacttgaacaggacctactatgaaggacaaacagacaagcaaagcagccattgttgaccagcaaaccgttgaagttattatttggtttctctcacttggagtaaataatttgctgtaaggattgaaatgagagccttcttttcctggacttctattccactgaaaaatgcaacaacaaaggactttaatagctcaaatctacactagttttttttttcttcccaaatctcaaactaaaattttcaacaaatcaatatatgttgaaaaaagataagcatcctcaccagataaaaagggtatgcaaataagggaaatgggactttgaatctcagcctctttgttttctcatccaactgcttgtacatcttctcagtcaactaaaacaaagacatgaaacaagagcaatgagggttgtttctacactccaagattagaactttaaacacaataaatcgatccaagaacagaaagcacgtaccggaacccatgactcgtcattctcaacatggccatggttttgatgatgagttctatggctaattctcctgcaacattaattaaaagaagaaagaaataaaaaatcattaaaatttcatgtttcttttgttctttctggaatttaagctcaaaggagcagagaaaatatataatgtcaggattttgttttgtaccatccattgtaaggtacaaggattgcagaatgcagaatatgacccacagcgctattcagctcaggactgtttgaaaagcttccatggccactgtacaaatccatgaaccaattacattttgttatttcatcaaatcaagactcgaaaatatagaaaaaaaaaaagatagaaagaaacagagccgggagcctccccaagaaaataaaatatataaatagattgtaccaatcgtggccgagaacgaagagagcccagaacatggttccttgagcagcccagtaaaatggccaaacgacccaagtatcggaatagaaagcggcaaaggccaatgcaaaaatgataaagagatctctgaaaacatagctgagtgagcgccatggattcttaacccaacaatgcttaggaatggcggctcggatctcagctatcttaaacggtggaggatcactcagatcgaaatcgccgttttggtttcggatcccatttgccaccttaatggggtagtcacctttttcttctctcgccatttcctccgaagcatgtgattctgtcattattgaacgcttaagcctctctctgctataaaaaaaaaaccaacaaaaaataaatgaacgagtttgaaaatgttgtgaagaaatttgaaataacaaaagaatatacatatacattattagatatatagttgaagggttatttatatttatatttggctaacctctttgaggttagagagaagagaaagcgagaacactggttatggtgtaatgttacgtttgtttatatagagaaagaaagctaaggagagagagtgacctaaatgaaagggatggcgctgatgatcgcacgtatgcagatgcacagcacaaacgtgtacgatgataggagcgcactcgtttgctcttctatgccattgcgtgacaacgtaaatttatttagggcttaatgttttttcttttttcttaacattaactacactataattttacttaattataagtttgtaactattttgt

SEQ ID NO: 190700 - DNA, 2966 bp, Cannabis indica
ctcaattaatgcttatagcccatatgttttctaattcttcttctttttcagttgatgatagtttgatgattactttaatggtgtaaacaaaagaagaagaaagaaagaaataagacatgggttgtgctgcttctgtatatgttgttccatggaagaacaagaagaaacaaagtattcctgaagttgtgatatttgtaccttcattgaaaataccattacaatctgatcttaaaaggccacttaaagggttggtcccaaaagatcttgctgaaaggttacaatctcttaggaatcagattgtgttagtggctgatgacacaggtttctttcatctcattcttattttctgtttgtttactaggaaaattctctgtttttactttctttctaactcttgttattgtagatggatctgctgtaactgagctgagaagagcattggaagagtatttgtcttttcttagtggacttactaacaaaggtgtttgaataattgtctgaactagaacaccctcaattttctttgtctggttagctatcattgtattaacaatattcatttatgacaacagagtttggtgttgaaggattgatagaattcaagtggaagactttacaagatgaaagacaggtatgattgtcaaaacaaactgactacatatattaataggtgggctttgtctgagttgagtgaatctttcaatttttattactaagcaggaattgagtgtagcaaattcctggtttgaactactatctatgattcatatgatggctttgctgaccttggctgaggctgattccttgatgatccccaaggattatggatcaggaataagagttgtatcttcaggtccatattgtttcatatttggcttcatatatctttgtttcagagttggtgatcttaacttggtctccatctcattgcagattgtaagagggaagctgttgatttattgcttaaggcatcagggtacttggaattctgtgtccgggatgtactggttaggataccacaagatattaagtatgttgttatgaaaagatgaaatgaatttaaagtatgaatgaacccatttgaaacattttgacacaaaactatgtgtggtaaacccaggaacaggttgcccatggatatgcaaggtggggttttggaggccatttctattcaagctttaggccaggtatttataaccagggtgtttgagtcttaccattactgttactgttggtcaatttatatatatttatacatatgtctgaatcttgatgatgaacacaggggacagaaattcagcttggtttagcagtagaatgccaaaaggcaactttatcagttaaaagaaggttggcatgtgagcagcttagctattatggccaggtctgtaatcttgttctcaaattcttttccacaatatatacattattataatattaacctatagatatgttatactgctatgaaattttgttacttgtggttttgatcaggctttccaatccttgtctggagcatatgacaatgatcatgggaatggaaagaagcatctttggtttatcaaatggaaatttcttgaagcaaaggtataactattattacttgaaaaaaatactcaaaatctaacaacagaagaaagctaatctctttatgcttcataatattaacaactcttttactttggattaccaggcagcagcatactactaccatggtctgatccttgacaagggaactgaaccatcttgccacatcagcgcgtgtgttgttttctcgccgcggaagaacttttagtagagagcaagaaggcctgcctgaccttctgccttgcaaatccagtgactaggtaggttggtcttgttgtgaaatagtttcataaaaggtctagttttttgatgttaactataagaataatttgcagataaacctttttatgttttcatttttatacagttaacttctctttttcttttttgtgatagtacttcttaatgtatgaaaacgttaccaaatttaagggagtattgggtatggtaaaattggtcggagaccttaaatttgttacgttttcctacataaggagtatataacatttaaaaacataagagagtttgactgtaaatttctcaaactaaaaatgaaaatcctatctgaatgtgaagggctccaccactttggggtgttatgaaacatttgcatcaaaaaatcccagaagttgcatcaaggaagtcacagatgtatggttacctcttagaacaagaaaagtaagaaaagccctttatttgagtactttcatcagtcattttgaaccaaattactgaaattggtatgtacatatatatgttatgtatgcagggttctccaacaattaccagatttaccagaatttcaactttcattaacacctgaagactatcaattgcctgaaattgatgcagcttgggacagtgagacatgggagacagaagaacataccctgaaagagcatctcaaggatcttgaagaggacaatgaaatctaatgatattatagctataagctctgctatctatactctctcagtgtcagtggacaacattcttcttatacaaaaaagtaactaataatcaatatgtatctataagatgaaaaatgaaaaaaaaaaaagttgcaacaagcttaatcatcactctctttgtgtttagcagatgttaaatttgttccagtctatatatatatgacagtaaaatttagtttgttatcaatgagagggttaaaattgagattaagctttatattttatcaactaagttaattatttaattattagaaacattttacatgaaccaccaaaatcaaacataatatgaaccactatttatttgttttaaaaatgttttatatttcatattcattatatatattttatttttatttttaaaattaacaaactacatcaacctatcttatatacttaatttttttt

SEQ ID NO: 190701 - DNA, 2529 bp, Cannabis indica
cattcacatggctaatttttggattcagctctaatattacatgttagaaatttatatgaatatgaaatatatgaacgattatagaaaatgcaaaatgaatcgaacatatatgcaatacgaagaagaaaatacctccaaccattgattctttgaaatttgatcccatgcaagctttgaatctataaaagaaaagaaaatttagttagtgtgggtattcgagctttcaagctctctctaactctcttagatgaatttattgtgtttcaaagaatgagtagtgagcttgtggaccggtaccctatatataggtgagatactctatctgtatctgtaccacaattaattgtcagaatattttgacaattaattaaaaaaattaaattaagtaattgaatgtttagtaaatcaaaatttgatcataactgaaatattttaaattaattaccaaataaatggttatatatattataatgtgaatcaaatcaaatatttgaaaactaattcaaatatttcacttaccaattataaaatattctaatagcaaacacatattctatcactatcgccgaccaatgtcgatgctctagccacttccttcagtttatttgtcatttcgcgactacaaaacaattcacaccaccaaacgacgacataacaaccaaactgaggtattccaccacaccaccaccaaaccaaaacaacaccaaggtaaaggagtctgtacaagctaggaggtcaatgaagaaaatagaaaatataatgattcttgagtgaatagaataccaaattataaatattagaacacttgcttacaattattaaaaaaaaatacaaaatatgaatacttattgaaataaattgttcatatacgtaaatgaaattattataattacaaaataaactaccttttatgattttactaagttagtttaatagattttattttaaatttcatacctacaaaatgtattgaataagaatattacctaacattctaagatttatttctaatataggcctctaacaaataagataaattttacaattctttaaaaacaaacctaataaaaaaaaaacactatatttgattacagttttgcataattgcttaactcattatcacaatcacaatattgctatgttgacaagctagtgtggtgacaattgtaataaatgaagtttataggggtttaagttagattaagatgaagacaaagtcaaagagtcaaacacacacacacaaaaagtataaggtgtggaataagaagaggaaattttgcttgttgtctcttatagttgcacccaaataagaccaaatggggtcctctattgtctctctttctaattgttcattagttataaagactaagtgggtctgagtttggcattctaacaaccacctttgtttcctgattttttttttttttactttatggagtttgctttttttttccctaacaaaaacatcattgcatatttgaaccttgacatgtatagatataaacacattaagtttagtgcatgtatgcagtatttgaagtttagtgaaattttggaactttataaacatttattaataatatgatctatgtgtccaaaaatctattccaattatgtatctgtcatatatgagatatagcatagcatatatatgtgcataaatgttattatttcttcaaattataatgaagaaatacactttttttagttaatgattttgggaaatgggttttgttttgtattgtagtgggtccaataaattaatgtataccttacttttttaatacatattattctcttgtttttttaataagagaaatagagatcattgctagaggtatcttaaaagtatgaacaatgctttttaggttaactagggaagagggacaatgaaacactatccttattcatcaatagagtttttcaggtttcaatgatttgagattttcatcttttacatgcttttttaataaacatgggccaatatatgcaaatatgtttctcaacacaatgatttcacctttgaaatatgcttataatgctactaaaatctttgccacaatattacattatttcttgtcaaatgacaagaaacctatgtttctctccactcaacaccatactaaattattaacaaattcatgtttatggctcttctataaattttggattcgatcaacttttccattttttttttcttttagatctctttgtttggtaacacttcaatttctttatcttttttcttaataaagttagaatgttgtctagtttttgtttttcaattgaaattatagaatctttcccacacaaagaaaaaggacttatttaagtataggtccccatgggattacatatatggagcaactaaaattgtagttttcacttttgagtattgtgaatttcatataagaactaaccaaaaaaaaaaaaaaccaatagtggttattattatttttgttccattttctaatattaatacttattaaaagttactacccacttttgtatgtgttacccactggctta

SEQ ID NO: 190702 - DNA, 1748 bp, Cannabis indica
ggcttatgtatgacatttttgtattcataacaacaacaactaacaacaaattaagtcattaacaaaatactcacacaatcaaaatccaatctttattaaaacccttttcttctttcttctttcttcttcttctttggggtacccttgagactttatgtggtgggtatttggtggagatgtcggtcgccggcggaagaacgagggcggtggcggcgctgttctactctatactcattttacagatttgggtctgcctccaatgtaataatgaagctaatgccacaagggtatttccgggatttcacaatcaaaaaaatgatacgacgtcgtttatgatgaagagtagaagaaaaagcagtgaagtggtggaagagttgtttgaaaagtttttgaatggtacaaaaacagatattcataattattcaaacgacaataatggtaagagttttgatgatagtaaacgacgtgttccaagctgtccagatcctcttcacaactagttcaaattaattttaatttatttttcgttttttttttatgaaattattattattattattattatagccaaaatacccacgtttttcttatcaaattagaggtagttgttaagtgtgtttttgtaatttaggtgggaaaaccgggggtattttggtaaattatcaaatgattattaattttccttttttttttctattattattattatgatgatgaacccagaaaatcaaacaccatgatattgatcatcatgtgtatatatagtctctgtatatgtattacaatcaattaagatttgttttttttaatgtgtgaaaaaatgaagaaattaattaattataggtatagtagtggcaaaaatgtaatttacaacaaagaaagattcttggttattacattgtaacaatgctaagattattattattattattattttagaaagtttgctgaaaatatgaattaattgtatttattaattcttactgtgacaatgatgaaatgatttctattttagtgaaaataatttctgtagcttctgtaggttatgatgatcactactactgttttttgtgtccttatttgataattatatatataaatattgcactgtaatttctttttctatacagtacttttcgtctataataatatatatacactatttaataagaaaatattcctttcattgaattaattcttctttcttaataatgctattatgactactaattaattaacttaaatatatatgatcaaataattaattattaatttattaggtgtctcatgatcttgagatcatgaagttgttcaaatatgtcaggccatcaactcttgttaatttctttccaaccactcagaaaatgacttcatttttattttattatatttattatgtatgtatcaaatagaagcaattaaaattttaattaaagatatttgtttcattatattagtaaatgctattcaatatatatgatctaatttagtatatttgcatgtgttaggttgatagttctaaacttttgtgtactatatataatatacccttaaagagcatacagtaaaacttaattgttattttatcttaaattacttctgttttttaaaaattttaaataatttataatgctgataataaaatttagatattttattgcatataagtttatttttttgatatgcttaataagtaattgtttaaacttaatttttgtcacttaaaattatttagaattttgaaaaaa

SEQ ID NO: 190703 - DNA, 1260 bp, Cannabis indica
tatatatatattctcaaactacactccacacaactttaattattgatcacagaaaaaatctctgttattttcagtttagtttttatgggacctaattataacttaaaatctatgacgtaatcgcataatcacagaataatattctaatattggttaggcaagtatttgatgagggctctttcattaagtcatctacggtgtactgtactgtatatatgcacttatgcagacacgaataaaaaattatatatattgaatatgtaaatataactactaacaatttattcctctaaattttttttttttcagtttgcccccatttcactgactactctatggtgtcgatcttactggtattaaaagatgtaatggtttagagaagttaaggttgataactacagcttaaccattcctcaaataataataaggttgacattaatgctaccttccgatgttaattagttgcatgtgagtagctggcccggtgggtcgaccttttttagctttccaaaatttcataatgtttttattttattttcttttattttttcaaaaattttaataaaaagatcttaaaaattgtcaatttttcacacaattaacctggatagttgggcattaattgtcttctgggcctggagtaaacttttcccttttattgtgtttttatttttcttttattttcaaacttagaggattgcctggatcagtttgttgatgttcatgtttggtgttcaatggtcatagtgattccaaacaattccatggagaatgggaatggattttcaaaagttaacaagaggaacaaatctcaattctctcttgtaaatttatatatatacgcacacacatataatagttatatttcttttgcagcattgtagcttggttcctaagctttaacgtttccagcatatatatttcaaaattcagaaagtttactgttaaggactaatgttgctcctttaaaaaataaagaaggattgatgttgcaactctttagaaatttcatccaaagaaaacatcgttaaaaaagccaatgcatctttttcatttttcttaagcctgtcttaggatatatatgtatatatataatgatatttggatctcgttttaaatgatcatagatgtaattttgcttcaaaggattgacttcaagtcttgtatacattggctatacttacagatacgcttaatattctattgcatatcatgctatattagatagaacaatgctaagataagtccagtgcagtgcac

SEQ ID NO: 190704 - DNA, 1261 bp, Cannabis indica
aatcgtcaaattttaagttgtatcgaatgagttatggttagaatactattagaaacttagagtgtatgacacatttttaaatgtgtcactgcacacctttctttgtgccacaactatcagcgaaagttttcccagagaagataaacatgccgctaaacacctatcctcaggtcatagcttgagcacaattttttagtttttaaatagaatttaaggggaactgtaaaagattttgatctaatttttggagaaagtttttattaagtttttaatgctagagagaaaattataatattattattcattagtttagtctcaattttttccctaatctctttaattattaattatgattaattacacttgctatgatatggagtaaatcttttagaacaagaatatttcaaaactcaaaatataaattttcaacttttaataatgaatattattatttaatttctatcatattaaattactttctactcttctaaatactatgactatagggaaatttacataaagactatgtttggtaaaaagaattacactttacggtcaaatattttttttattcatattttatgtcctttaaaaataacaagaaaaatatatgaaaataaataaaaaaaaaaaattaaaacattgtaaaatatgttggaaattattttaccaggatctagatttactaccatgtatgtttcattaacatcctaatacgaattctaaaacacatataaagtttaggaaaccttacattgggtgcagcggaatataatgactccttccgttcagatctctagcccttgattcctttctgtagcagagcatcaccaagatctgaacctggatctctttctctccttccttgatgctgattctccttcttgttgattggattcttcacaatcttccacactatgattgagataccacttgatgtgtgtgggcactcactcattcactcaaggttcgaaaatttagagaagaaaagagaagaagagggtggcggctatggtatagaataggaggctcaactttcatctgacagagttaagtgtgaatgtgagccatcactatctatttataggtaaccacctaggtttaggttagaattatttggcattaaaataataaaaaaataaatgataaaagccttaagtgtggccggccatgggctttggatattgggcctcacttatgcaattttgctgttttatcatttctgcatctcattttctcaaaaacgccaattttcaaattc

SEQ ID NO: 190705 - DNA, 3078 bp, Cannabis indica
gagtattgagaatgatccttgtaagtgtttgtgttatatctcatatctagacccagtgtggaggatgtagatgcttatatgttgaattgaagaaatttttgcattgaatctgcttttattctgttgctggatttatttttctaaacaatgcttatttttatctgaaaagaggtcacaagtttctttgtcgtcttgccatgtgtcatcatcagatgtgaatagtattttgtttagggcatcaatacattattattgtgaatatatggcataactgttaactcttttttttttcctaatttatttaaaaaaggcatatcttcgctatatggtcgaactttacagaagtgacaaatctttagcagaaaagtatttgcaagaatgtaaagagcttgcttcccgtctttctgggacatttgttggtgctgctcgaaacaaacatagattagaaattttgaaaattgtcaaggatggcattgaacatgcttttatagatgctccaaagcaagttggttttctggaagctgctgtacttccctttgtatctaaacttcctacacctgacatcctagagatgtaagaatttctctataaggggtataatcttttaaatgctttgagaattatactttgagtatgtgacatttctatctgttttgtttctttacatatttagcatgagagatgttgaaaaacgaactgagaatgtacagatggatctttatcccagtggttggaaggactatgatacattcatgaaaagtttacatgaaaagtatgcaaagcctgaagttatccaaggtattttcaacttggttctctcatcatgtgtagagcttactactgttcttgcttattaagttttaagttagtctagtttgtcaccccttgctcccctctccattttttactgtactgcctttggcctaagattacgactgaattagttcctttgatttctccagtaccactaaatactgatttctttcattagcttttatttgtgctattggtttcaatacttattttccccccttgctcaatatcttgtattttgtccaacccaatgatggatttctgcagatgaaaaagaagggggttttgtgaagcgtaggggtcgtccacgtaaacagcagaatgtacaggggaagaaactttttgatgaacatagtgcaagtgaagaagaggactcaatcagcaattctgaccacgaaaatgctcaagatgaagaagacgaagaggaaaatatccctttaataaattctattaggtcatccaagttgaggtcattgaaagcttcaaaaaatgcaagcaagagccagacaaggacatcagactctgccagagctaaaggtaatttattatctgcttcttgaatatctggtagcggtaggaatctactattctttgctatgtttgacgtgaatggcattttcttcggtgtaaggtattcactaatatgtagctatatggaaatgacctgcatgtacccagttttaggttttgcccagcttccagtttctactttttaaaattgaatgattttgctgtatatcagaatggtgaagaccataaattataatattttaaaaaaataataaattgtaattttccttatgattcattctagtgtatagtttaacagtgaaatgtgaatgactataatctacgaacattaggatttgtggcatccttgttaatgaacttaatttttaatcagttaggcggatgtttagtttttttttttttttgtaaaaagagaaaagacccacttatctaaagtccttcccattatttattaataaacctcacttatggcggaggaaaaccatagttacaattagcatcgaacaaaagtccttagacaggatcatactaggaagcttataataatgttttccattctctgcataagtctaaaaaggacaaatggaattattattctctccttaaaaagttaaaatgaataatgatcttattaattctttctaactgttcaggaattatggtacattttaaatttaaattgggttaataccatatccatgcaatttctttttctttttccagcatttttactatgatgacatttacacccatgaatatatacaggaacaggtttattaaatttttttttttgtttatttttacttttaacaagttttctagagtaatctatacctacgaagttgttaagatataatgtaattaatttctttatttatattttggtggtacatttgattgatttaccattattccttttataccatatcattgtctgatgctgaaatatttgtgttcttgcagaattcttaaatttctccccagatggaacgtttaaaccgtagcttgaagactgaagaacgtaatgaaaagcgattctgtagattttaatgggaatggagtttgagaatttttggggtgaatagcttgtatatacatttcttgttttcgcttgtagattaatttgttatttcaagggcctagcccgagtattctaatattactatttgttaaagattgccttctcacatataatgttataattgttcttgttaaaattgaatgtacaatactaatttaaaagacttgccaaatttaacacagtttttcttcatttattagaattgaaattacactcgttattttgctcatgaacaacgcaaattacaagtcttcttgtcaaaagaaattctagtagtaactattcaattcatggattaaattaactaaacatacagatgtataatatttctcggttgttaacaggattaagaaaagtaaaagaacagaaagccaatatccctatccatacgagaacaattaccaaagaagatataaagtttgcatgagttaaacccattaaacaaaattgttgaaattcccttgtgaaatgggtgaaagaaaactgaccgaaaaagaatgcagcaagtaaaaaagagcaacaacccttggctataagaggaaaaaatggaatcaaaattttcatcttcttccagcaagccttaatagaggagaaataataccctgtatttctagcaaagaatgttgtattcgaatctcctcttccacagaacg

SEQ ID NO: 190706 - DNA, 1598 bp, Cannabis indica
tatatgctaataatccaatgtaaaacattgttaaagggcataaaaatggagactgtctaaataattataatattaattcttgatggtgttcttctcaaaattttgactagagaggaggaaaaaaaatgagaagaaataaacaaacaaaaaatcgtgcatatcacgagtagtactactattcattagaatatatttattttgacaaaaagacaaaattatattactgacagtagtactatgcttagtatttagagctagctattaaataatattcttacgaagagatattgaggacaattggtcataataagttagggttagctacaagtctagtgtcttatccctaattaaagaatattaacaataataatattggtatttggtgatcttgttcaaaataaaatctaagctaaatatattaagaaattaataattatccaagcccggccctatattgattgtgacatagacgcaaagcaaattgtacctaattaatagtcaacatatattggaatttcacactaaagttatgggcttgttcctagcctagctagctgtggtgtggtctgtgacactcctcctattccttctggctgcttgggctggccggtttgagtgtttggttggtaaagttagtgtttggtcatgtatcccatatttcagatcacaaatgtatatttagtttttttttttttgatgtgtttggtattaggtttggtgttttaataatggtgatttgtatgtcacctttgtaaaattgtaaggatttagggattaagagagagagagagaacaattaagaaatgagttgaatgattctgtacattactcaatgagctcttgctcagtatttatataaagctaaagctaagtggttaactgatgtaaacaataaatagctctgagtacaactgtacaaactaactactctaacaataataacgaccgaccctaggcataagcgggttaggcctgcgcctaggcataggcagattaggcctgcacctagggcccactcattttagggactcaaataaaaatatatatatatttttataatttttaaaaatattatgtatctttataataatattatttattattaatttgtattataaacttaacttaactatagttagaaaaaaaaaaaagaagtatcagggtaagataccctaaaccttatgatataaacatatataaaagttctaaagtcaattaattgtaaagggattctctggacactctcttattccaataaaatccacttgaaagctaaactcttggagaactcttcttgaccattgagatcaataaaactcgaagtagactagcctattatcactgaaaggggtgaaccttgttacatttttgtctacaaatcagtttattttaatcgacattcacttgtgttcatctgactcgtttgctcaattagtgttttgagaagaatcatgagattccatcttgaaaatctactggtgataagtggagtagtcaaagttcttatattttacctaatttttgaccattttaatacatgtgggacagtgtcccacaatattcttcctaaagatggtgacctttttttttaaaaaaaa

SEQ ID NO: 190707 - DNA, 1113 bp, Cannabis indica
attacaacaagtaatatattattatctgtaattctttcctatggcattgacaatatgataaatattataagtataagttctgagattaattggtttttatttttattttcttaatgaccatttcttggtcttggtgtggttatgcctcccatgtacaaccatatctgttcacacaactaaattcttacattttttaatatatatcttctcacctactacaactaaaacaattatagccctctatgaaaaatattatataaatatttgtgtatctgtaaaaggaagacatcaattttggacggccattttgcattgaccattaagttacttattacatagtttataacacaaaacaaaaaaaaaaaagatttttataaagataatcatcaattttagaagaaagaaagaaatattaaacgatttttgatctgtttcaccctaccactttatacatatataaatacaaattgtatgaaaatagttctagtacgtccacttgcaccaaaagtataattttaatcaactcctatttgtacatttgtgtcatatctaaaaaaaaagattgatatgtgcaactattcactcacaagtcagaagttacctattaaagatattactttgtatcaatgagcactgtcattcatcttctatgtcaaaattattattgttattatattccattttcgatatttttgttcttttgggggaaaacgtacaataacatggactgaagcttgaagttgaagttgaacttggacttgcgcatgtatgcagttaaccacaaatataatatatagttttttgcttggaaatatagaaaagggtaaataagatcttgcattgcaggtatggagggaggagaggaagaatgctttttctttttccttcctttgtttgcattagattagagtacataaatccctctaatccttttctctcttctgacaaggtcacatgcacatgaagacaaggctagaccccacccacatacccatctcacatggatatctgggatacaagccttgagcatttctaacccacaaaaacacatacaaacacaacccaacagcctcatacttgacacatagtgcattctcttctctctctctctct

SEQ ID NO: 190708 - DNA, 2794 bp, Cannabis indica
tttgttcaattttagtaacgtggcgattgtccatgtaacaaatcgtgcctcccgaaatttgacttggtgcttttattggtaaaattagacaaaagttcttgaatttaacaattttaatagtttaagaaaaaattttaatagcctgaaaagtttggaagcaaaatttggtacatttcaaaactcggaggccactatcttagttagccaagatgtaatggctattgagtttatctcagcttggtttgatctggtttttgtacaggtctcatagtcggttgagtacacggagaagattaaagagcgctgcatacatgttgaagttgtttagtctccggggactcccttggagttctgatgaagatggtcaaagaaaggtttttgagaaactctcatttgttgaactcgatttttttgtgtgtggattgtgattagtgaacatttctatgttcttaaccgcaatcaatttgttgcaggttgagcttactgctgcagaacttgaatcacttcgatcggagcttgctgatttagaagagagagaagctcatttaaaagctcagtaagggaaaacttgatacccctttaaatagggatagctaatcttctcttgttgttattttgactttttgggcaattttgtttcagcttcattaatggataatgtgttgagtcttaagtgtttggatttaaagccttgaataataaagagaaaatggttcccatttcattctatacaattcattgtcatatttttcatttcattgacaatgtccatgtttcttacaggttggaacatgttgatgaagttctgcgttcagctcgtcttagtggctatttatacatacgaacggtagtgattacttcactctcttctcttatttcccttctaaatgtttcattactactacatctgtatttgactggtattttgaccttaacatcactcactctaatagagatgggaagcattaccgggagaacctccaattgacgattctgaggttgatgattggcttcctcgctttgtcgtcctgcacggtgtatgcctcttcttctatcttctttctacaggtaaaataaatgttgaattttgctcactgaatttcttatcttaagatttcggaccttttgttttcaataatacgtgcaataagttgtttgactccgcaataagcatgcctgtgaaactagctcgtcgctgaggcaattactgactatattttcactcaaagactgttgattagtcatgatttttcagtacattatgttttatgttcttatggtcataatttataagtagtttgacactaaaactagaaatcgtagcttaaactacttgtcctcaacctcaatggatttagatttgtagttgtttagtgtggacatttcgatatgattcttggtagtactagtagctgatgaacttaaagattaaaattgcagatctgagtcctcaggactccaccctgttatctgatgttattaagataggttccttaccgagctttgttcgagaaggggaaggaacagtatacgccttttacatattaagtcgtcatggcttgcgaatcgaatgttcaagcagttctaagatcaaggtactcatttttagttttgatttttctagtttatacttactgaacagaaataactaattagtgaacagttttgagtgtgaaaataagaacaagaagagaactaagatcatgtctgttactattttgtgattcaccatagcttttggtgattcattacagtcatgtcttacttgggtttttttccgtagagagtatttgcggcataactacttaatgttttgaatttgtaaccagcaggaccttattaatttttttagtggcaaaactaccaaatattactaaaagtgtaattctgtttaatttcattcaatttcgagtattaatcgtgtacttacatgtgtgcatgcaaactcatgtcacaaacagaacttgttaggatgaaactcgctaaaaacattgaaatgggttcctgtcggttacaaatctaaaacattgagtagttatgtcgtaatttttatttattgttaatgaaaattcttaacttggttttttattgggttgatttttcaggtagattcttggctgttagaattacaaaaagactgcaaaatagattctgataatactaaaccccccaaagaaatatcagatgttaaaaagtgaattttcactctctttttttaactgtaacttgtagataggtgggagttagatttatatttgaacttagtttaatctaatattgtctcttaaaggataattcattcattattatgttgtctattgtacatgaaatatcattaaattgaagaacaagaaggttgtctttttctcactgattcttatatttcaactctgtaaagaccacttatattatattttactcaagtcaaatattccaaaaaaaaaagaaaaaaaaagttctctacaagttgggacaaatgtttatagcaaataaaaacaaagtgattccaatcttcattaacatctacacatactttgtagctttataatagatttgttatagagtaaatatgattttgaattctctttttaaaagttacttgaatattttgtttgttaaataataaattagattttgtattatttaaaatagtaataaagagtacattaaattatttttttggcaaaataaaacttaatgatgagctgatctagaggtgttataaaaaaaattggttatgtttttttgttttttgcttctgttcgtgctaagaattgtctttaagttgattata

SEQ ID NO: 190709 - DNA, 2983 bp, Cannabis indica
aataaatattttagaaaatgaattaaataatgataaaacaaagcaaacttttttttttaaaaaaaaataacactttttgttattcaaaatatcaataggtcattcaaataactttgtaaaaaaaatagatcaaatagctattaagaaaaagatatacatatataccaaaaatactagctatttgaatctaattgatgttttgaattagtaatttttttttaaaaaaatgaactataaaaaatctgtatgtgtttttttttttttttaaatcttactgcatggtataattttttaaaaaattgtataatttttttaaaaaattgtatgtgttttttttttcttaagaaaattaaatttttgacaattaataattattttaatatataaaggaaaacaaacggagttaacaatattttggtggtttgtttaatgtctatttgacattttaaatgatgtggcaaaatataattagtggggataggagtggaacaggaaaaataggacaggtgatttttttccgttcattgtaccacacatccataagctactcttctaattgtcaattgatttcgaaataaaaccccatacaccttaatcacacaatcctaatttctaacaaccatcaaagtccataaccaggcatgtaaataatagtcatagaagttcatacatggtgaggatgcttgatttctataagaagaggaagcttgattttaagagtattgcacttcagcagagcataaagagtttttccaccaagagatggactgttggaagaaaaagcctgccccatacttagtggaccctttatcctgtgtaaataccaaccttatcttcactccaaattaactttgggagaatagttccacatttcatggatcctcaactagtttggcttccctgtttgagtatccacttgtccccacacacatttatctgcgattttaaatgttccatctagttgcacaccgaaacattttatctttcacaatatattatgcggaaaaatttgattcattcgaaaatacttcatgaccaaatttattcttaatttgacattttcatcctgagattcatcaacacaattgatctctatcatcaattgttgaaaaaaaaacaaataaagaatttccatgtgcaaagtactaaaacaaaatgaaaagaagcaacataaaggaatttttttcactatataataagtacatataattcatatgcacctaaaattacacacccctaccgaaaggggaaaaaaactgttaaaggaatgttaataaggtactgaaactcaaagacaactatgatctctatacataatttgttgaagaaaacaaaaattaataaataattaagccatggacatgttagaaagtcgactaggagttgaccggaaattccaccagcgaagcgtcatgcggcgtttgggcggcgtgagcgcccttcttatcaagacctcccctgctggcgccgcatatgatcggccaccactgtggcatcggacaaaattacgagctgattcgctaatgcttgcggaaaacgtacgtgctaggcgagacttaggactcggaaccacattattattataacttttttgccttatcataagactctgtcttagcctctccattttggatccaatctgaagcttttctcccatttgcttctgactcagtctttgcatgtttgcaattaaggccaatgaaggaatattgaggtgggtagagtagagcagagagagatcgagtggagtatatgtgttttattttatgcctatcgaaatgagaaatattaatggttaaattgtttggtttgcattggggtgttgtgaaactcttatatatatacgactttatgagctgcgttatattaattattgatatttgacgaagaacaattcttttgatagatatatttgatgaagaactttattagaataaaagtactaaaactaatgatttttctattcagaacgaaaacaatgtatataagacgacttgttcgttcagagactttcataaaggttgtgctttgactattgaattgttgactaataaagttattattttgctcaaaagggcaaagaaagaaatgaaaatcaacggccactagtagtggaattattattaggaagccgccgcatcgtttgacctgacaactaaactaattaaccactcggtaaaccggaagtttgacattgtaattcttcttcctacataatttcttttccctcactatactccattatttcaaattatccaccatcactattcttcaaattaaccaattagtatttattttccttttcattaccgtaggaacgaacgattataattaataagtaaaattctaagcttattaatttcgtcacatttttttttattatatataatataaaattaatggaaaattttaatttatattgcaagtattttgtttattatgacactcatatacacatataagtttcatattcgaactaattaagtgaagattatttctatataatgacttatgactatatttttcatttattaattagtttctagtccactaatgaccacagcttaatgatacagaaatgacgtacgtgtatcgtatgtggtgggtggtagttaggtctagtaagtttattaatgtgatcgtgcactgcaggttgcccttcgtatatctttatatgacgataactctatttttattttctttgaaatcatggttgttgaatttatatatatggcgattctcattaatatataataatatttgtaaaagattatctaaaacccctcttaattaataatttctttttcgaaatcgctctccttaatctactctttttataatatatttggtcactttttgttcgagtaataagtcaatagaacctcttctatcatgtatatatttacatgggtttatagtaaaatcactaaaagctgataaaaggagaataaataacaacagacaaaaacaagagactttcaaa

SEQ ID NO: 190710 - DNA, 3029 bp, Cannabis indica
gaagaagaaaaacttgtaaagaggcataagtgacatcatgaaagaagacaataataacaaatggtttttgggtttattattagctaaaatatagtctagaagagagatttaatattgattaaatttttgacagctttcaagtgaaccttttcttttctctgtcttcataattggtaccctttttagctcttaattcttaccaaacaagtgacaacaatagaagcttctttcttcacttcattcttgctaaaggtgtgttcttcacttctttcattatatcacattcatacataagcaagtgaaaaagtaacttgttacaagtaacctgttacttgacttgtgttcttcatcactttttgttagaaagaatcaagtgaaaaaagtgttctgttttagtgaatgaaactgccaaaatgagaggatctgatgaagttgaagacacaagaatacatgtcatagtagcatcagcatcagcagcagcaacaacctcctcagcgcagaagagcatggattttgtgctcgaaaagaagaaatcaatgcgagctcgttatgcatatggcatcatctttcttataccaaatctttgtgcttggattgttagagattatggacaaatgattcaacctcagctccattgtaactaactactacattctactaattagttactagtaactaattattaaacaacattttcttttaagtgtattttattacttttcttgactagttttgtttcatttttcttttcattttcacagatctaaaatcttgtggaagtaatggaagagattgtgttcataccctaggtgttcttcgagtgagtttcgggtgctttgtatctttctctttactctttactcttttcttttcatagttttagtcccaaatgccaaaaatgttatgttatgaaatttagcatccttgacatgaatgaaatcatcagatatatttttttgtgatgtttctcacaacatttagaacacgaaaattattcgaaaatcgcaatgcatggcattcgggatggtggacatcaaagtttttcatgttgattgtgtcattggtggtaccaattttttttccttctgatttcattcaactctatggtaagttttttcttattttaatttttttacagctacattttccttaagggaacttatttttcgatgtttgtcgcaggagaacttgctcgtgtcggtgcagggtaattcgccttcagatcttcaaacctaattttcttgattttttcttcatgaggccaaaatagctaaaagttgtcattttcttcatgaaaaaaaaaattatttcataagctatgaatctcaaattatgttaaaaattaacacaagttttcattgctaggatttttcttcttcttcaacttataagtgtaattcaattcattaattggtggaacaagtattggatgcgcgacgaggaacaaaaacaaaaggttttttttttaaaaaaaaaaatatcaagcttcgtttggcaaaatttttacttatcataaaaaaaaaagacgtctttttattttttacccaaacactcctagaagtagttttaaattcgtgctttcgggatgttgcagctgctctctcgggttgtttatgtcgacgctattttacattgcttcggtatgtgggcttgtgtacatgtttgcatcttatggcacaaaaagctcatgtagtctcaacatatttttcatctcttggactggaattcttctaattgtgatgatggctatatctcttcattcaaaggtatttatattaataattaaatttacatgatcatgtgatattatttgagtgattaataattatagtaatacaggtgaataggggtcttttatcatcaggaatcatggcttcatatgttatttacttgtgttggtctgctctaagaaggtgataaccttttaatttgatcccattttttgaatcatttttcttaggagcccatactttttttagcttttgaagatcattcgagtgaaaatgaaatgacatttctactatttaattaaataagaattttttaagaataaaagaaaaaaaatcattccaatgcacatagcaaatgaatattatttgattttattagaattaatctcattaccaattgaattttctcatcttaaaccacacacttaccaattcaaaccgatttgctccattactcatatttttattattattcatttaaggtaaataagtattttgtaagaattgcatattggattctttattttgttaaataataaaatagatttattatttttttaaaatagtacaaataagattctgaactgatattttatcaaaataaaacttaataataatctgacttagaggtgttatgacaaaattagttaaatttttgtatctgttcgtgttagaaattatcttcaagtcggttatattaaaaaaaaattgtcgaaaattgagctcaaagtcttaattgtattattttaaaaaatacaaaatccattttatcatttagtaaaataaataatttaatttattatttttgcaaaacatgaagcccaaaataatatttatcttatttttctattgaccattactccacactatacaaagttcaaaccctaattttggatagatgatttttcagtgagccttctaatgagaagtgttacaaacttaaagcagccaatgaaaatggtgattggactaccatagtagtaagagctatttctccctcttcttctactttgttgtctttccttttaaatactaattgggtttttttttacattattttcatcaacacaattataccaaatatgacactatctctattaatttgtgtctacagagcttcttgattgcaatatgtgccattgtcatggcaactttttccacaggaattgattcagagtcattccaggtcagacaaaacttctcttagtagtaaatcaaataaatttatcattacattttgaagactaattaattactatatgaaaaatagtgacaaaccattataatattagagcattg

SEQ ID NO: 190711 - DNA, 1004 bp, Cannabis indica
gtaataaaataaagagtggaagccagccacgattaaaacatattaactaaaccaaatgcaaatattaatttgattttgtcggctaaaactgatcatgaatgaggttttgggtgggtggatatatttgaccactttagtttagtcacaaaattgcagacaactggattacaattctttttgttaaattaatattaaataataagaataaggttgaggaatgacatattccattgtatttgtatttattaatcaatcaaacttaacgtatggctccccaaaactgattaaattgccaaaaaagataactaaacagtaggctccaaatgtggagtacaagcaaagaatggcccattttttaatgttattttatgtctatatttgtttatatgtatctacctcttatgttttttgtgtgttgaataattggcttttgttagccagtttttcctcgttttgaacaagttcctcaactacccgggtgtctaatttatatatttatatatttatttgaagaaatttatattaaattattatatatttggccacttggaaaatggtaaaatttaaaatattcatttgtatatgaaaagaaaaaaagcatgtaaaatgtgacataggcattttgcagcttagaaaactacttagctaacctaaaatcttccttgatttgtgttgtctttttgcataaatttgtttaaagtttggatttttcttttatatggtatggggaatccaacctttgtcttcctcgtaatctcacatacccaattacatgaacgagtcttataagtggtttcaatattaaattttaaagataaaaaattatgtataatttctaaagaattttatcaattgaaggtaaaaaaaaaaaaaaaacgataaattaatataattttataaatttgaacttttcagtttcacattcagaaaggaaaatgattccaacaaattggtctaaaaaataatttgtttatatgaaagtaataacaattaaaaaagaaaaa

SEQ ID NO: 190712 - DNA, 5902 bp, Cannabis indica
  modified_base (67)..(67): a, c, t, g, unknown or other
aatattgtttagttagtactgtcatgtgtgcatcttgcttcttctcttcttcttcttctttttttcncttcagggagaatatccaaagtacttaccatattaaatgacatactttagtggcgtaacagcgttctataagattgattcaatagggcaggatatcttatatttgcttgcttctcgtggagtgttgacattgataagttggttgtattgagaatttttatactacgataggcttttaaaggtttaggattcaaaatatatgttgacagagtctattttgtcatatcttccctacttttttattctatttggttaaatctattataatgtttttgttataataaacttaaaaatctgttgtgcaggacgagataaggaaggtattgggtgtgtgtcctcaaaatgatatcctttttccagaattaactgtaagttagaagtgtgattcatttgatagaacttgcttttgactataaggtgacctctcaatgtagtttggatgattccgttcacaggtgagggaacatttagaaatatttgccaaattgaaaggtgttgaggaggattctacagaaagagttgttactgatatggttgatcaagtaagctactctcaaattattctgtacttactttaatataaaaaaaaatagaaaataaaaagtaaagctcctctctagtgtcttgcctacattttctgctgtactagtttgtttggcttaatttgcgtgagaggcactatttccagctagtttcgcttgttgttgaacttacatcaacttctagcatgctctactttgattatgattttttcccctatcagtttagagtgtctgctcaagaaatgtgattttgtgccctctttagcttaagtgctttaatggtctctcatgttagcctttgaattcaaagactctgtataccatggcatttgcaaagtccaaatttattaagatgataattttatacatgatgaagaaaataaaatctcacattatatagagatgtgaatgattaggggtttataagaatttgggttttcggtctataacaatctttttttttatatggtcaggtggggctggctgacaaaagtaacactgttgtgaaggctctttctggaggtatgaagaggaaattatctcttggtattgcgctgatagggaatagtaaggttgtttgaaatctgcagatgcatttcttttctttctttttctttttttgatgtgaaataatgtactggaatgatttcttgcatcttttacaggttataattcttgatgaacctaccagtgggatggatccgtactcgatgcgtttgacatggcaattaataaagaaaataaagaagggcaggataattttgctaacaactcattcaatggatgaggctgaggaacttggtgatcggattgctatcatggctaacggttccttaaaatgctgtggaaggtacctgctatgctattttcttcactccctactctcattgaaccacacttatttattttaacacaatttttgcaaacaatataataatatatgtagattcttttggattatattctggtgattacaatatgctgttgaacagtcaagactattatgccttaagctacaggaacgtgtcacatcatgtcattggatacgttatcttctgattctgatttagactgtagctgtaccccttttcattgaggtttataccatcccttatattccttctttagttttttcggataagaaacaaggttgaaatataaaaaatggtagagtatcatctgtattacagcataggcagtaccaaaaagtctactaaatcccaagaattgtataagacataatgaaaacatcttcccagaaaactcctagaaataccaatcggaaagaagcatagcaaatgagtatgcctgaaaatccataatattgaggatccaaatagcaacccaacacttgattttttccatgtaacacccacatcctcttctacattaaaattcttgatacctggttcttgcaatatcctctctctctctctctctatatatatatatatgtatatattagttattttaagttgccaatacatggttttcatactatccctgtgatccgccccatatagaaatagcaaaagaagtagtaaaaggatacatggggtcattcatgatgttcttttttgtcaaagaagaagcagcagcagccgtgggcttttgtccatgttgtgataactttattattcagatgtgggttattgtcatttgtactttgcatgttcatttgtgggcttacacaccggcacattcatttctttatgatttatgtaaaaccagctattgataacatgctcactaattataggatttgatcttaacatgtttatattttgattgcaatgttcattttcaacagctcccttttcctgaagcatcaatacggagttggttacactctaactttagtaaaggtatacttactttctcttttgtgttttgtggctcccatttaataattttttctaatgataatagaagaataaacttgttgtggccttgctgttttacttcttcagtctgcacctactgcctctgtagctgctgacattgtttatcgccatattccatcggctacatgtgtgagcgaggtattcctgttattcgatgacttaggaaaatattgttagcgattactgcatccattatgttaatattatatttatatcaattatcagatggatgtttttttttgaaataattatcagatgtttgatgaagaattttgggatccttactttttattttatatttgaatgatgaaacaattttaattcaattagggaatagttaggtggcggtacgaggacctctaggttgtggtttgcagcaatattagctagattttgggctgttggatagagaagaatggtaggatctttgacagtatagaacatgaagtaagatgatttgtgggagaatgtcaagttttggcttgcttcgcgggtttataaaaccaaaggtgttggtgatctgtcatttcaagatctagttagagaatggggatgtatcttggtccaagatagtatacacttggcttcggaaatttgaagtttattgtttactttaatgtaatgaaggcctaagtcttttggtataagattgttcgttttttaaatttaatattttgttaccatggttttactctgccgtaagtgaggctccctaataatatgggaggaggtcagtctaagcaatcccaatcccttaacatgtgagaacataaaaacaaggaagaaactatgacactctttagccatataggaacccacaagaaagacactaatttggttttaaagtatctataagaaatctatacaaatgtacttaggtcggtgcaccatatagcttttttgtttgatcttggcatttatgtttggggtaaattgagattagcctttctactgattgttctcagattaatatgaaacaaaagtaccgtgaattactaaaaatttgggatagggctatattttgggtggcccatggatgatctcaaagttcgctttttctgagttaataagagtttggcatcatctttggctgtgtagtatgagaaccatattaatcagatattaggtgggctgtgtaattccatttcctgtggaatcttgcaccgtattttgcattctgatttgatcatgtttcatagcttaattacctatgtggctttaatgtttctccaggttggaactgagatttctttcaagcttcctatagcatcttcaatgtcgtttgagaatatgtttagggaaatagaagggtgcatgaaaaaaccagattttgacgtaaaagcaagtgatggtgaagagagagattatgctatgattgaaagttatggtatatcggtcacaactctcgaggaagtattcctcagagttgcggggtgtgactacaatgaagctgaatgtttagagcagaaaaatagtatctgtttaccttctcctgtgacttctcaggttcctcatgatacagctcccaaaaagattttgcaatctgacaaacttttgggtaactataaagatattctgaggttcatgtgtactgtggtggggaaagtttgcgggttgattttcacaacaattttaagtttcattaacttcttaagtatgcaatgctgttgttgctgtttcatttcaaggtcaacattttggcagcactgtaaagcgctattcataaaaagagcaatatctgctcggagggatcggaaaacaattgttttccagcttctgattcctgttgtgttcttgtttgttggtcttctttttctcaagctcaaaccacatcctgatcagcagtctgtgaactttacgacctcaaatttcaatactttgttaagtggtagtggcggcggcggtccaattccttttgacttatcgacacctattgccaaggaggtttgtcagtgattagtctctctctgataattttatttctgtctttgtttccttgatatgtagtacattctttttgttttgtctctatatgtttagtccaatgtttgctaccagctaccagctaatagcttaaacttttaggtaaattggtaaactaacaattggacctacactctttaactgacagtatgtgtgtgagtaggagtgatgttagaatatagttttctgtttaatgcttgcataattttctcttagaacttatgtttgattgcaggtatcacagtatattgaagggggttggatccaaagctttaaacctagtgcatatcgattccctgattcagaaaaggcactaactgatgcaattgaggctgcaggacccactctgggaccagttttactttcaatgagtgaatatctaatgtctagctttaatgaatcttaccagtcaaggtatgtcggtgaaaatgttagagttcctttcatttatttcagttaagctatgcaactgctgctattctatcacttcgaatgaaaattatataaatttcatttatgtcgttttaattttcatagtatttgaaatggatcttctgcctcacttctaccaatttcatgttcttacaaaattttaagttgtgtatatttccatcacaccagtctcttgagattgcttttgacatttcttgcttgctgtctcttcctctctttaagaaaaaaggggaattgaatatatgttctgttttctctcggttcattttcattttagactctgtttgttgcagatacggggcaattgttatggatgatatgaatgaagatggaactttaggatacactgtactgcataacagctcttgtcagcatgctgctccaacttttattaatttaatgaatgctgcaattcttaggcttgctacccaggataaaaatatgacaattagaacacgcaaccaccccctgccaatgacttatagccagcatttgcaacgtcatgtaagtttctcctttcttttaaatatatagcttaatggtaaacagtctcatttttaaatacagaggaaggggaacgtagaaacaagaatccaaaaagtatgtgcactccttttattgttttttaaaactgtcgtgcagattaatttgttcttaaaaatcttcaccgtcctccctaacatcacttcagtctttttagcttaatattaaatgcataaacaaccattgaattataactgctggctccatttaagttgaaatgctaaaatataatgaaaagttcatgttccacaaaattgaagagaattgaataaacaggcttgttttccatacttgcgtccttatactatgcgagctaaattcaaagatcaaatattttgtagttgcatgtccgatttttaaacaatattagaatgcttcacattgaacgacatcacttctctctctctctct

SEQ ID NO: 190713 - DNA, 3044 bp, Cannabis indica
tttgcttatagcccattttaacttagggctggcgctgaatctaactaatttatataattaaataaaagtaaatacaacaaaatataagtgattagttaacaaattaagtttttttttttatttaaacttatcccggcttcgacgtgcggagtacaaagatctgtcggtaaattgtattatgtgtttactggttggggttggggttgatcggggttcgcgcgagggagagctaggggagaaagatggggatggttgggtcgcaataggttcgcaagatctagccagtggtgtgatttgaggcggcatggtggtggttcaacagtaatagaggcgataggattagagagaggataggaaagttaaatttcttaagagactattacagtctagttatgatgagtattaataaatagtttaataaatatttattttctttaatatttttatatttaaagttttcagctttttactttaaaaaaatttcaactttttatgtttttggtgttagaaatttttaaagattttaattttttaaacatttaatctaatacacgcaagcaagaagatatttgatagtatacacaccaaaaaatcatttacatgaagagttaaaaaaatgtcaccatactataacaacaaaaccaatatcctagcatagaattattttataattatatatataaatagtctaatttgctttaatgtgaatgtaaaaattgacggagataactttaataattagttcaataatttagaaaagactttaatttttttttttgaaataataataacaagactcagtgaatattttaataaaattaggtggacttgcagcatcaagatgtggttttgttttttcgttttattattattattattattattattattatggacattgtgttttgtaaaagttattaattggactttcaattttattgaatggcaaaatgaatcttgtattttcttaaattgtacaaataagacccttaattgattttttgtcaaaataaaacttaataataattcgatctagaagtgttatgacaaaactaattttgtattaaaaattgttttcaaattggttatattaaaaaaaaaattgttaaaaactgagtttaaagtctaatttttacagttttggaaaatataggatctattttattatttaacaaaatagagattccaatcagtaacttttacaaaatacagagccaaaaataatattcacccttattattatttaaaaagaagtgtttaaaaggttaggccacaatgtctcaacaaagaatgtgatctcagagcgaacttcactcaacaaaattagatacgtcatgggctaatgctcactgagccactaaaaggttagaccacaacattatctctacagagaatgtgatctcagaatgaacttcactcaacaaaattagatacgtcatgggctaatgctcactgaaccacgatattggcagtggtattaaaacatctctaatcatagcattgtttaaagttgcttaaaatttttacatcatctaaaaatataatattttattgtatctctattttacattatttttagcaaccttacttctaatggttcatttggtaagcatgattggactgaattaaattgtataatttgttcaatcttatgtttagacatgttggaaatctgaataactaattcaattaattctagttgtctgaaattatttatctcatttaacactgagcgataaacaaataattccatgcatgtatgattttttttatttaaaattttataaatatattttaaatttaaaaagaatttaaatgaaatggcttacaaatttattaattaaaaatggtagaaatatataattttatatttaaccccacataatattttgaaatttaaaatgatattaattaaaaaatatatactcaatggattctaagaaaagcaaaatagtaatagaattatatattctcattgaattattaaaattataaatatgatccactttttaattattgaaattatttatatcaaaattttaaaaaaataatatttgtattaaattaaataatttgtttaaattgatatttaacataaataattttttattattcaaatacttttattatatataatcataataaattattctattacgaaggttgttataagcgtgataaatatacacatatttaatcatattatgatatatattatttttcaaaaatgtattttattattacttcttataaagaattattattttatattgtgattccatatttttttattatttaaatttaaatttttattcatttatcattagaatatattttaattggactgaatttatatctatatattttaaatgatagtccaatctattctaaaatcaaacacaaaattacattcagcataaccctaattgtcgtaagaataagagacgggtcacgacactcacttgtagtgttgcggcccgtgccttcaatgcacgagatctccttttaaattttccatagcgggtcgcgacactacaagtgagtgtcgcggtgcttgaagcccgatttttgatagagaagaattaatagtttcatgaccttgctaccaaatttttgtattttaatgccctgacattgaagtccagtgttgatgcactactccacactttccaattctttagcattagaagctccaatcgcacctaatttctttcttgaattattttcttaatgctctagcgacaaaaattttatttaattcatccttcttacacattttttttttttttgaatttgctctactcttctccaatactaaacctaaaaacattaacaactaaaagcgtaaaattacacaaacacaactaaaaactaattaaaaccactttaaaaatctactaaaaagcactaatttagtcctaacactcgtaccaatagagatacgtacttccttatatactcatgatccttcttatttctagtcaatatgaaattttagttgcaaattcgaattttacatattttaatttaataattataagaaa

SEQ ID NO: 190714 - DNA, 1853 bp, Cannabis indica
ttacaagaaaataataaaaaaataaaaaaaaagaagaaaacagacatttattgataattaattcatataaaggttatgctgttgggaggggtgacaacaacaagctcgtaccaccgatccaagtactatcatctatcttcatataaccttctgctataatattatcctactttgcctgcataagcattaagcataaccttgtatgagactaaattcattcaaccaacataaactcattaagaataaacactaaaactaaagtgtctagcataacatttagattatagaacatcaacagaaatacagaagctctaattatgaatgtagaagccaattttgatctttacaacgagtgaaagcaaacgatttttttttgtctagcttcaccgttgtggaataagttttacaagaagaaagtaagtaccttggtgtagctccgaaaacagagctcctggccatctaatagtaaagaccacctgcagataaaattacaagaaaccatgaatgagaatacactgagacaacaagaattgttataccacaagctaaaaaaacatttcataagaaaagtatcacaccttgccaccagttcccccgtgaggcgctacctgaatcatcttcagcaccatctttcttgtactgcagattaagtaacaaagcaacaacttatcaaactccttaatacaaaaaactaaaataaaaatgcaaatgttctctatcatagaatatcagttatactatgttgttatctactattgtcccaccagaacaatgagactgaggaatcaatgtcacacgccctttcatcatctaagcgggaatagtcaacactagttcataaattccaatttatattccttatacctgtaaagtgtaaaggtctcttaaacaaacttcataacataaaacaaaacaagaattgctagaaaatgcttaccgtcgagcttggtgtgctatggggattacaatagacgtcttgaccaccataatagattgatgagcttagatgacatggttgcattcgttgatcctgataaatggagccggtgtctgtgttttgctgaatttggttctctgttgctttgcttttggatgcatcatctgcaaatacaatgtgaaagaagacaatttttaacacacacacagctaaaaataactcattaagcttattttattcagtttgaaatctggagctagctacaaaatgaaacagatttgtcaaaatggcttgtatttcatttactagttgttttggatttatatctatttgcataagtaagtctcatgtttgttagataatttcaaaattaaaattactgaatttcaacaaaaaatactcaattaacaaaaataaaacacgtttaacaatcagaatgagcaatgcagatactaaacaacacacacacacaaaaagataaattaataaatgaaggaatatagttctatatatgcaaaagaaacctgaatatccatgtttggtggtgtatgattcagtgaaggaactatgccttctccctggtacttcagaacgcacagattctctacctaaaacctaaatccaacacacagataaatctcagaccatgctaagcaatcaaatatatattttctatttgcaagaaaagagaacataaaaatgattcttatgcaatctcacttagattgaggttttcttaacttcatccatatatacccaaaagaaagttttcctcttaattgagataatgaagagaacacaaatcaaaataaaacataaatgtcaacccaatatttcaaaccatgaaatgaacaactttcatttgaaagtcaattgcccccaaagccaaaacagagccaatattatattaataata

SEQ ID NO: 190715 - DNA, 3764 bp, Cannabis indica
caaaaaaaaaaaactatgagaaacacaaagtaggctgagtaggctgatcaatctgaactcccaagtacgaaaaataacaacaatgaaaaaaaattgtaatggcagtttttatcaaacaaaccacaaacataaaaaagaatgagcaaagataaaaattattgaatgtcacctgatccaagaactctcactatacaattagaaccttcctggatggatttcacagttgctccctgtttcccaattaagcttcctgcctgtgaggctgcaacaagcagcctagttgacacttttactcccacatttggtggagcattaggatcaccatccaaaccatcaacaatacgtttgtgaactcttaaaagaccatccacagcaggaggaagggcagattccggctcttcctttgcagataccataacctattaaaaggaaacagtaaaataagcacaccaaagttataaaaacatgttattcgacagaaaggtgcctcaacattcaaatggaaacaaggaatgctggcggaaactggaaaccctcatcctaaccaaaggccacaacatatttaataaaccaaaatatgtacaggcctagacaaatctccatttcttgataattttctaacactgtctatcaacaattactggcttactgttactaaaggaatgttaacaacctcaatgttaactatttgaatttaacatctttacttattatcttctatataatttatttcgtttcctttatattttattttttattttttatcttgagtacaccattgcggcaagacatcaatcatccaagttctgaagttaccagaagaatgcagagctcttgagaagtatatgtgtttaaacggatctaacttttcagcactttgtaatgctcaatgctgatctctgcaatctggacctttggttcttcaagtttgggatcttattgatgattgagtcgttgacttaaaaatttgagcatagaacctgcacagatccattgttgttattgccatagatggaatcgtattcacattttaggatttctttgggtgatactctctttatgtcttctttcagttaaagttttagaataaaaactttcatcttattaggatttaggagtcatcaacaaccacttttcatctttccttgtactgtccccacaaatttacagctaagcttcaagttgtttaacagcagcagatccaaacaataattactcacaacaacttcccacaaaattttatctatttaatatcttgaaaactataaatttgaccaagacactagcacaagtatgggatataagcatacacaaaagagctaaagcatggtgactattagatcaaccaaagatcaccaactagaattgataagaacccgaaggcttgttgatttgaagcatgtgaacttagtacggtttgtctctttctaattgaaacactataaattattttttgtaccttcaacttcaaatttcaaattataattttttaacaatattgttttggtgccaagtttctttactaagataagatgttaagatgacagaggtctacaatctacaccctgttattatttcttatcgtttccttttttagtgattaggcccacaaggcaaggatttgtgtcaaacacttgactttagaaatcttcttctaaactgagaataaatttagttaaagatttttagttaaaaatacatgagttcactcttcaacatgcaacatcctactttctgcacatctaacagctttaacttcttaattatgctttccattataaagctaaagctagttgaaccagtaattgttccctaggacctagacagtgataaagagagcagaaacaaccaaatcataaagaaacctatggctctacagcagaacacttattcatttgtaaaaccaacaaatcctgttgatgaaaatggtataccaatcactcatcttatactggaccatcaaacaaaacaaaagtgtaaacttaccgctctttctgctgttccaggagggccatcgagaattttaattcgagctcttgtctcctcgactatttttttgataaattcccctttgcgtccaattatgctaccaactttttgtgcaggaaccagcatacggaaaacactctcaccaggccatccaggccactttttttcagcctcacccatgacgggtacatcatgttgatggtgctcatgctcgtgcccgtgctcgagttcttgttcttgctcttgctctagttcttgctcttgctcttctttctgttcaaacagggcctcatcctctggcatttctgggtgcaggtgatctgggacttcggagtttactgtcatttctaagttttcaggcacctctaagttttcaggcacctctatgctttctggcagttctgagttttcaggtacatgatctacatcttgctcaccgaagctttgatcaacttcagccatagattttgcgctgaaacaaacaagttacgagaacataataaaccttaaaaaccaaaaacatgcagaaccaaatagtatattaaccgcaaatgtaagagaagtcaaaaagcactattcacaaccaacatttgacaatgttccacatttcctaatcttagtaagcagcaagacttacaaattcctagcactaacataacccaaccaaaagataaaccatgtgtatgcaaataaatcctccaaccacgacaatgataaaagaaagaatcacccacaaaaattcgaaaagaaaaataaataaagtactgagattgtcttccataatactcgcgccgaacaaatcccaagaagggattgaaaatgtttcagttgtaaaaaacagaaaatgaaaaccctagaaggacaacagttaatatacaaaggaaagcaacacaatacttacaagggcaacgaagaatctactattgaggatttaggggtttgaaccggagaaccagaagacgttcgtttagggttcgaaaaggggtttaaagagagagatgggagggattggattggagccagttgatttgattttatctgattgggtttgggcttcggattgaagaggaggcaaagttatcgtaatagcaaaactaggcttcaacttgctgctatttcctcttcgaggtccctataaattgttatattcgtattttaactcatgtgtgcaataaacgacagaaaaaggagggagacgacagtaaactacataagcttttccgacactattgggagaaacgacaataaagttttataatgttctgtaaaaataaaataaaaatagtttatgggtgtgattttaaggcaaaaaaattactttctcctttccaaaacaatgcagtcttttttcagttgagctatctatttaaattcatggttttttttcatgtcaaaaaaaatcatggtttttttttcttttattttgctgatatttaaattcatggtttaaaaccaataaattcaacatcacagactgtatttttccaaaatatttgtatatcgcattacaaaatacaaactgtatatcaattattattttattatattatttattaaattgactgaaatcataatcattctattttgtttaatacaaataaaataattggaatgccttaatttaataataataataataataccatgtatattactattttgggtttttttttataaattttgaattttttaatctgttagagaaatatgaacaattaaagaactactttaaagctataaaagaaaaagaagttcaaaatttcaaaaaaaaaaaa

SEQ ID NO: 190716 - DNA, 2911 bp, Cannabis indica
attgagcagcagctgccttctcgcactccaaatacaaccctccctccattacatcttttgtgaccaccttatccctctcttcttctttgtcttcttcctgaaagtctaactccaattcatctgaatctctgccaagggtcgagaaccccagtaactccccctcttcttctctaaaatccacccgactttcattatcctttctagttttgctgatattctctgaatctgagatatcacaaccatctttctcttcgatcaccttaccaatctcaaaatcttgatgccaacaagtattgaaaaagccactgtattcccagtcgtttagcttaaataactctagcttaattactaatttttcaaactcaaattgcagaaattctggcacgaaacctttgttgtccccttcgagtttgattctcaggtgattgagaaaattcatctctgctgtgtccttttctacgtctaacagtcccccacacaagtctccaatttttcgcattagtttcatgttccatagattcaagggtaagcttttgacccctatccaagaaccacggcattcaattttgatttctctattttgctcctccgctgaccatcttctaaatgagactctggtgtcccctgtgccagggataaaccagtttcctatctccacaaaattctccacctcattctcgttgttgcaccaaatgattactcgatcatcaaacaattggctcacttgcaattttctacccaattctcttgagagattataaaaaatacagctccaagataagccactgttgtctctgaacataatgacgaccttcttccagtctttttcacattgtttagcttgcttatattcatgaaaattattctgcttcattcttctaaatgggaactcgttttttggtctaaaacttccatttactttaggcagaaagtcccattttcccaatcctttaatcttcctactagggtgtttcacaggggccttattaccttcaacgttgccttgctctgtttccttgtgcttcctgttgaactgaatcgctttgggggcattcttcaatgagttttttacaacatttacccatgtatgttgttttgttgcatcccacgccaacttttcacctccgtgctgccttggaagcgcttgatggttctcaatcttccttctcgtgactccgtcttgaaaactttctggctttcttttaagtacaccaacgagacattcatataggtcagactatcctttagcttctacttcttctgaaataatcaccattttgactttgttattctgcaaggttgaaatctttaggaaagctcccttagagttatcgaaacattccataaaataacttccactgctgaatctgaagaatcttttgaaagcaattctttgctgtccagcttctttttcagttcctccatgattccaagcatccagtctgctgcatcgattgttacccttatctcgtacccaaaaagtcttgttctctcacaaattctaaccgatcctccatcctttgacaaggtaatcataaaggccttgtgtttaatgtgaaaactccaatatttttggattttctgatcacgatttggatcaaatagttttcccagccaacaccagtggggtgagggccttttttcatcccaaaaccagtggggttttggtgttttccatgaccagaagggccatggtaaccccccatatgcatcactaagtttctcagaaagaggagagagaagagggcatagggaagtcaaagaggcaaaggtttttatgtaattactaccagcatcaatttacttagacaaaagataatttctttttttaaagttttagacataacataattggggagagtaatgacctattggaagcacaacgtgctgaaatgcgaaaacataatcattatcaccaactcccttgcgactccatggaacatttacgcagaacccttcagcccccatggtaccaacctgaagaatatgaagtcactcccaatagttataatccaaatgaatattctgcataaggtgctcatataatgtctactcatggaaatgttaagtttaaactaaaagtgtagaaatataagttttacaaatgaaaaagatatatatgtaaatatagcataatataatatattaataaaattcccacaaatcttcaaatccttgatgttacaaaatttggtttctaatggtcggtgtaaattttgtctaacctatttaaatcccatggatacccatgttggtatcccataaaatacaagcttgtaaactgatgggcctcccataagatttacttatttgaggatagaagaagtctttaagttgttgtcattagtttttcgtttagtggcttattgtgtgttgactgctattgttagtttgtttcaggctgttaggctgtaaagagagtatagatagtttgtaaccaatttgtagaaggggtcttcggcactaaaagaggggttttgagtaagaaagaagaggtttccagttattggttgagttctatcaaagcattaaatgtcagaaaattaacgggaaaacaaaatcgtaattccggagcaaattatagataaaatgacaaaatgaattcctgaaataacctatccaggtcaaggtccattaaggctccaagtcagatattgtcactctattttcttaggttgtatacgtggctgatgaataatcttagaaaactacaacttgtttgcagagaaccagtttaattaattaaagtaaagaatagtaatcagctatctttatcactatcctggaacaataaacaatacaaaactgaaccaatacctcatcagcagccccagtaccaggataaaactttcctccttcatgtctatgtaaggatatatacaggacctagaaatcaaggcaaatacatcag

SEQ ID NO: 190717 - DNA, 3485 bp, Cannabis indica
acaaattagtctattttaaactgcaaaatcttgtgttttttttaggtgaatggtcaagcacacccaacttttcgaaagctgactaatctgactaggcagcaactaccactagccaccaaccaactaatcaaataccggggtagtgcagctgctggtattgatccattggttggcactattagaaaaaccaaggctcaaaaatggatgctttattttagtcattcatttcttaattaaaaaaaaaaaacgaactcaaaactaaaccgacccatcattccaatagcaagacaccttcaatagtcaagcttgtgagatcataaaatggaaatattctaaagagtgacaatttgagatttcagagaaaaaattacaatagaaaaagcaaagcacaaacaattaccaactcaaaataacaaaaagcaaaaggggtgtctgtctcctcaaacttatttattgtcaattttctttttcttttttctaaattactattgagaaattcaacttctttttgtttcttaagcttgagctgacttggtgtagaagcgaattccgacggctacacccaaaattagaagaggaacaagtacttggaggatcttgatgatgaactctggtgtcttgtcctggttataatgaggctgttttggtggtgtgtatgtcaccttagaaggaatagttgttgtgtcaatatctcctatgtagaaatcatccatcattgagtaagcacttgtactatgccccacatcctcaaaatcattagttgcatcctttcctggaaaacccacatacaacattttggtatatatgagaatcaacacaagttttgatgtgaaaaaaaaacaaggaaaatgaatatagctctaatgaacctgtgctagatagtatgacatcatcaccaccaggatggtcatccaagaattttgttacatcatatacctgtccccaacaaatgacaaatgagagtagagttaaagatcaatgaaattgtaaatggatgaatataaatgtctaggcataacataattggttgctgagtttgaagtcaagccatgtgacaaatttccatgttgttggcctaattttgaagtcaaaccacagacccctatggctctacataacactatatatggcacataaattaagtgaatattaaatgaccactaaagttgcttggaaatttgggtcaattaagtggtaaacttttatacatcttgtaagtgattctaattcctaaaggggcataagcaaacaacacaacagccataacaatcttgtaaattgccaaaatgacctattcatgtcacaacaaacaagttagtaacaagattttttttttttttttgttttggaatttaacttactctcaccattttatgtcaatttcaaccaacccttttttgggtacttagatctgaattaataataaatacaaaaggatttgtattaatgaagtcaacactttcctaagaatcagataccaatttcacaaagcccttcaaaaatcaaactttaaggtacaaaattcaaataaaaaaaatcccaaaagtaaaaacttgatcaagttatttattatgtccaattccccaaacactcaattgaaaacaatagacacccagatccaatacgaacaatccgaataaatctaaacgaaaaatccccagaaaaaaacaatagaaacccagatcgaaaatcaattacctttccgcggatgacgagccaacatttgtcgcggttgttgaactcagaacactcagcaaaggtgtaaacttttttgtctcctcccatactattgatctgagtttgtgccgcgcacactccagaaagctttaaatatcaaaagagagagaagaagaagaggaggaggagttggtgagatgaatgatttggatttcaaagtgttaattttatggttggtttggtgatataaccttctcaattgtagtcagttgtcaccaacccccagcctattaaatttcaatttttaccccttcattttattgtatttatattttttgcctggtttcaacctcataaacttgcaaactttatccttgagtttacaattatactaaaaattgtactatatttggacaaaaaaaaaaatgactttataatgtgtttgcataaacttttagcattgtgctttaataaattaatttatagtgtaaatttggtgctaaatttagctcgaaaaatgaattagtgtaatatttggcataaattttaaaattgtgttctaatacactatgagtaaaaaaaactttattttaatagaaatgtgtaaaaaattaacaaaaaattaaatttttattgaaagtatctaaaaattatattaaatataaaaataaaaatataaaaagttatcaattgcattaatgtatagcaataaagtaaataaaaaataaggtaaataacggcataattacttaacgttttaagtttgtaagcggaaaattacagttttacaaacattgggtacttatcccgctaaaaataaatattgagattatactacttacaaacttgaaactttgagtatttatgccgctatttatcctaaaaaatataatatttattatggtataaaatttagctcatactatattcgtgctaaatttcacataactatttttttttattattatttttattttttttctttttcttcttccggaaccacaacccagagcatcgctgtgcgtggtggtcgtctctgatcaaatgtggtgtatggaaaaatgacccacaagatctgaaagctctcaacacaaggaagctagaaacgaggttcttttagcctgttgacaaccgagaggccaaattggagtcgaaaagcttcggctctggcgagagaggaaaattaaaaatatggggggaaaaactcagggttttggtattcgagacctaaggagcatggatttgtggtccttttggaccatcacggccgtcaaggccttgtcgtcatatttgcacaaagaaaggaagggaagagcaagagagaaagatacatgagaaagagggagagggaattaggttttatggggatgatgagggagagaaagattgaggaagagggagctcgagaaagagattttctgggtttacgggaccagagctcatggtagtccatggctagtgccgccacgcaagagaactgtcaaggctggagcttgtaggggagttaacaaacgatagtagacggaaagagtacagaacaaaacgattttgtagattggggagttcaaccttaactatttcagtttaagggttgatcgtgtcaaacttaaacgttcaaagagtttggctataaactaccctttaaattatatttgtctctttatcacaattaataattacattcaatttttaagaaaatatttaaattaataaataacttgtatcaactttggattatggttgaaattttaagagtcaaatttcaaacaatttgttacattttggtcttttctattttttttttttta

SEQ ID NO: 190718 - DNA, 1087 bp, Cannabis indica
aaaaaaaaaaaaaaacaagaacatttcctttaaaataatattttgtggtttaattttgattaagtgagttaatatgattaaaagaattaattaaacatatttaattagcttactaatttcaaaatattttttttttattattggaataatgttttaattattttttcaaaaatgatataagattgatcaataaaaatgtgacacatgtcactttagataatattcatgtagtatttaaaaaaagagtattgttattaagcactagtgcccaacaccttctatatatttggcgtcctacatttggttagcgatatttcttaaaagttattttcttaggttttatatgatccaatatttaattacaccaataataaaaaggactaattttttgagctagttggatgatatttttggaagggcagtcaaatgagatgaggtgcttggtgtgttttattttttgggccatttggggggcaaaaaatgagatggtttagaaggaaaaagtaactggtcctggaagtattgtagctaacgctaaaggcttccttgatcaatgaaaaaatgctaaaaactcaaatttagagcatcacaatctttgttttagattgaagatgaagttgaggtgtgttactcagtctaatagtatcaaggttaatgtggatgcttcgatctttatgaatgaccaaaactactgtatggatttggtggctagagacgatagaggcctatttattgaaggttgcacaaggctcttccatgatactgttgtgattgaattagttgaggtcatgggagttcgagaggcacttagttggatcaaaaccataccatgaaaaaacttggtgttagaatctgattgtttggtagtgatacaagctttacgaagttcaacaatgtattctgagtttgatctggttatccaaaattgtaaagttttattacgtgatttgcaaaatatttctattttctttattaagcagtagctaatgtggttgctcccaacttatatttggaaaaatttgatttagtatgcttaaatgtaaaatatatattttaatatacaccaaattagaaataatatatatat

SEQ ID NO: 190719 - DNA, 1955 bp, Cannabis indica
aagaaagaaaaaaaaattgcaatgagtaccaaaaaaagagataatatttcactcattgctttgaaataaaatcccaactccacttttaacaaagttggtttcactagtgagtagtgagtagtgagtagtacttttcttttaaaaaaaaactcatcatactgtatctaaataatggacatgaatatcattataatcaatcaagggcaatttggtctttctgctataagataatgtcactcactcacccataatgataatcaaagcctagtaacagcctttgattttgtcaacccttgtgatttgaccaagggtattttggtcaaagtaaaattcgttgactacttatgaattatggatatcaattataggagtctggctcttcaacgtgattaaccattatagtccacctccaaaatgcacgtgctggacatgttgtcacatactaaatctaaaaagccatttaatgaatttctcacattattatgaaactaatgaccttataacttatcataaaatcttaattaaaacaaaaattatatatttatggagaaaatgtatatttttttttcttttaatatgaattttaatttaagttgttatatcaacttgaatttttaattaagttttaaatatatatcataatagaagtacacaccatcgaccattctaccattcattttgaaatcaaaaaattataatgggatttcccaccatttacccaaaaaagaaaaagcttgacttttcaagttgatattattgatttttggtataaattttcacaaacttaaaataaagaaacatacttaattactttatcatagaggaatattttctagttaatttgaagtagatgaaaaacattgttttgggaaaaaagtctttgaaccatcacaatttgattatttttaaaagtaaaacaaatattagaattatcattaatcaaaccatatattataccatacttaacattgaaatgtatacattctctttctctatcactctccctatagtccatatcatttttttttcttcaaaaagaaaaaggagcttttttactttaaagttggtcaaatttggtccatccaaatattagaaaagtgaattatatatatttatttagatacaattataaaatgttatataaacataaggtgataaattcaccttttccttttgagccaagttatatagggttttgtgcttcttgtccaactattgtctacaataagagggaatccaaaggcattgtatcttatagtgtgtgttttttttgtttttgtacccacttaaggccaaactctccatatatataatttatataagaaaaaaaaacttatttttaattatacattaaacaaatattgtatcatatttcaacaaactatacttgtattattcaaaaagttacacatgtgtgaaaaataaacaccaatgataatattaataataattattatctcagaaatatgttacccctaaatgaagccaatattctgacaatatcccatcaatggaaaataaataaaatataaattataattgtgaattgtagtgcaacttaaaaagataactatctttccaactgtaaggctttttattttttatttattttatatataaataaataaataaataaaattaatttgtacctactaccactaaatattgttatacatcaacttcattctttatgttaaaataagtatacacacaaaatgaatcttcaatatttatctagaattaagaaaagaaataaaacattcctcttctcatattgattgtgtattaatttgttttcaatgtttatgtggtgattaactgattatgtaggaaaaaactgctatatttataaatattagtaaatgttgcatttagtctaagtggattttggggcccaaaaagatactattatcaaaatcaatacaaataaatattatatacacacattatatata

SEQ ID NO: 190720 - DNA, 3166 bp, Cannabis indica
ggtttagtcatgattgatatgattaaaaccgctttgatcttatatgggtatagttgatggacgagattgttgtgaatacctttacataatagcaaattttgtgctcatgatgttatacatttataaggtaacatatgttgtccaagtgagaaattattggattaaaaatcttattgtgggtacatatgtacaatgcatatgttattatattttgtgatacaaaattaactgatcaattatgttatgtgtatcaaaatagtattaaattgttatgaaaataatgtgtagatatcataagttaatttataatttgttgaggggtaaaattataaatacccaaaactcattatatactgagtctataaataggtagtggttctcaagaaacaccaagttttcattttttttttctcattccccatcagagaaaatgttttaagaaatattgtatccttagaagatcataatattctatacaatctccaactatgactttagattagtaattctgttcatattttatcattcattttcttttttgatttagtaaaagttctataagatatgatttaaaattttatttatttaaaacattttaagaatatatttaaatcagtgaaatattctataaatactaacattgccaccaaatatagttttgactcagcaaaattttgataaaattagaaagaaaatcctaaagaagtataacataaatgatcatttaattataagttttgttacatacaaaagaagagatgctccaggccaaatgcatgtccccgtagccataactcttcttccaaaacgcgttatggtatcgttttcaatagtgtcagataatatcttaatggtacgcgggtaagcaaataaattgaagaggaggaactaagaaggaaaaagaaaatgccctatttcattccactactgcccatacgtcaatgctctttttcattctttaaagactgcaaagactaaaagtgcacactgtttctaacttaaacttcaatgccacgtaatgaataaatatgatgtaattccaagaaaggacaagggtaatttcagacaaatcacgactccacaatccacatccatgactcttgtttttatagcccaaccaaactctattatattatactattatataatcttcttcttcttcatttcatcttgaattactaatttatgaaaacaaaatggacagagaacaacacgagcttcagtttctgggtttcttcggaatcttcaaagaatcttataagatcgtcctcacatggaggaaaatctttagccaaatcactctggccctaattctccctctctccttaatcttcctcgcccatttccaggtctctcaaattcttttctttaagatcctcaacaacgaggaccgactcagcgacaccgacgtcaataatcgagaatacgggaagcttaaacacatcatttcctctcaatgggctggattctggctcttcaaggtcgcttacttcaccttctcactcatcctcctcctcctctccaccgcagcagttgtctacaccatcgcctccgcctacaccggcagatccatctccttcaagaaggtaatgagcgtcgtacctagggtttggaagagactgatggtcactttcctctggagctttgcgatcgttctcgtttatcatgttgtggcaatcggattgctcgtcttgttgattctcttgctagggttttcatccgctggaataatcttcgttgccttgttcctgatcgtttatgtcattggaatcgtttatattggtataatttggcatttggcttcagtggtttcggttttggaagaggtttacgggatcaaagccatgaaaaagagtcgaattctgatcaagggaaaaacaggactcgctgtcgcctattttctggtcctcggattcatctttggcggaatcgaatttctgtttgagaatttcgttgtcctcgatttcagtggcagtttggctctacggattggggttggaatcatctgcttcttgctcctcttcaagttgattctgtttggtcttgtgatccaaaccctcatttacttggtctgcaaatcctatcaccatgagaatattgataagccctcattgtcggaacatctcgaggggtatcttggtcattatgttcagctcaaatctactagggatatccaattaggggaagctcatgtttagtttttttgtatttttttcttaattatcttatgataataaacaaataatgtcataaatataaaagatgtgtataagtcaaatgaacattgttgtttaattgtaaactttattacgagacaaaatcatgtgttattttgttgcttaaattaagtataatacatcaagttttggggaattatatcgatatcattgataatttgctgggtagtttccttaggaaatgggaaactcttaacttattatgtatatatatattttgaaaagatgtaatattatatcattaacatgttatttcattgtttcatagaattgaaaagtaataattgtccctattagtgacgtttgtttttatttaggatacggtgtcaaaatgtaggtaaactctagtggatattttgtcataatttattatcattattgcaattgaattgatatctggaaagtcaagaggaaaatgaaaaaagattaatgtctaccaaacatgagtttaacctttttggacaccgttttgctagctttggatatatatatcttaacaaagttttatgaaactttggatacacaaataacaaataatgaaactcgttcgtttagcaaaacaataaataaataatgaaactcgtcccattgagattctagtacttgtttttggagtttaaaaagtattgacacgtgtaatgtcatactcaatttttttaatttttatactggttgaattaagataaaattttacttacacttcaccttaatataatttattaaagttaactaccaatataattacttatatatacatttttatacatattttatatttactagatagatattacgtgtcaagtcgcgtatgttaattttattttaatttttaatttttttaatatcataattttaaaattaataatattcaatgtagcgataatcattgaaatttcaaagcataagagtaatttaaataaaaacaaaaa

SEQ ID NO: 190721 - DNA, 2231 bp, Cannabis indica
ttatgaacaccctaaactaccaagccttaacccatgttatgttatggttgataattagatatatatatatgttttgtgtgaaaatttaagaatttttttatttttatactttaaaatatatatatatttttttatattttttaagaaatctacgtagaaactcacataacaatcaacagagcaaattaaatcgtaactgaaattcacatatcaacccacataaaaactaggagagtaaccactaaggcaactcaaactatatatttgaagagaaaaattagaaaataatatataaagtaattctcctcaaatatttttataagcttattgtatatcttttatatattttttttcaatgtaaaattatttttaacacacttttctcaacaaaaataaatattttgtatgctttcattagtttgtttaaggaaactttttattataatgacaagtgcttatattatttaacgaaaaaaaatccctcataaacctaaacatacactttattagttaattatttcagtaacagttccgtcgatgaagaataattagacagttgaaattatcttcatctcgaacaagtcttacacaacttaactaatttagcttactgatgttaagaccatgggaaatgttcctgataaaagcatcaaggtttgagtcagacgatccacctttggctattgctttacgacatacttcttgaatttccttcactcttttactcatcactttaccatcactactctctttattcataaacttcttaacaagctctgctattttttctcttttcaccaaaccctgatcatcatcatcggtagttctactactcatagtcgtcccacctttctttattacattatacccaattttccaatcttcaacaatttgtttgctatctgggacttggtcccaaaatataggacaagtcagcataggcactccagagtaaatggcttccaaagtagaattccacccacagtgagtccaaaacccaccaatagaagcatgacacaacacccttaattgatcacaccatggcaccacaaacccaagctcatcatcatcatcagtaccatattctttgatctttgagacattgtcacgtgccacccacaagtacctcgtgccactgccccgtattccagccacgatttcgtccaattgggaggctgaaactgagagaaaactccccagagagatgtataagacagagccttgaggctgagaatctagccatttgaaataatcagctgtatcagaataattagagcaagtttggagctgtgagtgaggtatgctgggtccgagtgggtacactgggaatggaaacttggcctttaaagcgtcaaagacttgggattcaagctcgtaaactgaggtggacaacaagaactgtgccttggaaaccttactagtagcctccttggcccattttaacacctttcgaccttccccttcgaatattgtgggaagatcttcaacgcgaatcgtaggaatcccggggatgtaatccacaatttcatgtccacgcacttcaatacacaacaaacaaaatttgaacaacttatcaatgattagacaccaatccatatattatatatcaatgataatattttagtgttaattatttgattccattccgaattacagtcgaaggccctatttgatgaactaagtaaggaagcagaagtgaagcaagttataatatacatagccacatttttacaggaagacataaattttgtgtgatccttttcgattgtttagtcactatttttttttttaaaatttctttcacctaatgttagagtcaataatcactatctccgtaattgaagtccttttttttttgcactacatacgcttacttgcccatgtttatttttgaaaggtgcaagtatcttcattgttattatatgttcatgtttttatttattaaagcaatctttttcagtttgactttagacccaatgaggaccacgcatacatggcagacaaaagttgaagtacagtccacaaacggtgatactctactgacccacttataatattctattctgaatccatttcccagtaatttttcttttttcacgataatccccatgctctaccttaattaattgatagatatattgaaataaatatatgctaaacattacaaagaataaatgtatatggaaaagtttcaaaatattgtagttgttgtcctatctctatctgtgtag

SEQ ID NO: 190722 - DNA, 2274 bp, Cannabis indica
attaaaacccacatgacatccatacttctatcctattcccatccccaccatatctatagaaagttgggcacataatttctttttttttttttaacaaaagtcactcaagaaaaagtaagcagattccaagtgggcaatccctaaactcaagtaaaattataaacataaaacaaccaaagcaccaactactttaaaaattatggactgtggagtcataattgcaacatttgatctcttctatagtttctctatactaacctcttctcagtttgtatggctggaagaactaggaaaaactgaaacttgggtacacctctcaaatcttcaatcttcaatgagacaaagatgaaataagaaaaacaaaagaattttttttgcttaacagtgggagctgaggcaatcatgcacatgacagaaaactgagagaaagataacattttcttttcacaagaaaaagataacaaaaaaacaggacaggggttgaaaggtgatgtcatagaaatcaaaaaagcacagtcacgtgatttgaaacgacagttacacacaattctaccatactaccataccataccataccaaacaagagaccacccattaaaagctgattccatctctctcccaatggtgcatcattattattagatatattcacatcccaccaaccttttcattatttttttcctttcatcctgtcacaactcacaaatctcaaactctctcacatgatcatttcaccatgtcgtttctcaattctagtggtaattaaaacatattccatttttccaaactccccacctaactttattgagcattaattctatagtccctattatatctattgttttgttgtcctagcaggcggttataataaagaactacaaaataaaaataaagtggtaaaacattattttcatgattggtaacttagtcaagaaagtgggagaagggttaagtattttctgaaagagcatttatagcgcacaaagaaagcctttataaattggtattatattaggttcattcatttcttgcaattaatctagagtcagcttttcccatgtgaagcaaaatggtcggtttcaaaagttaaaacctgctctgtttcaagcaccgaaattttatccaacctctaataaaacccttttatttgtgtaatgaagcacagtaataaattaacccactttagtcctttttcccaaaaaaacaaagaaaaatcctgctaaattttcactcgacttgataaaacaaacactttagtatcaaaatggtcccattattcaattcaatcacatcattgtatttgtaatcaaaagtagatcaaacccacttgaaatgaaaataaataaataaaataaagcgtacctgcattaaaataaaacataagcaagttttgaccgctgtactattacttcgtccaatattggaaaaagctctcagatgaaatgttgaagttgaaagatgaatctcaaatgggttttaggtgaaataaggtttatttatttgagctggaagaacactttcacttcatttcatgggtccctgaaactccatgaaacccattaccaactttaacgtgcaaaaaaagtagagcattaaaatagggttttcctgtgaaaagaatcaaaacccattttccaattaagcttttgaggatggtgaacggagattttagctacagctcggtgaccggagcgaaaaggcagtaaaatttactgtaccaaccgacaataatgccgaatgtatgagtatgagtatgactatttaaaaacgaaaaataaataataaattaataaaaattaaaagaaattaaaaatgtatgtttataatttttaagctaattagatattttctctaaaattttagcatttaacaaattatgtattttttggttgttaaaaattctcttttgaattattaaaaatttttaatttaagaaattttgtctaattttatttaattttattattttacaattaaattatatccccaaactttaatatttactaaattatatcttccaaactcaaaattaaaaattataaaaatcctaatttttataataataatggtaaaaaatgggaaaagggattgtaataaagtggaacatgggtggtaagccttgtcacttgtgatttttattcggcgaagattgcgagggagaggggtacttttaacttttgtctattaagataaaattaaagaaatttaaataaataaaaactgagtattaggaagaatgtttcgcattttcatcggcgacaataatggacacta

SEQ ID NO: 190723 - DNA, 1890 bp, Cannabis indica
aatgctcatgtggttaaactatcgaaatatttaaaatgacaaagggattatgatgatatggatatgtgaaatttttgtatgtagggtaaatgtacgtatcatctttacttatcgtaagtacatcatttatttttagtaagtggagaaattataactattaatttttcttatataataacatagttataatagatattctttttagaatagttattctgttttatttaagagttgtattttttctaatattaataaaacttgtaattttgttgtctataatttagctaagtgagcattttttccaccaaaagttagtgttattctgatatataccattcatattaacattttatgtaatgaccgcaaaatttaactatttcatttgtcgatagtatgctttttttcaaaaaaaaaaacattcttcgtattttgaaaatttcaaatgtcatggtgtgtcctttttcttttgtacacatatgcagatattattttaaattttattttacagaccataaattatttaaaattttccaaaatatataagatctcttttaaaattacaatatacaactaatataaaaaaaattataatataacctctaactctaaatgtccaaaatagagaactccctatattaatattagcaaaaataatatgctatatagtctcctaaatatatatgtatacaatacaaataataattaaaaagcaattgggttaattataagcaaaaagatgaagagcatattaggttaaagtgtctagtccagcataactatttgggatttttgaaggtgactacttctgtctttaggccaaagaaaaactacatatatgatatgaccatctggccacttcaaatgacaaaaatttgttcatgtttaacatcttgaattgacataaaaagataaaattattatgaaataatatagaggtttagttggtctgtacacattcatcaaataaggacaatggaaaattaactttgagtaaccttgattataaataaatattaattagaattaataatgtaaaacaataggtatagtatacctacaacgacctaaacatctatgtatctatcatatttattgtttgtgtatctttttcacaaaaattaatgaaaatgtactctatatttataacaaagatacttaacattacttaatgtgatacttcaccaataagatgaatacccaaattttgtgcacaccattagttgtcttttattattatttttttagtttcattgttttgtttttcatgcagatgaacaagagtccttgtttggtgcattatacatacatatcattttatgggatctacatgtattgtattacttattttaacttaaaaccgaaataatgctatttatttatttgacaaagaaataatgctaatttaaaatttataattcatttctaaatcataaatcagtaagctaagaaaaaggcaaagtagatattattgttcaattaaaaaacatcaaatattctgaggaaaaaaatagtaaatatcattttagaccttgtattttgtaaaaattactaatggtactttgttttgttaaatgacaaaatgtaccttgtaatttttaaaattgtacaaataggacatgaattgattttttgtcaaaataaaatttaataataatctaacaaatgttatgataaaactggttacattttctgtatctgttcgtattaaaaatggtcttaaagtttgttatattataaaataaaattgtttaaaattgagctcaagatcttatttttactattttagaaaatatagaattcattttgtcattttacaaaacataaagtctaattaataacttttacaaaacacaacattcaaaataatatttctctaaaaaaaaaagaaaa

SEQ ID NO: 190724 - DNA, 1481 bp, Cannabis indica
accctaaaatatcaatatagttgtcagtcaattataagtccaaatcatgatctttatttatcttcattttatattgctcattacctggctaatgggttatatatgagctactcttcagattacatagtatatagtatcaaagattatcctttttttagatctgtaataaaaacaaaaataaagccggtacgtcatattaaatattcaataatgaataatgatacgtgtaattatactaaaaaaaatgaactgttttaaaaagtattacacacacagtgctgagaaatttatggttttggaagcctaacattggcattagtacttttaagtacttaagtaggaattaggattttctgttagaaagaaattggtgttatataatatattaaactaatttaagtgtgacaaactcaactaatgaaattaccgtagactccattaattatttatacagtttttttattaaaatatttaaattaattaatgtgtcacaataaaattaatataaataaattaaatttcttacgtagattttattgactgaagggagattcattctttccgtgtgttgttattattattgttatttgttctcttaattggcaaacacgagttctcattttgtaaagatttatttttcgcttttattgatattaatgtaagaaatttcacagttattcaggaagtagtagtttaatttattggtagtgctggattagtctcttatacatgatcttcatctacatttgcactcagatataatgaacagacttaaatgaataatttttaatatttcgttattgatgtgttaaacttgtttttggtgatgggtttgaaaaaggaaaaagaaaaagtataacagagtgtgatagaaagttgatgtataattgggccgcacagtcgagtttgatgtggaactccaatgaccaattaagtcaattaaattattgtggggttagtgtatactcgagtaacaatgcgcactgaaaaaaaaagtatgaaaattataaatatttttatacaagtcaaattaatagaattattataatgatgcatctcgaattttatatcctatcgtatgtatcaatatatatatgtaattcttgtatttgtttccactctctttctttgctagctatagctaagactaagagataccctttgttcaaaactaaccttaacataggtcttttacactttggtatgaaatgggaaccataattacttgtgttaattaaggcaattgtccacccatattaattgaaaatgaataagaaatacaaagattgtggatgtgtgaaaggcacaatgtgtaacattttcatatcaaggtcttattatatttaaaggtcaaactattgaccccacagtttcatatcattctatatcggaccagaccaaggagcaacaaacgctcatacatttatatacataaattcaatcaaaaaagtgggaaaaacaagtggttgtccgaggataat

SEQ ID NO: 190725 - DNA, 2907 bp, Cannabis indica
ttttgtttcatttttttttaactaaagttctttttcgccggatgtaagtgaaggccttaatttagaatgatgagattattctgtactcttaagaaaattagcaaattagactgtcgtctttttacttctttatatttggaccctttttactgctactgtgtctctctagtctctctacccgatactcttgttttgctatatgcttttcttaggaatgtatgaacttaaaagggggggagaatgacatccaaatgaatttttgtgctgatgataactgtttctttgattggaatgagttttaggataattatgttttatatattactttttatattttgtgcttatcaaattggtttttggtgtaggtgtttattcaatgtgtgatggccctgctttatcacacggcccataccttggaaccgtgactttatcttcctttgtatcaatcattcttctttcagtcaaggcctgtgtttttactgtaaattctcaacttgtggctgaggcttcatcttccccctcaagacagaagcttcacctaaaaaagtcatggggaatgccggtcttgtttctatcatcggtggtttttgcccttggacacactgtagtggcttatagaacaagctgcagggcaaggaggaagctcctatttcaccgtgttgaccccgaagcagtacgtttaagtttcatattttatctggtttcatagatgtatgtatgaattttatgcgatttcagcttcctaaaatttgtcttaaccacccttccactttgtagaaaggaggagtatattttgatgcggtaacttattaattaagcaatagtttgtgttatttgttaacatgttcttctctgtgaccatttgttcacaggtccttctttgtaagaacgttttctcaagttatcagaaagtcccgcgatctcccactccttctgtaggaaaaacccctaaaagtgacagtgagacaaggcggaagccatttgggaatactcgtgatgaaggggaacgttcggttagactacttgccgatgttgacagtttattcattccatgccaagggattaatcttcactacaagctcagcttgcctggttctccacctcgttccttatcatctactacctttctcaattctgatccgaactgtggctcattacaaatggctacgggtcgatcaaaacctgacaagcatcctttaagtttgttctcaaaaggccagcataatctgcataggagttacagcaatcaatttcatggctcatctctatatgctcctttgttggatggttctacgaattctcctgttttttctgaagatattccacattttagtctagatgctggtaaagaggatgaggttcgtaaaataaattatccaactatagaaagggaagtggaaggagatggacaatttggtattgttttggtgcatggttttggtggaggagttttctcttggaggcatgtgatgggggtcctgtctcggcaagttggctgtacagttgctgcttttgatagaccgggttggggattaacttcaaggccatgtcgggaggattgggaggaaaaagaaatgcccaatccctacaagcttgaaactcaggtaatcaaatacatttgtctttttgctccctacatacttaaatgtacaagcagataggtggcccctctaaaacagtaacatattcaagcaactttgatacacgtcgttttgagtaatagcaatgtcagtaattgttcccagttaactgagaatcttgtctagtttgctgttttaggggactagtaaacgtttaatgtgctttgataggaaacatgtttaagtatcaggtattaaaggcatgagatggctacatatgaagtttgctattccttgttgtctgcttcatgtcagcctattcttgggtttgatgttgtatgtattgtataaatatatgtatttatctttcaggttgacctgcttctttctttctgctctgagatgggattttcttcagtggtgcttgttggccatgatgatggtgggcttctggctttaatggctgcacaaaaaattcaagaatctttgaattcttcaaatgtgagtatgctttgtttccaccaacaaggaaatttaacatagtttattatcatctaccaaaggggtttgtctcaagctctctgtcatcctatttattgtatctaaatgtttgatgaaaataatgtaaatcaatgatgggcatgatactgttgcattagcattgtaaattaaagcatctaacttcttctttttccacactttcatttattttttaaaattaataccttgtattattcaggttacaatcaagggggtggtgctgttaaatgttagcttgtcaagagaggttgttcctggctttgcaaggattctaatgcgtacttcacttgggaaaaggcatcttgtgcgtccgctattgcgaacagaaattactcaagtagtaaataggcgagcatggtacgacgctaccaagttaaccacagatgttttgagtttgtataaggtatgactgactgctagtagcaaccctctggtattaaataaaagatgtactgaaataatatgatttctgtcattgatgatttcacatttgatactatctataataataaattaagcttaatgtttttcttttggtcctcaggctcctctttgtgtagaaggtttgggatgaagcacttcattgagattggctagattgtcacatcagaccaatcctcactcgacaaaagtgctgaaaatattattgaaagccagaaaaagacataccagtgagtggtggttgtcgaggtggctgaagatgccttagtcccctcgttaaactcttcccaagctatggcttcaaaaactaggaaattctgtgagtacttgcttttattatcttatc

SEQ ID NO: 190726 - DNA, 1279 bp, Cannabis indica
ttaaacgatttgctaattaaattataaatatttgtgttagtctttctcgtacttgtgctaatcgtatgttcttgaagcaaaatgttcctttagttttttatatgttattttttattttttttagtcaaagttagagtaataatgttaaatgatactccgaatgtgtgatgtaattggttaaatgactttacgctaaatttctcatttagttgcccacggaattcgtctatccatagtagcacttatcctaggccttaaaagtagagctcttttagatgtaacatatatttgttcgccctattgagtaagtcatggtatctctgcgtaagagaatctcgactgagaatcatcttagggataatgtataagctctcattgaatgctattaaaccgaaggagtgaggatagaatggccgctacttgatcccctttcaatagttatataaaaagggggttcattgatagaataacaaaacgacatgtcgtgtatataatcaagcaaaaacaaaacgacaagtcgttttgttaacgtacgccgtaacacgtagcggaacactacgcacctccttccttatcttataatccacactctcagagctcagtcttctgaagactcaaacacacaaacacagagctcaacaatggcgtcctcacctctcacttcaactctcaccccttcttcttcatcatcactactcacaaaaccccccaaatccatctcccaattcctatcttccttcactcacagaccattctcaatatcaaaatcgaatcttttcatttccccaacgaagacctccttgaccgtagtcgtccgggctcagacgctggacttctccggttcattcttcggaggaggtgggattgcatcggatgacgacaccccatcaccgccggggtcgggattggcagccgtggaggacaaagaggagcctcaatgtccacctgggttaagacagtatgagactatggcggttttgaggcctgatatgtctgaagatgagagactttcacttacccagaagtatgaagaggtaaaaggtttttctttgtatgataatttgtttggttgctgggaaaatggaggaaagaaagaacttttgtgttatatgtagattaacactatatatatacatatataattatataatgagcattgctatgtagtgttagttagctatattcaatcaaagttattattataaccatatacttaattgtactaataactgatagtttaagtggtgttaggcattattggtatcttttaccatttttc

SEQ ID NO: 190727 - DNA, 2351 bp, Cannabis indica
tcacacgacaatgtggatgaaactaagccacaacatttttaggctgtcatatacgtaacctgtgatgatactatgactataagcatcattctatctatagcttcaactcgtaaaaggaacttaccggcagaaccattttccttcagaaattgtgcaaccacttcttcgttctgagcaattgtcaagctaattgagtgaaaaaacacaaaagagtaagaaatggacgatgtgaagagcatacacaagggtggtaaaagagaaaagaaaaaaagagcacctgcaagtactgtagacaagcagcccgccagcttttagcaacctaaaaccattgctcaagagttttaactgcaaacaacagaaaaatatgtgcagtaataagtctaaaactcattttcaagctagggaggaacaaaagaccacttgctgcaaagttcacgagagaaatttctagcattgattattcatttaatgtttggtttgggaaacaagtgaaaaacttgaacaaacagcaaacagcaagcagctaaattaacaaagtgcatagtcaacaaagctaagaaatacatgcaatagaatagtagaataaattagttacctgaagcacactcaggctatcggttctttctgcatccaacactcgacgttgaagagttttccaaccccaatgttcaaatttttgaatatgtttaattgatccgtcatgagtacactctgcatctactagcacctgtatcaaatccaaccaataaataccttccatacaaagactaaactgtaaactcaaattccatgagcataaaactctctaagaaaatgaggattaagtgggtaaagaatagtttacttcaatttaccttgtcatagccgcagctcaacaactcactgtcagaaacagatttatacaattcatctttacttaaaccaaccacaccagcatgttttccataaaagagtaactcgggctcctgaattccaggattcatatgagcattctctctgtctctagctgcttttttcctctccttccatgttctcctagacctccactctttaaacctttcgacacctcctattaacacagattcacctgcataattctagaatgaatgatagcacattaaaaatgaacacttcaactacaccgcagaactgaagcttaacatacatagtaaattagtaacatcgtgagaaattacatgatttagaatctgaataattcctggtaggaaatagagaaaaagttgttccatcagcaacaagaagtcggcaatggtcacccaattcatatttctgaaccattgtcctacaagccgctagacggtgccttgtgacatcaacaccagttacagaacccaagtcaccaagaaggtctaatatcatgcaaagcttagcaccttaagattgaaaaagaaaaaacatttattaagaaaacaaaagtaagcaggcaattcttcagaatcacaaatgaaaattatattatctgaggtaaatacatacgcaagccacaaaggtatgctaatatagttctgtaagacatcagaatcataacttgaaaagcaagcatgatcatatatgtaacaaccatttaaataatgaacagacccaagaaaatttcttcaacaaggcacaaacaaaatgtaactcattaaaaaagagtacataatattgaaagggaaatagtaccaggagcagcacatagatcaagaacatgatctccagctgaaatatttaaagctgaaacagcagctccagaagctgcatcaatcccataaatctgaaagatgaacaatcacacagataatgatattgacattttatacaacacaaaatcaaaagtttacctaaataaagttctgggttctgtacctttccttcacggtatgcccttgagttagcgatttgaacatttggaggaagagaatagaaaccaggcaaccaaaacactttctcaaccttacagcccatctcagcttcaatctcctcaagttgagattcacaacctggtttcaaccttcaccaaaaaaaaaaaaaaaaaaaacccagctgaattatcaccgagaaagcataaatgtgactacaacgggtcttattatatgtattacaaaagaaggaaaagaaaaactccatgaaaaggagccgaaataggagaagaagaaaaagtaccttatgtaacgaggagttaaatcagaggcagaatagattgaaggatcgagtccatttgcgtcaagaaaatcaacgaatgcatctggtaagggtgagtttgatgttcgttcttccatgaatacgaacctgatgactgatcagtactgctttctcaagggaaacgggccaaggagacgaagctgcgaacc

SEQ ID NO: 190728 - DNA, 869 bp, Cannabis indica
aaaaaaaaatttaaatcaaacaaaattcctaatatgactattataatgtacatcatcatataaaaaaaaataatttataattttctttatgtaccataaataagaaatgatccttcctagcttgagcaaaattaatgcttaccaaaaaaaaacaaaaaaaaattcctaaaatgtaaataatatatttatattggacacattccgtaaaatatattctatgctacaaaatgggagattgtaatgaagaggttaaagtaaaattgcctggtttatttgaaacaattcccactttaactttttgactttttagggttttttatgtctttaatggggacataaacctaataaatcatataaagcaaagccaaaaaattataaataacttaccatttcctactaatttttacttttgtgagtattaattacaaaatcaatcactacattttctcttaaccaatattctctgtttttggtaatcttacagtaattaatatctataatatagaaaaaaaaaattattattaatgatgacaattattatttctaatgatcgatctcataggattctaatgaatttcatattagacacataaatcttcaaaacaaacttacttaataattatcaattgggagatcaataatgatcttttttaaaatcttggttaataacaaacttaaataattttcagaatctaaatcaattattatgaaaaaaatattgcaaataaaatggggtccaaagggtataaatatgttattttgaagaataataataattaagaaaaaaaattcatagccccatgtccttatacagatgctaaaacagagttttcagctgtcacataaataattataattttttaaaaata

SEQ ID NO: 190729 - DNA, 1874 bp, Cannabis indica
gagccatctacaaaatttaagacgaaaaaagatgaactattcaaacacattgaaacgtgtcgcaaaataccacaaaataaatcgctaaacatcaaaagcaaagtcgctaaatatcgatagtaatcgctaaagcatgcatttaatctgtgaaaaatggttcccaaggcatatgtcgcgacatgtcgctaaatacagcaagacagagagataaaacacaaaaacatcgaaattgaaaatgttgtcgacaacatatcgctacatgtcgctaactacatcaatactttgagaaaacaaacaatagacaacaagatcgcaaataatgtcgacaacatatcgctacatgtcgctaatggtttcaacttccaattccagcttaactaagattgatggtatcaacaaaagtcaaaaatatgtcaagaaacatcactaacaatatctaattcctaacctaaggttgatgatatcgatagacgtcgacaatatgtccataaacatcgataaattgcaaaaattatcagggaaatccacaaatcaaaccgaatcacacaacttcaacataatatcaaaaaaattctctaaaacttaaggacaaacaacaaaactaacacattattctttacagacctaatccaagaaaaattacaaaaacatcaaaatcttaccaaaaaatggagattaatctgtgggattcttgaatcttccaatgtatgtcgactcccttccaatggtgctgggcttcggtggtgagtgggattcggcatgggtttcaaatgaagaaaaaagaaaaagggagagacgaggacatgggtttcggtggtgagtggattcgatggtgttggatgttgtggatggtggtgggtgcggtggttgatggttgtggttcggtggtgtggtgagtgagagagagcaggagagattcagagggagagagtgagagtaattaggtgagtgagtttaaatgggaggggtatgttagaggttaagtaaaattgaggtgtatttagagaatatttttaaagtgaaatattaagagtccctaattccactttaagcatggattgtcaaattttcctataaaatttccaacatccagagcccttcataaattgaattgtatggttacaaacaactacacatatttatattgttttaagttttgggtgtaaattgggaatgtgcttatcattccttaaaaaactcattacataactatcacattatatctggttttgtaagtagtgccatgcaatgttgaagaacaacagattatgccactatgctatgcatactatatttaatttactaagttagagtgagtcgattcccatacaacatagcttaaccacaattattcaacatcatcattagaccacccaattaaagcttggattattctaagcaagttaccactaattaaggctttcaacaatctttgtttctgaggtgtgtatggagggtatctcacagaggcatcaccatcgaaacttctatacataactgacttcttgtgactaaagccatcaaaagaaaatttcccatgatacgaacccatcccactctcttccactcctccaaatggtaacccaggaaccgtgagctggagtggtaaataatacaaatactattagagaatttatttacattaatgtttcataatagattaataactattgatatgattatgatatatatgaagaggagagtcactcacatgtataactgtatcgtttatgcacattcctcctgatgatatgttttgcacataatcttgcttcaattgatcgttgttggtaaaaagatatgctacaagaggcttcggtttcgatttaatgatatcataactttcttctaacttctcaacctgccaaaaatac

SEQ ID NO: 190730 - DNA, 1068 bp, Cannabis indica
tcaaattaaaatctaataataataatctgacccgaaagtgatataacaaatataattatatttttttttgtatttattcgtgctaaaaactgattttaggttggtaattatattaaaaacaaaatgacgaaattgagtttgaagtctattttatactattttaaaaacatggttcgaatcatcatttaacaaaaacagaaagtccaaaatattatttacctaatattatacataagaaacaaagcaaatatacttatggttattgtgttatttaaatttacataaaatcccttcaattatgaatagtatatttttatgttttactttaaatttctctaatatggtattatattttataatttattgcgattttaaacagctgaaatgcttgggttcagtgcatacccaccagcttatcttagcagaagagctgttggaagaaacctgttgattggggccaactttgcttcagcttcttctggctattttgatgttacagcaaatctatatgtaaatataatctctctctctctatatatataatatttataaggaacatattttaatttaataaataatattaaaaatcgtaaaattacatgttatgaaatgattttttttgcagcattcaattcctctatcgagacaagtagaatactatagagattaccaaggaaaggttgtgtctatggtgggttctgccaatgcttcatccattttttcgggtggaatttacctaattagcgctggtagcagtgattttctccaaaattactatatcaaccctcttcttcataacacttacactatcgaccaatttttcaacattctcttcgaaaacttagcacaatttgttgaggtaattatattccacaattaaacaatgcatttttttgttccaaaaaatatatgaaaaaaagttatcgagaaggcaaactttttaaacctagtaatattaatcaaaaatattttaactaaaattcagtccaaaagtttattttttacaaaatacagagttaaaaaatgaattatttaaacacaaaaatttgtgtataaatcttatattaa

SEQ ID NO: 190731 - DNA, 2635 bp, Cannabis indica
aattttaagaataatattttttttatttctaataggataatatctttatattttgccacctaagctttctacctcatcaaacattctctcattctctaaaatattatcaatagaagctaaatcaatgaaaataaaaaaaaatataatcaaatatttatagtaataattaatgcattaatttagacatcaaaaataatattttataacaattgattgattattttactttcaattcttataccacctagacatgacattgctatcctaagaaatttcttagcttctttcactaaatttttttttaaaattttttcttatgagaccttttactatgtgtttttatattcttatttttttttttgtaaggtaatcttttattcattttatctttttctatctttaatcttttattactttactctgttgttgatctgtgctttcgtatttctttttaaggcacaaaatagaaaggtgaaagtggaaagacactgttcggttggacctcgaatcgaactctacagtgatcaatctcctttgcccaacttcatacatttccctctgtatatgtattatcataatactccatagatgggaagcgttgcagtggctgaaaaagagcaccgagtgttcgatgtggaagagactatatttgttgcggtgggaaagcgtgttcagcagagcgagagggcgttgttatgggtgctccataacttttcagggatgaagatttgcttgcttcatgttcacacaccttcacgtctgttttcaatgagtgagtttttcaattgtctttaatgaatgcttgcttttctttttaggtcccatttgcttctgttaattaatgagagaaaatggcttttggacttcttggtctgacttattatgttattttcgtaattgggttttgaatttcgctttacaactatggttcattcgatttgaagatggaggatgatgatggtgataagttgggtttggatacattagtgtttattcaattggttatgtttggttgcaaatattggaggaaaagatggattgggaatcactagtctgatgtcaattgtctattatgttggataaagatctgtattttgtttggttgatcaatttgaaaagtgggagtattaggaaagtgtctcatatgtttttgtttttcttttcttttttcttaaaacaatggtaagcagccatattttgattgaggctttttagagtgctcttgaaacaaattacgaaaaatttgctcactcctgcttgtatttcaatgaatatggtatgaacacattgacgtttatgattaaaaaagatcaaaatgattgtaaaatgacagggttgcttaatcaaaaatatatttattgctttatgggaatttctgttttttatgattagtttatgttgtgtacattttattctatatgttgcacaattatcagaaccacaagctgttgtagcttttttttaccactatccattttattagaattgcaacataggcatacatatatgtagaccattttcatttgtttatcgtaaatacaagatttgtctatgatttgcagcagaaggaagtactcctgccaacaaactgaagcagtatatggttaaagcatatcagcatcttgaaaagaaaaatttaagagaacttctagataactacctactaatgctttcgcgaagaggggtatgtatcacttttctaacccttcatatatttgatactgtgagctgtcgtgctaacaattgattgtgatcttttagttttgaatgtaaattttcttccttcagttgagtcaattttggattgtgaatgaactagtataaggttattatgaatgttgcagagaattatattatgatatgattgatgtatgatagacttttgttctccaggcgcaggcatatgaagtatggattgaggcggataatgttgagaaagggattgtagaaatcattgctcagcatgatattagatggcttatcatgggagctgctgccgatgaatattataatgagtatgaatacacgtgtaattcactggcacatttatgcaagaatatctctgactggcttctttgatttaagtttacttgttttgagttaattgcttctgtgaacttgattttcctaaaattctgcttttttttccttaaaaccaatattctggttttgatttagctctttttccaagttctttgatgagggaaatctaaaggaataaacacatgctttcattataactgactgattctttctgaatttgaaggacactggcagacctaaagtccaagaaagcattttttgtaagccagcaagcatcaaggtcttgtcatatatggtttatttgcaagggtcacctcatatataccaggtaattcttggaatgaattaaccgatctctgttataatggtttccctgataactacagatttgaatcttgataacaagatggtcattactgaaatgtaatgttttagaattgataaatcaagattttttttaaaatactgcacttgaagatgcttacaccccccttgaagaacggttttagctatcatttgttaagaaaaggtgattggaagacattcgatcgtattatcagtggtcaagaatgtaaacagtcacggtagttaa

SEQ ID NO: 190732 - DNA, 2184 bp, Cannabis indica
agtaacaatgcattagagatttcaaattggaaaactaaacaagttctagtctagtccactcgaatagtaatagtcaaacaagacctcttataaacaagttctagttctactcaactccttatgaaataacttcaactcgatttgattcaattaacaatgcattaaaatttcgaattggacaaacaaacatttcttcatctcttatcacaacaaaaccagattcctctgaaatatacagagatcttagtctaattcaacaaaacacccaagaagggtagctcaaacggtcaaccgtgtggtttgatcctacaaggtcggaggttcaattcctttattggtaccaccttcacatagcaattgctatgattctctagtcctcaaatatcctaggactagggtgaggcattacaattttgaaaatgatcacctatatattaggatttgactatttgagtaacaattaagcataattctcactatagatcaattataattagcccataaagcccaaaagaatattccttttaatcaccactatcaacaatttctttaacaaatacatttggatctaatctcaaaaatcacaaatcaacaatttcactacccaataatccaaattcaattatcattataaaaaccctcaaatctaaaaaagcaaatgggagttcaacttcagaatccaaagcacaaaaatttccacaaatctgggacttaaaacatcagtacaaagtcataaacagtcaaatcaagtcttgaattttgataattccacaaaaattcaagaatgcaaaaaaaacacaaaaaagaaacttagtaaagtgaaaaaaagagagtaaacaaaacagacccagatgagaaaatgcagagaagcataataaaaatcaaacctttcttgaccagcagtgtcccaaatctgagctttgattactttcccatcaacatttaaagttcttgtagcgaactcaaccccaatggtggacttagactcgagattgaactcgttcttggtgaaccttgagagtagattggatttaccaacacctgaatctccaatcagaacaaccttgaaaagataatcataatcatcatcagctctgtatccagccattgttgttgttaaagcttcctccttttccaactttctctgcacacagaaagagaagagagagaagagagagagtgagatttgcagaagagagagaatgaagagagagagagagaagggtttaaatatatttttggaatttgcagttgtggtctttttagttttcacttctcactttttgatccttagaaaacaagtaatcttctttcttccctattatgagtttggattactatgtgataatttttaattaattggtagtttgttgaagttttataatgtttttttttagctagtaagagttatttttcggatggaatagttaatgtgtttcgtaattatatgatttttgaatcttcaatgtctttctatctgaatttgaattaaatatggtgtaaaaatattttgttttgcgtagaatggaaagttttgtcttttttaattaactgatggtttacaggtagtttcatcttctgatctttattatgttcggttatcttaatttatacgtatcttttatcaattttagcttaagtactttatttgtacttttggttcgttgatatttatcaatagttaatttttcctaaattttccttacgaggaaaaattaaatttcttcctatgtcaaagataatcataattgtcattagttctgtatccaactaatatgtgtaagagagaaagagatttcaaatataatcgtaattgtcatcagttctgtattcaattattgtgtgagagaaaaagtgagagaatggtataaatataattttaaaattgcagctttatatttaacactgattatgtaatttttcaaaaaattatttagtagtttattgaagttttacaatagctttcaaggttgacaagtaattataaaatgttagaataacttgtaaaagctttattttttaggcgaaatagttgatatgtttcgtaagtatataatttttaaattattatcgtctttctttgaacttgagttagatgcagtgtaatgatattttgttttgcatagatcaaagatttttgttcgtaatgttatttttctcggtcaaatgatagcttagatcttt

SEQ ID NO: 190733 - DNA, 1467 bp, Cannabis indica
aagctggtttttctcagctttgagtgagagtaatatagctatagtagtactccttcttctcaggccatctctttcattaaaaaacacttactatatttctctatctctctccccaaaaactcatccccttttctcccaaaaaacccctttaaatttttttattacacatcacatatatgttgagattgaaataaattctatttaatttttcagtagtttgtttctctttactgttaaaaagcagtaaaccatctcatttttttttttaattttgtaggggtttttcttgttttatttggtgtgatcttctagaaggataaggaaaaggataaccttgagagagagaaagaggaagttaaatagtgtaataatatggatgaaatgtatggacttgaagcaacaacgtcggtggagtattcagataaagctttgatgtctccagaaaatgatcatgatctgcttctaccctctgattatccgacttttatttcctcaactaacttccgtgatcatcgggtacttccctcctttttcggatcagatgatcatcatcataatcataataacaatcatcaacatcatcatcatcagcaacttctttcagcagcttcggctgctatatctgaagccgccgtttcatttcaacgatcagaagaagatgtttctaatctcatcaaaaccaaaatctcttctcatcccacttatcctaaactcctacaagcctatattgattgtcagaaggtgaataaaactaccaccactactactattaaatttaccattttgggcttagattttatatttacataataaataagaaatttgggatttttatatataggttggtgctcctccggaaatagcgagttttttagaagaaatccgtagaaaaaacgagtgttataagagagactccataatctccacgtgcttaggagccgatcccgagctggacgagttcatggtcccctcgcttctctaattattatctcgtttaataagttgaattagatattgtttaatgtttatatataatattggtttttttcttgttttgtttttaataaaaataataggaaacctactgtgagatgttagtgaagtataaatcagatctcgctaggccttttgatgaagcaacaactttcctcaacaagatcgaaattcaacttagtaatctctgctcatctactgctgcaaccaataccagacccctttccggtcagtactcattctctctctctctttcttactctctttcatatatataaatatatatattctgtgactgagacataacactgtttttctactactggtgttcatggctcaagttaacattgattaattattgttatatataatcatatatatatatagatgaggcaaagacagtacgctagagaactagtgttgttggggtctttttcctattaagagaacaacccaactattaataatactcac

SEQ ID NO: 190734 - DNA, 835 bp, Cannabis indica
taatggtactcttcatgatttttccctcctaagagaggacttaggcaagagatcctttgtctcctttcctttttgtcattagaatagagtgtttgtctcatttgctctcaaaagtagctaaaagggaagaatttggctaccactcgagatgtaaatctaatcaacttaatcatctttcctttacagttgatctactactcttttctaagggacattcagtcggttatgttgtttctaagagctttcaagtgattctcagatacttcgagccttcaagctaatacaagtaaaactgccatttactgatctatatatctaactctgatgtgaaattgatagctttggtttcactcttagtagtattccttttaaatatttgggactaccgatttgtgcatcccgaatttctaaagctgagtgtgattcaataattgaaaaatagtagctcaaatcagaatttggagttcaaagcatatttcttatgcgggcatgtgtctcctgattaattctattttgatggctatgcacacattttgggcttaaatcatgattttgtccaaatacattcttgaaaaaattaatagtatttgcaagtctttttctttggaaaggtaatgttgatatttgagggccataacatcttgcttggaattatagttgccaacctaaaagggaggacgatcttgactttagagacatagagcggcatgtgggtgctcttagcaaatatgtgtgggacattactactaaaaaagataatttttgggtttgttaggtgcactgtgtgtacattaaatacgttttaaataactataacgacgaccataaaaaatta

SEQ ID NO: 190735 - DNA, 1424 bp, Cannabis indica
tctcgaaagcttcaaataatatggaatgtcatataaattagcaagaagacaatgatttttgtaatgtatgtaaaataaaaacacatagagactacaaagacagaaagacaaaagaatttcaccccaccagataagtcaacctcaaatcaaaattactcaatttttataaatttaatagtgaaagttttttaaaataataataataaattagttgataagtgtttttcgcaattgcattccaaaagaaagaagaaaacttttatgaaagaaaatccatgctcacctgcgaacagtgtcaacgtagaatgcattctccctcatgcatatccccgcttcccgaacttcagtaactgtcttatccagtacccgtttatatgcctacgagaagcatacaaaattagttttaggcatcatttacaagaaaaattgaactttaatagggaaaatataccttctgacaatatttctttagacgatctttcagtctcaattgttgttctgtcttaggtaggtcaagaaaagattttgctaactggctatcagatccatcaacaaactctgactcaatttgcttcttcatatggtagtagtcactgtcattcaaaatgataaaaaaaaaaacaatcatgaattaccttattactgacagacttaaactaaagtatttgctttaaggagttcaagagctttagttttgtgattttttgaggatttgaaaattagtagactagtcaggcttactgtgttttgcattgatggcttgattttctataggcttttctttctagcagtgttgcttctttttaaaattaaaacttaaataaataaaaacaagttttgttgaaggtgtatgtagaaaaataatgagtcccccaaaaagagaccttttctttgccatgaagacttctccacgccaaacccattcaagtttccgaagacaagtctttcctgggcgattgaaatcacaagcagtgcaaatctcgtctgtaactattgatgatggctgaaatagacacaaaacaatataatagaggatcaagaatttctccctcttttaaattgataagtgaagaacaagttttgttcatgaaaaggattaaagacaacaactgtaataggtaaatcagacgatgtgcaaaacatattaaggtaaacaccaagttttgttttgtaattgcattgcaaatctatattgtagaccacacaaataatatgaaatgaatagaaatcaattaatcagcttacctgaagcctgtttgtcaaaataatatttgggtacattgcagctacatctagatgataaataagggggcattcatctcgtatggggtcatctacgtaaactttcaagctgcaaagcaaggaagaaagataataaaagagaataaaatgtaaagaaaaaaaaatggaaaataaaaatataa

SEQ ID NO: 190736 - DNA, 1678 bp, Cannabis indica
aaacagcagctgcaagtacactttgcacaatttttgtgctcatccctttgtaaaacccgtagaagccttcgtaccggatcatcttcaaaatagcatctaatgtgcctttgtaatgatgccttttgtcaccggttgcaatctgtttagcttgaagcctagccttgacaactaaaagaggatatgtgacaacagtagctcctagttttgccagagcaccaagaagaaatgtctctaaagctgtcactccgttgttacgttgcttactcaaatcacgtcttttcctaagcttcttcaacatggtttcatacaacatgaattgtatggaaggattgctaaccataattaatgttggaaatacacctctccagaatccccaaactccagcttcaccataaacttcttgaattgcatgggtagtcccaaatggcggaggctcggttgctgcagtaagaactgcttcatctggagtaattggtcgtgtctcaggcaaggactttgagatttttgtatgagtctgcatgtcacatattttcaacaagaggactaagatgtaatttaaaacagaaaaaggaaactaagatactggcacagcaggaaaaaaatatacatataaatatatatatatatatatgcatgtataaatcatatacgacagcattgtaataaagcacactaattaatttttcaaagattcagacaatattccaagttccagaccagcagtgtaatagcatccaatccaagaatgtggaatcttgtagaatgcaggtccgtcaacacttttaaaaactaaactcgtttaatactttgctatttcttaagaaaaggaggtttttgtctgagccacaattgcaaactatacagcgatactatacattcgtccacccatcacttttcactaacctagtcagtcatggtaggaatctaacgaacatcaacaggaatcaattgcactaaaataatacttatttgagataacagagaactaagagcagttacctgcatgcgagtaacaattacccatataggattcgtcaacagcacattcacacacctgaaatagactaatgcatgagataaatgaatatgtagtcaactttctacgtataaatttctcttttcttgttcccagcccactcaaaaattacccgataaagcagccaccacaagtgaagaaagcatgccaactgatccatcaccaattcctaacttcatctgttcaagtgcagcaacttcagccttgttcctgaatatttgatagaaataatagtaaacaccctgagaagcagctgttcctgcaagcgatggcgtcaaacctccgtataatcgtccccatccttcttcttttacaacctgacacatttgatcaacagttccaagcttcctcttctctttcttcagatcacgctctgtttgttgtcgagtattcacggtttgaagaggatatgtgatcagctgggcgatgatcccgcctccagctccggcgagcccattgatcaacgcgtctgacatttttctgttgtttatcggagaggaaaaggaaactgaagcttattttctcgggaaagtgcagatcaacattcaggaaaaagagagaagagatctaaaaaagttggcaagtttcaaaaaacaagacataatgagcctaatctcaagctttctcacacaaacagaagaa

SEQ ID NO: 190737 - DNA, 1851 bp, Cannabis indica
ttcaatccttgtactgtatcctcctcagaattcaagctcagaggcatcagattctccaaaactaagcaaacccagataaagacgggaatttgtaacagtagcacgagacccgggggtcctggttctggtacttgcttttttctttctctatatattcatggttatttttcataaaagagaatttgggtttctctgcttttaaaaatcttttcaatggagtcaattttgaagtcaagaaaagtgggaaagtttttacctttaattttctttcaattttgtattagatttttctttatgaaaattagccgatgttttaatttgttcccaatattacatttgatgtaatttgggtttgtgataaaattcacttctttttatttattttccatttttgttgggaacaatttcgatggtttatgctagactaaaaagcataacaaggtaaaactgccatggtaaacaacgataatggagtttagagggttaagtccaattttttatttcatgattatagtaattattttgatacaatctgtaaattttcaaaatagtttaacgtggtaagtaattgaactttatttttggtattggaaactattcaattggtggttctaaataactacaatggtcactaaacaaattttgaagtaaaaaactcttttgaatgctgaaataagtagaaagtagcaaaacaccctttcaaaggagtttactacagattattccatgagttatataattatatagcatgtgaggagttatgaatgtgccatagtttattatcttaagcataattccaaggcaatagtaatgagtttacttcttctatcactactcttatttccttttctcttttatcattttctttcttcttgacaggtgataatgaaagcagaagtgttcttgatgcatttttcttgggaaaagctttagcagaagccttaaacgagcgcattgaatcaactgttggggaggttttgagtactattggacgattgcaatctgagcaacaaaagcaagtacaggagttccaggtaaagcatccattggaatatgcaattttttgatagcttcattagttaatttttcatgtagaagaattgttttgagttctttttttagttgtttacattctttggcctaagttagccttgttaactatgataatcgaaaaaatgaccctcttggtagctcaaatggtgaggcatgtggtttgctcccacaaaggtctgagattggagtccctcccgggtacctacataacaattgctctagtttcctaatccccaaattttgtagggttaggcgggatcctttttcaaaaaataaacaaaaaagaagaaaactttggcaattgtaactactgtaccacacaaaaatcaatcattaagatgatatgaagctttatctgcgaggcctattataatttattttacagttgctattcattcatagtatgctgctattctaatcattttgtttttacttttccacctggtatacataaaccaaaatcaccatgactttttttattattcttttctcaatctgttaatgtggttgctcatgttttggctaagcacgctattgcgatattatcgtcgctacaaactcaccaaaatcgccatgagttttcagacaatatttctggttcaagtcaagttctttcttttgggattggtatgaaatgatttacaggtgttgaagagttccctccacttggccatatagacaaagtagtttagcagattttcttgaaatggttacatgaaatatctctgataattattggaaacttcaactttgtttctccatgtaggaatatgtattggaaagagccagaagagccaa

SEQ ID NO: 190738 - DNA, 1792 bp, Cannabis indica
cattgtaaaacactaacccatcaaatgctaataataattcatttacatatttaaactttaaatggtcctaaatattattattggtgtcttttagtattttttttcatccgtaatagtattttccgtaaaaaaataaaaactacatttacatatatttattgtttttttgtatttattggtcattctttaaaataactttttttttttaaaaaaaaaaaagtactaatcctagtggctaagctaatacacatgaaacacgtaatgaaaaggattatttcactagttacgtgagcttgagtcttgaccaaaaacttctatcataaaaaagcgtacacacgttttttcatcatgtgcattttataaacttgcttggcttttttctccttaccgttgaaagttagggcatgtttagtttatagaaatgagaattgtaatagtaatcaatatattcattacttgcttgcttttttttttattttttttaattttgtaatctattacattgtaatccttattataataaaaaaaatattgtaatggtcattacaattagtcaattacaatctattacaaaattaatataatattataataaaaataaattaaaaagtctatcttagctaattttatttaaatattttataattataaaagttaaaagtaataaaaatattttggtcaatatacattttattctattacattcccacaataaattaaatacaataattttaattataatatttatttcaaccacaaactaaactgtaattaccattacgattcctattccattacactactattaccattatcattgcatttctattacaccaaatcaaatatcaccttaaatttatccatatcgttattgatcttgtacataaaataagttgatgataaaatgtttaaaaaagcacattaacatataccaattagctcacatttctatttataacatatatgatatatcctatttcaatttcatcattcccaatctaccaccaaatctttctttttctttttttttttaactcgcaaatcacaaatatgatttcaaatcatttttcattgtaataaaaaaaaaaatcattcttccctacttcacgaaatttacttgaaatgtattactatgtgaaatatataaacatgagtggaggaggacaggggaggctcctcctattttatctttccaatggaatctgtgacgagtcggtttgttttttttaggatgatgattatattgattgttgaggctaaagagtggaagagtggttcaccattattattataattattattattatttgctttaattttagtttagcctttattaactaccctttcactttatttgccttccatttcaatattccttggcgcgttttctacacgctctttctttatagacgacaaacttatgccagctgtattatgctacctgtctaaagaaacggttccatttttttttttaactctaattcttttttcttttcttttacatttaatttctgtaactgaaagccgtaagtccaagttaagccaaaattagctcattggactggcgaatacccgggtatcgaccagattgtcccggggcggggctgccccatctggcaggggctccgacccgatccgcgaaaagctccaatttccccgtcataataaaatgtgaaaaatagagaggattattaacagctgtttggaatggaatgatatgatgtaatataattactccttaaaaaaagataggttagaattatttccttctttaattatattaatttgaata

SEQ ID NO: 190739 - DNA, 1394 bp, Cannabis indica
tgagttcgagtggaatggatgatattgggatggtagagtttcaaaggaaatcagtcatttccaccgaaagcattccgatttcggttgaggtagattctggatatctttttagcatggtttgagctgattacatcctaattctcttaccacctttttgtttagtatttttcatttttccccatctccaccctttttccagacatgcttctcttaggtacatcagatgtttctattaccacttcatatcagctataccatcactgtcttgatattctacttgtttagtgctacctccttaaatgtctgtcttccattttcaggttggggcttcattatttagattcattgaaggaaaagggtacaacactatggctttaacaaaactcagactaaaatatgtgtgcttatatttccatgtaaatcataatattttctttcagaggatctactcggaaacagattgaagaggagatgggagtaagcattatcattccatcgtcaaagaaagaagattctcttagtaagttttaaggttcacaattaagttcatttctctctggatttgatgaaaaactgtaagcgtgacatcttcagctgcattatgtttggtttctcttttacaatggtgttaaccttgctgtctgttgtagtcattgaaggtttttcaattgaaagtgtgactcaagcttcagctagaatccaaactatcatcgatcaggtcagtcacccatttattattcgttcacatattttgatttttaaggaaatttcgttttgtagttatttgtggttgaaacagtttataaaatgcatcttcattcaaaaatttagtaatttcataattattgtgtttagtggcttttttcttcaaaaataaaataaaaataattaaatttatcgtctattgatcatgaccctaatcacctactattaggagcagaactaatattttttaccctttccaattctttcttgttaattacaggcagtcaaaagcccaagccttaattactctcacttcatttcacttccactggctatacatcctgatttagttgacaagcttattatgttccagaactctattttagaatgcgatgatccttgcctagaaaagaatgcagcaagtggttcaaatgtagatgataaccagaagttagataaaggacccgatgttgctgttgaactaaaagttgatactgacaaagaacatgttcaagtgaatataaccaacgtacctgttgtcagttatgcacctaaggtttcttctactttatctggtacaaaacttgtcatactttgttatgctaccgatgctaaaagatttagcatatataatttacctactcaattatgcattttgacttggcaaaagtcactttatggtttcattt

SEQ ID NO: 190740 - DNA, 2278 bp, Cannabis indica
gtttatagaagtaaaaaaaaaaagtttttatcaataacgactttgcagtgtcatcactaatagtggacatatcaataacgacactttgtcgttattgatagcggcgtccctaatacatgctattcttgtagtggagggtgctgttggagagaaagaaacgatagtatgagggggttagcgttattggattagcttaactatgagctttttttatttaaatgttttgagttggttttttatttagataatgccatatagtatcagttatgtagctgactcaattaatataaactgagtatgattttaaaattgatgcaattaaaaaaacgaaaaaaatattatgttgattttacgttgttattgatgcaaaaaaaaaaaataacacaaaatctcttttcttgtagtaaaattaatgttccaacatgtaggtcatgaaattgaagtttattgacttgttgggaccaacatagattgtccattgcggggttcaaattggtatgacaaagagtcattgaatctattagtggggatggtttaaagaatatttaatgatatgaatatatttttgatattttttaatagatgcttactattggagtaaaaaaaaaataccaagaaagaatatcatataatgacattctttatatcttttttatcttatttttctattattattttatcgtaagaaaatttatttaatatatattaaataataataaaataatattttaataatttttagaagtgcttactaatattttcataatattttaaaaaaataataaaaataatgtgaaataaagagaaataaaattaaatattatatttttaggtgatgtataagtttttgactcattttaagaatgagaaatgctaaaggacatttatggtgagaattgtttactaattataagatgtcatgttattggtgccctaacacaatactcttaataaataaaaaattgttaaaaaatattattggtgctagactagtaattttttcagtatcatattactattgatataattaaatatcaaatctcatataacttaaaaaaataattttaaaaaaatatcgttaactaatcgtaagacttagacgttatttataaaagtgattagtaacaatgcaatagagaatgccgccatgaaatgccccaatatgattatgatacaatgccaggtcattgcttcctgtactcaacctatgacattgcttctgtcatttgactttaagtcggccaagcaaagcaatagtacaattatacattagtttatttcgcatccttatgcaatatatgttatattctcatttctcaacctaccatgcaatttaatttttatatggcaaagtaattaatatacgaatgtcttcaatgatttatgttagagatattcaaaaatagtaatagtgtctaccacttaaatattttattaattagtataattaaatataaaattctacataatttaatttaataattattataaaatataatcaattatttaataactctactttcttcccatcatatatattccttgtaatttgtttgaatattattcaagctttttaaaataatactaatataatgtaattttccttttttttttaatttaaactttaggtcaaaaataaaattaaaatccaagtaaaaaataaaattgttgggagttgacttctaaacttcttagtgattactttaattaaattatcattgagctacaatatatatttaacattgtaagtattatttttatttaattactaactttatttaaatttttttcgaaatagagtcttgagtggtagaagacctaaagtagccgcctcattcatctcaccttagggccgactctagagttgacttcatataaataaagatgtaactcaatagagaacatgaaaccgtatataaggtttaaattagttattttattttgggttgtcttgagtaaattaaaaaaaaaaaaaacttagaaataaaaagataataatgtaaatgaattaatgagctatcatgggatggttcttttggatgatgacgtaggtaataggttgcgtggttaagtatgaacaagatctgatctattggtataaaagtggcttaaaagcgcgatagagatggtgaaagccccctaaaatccaaacaactaacatcaagtggatcatataaatatatatggcttattataatactcataaataaatatatatttaatgtaaattaattctattataaaaatacagagaattattctacatattatttttaat

SEQ ID NO: 190741 - DNA, 1326 bp, Cannabis indica
ttccaataaatgttcacaaagatcctacaagatgggtcgtctccacctacttagacgggttgcctctacctacaatgggatgcatatcttgtggatcccttctcgggcgttgtcaagagggttccgataaaaatgttcgacaaggtcccacttagacgggttgtctctacatacaatgggatgcgtaatttgtggctcccctctcgggcgttgccaagagggttccaattaatgttcgcaaaggtcctacttaagcgggtcgtcttaacctacaatggggtgtgtcactagtattccacctgaacaaacaactagtgatggggtagcatcctgagatagtgggcaacgcaattggtcttttcttatcatgcatatgaaacttatgctccattgactttttttttcattgatttttgtttttaacttttataggcaaaagttgagttgataagcaaaatttctactaaatagaagaaaaatcacccacaatatttagctaggtgtttgtattttcattttgaaaatcacccatatattgtatttatgaaaatattttaccacatcataaaaaatatcgaattttcaaaataatatacatgatgaattcataggatatgttttatttgctatttttggtattatttggtggtgatattatttgaattgtgtcagaaactttatggtggatgtcaatcattaatgataaatttaattttgaagaaatattattttggatcttgtatttttatttgggtccttaaaatgagtgggacttaggcgcgggtttaacctgccttagcttaaagctgaccttagatatttgtggtgtctagcattttctacacgtgttttagcattctcttcaacatatataatgtttgatatttttaaaaattcattgaatacttctcattcatgcaaagtcagtagtagctcatgataaatgtgttgttgattttgacaaagctagttttggttgccaacttgccaccatattatgtccccatgtagcatatattactaatctaatacatctttcaatgcttctcaaagatcatcttctcaatcttcttacatttaaatatcacactatgattaattttaatcacaaataggtttaatttaaggacattttctaattacattgggtttgatgaacctcaaaagactaatcaccttccccaaaaaccattactaccactaattaataatattataaacttagtttagtctcataatacttgactaatgaatccttatattctaacacctatcataaatctatacaacttaattataatattttgaatagaaaaaaaaaaaaaa

SEQ ID NO: 190742 - DNA, 5505 bp, Cannabis indica
aaaatggagactgaagaacaagattctccaccgccatgggagatcctcaacctaatctctcagttcctcgaccccaaaaccctagctatggcttcctgcgtctccaaatcatggtcaattttaatgtcttccaacaatttatggaaacccatttgccaaacccaattctcttcttctctatcaaatctccacaatctaacctccgtaccctacaaacgcctctacgcaatctcacgcgccgccgtactccgccgccaaccaccgtgtaaaccccgtttatcgctgaaagacttaatcttcaccgttaatgtgaggaggaaaaataacaaaggcgaagtcttcgccgccgtatcgaagccgatcggcggcggggacggggttttcaaattctccgtcgacgtagtcaacggagaaaagtcaacgtttacggaggcggaggaggcggttgaggtggtttggaatgtggttttggaagggtggaatgggatttttacaatgatggattgtgaagggaagatgggatttttggccggttgtgaagggtggttctcggcggagttgccgttgccggcgtgtttttccggtatagttgggagtgggattgttggggatttgaagattgggtttgggagtggtgggagagttgagaaagtttgtgttgggattttgaatgtggtgaattggagatatgttagtgttgatgatggtcttagatatttagatcattttcttcttcctatttgatgagtttgatatacatataatctatgtaatcatgtatctatatgtttatatgtatatgtataggttagttttggtggtgtgtttttttgggttgttaagtcaaaggttttgacttgagttttgtgaagtagtttagtagtggaaattacataaattatgtgtgtgtattaatctagttacattgttctaatttgattttatttctttttaaacaaaaaaaattgtgctcgtaatgtgttgttgtgtgattttatatagtaaatctaaggtagcataacaaatgaaaaaattttcattatttttttgaaaaatcatttcaatataaacaaatttattagttttttatatatatatatatatttttttatgtatttttaattttattctatttttattccttttggacaccaaatgccatattggaatttttagcaaaggctaagtttcatactccaaattgggattggtttggtttggatttttaaatattctcaaatatatggttttttaaaatttaaaaccaaactagttaatgatcaactaaactaattcacccgacaacaaattattgtgtaattatttacaatttcttttttataataattgttaatattttgggtaacttttaatatagtgaagttttcaaatattaacattttagttaaaaaaaaaatattaattaaatataaaatattaacatttttttttatatttttgatgagaagattcaaaatggctgtattttttaattaattaagtgaatcaaattcattattcactcaaaaaaaaaaaaatcagaaaattattcactaattaaaggagtttataagagttgcaatttctattctttctccttttccttaaaaaaaaaacaaaattcctattaactcatttaactgaaattaaattaacaatatatttatttaataattttttaaataaaaattaaaatatgagtgtgttattagtgtagattttatattattaatttaataattaatattaattgtgatttgatctgaaaatattattaatgatcaataaaaagtcagtatagtctcaaatataaataaaaaaatttagtataaattaaagaatattaggaagaaaaatatactttattattaatttctattttttcagcttcccgctaaaatattcatttatgtatagtaaatagacaaaagtatccccaggaaatatagatatttacgacaatacccctcctttcccacctatatataatcgtctcctccttccaagatttcattttcgaaaaattttagtacggaatggcgcgaaaaaagaagacagctttggcaacattttcttccccaatctcaatcggtaaccctagttctttaaatcaatcgcgctaatggcgaaaatgagtattgtgaagtgacttggttcttttgtttttggtcgcaggaggttgcgaggttactgtggaagcaaagaaatacacttatgaatccgatgaaaagtgtctcctaatctcaattaatagaaatgttaaagttagaatcgcgggtaatggtcgagacttgtttttagttgatggtaatggtgttgattttgatttatgtttattgggatttttgtgtgtttcagttagagaagatgagaatgggaaccaggagattgatggaagggcttgtcaatctggccagggaggtaaatttgttattgattaatgatcaaagttcttttctttttgtaattcgagtctttgagatgttgattttggtttcgtttagaggagaatgtggagagagttgtctctcatgagggtgaattcttattttttcttgttaatccgaaagatgttgataactctagtcgaccatatcttcaggtaaagtttgtttattgggcattaagacttcatttttagttggtattgaaggtggaaagctcatttttttgggggaaaattcatggttttttgcaggatgtgcttaagatgtacatgacagagcttcctgcaatgaattttgctgcaaatactggaaaacaatcgatgttcttggaaaaatgtgtaacaaatgggtaatgggagttttcattttgttatagattacaactgtttcattagccttaacataattaaaacatgatttattatgtactgaccaattctagctctttactacaggaaatattgctcgctgctattgattcttgtgtctgtaggaggccttcgagaggtaaatttactacacatgtttcttgcttatggggtaaaacgtttttcttagtacaaagctagttgttttttgtttgcttcagtaaacatttagcttgatggaatactgattttgacattagttggacttgtaagttgtaacaattgtgttctttcctcattgctccctataaatacagattatagctgcaattacgtatcagatagttccggctgacactcaatatgctgaaattcctcttgctgctgttagttcagcccaccaacgaaaggtctttactatcaccatttccttgcccctggcattgtaatttctgtctgtgcgtgttctaatatctttttctcaattgcatcacaactgtattttgttcatactgttttctgatactcctgataaaaggggatcatctaaattatttcttgtacataagaataatgtaaggatctatgaatggtgacgtgatgagatacctgtaatgaaaaatacatatcatttcatattttcttgctgctttgccgtttatcactgaatgggtttatctacttctagttttactatcactgagattttttagttcgttactggaatattcttgttgggataacaaaattaacttaatcatttgcagggatttggtcgtcttctgtttatggagttaaggaagaggcttcagagtgtaggtgtttgctcaatattgtgttggggagacgaggaatctaaaggattttggcataagcaggtggtttaactattctttttaaattttttcaaataattatcatttatatttttattttttgatgaaatgaattagcaagaacatgtttgccaaatgcaatttagtgaaccaataacgtaaaacgacagaaacatttggtatcaatccattatgaccaatcagaatattggctaggtacgcagattcactacagttattttgagatacctcaccaacagattccctagtttacaaagtcacacctctctcttcaagtgtttatctccttgaaagtcacaattgtaaacataaccagctgaatttactaattttgtcttcattggtgcttttggtttggtataataccctgatactttctatatcatgtgcttcaataataaaacattaatcacattttctttgattttattttttgctctgtataattttgttgaaacttcagggttttgtatcggtcgcagaggttgatgtaaagggtagagctcgaaggaggttacctattaaagctgacgttcgcaaagcattatgtttacctggtggttcaacacttatggtttcacatcttaagcaggaagcttcagatcactctgcagaccctttgcagttgacttttccattacatcctattggaaattcatcttcggctgcttgtgataaagccccgtcagaagttccaatggagggcaacaatattctgaatccaataaagcagattgcttccagaactgaaacttcccagcctgaattgctagtaaacgatgaggagcgcccaggagaagataataagttacatggtaggtagcattgacaatgtgttatttcgaaatttcttatttttttcttgcattgttttcctgagcatgaggatcattatgaagaacatgctcaaggtagccaacctttaaacctttgtttattagatgtaattattaaagctgaccttgtaatgttttgttaccattgtagggcataattactctagtgtctgtttttttatttatttttatgtggcttcccatgtaaagcaaattttccaagccattgtttacaatcagagttatttttaaacttggatctttcttgacaggagattctcagtggcaggttgaaacacgagggtgttacacagaatcaccacttttctctagacaggagccaaaaatatcaagcaaattggtttgtgttaagaagttattcaaaacaggagacaatggtgatgtgaatcactgttcttgttcgacacaaggttctggagcaaagaggatttgggaagcttcattatcttccttgaagtcaaagaaagtaaagggaagccatccagttggctgccagttatcttccagctcagatttagctttaggaagtagcagaaatgattgttcttaccaaacatgccctttggctgcttcaaaaggtaaatctttggacgaacctccttcaaattattctacttgtggtcgcaaggaggatattgccgaaggttctacaatgggtaaaactatatcagaagcttgtgttgtgaaagaagttcatccaaatagagaaggctataaaataattttgatgaatattgctgatgacagtaagaaggcacagcttggaaaggtacacaacaactaatgaaatcatttacttaatattgggaatatttgaattctactgtttttcatatcactatgctgtgttgaaactcttatttggtataggtaatagcagaccttggtggtgtcgttacatctgatggaagtgcaagcactcacattatcaccggaaaagttagaaagacgttaaatttctgcactgctctctgct

SEQ ID NO: 190743 - DNA, 7276 bp, Cannabis indica
ttcttttttttaaattaaataaataaaaaaagtatatattttttttttttagaattaaaaaaagatatattaatttgctattagtgaaaaagaatgtgattataatatcttaaaatatcatattataataataataataataataataggaataggaatcttaaaagtatatattagttattaatttgggccgtggatggtttaaacgtcgaaagagtgtgataaatatcattttgttcaagaaaataaaaataaataatattatatatatatatatatatcatcatcattatattaccaagtgatcatcgcatcatcaacaacaacaaaaaaaaggtacgtatgattatacaatttaattaacaattttatatacatatttgtattaattattatgttattagggtaatttgaatttttaaccacctcaaattttaatttatgagcataattggttacatgttaaaagtttagaggtataatttagtttataaacattcgccacattaaaaaaattgaatgaaatttcagtaggagtttttaacaacctaagtataggaatattatttaatatatgtcaaaatttagggataaaaattttaattagtctattattttaaaatattgcatttactcaatctatttgctaatttatcatatgcagagaaaaattatcataagaagaagaatgaaagaagagggaagaatgatacgaatttctaattatttgcaaaataaaaaagaatatattattgtgttccttactattgtgaaaggtagccaccataatattgaagatctgtacaagaatgttaataatttgaagtatgaaaagtttgaaaatattcaaaagcttggaactatatatccaggtcaatctatagatgtaccatatagtaaacttattatgaatcgttttccaaattatatgacggtcatacaatttcatgtgagaactgtaccaatctctactcagtgtaaaaaatcttttaattttcccaattctttttctaaaatttacttaactagtacacgatcatcatcatcatcgaaatctaacaattccaaatacaattactatagtcattctttaatagaagatgaatttaaaggttgtaaagaaatcacaatcttcggtcatgatggagttattgttgctcattctactttaggatctttgtatctccaaaaaccaccgtaagtttttatgtttattaatttttaaatgaaactttattctcaatactatttattaatattttttttttttttttaatttgtttcgtgttgttaagcttaaaattaatacattatttgaagaagaaagtacaagaattatcacctgattacagaaccataaataattttctaaagaagttgcaacacaaagattcattcaggtaaattttattatctattattttagcttttaatttatatatttatttatttatatatgaatataactatatattttatgatttactttttcaggagcaaaactaaactggagtagatttgagcatatgagaaaatttcaagttctattacctaaattttatttttagtgtatatttctagggtatcaatagttaaacttttattattggtttatcatttattttctattgaattattaatttttttttttctataatatgagaatactcttttagtatttgttattcttcaacttgaacactttaaaaatcaagtttatttattttgcatatgttatgttatttcaaaacatatttattctaatttcattacgaatgagattattttttgtctttcttatcattctaaaagtcatattatgagtccgaaatagacgtgctagacctgtgccaaaaagaaaatttctccttttaaaattacacaattttcttttactaattttgaaaaatacaataattttttctaaatagaagtcggaaaatatgtgttttttttttgctataactcactaaattttagaaccgaccctgccctgccctgattataatctatgcttgagttgagtttgtcacaagaaaaatctacaaagtaatccaaaatgtgaggaactaacattcatgcaagctcttaacacagtaagttcctaagaaaaaccaacccaaaagaagtaaagaaaataaagaaagtccaatcaagaatggccaaccaaccatgacaacaccaaatattataaccaccatgaaagggaagaatgaccttaagattgataacccatcaacccatttcccctttaagaatatcagtcccgccacgtttatcatgttccaattcatcgatccctcgtaacaaagtcgattcaaacagttggctacaaaagagtggcaattgcaagtgaaaagattgtaacttttgtgctcaaagtatcgcatacttgactctagggcgtcatcccaagttatcgagcttccgaattctgtgtgtttgtaaccgtgcatgcatgtgtgcctcgagatgttcgggggaaagcaacactgtattattgacatttcagatatcagaaaaacagtttttagaaatagtaaacatgattttagatgctcttaaagaaaatagcttaactagataataatttttggtgtcattttttccccctaagaacttaaatggcttaaatagaagtatgttatgtatgacaggttgtattactcgaaatatcgaaaaagcatcataaacccgatgcgataattttgttatcatcacagggtggaccttcttccagtatgtgttaaattctgttatgtgaaacatgcaaattgtcagaaggccttgttcacaaactaataaaatcaacccaaatctgttatatctgaaacatgcaaatagaatcatacaatcatattggcaagcactagggaactcattaaagcccacaaaataatgaaacaaacttataaatttcatgttttgatttggtttggtgtactgatccaagatcattagtcaaattcatcgagtacttcgaatttcgaaaccaaaccaagccaaccaaaatattatctactttatatgtcacatacagaaatagttttaagcaatgattataagccttcattctaacttaattcggattgagttcgagtttctgtttgtaaaattttaaaactaagaaaacaccaacacactcctacttgctacttctagaaacagattatgccttcataaaccatttaataccaaaaaagctaaatttaaacgacacaatgttcgtgagtgcaaaacaaagccatttcataagacgaatgtacctgttctcggtcaagttgaagatatctggctgcagaaccaaatgcaaaattatcaacattcacaaaattggaacctgaaaagtctaaaacagttccatcttctctgcaaatgccagtgtgtccaatgaaaggggccaaccaagagacaaccgggagaggagtccacaccaagcaacaaggaaacttcgccttcttcgaatcaatcggacttaggggccaaaactcgtgctgaattgttcgtgtagatcccatatgttcaatatcataagctgtttttaactccattgtagaaactcttccactcaaaattctcaaactttctgttccaaacaaaataagacaaacaaaagcttcaaactttcttctttctttgttgcttacaatatcgagtttgatcttacataagtcaacctagaaatttgtttcacttttaacttaaacttcaaattcttgtttccaattgtgaaaaatttcaacacatctaactaactagtaacctttattataagtatatacaacaaaataagatgtacgtgataagaaccgagtaatccaagctcaataaaaccaataaaaccagcaatagtaacagtagaataatagccaaacaatggaaaattatattgaatatctgagaaaagccaattacaaaccgatgggagcgcttagatcccttcgacgaaaatatagttttagtcaattcattgcataccctcctattctcttactcacctatacatacagtaatttctcgctcgaaactaccctcgcaacaaagactcatttacccattttatttactatatacagtaatcctagagcctaacactaagttaccaactcaccactaatacaacaaaagcttcaaacttcctttctttcttggccatggttttacataagtcaacctagaaaatttgttcactttaacctaaaatccaaatttttgtttccaattgtgaaaaacttaaagacatattactaaataataactttcataagaactcttctccatacatacagtgccaattttgatcacattacataaacttcattgccataatatcattttatagagaaataaacaatctttaaaatacaattgacagagaaattaaagaacaagtttgaataatttcacattcaacaaccaataattataaattttcccaaaacccaacaaaacccagatgctcaatttgatcactttacataaacttcattgccacaatatcattttaaacacaaagaaacaatcttcaaaatacaattgacagagaaattaaagaacaagttggaataatttcacattcaacaaccaataatcataaatttccccaaaactcagatgctcaatttcaatataaacaactcatatcacattacaaacaaaatcaacaagatctaaaacaaacccattttgaatagagtaatgatgaaaaatcgctactaaccttgttaaagcactgacctttaaacacttaacaactcagcagcgagtgcagaaagggctgttcaagcaagaaaattaggggttaaaaaaaaattgaaagagaaaatgagattattattaatagagcagttgtggttgttggtgtgcaccgccattgaaagcaaaatgattttttcctttggtggctgtttttgggtaccaaaaatgggaagatgcatgaactttcccaaatctcactctcacactcaactaaactaataaataattaagcggtaaaattttaatttttatacacttaaatttttttaacaaaatcactttaaatttattttttctacaaatttgacgtgtcattaattggatgatcactgtatatacataaaaataaaatcaattgatatttaacaataatattcaattattatcttaaatttacaaaaaaaaaaatatataagagtattttgcccaaaaaaaagaattaagaggattaagtataaaaattcaaaacataaaataattttggcgcaaataatccaataataaataataaattaagataggatctttctctttaaaaaataataaatctagtggctataaattctaattgaatattttaatatggactaaattttgagttatcttatattatatttaatagtaatggatgatttttttcccaccaattatatttgaaaaattcaacaatatatatttaaaagaaatttattgatgcaccctctatttgttttgccatctaagaaaattttttgatttaattatttttatagtcgtctaagttgtagttatttaaaacattctccactcttttaaaaagttcaaaaaaatttaatatgttgaaaataaaattcaaatattttatttcacacacgtataaaataaaagaacctaattctttattagctttccaaccgcaccctaaaagcttacaccacaattttttgttcttctttctttcaaattaatttggcatgacactaataaaagagtcatttgacaatgagatcaaaaaccaccattatgatcacaaaacaatcatagaccatcataattgcataaagtaaatcaagtgaagttatttcacaaaatttaatatttcacattattaatttagcaaatttcactttatgccaagttgtgtcaagttggaatatgaaacataatttgccaatgaaataattaaaatatattatgaaatataaatatgagtggcattatttatttagccaccattaagataaaggaatacttttattatattgagcattactaatgtttgatttggccaaaagaaaacaagattgaaaatcactttgaataacattaactcccatatgtgacatgatgagatgagagttagctttcttggcttcattattgccttaattacaagacttattattatgctccatacttgggagctttccacagcttgaaggctacctcatgcacaaacctatccgccggtattaccagatttccgccgttctgcaaacaaaattgaccatacttgttaatcttgacaaccaagaaactatagcaatcctcccccaaattcgtaggagcaaacacaattacatgtctagccatttgagctttacttactaactattcttaagttcagctaacagccctttataatcgtattgaattgagtaatattttgggttgtgtagtgataatctcatgagtcatgacatacctctttgaaatctttaaaggaaaatgtctttgccatatctttgcgagtcacagcatattgccattgagccataagcataggagaatggtgtctgttcaacaaaaaatattagctcaagataatttctgttgtgagaaaataacagaaaactattaagcatttaactcacctaacattctttcgttgattttcgcctttcatggtgtaactttgacgaggaaatagcactgaaagatcagatttttcctcgtctttcttaaccgaaattgagagatttgaagaatcatcaacatctgaaacactaccatagctcaacacaacggaaaaatggagccgggaaccaatttcggatccaagttgagctacattcattatgcctccgaccaaggaattgatgaactccaaatcataggaagctgccttgtccttgttgtcaccagcaccgatatgcaagaaaactaaatcgaattcgctcatatcaaccgtctttccttcttgaaatccaagcaattcgagcagtttagagtgattgttgtttttgttactaaagtccttcaattgcaacactgtgaaaccgagtttggaaccgaaagattccaaactagaattgctagtgattaaggcagctttcattcccatgaacctaaagtttaatgatgataaatatcaagtactgaatattgaatggaacaaagctgaaatgattgaaaaccaaagagattaaaaacctttctgatatggttggaatcaagggctggctaatatcttcattctgaaaaatcaagtatcttaactattaaaaagaagattaaaaaaactatgacacatgtagaa

SEQ ID NO: 190744 - DNA, 978 bp, Cannabis indica
ttgccatcaattttcaaaattggggactaatctacgtcaatcctatatttttagagacttttgccacaattatcccttataattacaataagttagtcttgtatatatgtattgtaattttttatatatatatatatgtaattataattataataagttaatcttgtatatattttatactgtaatagtccctttatatatatatatatgaaaaaatacctactaaaataaatgtgtactagagtagctagagccaaaaatgcatttacttgacaataaaaataatttcactggatggatagtgatattagataaaccgtataaaaaatattgaagaaaaccaaattagaggccggagatcattttcataaccacatttcaagcacaataattcatgaaatctattgatattattatattactacctagtacctagaaaatttgaacttaaaaaaaacaaagaaaagaaaaagatgaggaaagcacgtgtattggtgggtggtaccatatccagctgaggtcacataattccactacttcaactgtcccaaaggggcacataaatgtggggagtggggtcataattacaatagcatagaaagagaagggattagtgtggctttgatcatcgaaaaagaccagagaagtaatgcatgggaaagtggaggagttgattcaaaaaatgatgatgatcaacaagaatgggtttctccttttatattccaaactttataaatcaacgcatcttcaagacggtatggtgtcgtttcatgataaattactgtcgttttataattacaaaaatataaaaaaaaaattaaattggcccatgcaggtctcgaacctgcgaccttcgcgttattagcacgacgctctaaccagctgagctaataggccaatttgtttagtttgatcatgttttatttatatagttatatttttaaaaaattgcaataaaagtggcccatgcaggtctcg

SEQ ID NO: 190745 - DNA, 3724 bp, Cannabis indica
ttcgactcaaaaaaaaaaaaaaaacctacttgagagagaaagaaagatagagcgataaaatgtggtttttttacacgctaacttgtttgtcctctcacaacttttcgttatttcagatctcaaattcttctgtaacgaagcctgggtgggtctaacttcaaaccttttcattcgccttcatctaatcattctctattgcccattttctgggaaacaaggattttttttttcctttctataatagtctgatttcatgtacgaatagaatatagagcttgcgatctaagctttttaagagctaaatgggttcccgaaaacgaaccccatcatcgtcttcttccctcggaactgacatgtctacatcaggtaagctgttcaaaattttgtatatattactcctttgcccccaagcttttgatttgatttgatttgatttgatttgaatctgtatagcttccttaatcgttttttgtttcagtttcgctgttaaattcgtctcaattttttctgtttggtctctgaaattttgaatcttttcttgttttaatcaatttttttttttttggaattgggtataaacgaaaatatcatattatagctggttgaagactgaagtagacctttattgatgtaaacggtcttacccaagctgttgagttaccaaagaaatatggagattattaggaagccttggttgacgtttttgcctattacgatatacacacacatatatatgtattttaaaaaagtgtagatatgctgatcaaatttcacttttattacttacgtttgaacattcctttttattgtactgtgtgtttttcttatttgtgttatcaatgtggtacatcataaatggaacactgtctaatgattattatttatatagaaaacaatgtggtacatttgaggaatatttagtgtttttttttgggttataaatgtaaatcatagaacgctgtacagttgaatcctaaagttctctcgtaaagttttcttcttggaaatttagaagtaaaatttatcccggatggtcaatgaatcacatctggtacttgttcatgtttttttctccagccagccccttttacttgaccccattaactctaacataagttgtattcggtttgttaacttggaacattgggttactaatgagctagtcagtgatttctgtttcaaagagactttaggtttaaccctaaggggtggtctagtggtaaagaggaaagttggaaagtgctggtaagcattgttccaaggttcgaattcgaatcaaaaacttggggcactgggaggtctccttgtcaaactgccagggctaacaaaagggaaaaaaaaaaaaaaagagagagactttaggctttgttattgtaattgattcattttgactcctattttctgaagaattattttattttgcaggccttgctgaaaagcatcagcaggatctagaaaacttggcactggcaacacaacccttaagaactatgaagctttttgttttggctgtattgcaatatattaagagatcaatatcatatttgttggcaaaaggtggttggcttatgcttctgagtgttgttgcattggctattgggattcttcttatgaccatcgatgggcctcatgagaaggtagttatggaatagggcttttcctttccttcccctctaaatctatgcaaaaagttctgcattcttttttaatagtacactttcgcatgttttccttaggatttgagataaagacttacctgaaaaccacttcacctaaataataggataactttcagatggacctgtctacttatagaatcccaacacagatacaagctgattttgtcttttttgctttaaaagattcttaagctttttttttttttaccttctctaaaaaggataagcggacacataatattgaagaagagtaattaacatttgctttatcttggcatctatttttctttcatgtatatctgccatttctcaaataataaattttgacacttgttatacagcatgtagaagagcttgtaaaatattttcagtttggattgtggtggattgctctcggagttgcatcttctattggtcttggtaagcattttgcatatagatgaaaaagacaaagggtagtctaatatatttgaattctaatgttaccaaaatttagattttgaggaaattccatccattggctagggactgttagattagaaagggcatgtgccatttctttaattcatttcattatactagctttggtacatttgcaatgaaagttttgcatagtgacataatgtacattttgggtttggtatttttttgtttttttcatgaccttatagcatttatcactgcaaaatgtaacatatattttcatgtctctcaggatctgggttgcacacttttgtcctctacctcggtcctcatattgctttcttcaccattaaagcaatgcagtgtggacgtgttgatttaaaaactgctccatatgacacaatacaactgaaaaaaggtccatcgtggcttgataaggactgttctgagtttggacccccactgtttccgttagtcgatggattgcgggttcctcttaggaacatattagcacaggtccagatagaggctgtcctatggggcattgggactgcaataggggagcttcctccatattttatttcacgggcaggtacggagatgaaacagtaggtttgcaatttccataagttgtttgtggtttaaaatgtaatcctaggattattgcaaaattactttgacaagctaacatcacatatgccttttatatttgtatagtgaacataaaacttacatttcatttgaatattgtggttctttttggaatcataattcctttaggtagactgaggttgaatagcctgtacacaatgtatcttggccattttctgtctttcagttaaagctaataaagatcttgtcaggaacaaatgctttttacttacataaatatcaaagttgcttgttaatagcccaaacggaataaatatattagtaaaaaataaattgttatttttgtttactgttccagattcacgagacataattttttaactttccattttatgcagctagcatgtctggtaataggttggatgccatggaagaattggatggctcttcaaatgaggatagtggatttatagctactcatttgaacaaaatcaagcgctggcttctatcgcatgctcaacatttgaacttcctcaccatcttagtgcttgcttcggttagtctggattttattctgcttcattagtaacaaaatttgtttcattcaaaaaaaaaaaaaatttgttccaaaatatagcttattctttaactagcaatttaagtcctcacttccctattacaacaaatcattcttgtttatttgtaaggtacaccaaacagaattgcttgtgtctatctctccttcttctgtttcctgcttttatttctggtttacttaacatttaagtagagatatcaacagtctatggctctatgcacctgaactgatattcttttgtctttttttactgtgtaccttatcctcaagacttggggagatattttttacaatgaaaatgtagcttctacattgacttcaatgctttctcttttcagcaacttagcctctattctcacgggttttgtatctgaattcgtggaatgctcaactattactctttctttaccat

SEQ ID NO: 190746 - DNA, 1673 bp, Cannabis indica
aaagaacagacaattatataattgtttcctttggaagaataggagccaaaatatataaaaatattttgtacagttggggatggagtgggggcaaaagatgatgggataaaagaaatcaatatttgtgtacacatcaacttctaatacacaacaattttggtattagaaaaaaaaacggaatatatcattttactctgatttgcgtaaatacatagttacacctgtgtgttttaattaatatcagaacacccttatggtctacagcttagtataaactgatcccttaccaattaggaaagtgttttggtcaaaatcgagaattaatggataattttatgttgattagtaaaacaggcgagtgttttggtattaacaaaaaacaaaagtgtgaaactaagtatttaagcaaatcactagagagtagtcttttggtcccgtccccatccccaccatataaaaacagagaacgaaaaagaaacaagagagtaacatttacacaccaaaatccactatcatcagctgcaaataccattggattacagtcaaatccaacccctataaccaatctttcagatacaaatataacctgaaaatacatgttcaccaattgtaacagaaaaacaaatcagttgaacatgtgaaaaatattaagagtctaaatgtaagcaagagtggatgctgacccacatcacggagaggcaaatcacgaaatgcaacattttgggccgatggagatggtccaacatcatcaacgaagtaaatcatggaattatggcctgcacattagcagaaaacatacatacataagaaattatattgatcaattctaataaatgaatggtcaaaacgcgcatcctctcaaagttcacattagcggaaaacatagtgagtgtgactaacaccacctagatcaagtgtcaattaaaacattaagccagacagcaaaatacttgtgcgcaaataaaaaaaatgagaagttctccactaaatgaagaataatcaacaacggtagatggggaaatcatggcatgcagaggaaataatatgaaaaagcatggtaaatgacatgcaaaggacatatttctgacctgcgtacgctaaagtattgccacttggtgaccatttcacaccgaaagcccaagaaattgagagatcaagctgaatgatttgctgtctcatgaaaaaagagaaacatgagatcatataaactcaaccagtaaaatgtgaagatgaaagaaaaatgtgtcacccgctcccataaaatattgatatgacaggaaagtaaaagtatgcttgctaccaataatcaaggaaagataatgaacctctccaaatttcgaatctgaagaagggcccgttcttgaatccctggcacaattacattgagcaatcttaagatatgggacaaacagcataaagaagagaggtctaaaatgaagaaagtacttagctgaaaatatttataatataatgctttaaacatactttgcatcaacacctttaatgaaagtggaaaatactctgcattttccatccgtagatgtcgttgcaagaagtatctggtaatcatacaatcaattacacagtaatggtcagttcaaagacattgagtgcatgtacaaaacaaaacagacacattatatttggtaagtcacaaaatataaaatgcacag

SEQ ID NO: 190747 - DNA, 1406 bp, Cannabis indica
aaataataataaatcaactagctaaaacacctaattaattaataatttgaattctatcgactatttttaaagaacacaaaatgcaccctacgtaaccagtttagcagagattaaaggaagaaagaaatttgaataaaatcaaccaatctaattaatttcaaattaaccaataacaaaacctaatttctacacaatcatcacaaacaaattacgtcaaatttttcaattcaacgcaaaaccaccaatacacaaagaaacccccttcccctcatcattcatgataatgattatcaaatccttacgaaaaatatactaagctcaggcccagtattaccatctgggctcaacatatacaatgtctcagaatccttggacccaataatacgatcaaaatgggccctcatataagccaactctccatctgggccttccatctcagaattcccaggaagaacaccggcccccatagaaaccgccttgagaatctccataacgtttaaatcttcatcggtggcctccctcttcaccccgtaaccactcttcttcccgttacaatacatcgtccaaaggggctcatccacaatccgcgttttgtccttttcctgtcgtttctcgcactccaacgcgatccgtaccattccggatcccatttctctctggagcacgttggtctgcatggccagctcaatcacaagggtcggcaagcaacgcggactctcctgcatggagaagctcacgcgcccctttcggtacccgaaaagcgtccccgtcacgcggtgcccgctggacgaggaccggtggtggtggtgatggtggtggtggccctccattaggccgttaggcagagctggcattttacacgcggctggtgatatgattgggaatgaacgaaagaccgaccggaaaactctgaggacctttgttttgttgtgtgacctctttctctgtgatggttggatcagggacactggcatccggggcagtgccggtgccgggggaggagctgtgaatggcggtggcggtgatggcggtattgatctcgacggtgatgaatcggtggagttttggtcatacgccattaacggaggggggccttatacgataaataattatgagattggaaaaagattgaaagaggagaaagggagagagagagagtgagtgaagagaattgtttttttttcgttaagttagttatgagttagtggtttaagatgggttctcggacttctttgaatttatttatagtctcttttatttatttaatagtttaaataattagaaatgtattcattagacaaaaagaattacatgttaggaaaggaatgtttgtgcacgagaggttaaaagtggattggattgcgattgttttcaataatgttattatggttgaaaatatagatctt

SEQ ID NO: 190748 - DNA, 3458 bp, Cannabis indica
gtccattataataattctaacaacgacatgacttatatttttctgtagcacgacacaaacacgaattatttttttttgtaaaaaaaatactgataaatataatgaggttatctctaatttattttgttattgtaagtaatggatctatatgaaactaattcttgatttttaagatttaaaaacgacttgtcgtttgatgaaattagactattttttaaagatgaaataatagagagagaagctgccttgcccgtatttatttactaccgtcgatcgtcgttatcaggtttcgacagtcaaaaatggggacagtttgaattcgagtgacgccaagaccaaccatgtccgccgcagtagtcgtgggcgttaccacctcatgggccagcgcccttgccaggatctctccctacacctactccgccctaggaatcgccatcgctatcggtgtctcagtccttggggctgcttggtaaaaactctcaataaccctatcacattccattccttttaatctcgttgttttgataaattgcgaaatgtcttcttaatttcatagggggatttacattaccggaagtagcttgatcggcgctgcaattaaagctcctcgaatcacgtccaagaatttgattaggtaatcgccaaccttaattcgtactttttatttttttagatttagcagtttggatctcatagtgaaggcattctagattggggttttatggacttatatatgtttgatgataattgatcatcacttagttgttgtatgaacatgtattttaagtttaattttgtgatttgtgtgtggaattttgatgaaaattatcggtaatcatatttgggatctgcatattttctttttcaaatcttctcattctttcttaaccccgaaaacatggagattttgtaatttcatgactgaacactttaccatttgtatcagagaagttttaactgaattgaagcttaagtagtagtacactgagaattgtataatatcactatccttaattgacttatctagcaatctatttgtcaatttcccgtttcactgtttcctaaagatatattatagcatttagctggaaaaacttaattttgaacttagtttgccaagcgagtttgaggaatttgtaagacctcgaaaatttggaggtaagaagcaagtatgtccagagaataactttgtgttggtcagaattcagcacacgttataagagttttcacacatcaattggaaatgacattttaggataatgttttcttctttctgtggaacttaaaagaaatgtgttcaatgcttcattacttgctgctcaatcacactattaaataagttcttttgaaggtttcacaattttcattgagaagttgcttcaaccaagtatattggatgaaatttgtttgttaaattttttagtgacaattttgtggcatgtaagagactaagtggatctaatgcttgtgttcttgtgctgcagcgtcattttctgcgaagctgttgctatttacggtgtcattgttgcaatcatcctacaaactaaattggagagtgttccagcatcacaattgtatgaacccgagtcacttagagcaggatatgcaatctttgcctctggaattattgttggttttgcaaatcttgtctgcgggtttgtctcctaccgtttcttcattacttatcattgactgaataaaactctttaatattaccacttcttcctcgtttctgactttttcttttcgaaacagattgtgcgtaggaataattggaagcagttgtgctttgtctgatgcccaaaactcctcactttttgttaagattcttgtgattgagatttttggaagtgcacttgggctgtttggagtgattgtgggaataatcatgtcagctcaagcaacatggcctgcaaaggcgtaaatcactgtttattatttgtttcagtattctttgagtaaaatacatgttatgtgaacccttttgaattctatattatgttatgtattgtaagtaggtgctttaattcctactcctataccttgaattcatgttgtaattttctcaataaattgaatttcttgacaatgggagcattgctttttgttggagtaattaattttgcaacaaatgtttctcactattgtatattacagaagcatatttttgattgcatggaccaatggagtttgtctatgtttcctttcctaaacattaaaacacctccttaaaaggaaaagaaaaaaaattacctactcttatgagaaaaaggttaactgtttggggttggggaggagctgcaacagaagagttgtaagtatttaagagaagaaaataaagagattcttataccatttcagcattagtccattaagaatagagaaaagaagacatttttctagggagcacatctatttagtgaacaaatcaactgaaagcacaaacaaatacattcataacccattgcaaaggattacaattctctcaaattaccaaacccaattttctggctttttgcagaattctcatgtaaaaaacatttaatggaactgttgaggtttccttaaacttatccctctcacacaaaactaaaagcaccataccaaacagattatgaaaggaggaacatactcttctgttgcagctcttgacaaacttcagaagcaacatcctttggatgaaaaagctgttcttcaagagccaatccctattttatgatgtcccatttgcctggaatgcagggatagctagcaatcgaatgaagttgtattcctcgagggcaagagccgactccaacttgtcaagactgcatctgcattgttcattagatgagcatgttgactcaggaaacccctggtatcctccctccctccccctgtaactattttggatctcttttatatacagtatctcccacaactcacacactactaacattacaaactgcttcatataaatataataacctttgggcatgatcacctactcatcttcctctgaaaaagggaactaaaaaagcagcaaaaaggtaatttggtatgtgctcacttctgattataacttttatttcttgacatttgaactactccttaaatttgttacatgcaaataggttattaaaatttcaatgtttcataatgtttctcttttattattttaagctctgtggctttagatagatacattagaataatagactaatggaggccaaagcttctggtttctcttgttttgtctttctttgatagccagaaactcatactctttagtaagtataagatccatcaaccagcaaagaaaggaacatcagcagcaaagaagggcatgttcttctgttgcagctcctcacaatccttagcagaagcagtcttaggatctaaaggctggcgatcttcaagagccaagccttgttttattcttcccattcgcctagagtgcaggacttgcttagaaaaaa

SEQ ID NO: 190749 - DNA, 820 bp, Cannabis indica
aaaaattaaatttaaatcttaaagtttacttaatattaataataaaatcaatggtcaaaactgtgcacgtaagtggcccaaggtgcaaatgggggcgagtgagtaggtacccaaagtaattttttttttgaatatatatatggagtgagagaaagataattaaggagagactggtaggaatggagtggggcaggacgactaggggcgacaattgagggtgaaaggtggtggagatgacagataagagaaagcaaagacagagagagagcaagagacaaagtgggtaagaagaacaccgcttcaggtcttattaagagacttttacaggggtatttcgttatgctaataaaagtgtatattacgctggtaaatagtaatcaaaagccctgaaatcaaaacgtaccgtttaatttaaacttttatcggcgcacattgccagcacaaatgtgccccggtaaaaatttttcctcttaccaaaaaactagacatgaatttttccacctactttttttttgggttttgcgggcacatatatacgtcggtaaaagttcacttatctccctaaaacaaattagcacgcgagagtttcctgccaaaataggagaccttttaccggtgctaattacgttggtaaaaaaaaaaatccttaaattagtgtttatgccaaaaggcgattaaacttggcaattttactggcgtaattaatcatgaattgcgctagcataggtcagtttcaccggcgcgtatttgcgctggtaaaagttttagctgaaaagtttaggtctcttatgctcctccttttgccagaaacttttgtcgg

SEQ ID NO: 190750 - DNA, 2420 bp, Cannabis indica
taaccggactatgtttccaatggagccgccgtggccgggaattaaacaggagctgccagattggaccatgaaggacgaaattattccggctagtatcgagcggaaggcgaacagcgtcgatctgcctcactcgcttcgaattataaagagaaagatacaatggcaagatagttttagggaagctggtgaatcggcttattgttctgtgaaaaaggccttttcttccatggtgttcataataagagagctccatagttacactctacaaatgagtggacttatctactgcgaagagttacaggacgttctaagccgggtccagaaggagatgcacgcttctttcgtgtggctattccaacaagtgttctctcacacaccgaccttgatggtctacgtgatgattcttttggcgaatttcacagtttattctatgggtcatgacactgcgtttgcggctgcagtttctccgtatggatcttactcaactgcaatggaggctgctttgattgacgcgcatgacaatagccatcatggcaagtttgattcttcgtcagttaagtcgttttcagtgtcgtccggtggtagaacaacatcaattgggggaaataatggcggtggtggggatagtcggccggttgctagtggaaccgacggggacggtggatttaacgattctgatcagtttcggggtgttttgcctgatggggcttctcaaatgtcctcatttgggactagggaagctgcagcagcagggtcctctgtttcagaccaggagaccagagaagaagagttggcattatggggttctattgtggacgaagccgcttctttcagagacgaagctttggaccaacaaacaattcagaagttcgtttctccggtgaacgcgaagattgaatccgataattatgaggagtttgtcagaaccgatctcgtttaccaaatgggtttatctcagaatcccagcaatcctctcctcttggccaattacgctcaattcctttacctcgttgctcatgactacgacaggtactgtttctacattcattcaaattttctaatatttttatttgttttcacattaaaaaaaagtttaagggctgctttattttggtttagttgtacaagtaaatcttgtaataactcattgataagataatccttgtctttttagagtgttttacacctaaattagctaaatagtcccctatagcagaatagtcctgtgttgaatattcttagttaactttaatatgatccatctttgtcgctgtactcaaattgtggttaggctgcaactttatgataacgatatgtgtggtgtaggcaaataaaatcatgaagttcgaagaaaataaattaactttttgatatggtcatgtgctctatgtgtcccacatacaaaaaaaatctttcatctagtgtatgtaaaggcttagagaattagtcaaataatttattttgacttatatagttgagtagaatgataacaatttgattaaactaaacttaaactacacacatactgattactgactttattatatgattttttatacaatggtacagagcagaagagtactttaagaaggcaactggtgtggagccaccagacgccgaggcttatgacaagtacgcaacgttcttatggagagcccgaaacaacttatgggctgccgaagagaccttcttggaggccattaatgtcgaccctgccaactcttactacgctgctaactacgctcacttcctttggaacactggtggcgaagacacctgtttccctctcacctctgatgataccaatgaagattgttaaaaataaaaataaaaaaaatagataaatgataaattgcctgtcagtgtcgaatctaccacaccccaccttatttttctcttgaaattggtcacaaataaaattcaaggaaaaaaaataatagaaaattagcttttattttaggggatatatgacatggcttttcttttttttttgtttaattatttatttaaatttttatgtttttaaaattttggtccaagggaagaatgtggatggtcacctggccgtaaaatggggctatgtacatgatgcggcaacaaatcggcagtgtttggctctgcgtgtctagtgattagtactcttgagatctactaccaccgcctgggacttgggttatgctttttgcacagtttttttttttttttgttttggtagacacgaacacatggcaaatgtaatttagtctttttttgtttaatataatgccatttcagattaaatagaaaaggaaaaacttacaccatctccaatctattttcatgttttacattattttacactatttatttatgtcttaatactatttttacactattattcactgttttatttattttagtttcatcttcaacttaatacc

SEQ ID NO: 190751 - DNA, 1923 bp, Cannabis indica
aataatcatgtcatcaacgtagagaagaagcattgtgcagactgagactgttttcttaacaaataagcttgagtctgcatttgaagatttaaacccacaaaactcaagatattgagcaattttaccgtaccaagctcgtggagcttgtttgagtccatacaaggccttcttaagtcgacacacatggtctggagattcctcagatacaaatccttggggctgctccataaatatatctcgatctaactctccatagagaaatgcattttttacatctagttgccacagtttccagcctttgcaagcagctagtgaaataattgttcgaattgtcaccattttagcaacagggctgaacgtctcctcgtaatcaagaccatattgttgagtaaaaccgcgagcaacgagacgagctttatatctgtcaatagtgccatcagctcttttcttcaacttatacacccatttgcaagtaattaaatcaacattctttggcttgggaacaagctcccatgtgttattcttatttagagctgatatttcctcttgcatcgcttcttcccatttagaaacacctctagcttcgctgtaagacttgggttcattttcacatgaatcacccattagaaaacaagacacaatagagcaactattcaactgtacttcataatcagttaaatattcaggttgtgttctttgtctggaagacctccttacaacagcccttgtagcttcactttgctgacaattttctcccgaagtagcattactctccttttcacttgaaacttcctcattagagaaaggtgacaaatcagctatacctctatttatatttggaataatttgatgtgatgaaacttcatcaaacaccacatcacgagaaacaacaatttcctttgtttctggatccatacatctccatcctttcctgtgtgtatcatagccaacaaaaatacactgccttgcctttggatcaagtttagatcgtttattttttgaaatatgaacataacaaattgatccaaaaacgcgaaaataactcacattgggtttatgatgatataaggcctcaaaaggagataaatttgatcccgcccatggaggtagacgatttatcacatgacatgcggactgaatagttgctgcccataactctcttggaagattcttttcatgcaaccacgacaaacacatagaggtgagatgtgccaatttgcgttcagccactccattttgttgtggagtgtctggacaagtcatttggcgctgaattccattggctttgcaataatttagaaactgatcagacatgtattctcctccattatcggtgcgaagacactttatggacagcgaaaattccttctccacttgctccttgaactgaataaatttggaaaaagtctcacttttagtttccaaaaaaatatatccaactaaaccgagaaaaatcgtccacaataaccataacataacgaaaacaacgaatagctgggtacgtcttgttggtccccgacttaaatactgaatgaaccagttgcaatgccacagtagctctgttcattgagtttggaaaaggaaggcggtgcgattttccatattgacaaccaggacaaaccacatcgtggtgtatatccttaaagacaggaactccattaagaagtttcttcgtagagattttctgcagcaattgatagccaacatggcctaagcgagcatgccaaagtgctacactgaattttgacctgtcttttcaacatatgcatcacttgcagacaaaacatagagtgaatctttcctttttccagcaaataaaactatcagcctcaagatgttttatattggaaataattttcacatcatttggaacctaaaaagaacatacctcccagagtcagcaatctgagaaactgaagcaag

SEQ ID NO: 190752 - DNA, 2321 bp, Cannabis indica
aattgtattacatttgattcatgtgacctttcctataatgaatttaagcatccgttgtttaattagtccaactttttatcttttctcaccatgtctctctttttttactctctataaacacttttagggccttcaaattaaaagaatatgttagtactatttaagtaggtagctatttgtttataattaatgtgtttcttctagtaaataatatcatgttatgtgtgtacctaaacactatacgataattacattcaaacacgtttaatcaacatttatttaagacctattacgtaatatattatattacattattactctatttttgttgttttttgtttttaagattgatgttttgtgctcatagtggaatgcctagggttccaaaaaagcgagctagtaataatgataacaaaatttagcttcaagctctaatagcaattatccaactttaatttttgatgttatatgcacttttttttacaagtcattatcaataacacaatatttttcaataagttaataaggaatgtatttattttattttttaataaaggaatgtattatgaagttgccatgaaatgaaatcgatccattttctattacaaggtcaaaatccaaggacatgttctattcagaggtttggcctaattaaggctcaataggttagtaggagatttattgaacctatctttcctaccacaataattataaataataaatttattaataaataaataaaataaaaatgtattttatatacatataaggtccaattttagttgatttttctctttaagaaatgaaccaaaaaaaagtaggctcaattctttgagatggtttaatagggcatagttattaaaatcttataaataattaacaatttttttaaaataattattaaattaaaatatgtaatattcaatacttaattatattaattatatcggtaactatataacattttgtatcttgtgatagtattgtacatcaccggtgtgttatttaacatttttcattttagtatgatcaattgaaaggagagagacaaaaatgatcaacccacttaccctagtggatggtctacttttcaatatattaacaaattatataataataataataataataataataataataataataataaaaaggagatggattgtctactcccccatcaacaccaaagttgaaaagaataaaattattattctccttcaatgtttttagccacacctaacatgaaaatatattattatagagaactttttaaatgtttagtgttttttctttaatttcttatcaattatatggtttttacttcttcaaactcacactatgtttgggatagaggaaaaaaaaatcaagagggaagaaaaaatattagaaagaaagatcaaaatgagaaggaaataaattaaactactattttctttctatattttaaattattaaatataatgagggtagttgggtaatttactataatatttcattctcctctattttctctctatttttggaaggttaaaatcaatttattattatttttttacttatttattttttcttttttctatgtggccaaccgaacacatcttttctttcttaattttttctaccctcttacttttgtactatgccaaacatcggctcaggttagggtttagccatattgataaccatgcaagcacatcaatattattgcaagagaatttaggcaacttaattccatatatataaatatgccttttctttcctccaaagaatctctttcttatgatgtatacaatgtgtgtgtatatatatatatataaaaaatatatattcaccttaagcaatatcaatgattattcctagggcatctttgttctctacccttctttcttcctttggtatactttacacttccatgtatgttcattcatttttatttttttgatttctttttaggtttaccctttttgggtcaaaagggtcatttcattaaaatgaagtagggtgggccaagtggaatcaaaatcatggaccatttcctcatacatttgtgtgatatgattaaagtctctctgcctatgtaaatggaagggctttatttatatagtggaagttatttcaaggagtcatcatcaatttacaataaaaaataatcaatcttaattcttagaaagatagaccattaattccattatattgtaactactctaaatattattaaaatatgtactaataaaaattccaatgaaaaataaaaattgtccaaattctaccataaaattgtaattaaaatcaaaggtatagccgcctctctctctctc

SEQ ID NO: 190753 - DNA, 1249 bp, Cannabis indica
accggttttattacgggacagctaatgatgttcatattgatctattatgtgcctctgcatatctagcattgggtagatctcatacaataactgtcttagctttgatcttttttgttttatttcttctggaacaatcatattggtgtaattaagtattgattcttatataactataacaatatttagagaatattaataatcaatcgcaaaacaatacgtttagaaagtattaaataacactggtgactaataacattcgaatgtatatatttcatactcaactattcaaatgtatataccaatactccccatttgtacattattcaaactcatcccaaacttgatgatgaccttgtggataaggcgaaaatgaccctaacactaaacgttattcttcttcttattattattaaattagcttttggatggacgactttttcatattgattttacatgcaagtagggtttattttattttgggtattctctattattttatatactaaacttcagtttaaaataattatagataaattttcgaatttataaaattggaataaaaaaaaaaatctttttaaaatttaattcagtaataaactaaaatagtatttgagttttatagtttttttgtccaagtgctgaatttgtcggaagaatcaaaacttttgaagtgattggtatcaagattttactaattaatatacaaaatagaaaattacacacctaaagtcattaagaaaattaaactaaaattaattgttatctaagataacaaataaactattgtgaagtgctctatatagctgttagagtttttcctttccatatgtttgaaattccttcaaattccatcttcttcttcgattagttatccttcatgaactcatataagtgccatcatatcaactgtcaattacccatttttttctctatgatctccatgttcttatggctagtttatgcaacttcaagcctatttcaaatgctcaacataaggtcaaacaactccatactgcctctacaccaaattcagaccatcctcaagtaatacaatcggttgaatctcttttggataaactctttgcaaatgaagaacaatattgataacaacagtctcatgttgattggctacaatttagagatcgtaacacaaaattttttcatgctaaggcaactgctagaaactctaataataaaatcaagtctttactggatgcaaatggtaatatttgttgggttttatacccta

SEQ ID NO: 190754 - DNA, 1856 bp, Cannabis indica
gctttgctttgcatctactctactcttgttcttaggataacgattctaatcaattcaaccttttatatattgtttgtttttatttatctagggactatgctatatatatatatatatacattgcatgaagctttttcttttcctttatatagcttaggaatgaaattttgattcgtcaaattaattataactataaaattcttataaagtaattaatatctattaagaacgtataaaatgatcaaattttgctttttaagtgggctaccctactattaattgacatttgttagttttgtatgatctattttctacttcaatttatactttagagtttagatcgatggtgtcgctaattcacttttaatattgttgcttgattacaaattttttaaaacctgaattattattattattttgggccaagacttaaactttttattcaaatacaaacaattgttagaatttgaaaataaggttaatgggttctatctcaaaattaattgattataaaatgagtaatcgattcctcttatatattctattatctttccacatattagcaatgtgtgactctctaacaacaattcaatttaattaattgttgaatgaatgttaatttttatagtgaagaaaagtatgtataatatactcaacattatttatgtgtaagtagctcggtagtagtactattgttgccttttccggataataattctattcatctctatataatgacaaaaacaaaagctcttcttgtatttataaaagattttattctcggttatttaatatactttcatattgaaaaaatataatacattaaagtaggaacttaagcacttatgttttatcgacgtaatacataaaaataaaattaatcctgaaggtttgtattgttttttttatttatttcttttgacgtacattttggttatacataatatagatgaaacagttttctattttgtataaattactatataatattaatatatctatagagataatatcattgtatcaacaaagatcattcataagacataaaactgtactttttatttttcttttcttttgtcatggccaaattgatcagaggcaagcacatggaacatgggacataaaatgcatcattaagttttggctcacctaggaattgggatcctatatgtattatgcatttatattatatattaatatgtaaaactatataaatccttaaaattcgccgtacttcactaaagcctttccttattggggtcactattattaccctttctggatatttcaaatttaattccatttttaaaaatatatacaataatgttttgattagtggttgtgaaaattttgaattccccgcgtgacacccacaaatcatataatcatatttctatcaatatttatagagttttttttttaccatacccaacaacacatggcctaccaattgtaacagacaaaacacagctcataaaatgttgaagggttgcttctgcttcatagttcatatatatacatcatacatatataattaaacatgtgttgtaacagaaaagtattgataacaacaattacaaaggattaataatacttacaaagcttaatttattcaaaacttcctctccttctctatcattcctactaattttcttgatattcaaagaatttaatttagaacaaacactacatgaacaatgcatctaaaagtgacctaacataatacttttttttttcaaagaacttggtttctgatatgccaaatgtagtaaattatatagctgggatgacactgaaaagaatccttcttttacctcttgaagctttagattttcaaattcactcaaagactcctt

SEQ ID NO: 190755 - DNA, 4788 bp, Cannabis indica
atcacatgaaattttacttaactgagttcaacaagtgtttacccagtagaaagatgacaatccttaactatgtctatgaaattgatcagtcaaatacatgcaggcagagtcatcccagagagtgtcatctacagttacggaactgttctgttagatcttttgagtggaaaacatattcctccaagccatgtatgttgcctttattttcttcttgttgcatttcctcacttcgtaagactaatttctatggattttgcaatcggctcgacatttctatttcatatatggaaataatagaaaagtgttgtctttgtaggcattggacataataagagggaaaagtgtactgtctttaatggattcatcgttggaagggcagtatgagaatgatgatgcgactaaattagttgagcttgcttcaaaatgtctccagtccgaggctagaaacagaccggatactaagtttcttctcacagcagtgggaccacttcaaaagcagaaagaggttgatttttgtgtttttttcgttctaccagcctgctaatttgttctatgaggatttatctgatcagtattattgctctgtcaaggtggcttctcgtgttctaatgggtctacctaaatatatggctgtgctgcaaacaatgctctctccccttgggcaggcttgcacgaagatggatctaactgctgttcatgatattttgctcaaaacaggctataaagatgaagaaggggcagaaaatgaggtatcctagactgtaatttttctgtgctttccccttttctggtatcgctacaactgaaacacgtatccaatttaacggtttagatcccagcaaaaggcaagggaaagagatagtagaatagagacaggaggagtgcttattagtgtgcataaatggcccaagctcattttaacaaacaatagatacaacaacttaaacctgacttgtgaattatgcactcgagccaatcaatgtgcagtaatttgtgaattaaagaaaacaaaaggattggattatgaggaatagatcgcttggtttatgttagatctagtagagtttctctattaacacttggcagtgtcatggtcttgtggcgtcggtaaaacatctgactataacaaatatgtccctgcagtgtgatttttgttattattattactttcgaataagagagagaactttatttaataaaaagggattacgatttacgaagaaggaaaggtagcttttgataatttgtttctagattatgttggtctccaatttcaatcatctttgctgatttcttcatgattggttgtttgtattcctgtcctgaataaatttcactgagttttgctcatacttttgttatcatatgtagctttcattccaagaatggacacaacaagtgcaagatatgctgaacaccaagaggtttggggatatagcttttagggacaaggatttcaagagtgcaattgagtattattcgaaggtagatgtttctttttctcatatcagacctggttatcttatatattttttggtttctacaaaaggggtatggaccataccgcatggtaaggttttgatatttagccgagccaataatgaaaagtagtttgtatacttagcacccttgtgaagtgtaacattactattgatgcaactcaatatcgggtcccacttgttttactgtaataaatattataaaaaatcgcaaccaagtatagggtgacacttcatcgtgatgctaatgctctatcttgttagatgtgcttggagctttctgtgggctgattttttattcaatattatattcaattgccctatgcaaatgctgaaacttccatttcaatcttattggaataaacagttagtaggtatgatggctgcaccttcagctactgtctttgttagaagagctttctcatacttgatgaacgatcaagcagaacttgccttgagagacgccatgcaggcccaagtgtgcatacccgagtggccaactgcattctacttgcaggctctggcactatcgaagcttggaatggagactgatgctcaggatatgctcaacgatggagcagccttcgaaactaggaggcagaacagctggcgaagctaaacgcaagtcttttgaacaaacaaaacaggtcctttttttcattaactttgtcgatcgaaataggaagtgaagtagagaaaaatgaaatgcaagtaatagaggttagttctcttgagaaaattatgctaaatatcaggttgtctatatacttagtaaattagtcagtagtaacagaggcttgagctatgtataatagactcatctatagatgaagttgttaaatattatgtttttattagttgatttctttgaaataccagatgatcttgctcttgtgttatcgaaatgtcaaaggtggaaaaaattgacttagtaaaagtttcttgagctgttaataattttgaaaagttacaattatagcagattcatttttagctaaacatattaaaagagaagaaaataaacacagagaattacaagtatctgtaatctctgatctatccctgtaaatggtttgaacccttttggtggtggtggtgcaatcaaaggttgactttgattattagtgatgaagaatatgatcaatgaatcaggatttgttgctgggattaactcatctctatgaaaattaatatctttattagattaaacttaaggtgctaaattgttagattatttggttaaaagactttgttatgagcattaagcactgcgttttaataaaatagaacatggcaatttgagataaaaaaaaggttaataatttgtttggagcagaaaataattatagttgttcttagttttgaatgattttttagggtggagaattaactttgattgtcttcaaatcgtttccattgtcaaaatttaaattgttactacatgcatcatttatgcctatcttataaaaatttgggattctcccatatctgaatatggagagctaaactaaccctactactagagcaatagcagagtagtgttgcaacgccattattgcactactctaaaatggtatttttgcgtcggacaaggctagactttctaaacacttcaacccaccccacccatccaccaactacttcctaaacacctcaaccagccatgtctatatcaacagcccataacacaactctacaccacccaagccgagtcgaaaaaggaaaccccgtccccatcgaaggtcacctttgccaacaaacctagtccccggtccccaacactctctcatccttgcacccaaggagaacgactccaaagaagaaaatcacaacacgaaggaaaagttgggatagacaatcacatagatggcttggttggaaaagggttatagaaaaccctagcatagaagataagaatggttgttaaagattttttatgagaaaataaaaattaatatcatttcaaaataaataaataaaacatcataaataacaatatcaaccaaaaatattcaaaaggtgattaaaagatgatcttcatatataaatatatttatataaatttcaattcaaaaccctaaaaaaatttcaacctaaccctaaaacttcttttctcttaatagccctaatctatcagataagactaagaagatggatgaatcaaactaactatagtcgcatcttcttaaatagacattcaatggtgaccaaagaactagaattattagtggtacaattttcatgttccatcaatgtataactttttccagtaaatggtttaaattgatcactagattcactactacttgattcatcatgaattaatggtgtattggttattgggtttccatcgagacgataaccaattccagtaaaagccctaaagtaggaattatctttttccatcttgttcttttttagagtattaatacaaataatttgatgacgattctcaatgatgtcagcttcttcattaacttcttttttctctatgttatcctttctattattcttcatatcaaaatttgaattgttggattgctttcttttcgtcatagtaatttttttttaataaaactaaaaataattataactatatatgtttacgtgatatatataaatatatataattatatataggtgatgataatcaatgtgagtgtatttagtatatggtaaaatctatatataggtaaggattcgttaaatcctattcttattattattataattattatctctatccgaaataatctctttaattatcatttagaattttttttcatattatatttttttttgagagaacttattataattatttgaatttattttagaaatttgattcatttttaattatttttttaatgaatgatatcgcttctatctttcaaatttgaaagaaaaaaatcgaaaatatattctgataagtttgttttaattttttttttaaatgataagttttgttagtattttggatatttaaataagaatatatatatatatttcaaaaataagtatgttattacttacgagcataaaatatttgaattgatatttttatggattttatttgatatatttgtatgtaaagataaaaaaagatttttacacatctatatactagattcaaaattaatgcataccaaaatctaaaaactagaaaaatacgaggttatttagttttaatttttaaaattgagaataaaaaataatttttttgtaaattttaaaaagttaaatagtgttttgtactttagtttttttttctttcttttaactttttttt

SEQ ID NO: 190756 - DNA, 1535 bp, Cannabis indica
atatatatatatatattttggtccatccgtatctgtagataatatatcatatatttcatgactctattataattaagagacttaactgatgaacgagtaacataatttgactaatcaacactagtaaaaagatactttagatatatagtatacattagctgtataaatacatgtggtctggaaaataggatgaaagtgagtatgtaataagatgtatgggattttatttaaaaaattaattaatttttatatatattttatatatgatatattatctttttacatattaataaggtataacataaagtatattatatatgtatgcatataagtatatattatcctatggaattaatatttgcgagctatacataaaaagtttattgttatcgtagaatggagatcgtgcatgaggtcaaatcaaaagcacaaagaatttttctttattataatttaagaagctagctagcatcttgattgtacatataatatttaatttgttctcaaatatattaattatatatttatatacacacatcttcacccttaaaacatctccatgtgagaattttagaataagaattagatgtggacttattgtgtgtagtactagtcgccataaagttgaagattaattagaacaaattaagatcagtggtggggtggggtgagagaatcattactgaatctgtaaaagtgatactaatatatatatatatatatatatatatatgtatatataagatatctcttcaactccaatattgtttacacttaattaattataatttcctttcttttttatttggaataaaagccaagggcaagtgcgggctatgcatatatatacaatacaattaattacaagatatcatgtatatatttatggagaatctctattaataatgatattctataaatctgcaatattccaggttgagcaagaatttaatcaaatattgcaacataattattatatattctccttaaaattaattgcaatatatttaatatatttatttattttgacaaaatatttaattatatagctgtattttgcaatatatatttatatttaatattatactcacaaaagtatagatttggtttcatattattttccaaacaaaacaaaaactacatttaaactttaaagtcttcagtatatttttcaaaacaattaaagtgtctcaataaaaaaaaataaaaaaaaaaataaaaagaaaggaattttgtggtgtgtgctttgtttcattatttaatgatttgtgagatttatattacattcataaataccaagctataatttcataaaataattttaaaagttagataaatactatgaatatatataatcattgaaatttatatataatatatatatatatatatattgtattgaggatattatggttactatttctgtgtaggttgagtatttctgtgtaggttgaggcttgtttttattttatgtattataacttgccttcggggtatatttttagtttaatctaactaacaataatacgattgat

SEQ ID NO: 190757 - DNA, 1585 bp, Cannabis indica
tataccatgtaaatttcccaaagcaaaataggtggtaaccatttattagggcgaccggatggtttggtacatgtgattttttttcctcaattattagcaccagcaccaattgccaacctaggtcattaatttgcttataaaacaacagtaaccaactaaacattgctacgtaagcagttcttatctcgttgtctgcaactctgcaagcaagtggtagataatagctataaattgtataatagtgctcaggacatgcgcagtagactattaaaaaaaagtaatatgaaagcgtattctagatccagaaatctctttttcactgcagtactctgggtagtgatgattgtgcttaggacttcatgtcaatgcggagctagtgatacaatatcggcgaacatccacaacaccaccaccaccattacctctgtctgccacgggaaagaatgcctcatcgccctacaagacatggatctggagttgcaaatgccttcagaaattagccgaagagtcttagcgaaacaaaatcatcgtatcgtatatcgtgttggagacgccatcaagatttgcgggattcagggcaagaaatgcgcggctaatccatcggctacaaaatacatcaaagacaatagtggtacataccatcgggtcaaagtcaatggccttgattaatgccaattttgaaaggaatagttccatcttcctcgtgaactctgctaagtccttaaattttgattatatatatgggtgttcagttaagttttattaaatattttaaaagattagttcagttttattataaatggggaacttcttagcaagagatattactttctctagtatatctaacgttttgttttatatattttgaccatgtaataagttatatcttaattattattattattattattaacaaacatgtcacttttaaatttgttatttttgaataatttaatgtatcaaaaataaaatttaaaatagttgttgcaacaaaatatctaaattatgcctttgactgataaattatttagaatattttttctttcaagcgaacaaagttgctaatataactataatttacattgttataaaacaagttaacttatgatttttgcatataccaaaataaaaacactcctacctaaatttttctctctaaaacacttctcaatctatattagccattaatagttattaaataaatttaattaaaaatattaaaccattagattttgatctaataataattaaaaaaaaaattaatttctatatttaatttaactactttaaatattaaaagtaaatcctatatataaaaacctaatttaatattatttgtttagtaacaaagtgtttcatatatctttatctattaaaattggttatctaatgcgaatttttagtttaacgatcatatttttattttccgttaactttaacaaagacgttaacaataaataaatattattcttcccctcgatattaagattaacgtgtattaattcaattctctaactcaagcctaaatagcgattgacccatccttattttctctcataaacccaaataatctcaaactcaaact

SEQ ID NO: 190758 - DNA, 767 bp, Cannabis indica
ctataacagattctagcttaagaaagattgagaacatcctctgggacaatgtgattcatcttatggaaaatgttatctcggtgttctctaatcttaataggaaggagatttttacctatgtgggatgtattttagttcaaagttggttaaaaaaaattgacctctgtttgaaagttatccttattaatctcgccatggctcgagctaaagtaaggtaggcttacttcgagtattctatttttagtaataactgtgtggatacaagtgccttcaatcctgggacatttaacagattttcaaagatgaaagtggatcttgaggccatggttgttgatcatgttctatgtatagatgcttcctggcacaaagacacagttggtttgactgttgtcatgattaattgaacaaatgaaacatgggctttcaactctcaactttcaattgctgatttcgcagtggaagccgaattatgtgcgatatgtttggctctctcttaggccattgagaacaactagaaggaaattcatatcctcttagattgttggcaagtgatttcattctttatctaaacttcagtgccctccagattggaagacccttggcatttctatttctatcttagacttagccaatttagaatttgtaagttttttgtttttaagtgttgttttaattcttttaccgatgaattagctaaaagtgctagagttagttcgtttcaagggaattctccacgtaagttctaactatctttcgtaatcaatgaa

SEQ ID NO: 190759 - DNA, 915 bp, Cannabis indica
ggcgggcgtacactacactgcaagagtctaccactatacgagtagaccaaccccaaaaaaattcaataaccaaaccaaaccaatattatatatatatattcaaccttttctttttcttttttcttttttattcacaatagctaatagcttgaatgatcacatggcatccacatggaccatttcaccatcttatttggctgcttatgtggacaactctttatttagctaattaattaaacactaacctactaattaatttttaattatcaaattcaattagtggtcttcttcgatttcaaacatgacacatgggtatatatacgtaaaatataatatacatatataataatataagagtttgttatcatgagtgtatctcgctaaggcaaccatcgatttttcaagaagatatatatatgtataatataatgtatacatatcataatcacctactccaccatctccataaatatcagcttgatttataataacattgattttcgtaaattaagcacaatccgacaaaacattgttcgggtttgattaaaatgaggcaaagacaatgatcctatgaagaaatttagtcaccctgtctaagattagttttgattattttgttttgtcgtatatattgttgttgaccaaattagatggacttttcttgacttgactcggacgtttctggtgatagtgcttctctctttcaaattcagtaacactcgtaagcatggaccattagtaaaattatgcatgggctatagctgtgatgcttatatatagaactcacattgcggcaatattggaacaataagccaagcaagtacattaaacacagagcttaagtgcttaaaaacagagcaatggctactacgcttccaaaatttgtatgcattgctcttctggtttggactattg

SEQ ID NO: 190760 - DNA, 2401 bp, Cannabis indica
agctatgtattaaaatgtatggaaagtttgaaaaatttatatgatttacaggtaaacctgaattgatttcctattgaaatgaccaagatctgcaaacagtgcttcagaacctgatgtgatcatgttaaattaatatgttttcacattatctatggttgcataataaaaggctcaagaagaacaattacctgtgatacaaaggacagtgcccccaagcaacaaccagccttcctttccatttctcgaaaagaaattgaagatgtaatgtggtgacacagccttaaatatgcctggataataccttatgatgctatagatacctaccatgggggtacaaaaggtccatgcagccataataggcgaaaaaaggaaactcactcgagatgtaccaaacttttgcaagagaaatagaactactagaaccgctgcagaaagtccttccaccgcagctggaacattcgaaagaagtgattaattttcaacagcctttaaaggaaaacttatacgacagaatgaagactcgaaaacttacatttactgacagaagggaaaggtcctcttactccatccattgctgacagaactgaatttatttattaaaaatcaatataaacagaagttgcattgaaactatggaaaggtcttatgaaagcacaggcgccaaacctgaaattgctggtgtgagtatcccatctccgattagcatacacatgcctaatatggcaatgaaaagcaatacccttcttgctactatacttctttcgaaaaacatcccaagtgcactctggttcttcaagtcattgttagagtttgaatattttcgagaaacaattccaatattcatattcctacaaagtttcgaatataaagcaaatgttcctcctgcatcaaaagaaatttaagcattgttgagcttggaatgttggaaaagtgtttggaaacttaatgaaaaggccaaaatacaaaatacaaaagaaacttataacaaaaaacaaaaacaaacattttgagggttaggcctacatattcaaaccacctaatgtccataaaacacaaagcaaatactttccagtccaagaaaaatctatgctatagaacaaaagcatggtataaagagcatgtatcaaccagtagtttgattaaattttataggataatttcgatatcccttttagttatggtgttacaatgttttaatttgactcaaaaaccagaggccaactcatgtgaaacaagcataggccatgataaatgaagtactcatcatggtttttaaacaagtccagcatgattttgttcatattccaaaactaataaccagcataggccatgattaaccacatgaatgtagctaaatagagtctgtatcggtctataccttcgccttgatcatctgctttgagagctatacaagcatacttgacaactccaataagagtaagagtccaaaacatgatgctatagatgcccaaatagtcatcttcagttggagatttcaatggcatagaaggatacacatagagtggggatgtaactagtcctccaaaaaccactcccaatgtcttgtaggaaagtagcagagtcccccatctactattttcctgaatcaaattataaatacttgtcaaaaaatttaaaaccttgaccattcaaaatgagacagggcaatcaaagaataataaaaaactgaaaaaagttctatagagaatctggtcactcatataaagtcataaactttattaagattgacatcttaatcttcagatcccatatttattttattattattttgaagaaaaaagaaaagcccccacatgggattcgcatgattttaacatttacaagtgaaaaaacatttgtttaagaataaaaaaagatcattctttgcacaaaccaaaaataaaaaaataaaaaagaccacttgaagagtgtgagtgcgtatataataaaaagggaaagtagtagcttttatgataatttactcattaaaaattacaacccattacaggtttaaataaagacgtagaaaagagaaaagaaacaaacttttttgcccatattcacagattaaaagaataatgtcattttagaagacaatgatgtgttaaaaagacctggtttttatcagaagtagtagaccgaaggtggcggaatgcggcgccgggagtggaatcaacgacgacctccgacaaggtgtccggcgaggaaagtgggtcgagttgaggaggatccattggagttggagggagtccagaaccagaatgctaccacgttcacctctgcttttttaatcttatatatagtatgagtttgtgtgagtcttctttcttagtccaatcaaagtaagccatacatgaatatatgtgcccatattatagcatttttttattattattattat

SEQ ID NO: 190761 - DNA, 1824 bp, Cannabis indica
gtaggcttttacacccaagtgaggttgaagcttgggaaggatggtatgctaacaacggtggtggatttggatcaaatgataacgaagagaagaagaaaatggtgttgagatggaagatcatgtcatcatgtgtaatgttgtttcacttgttctaagggaatatttaattggctcgatagaacttgcattttcctccgtacgtacgtatattttgttctatagaattaatgatctggcattgtacaaaatgttcctttgaaactttttgattaagatttcatgaacataaagtcagctagtattcaaattcgtcgactatgatatcgttgatcacacaagaatgttctcaattctcatgaatgaaccctctctaatctttacaataaatcaatgaataatcccaccgtctaacctaaacgcaatatagctttaggctataaatagaagtcgataagggttggaaaacttgagaatcttttaactatctcatctacagacgacatcgtcaatagaaacaatctacacgagttactcaatttcattagttttgaatttgaatctttgaaatgaatttagagatttataatatatgttatagatcatgtttaataactatgaaacaagagtaatcatacacttgatcttattataattaagtatatattcataaaaatattcatgcagaaagtgatgaaagactatcaattctgtaactcattcactaaagattattggcaaaatatttttatatgagggaggaaattgagctttttcacaaagtcctaagagatttgcgtacgacttttgagtgaattcttaatgtacattttggtgagaaaaataaatttgtgaaggattgattctattttcattgataattagattgagtacagagtatttatacataagttagttagatataaagctggaaaattagttataaaaggagctgaaaatacagctggaataactaacatagtaacagctttaactaattatggagagatcaagtactaactctaacatcccctcaaacttaattagtgtggagagatcaagatcactaagtttgtttctaagaagagtgaatctcaaacaccctaaagccttggtaaaaatgtcacctacttaatcacaactagggagataatgcacactgagctgctttgacagtaccttctctcgagcaaaaaattatagtctaatgaagtataggtttagctgacataaggattgtctcagattgtcacaccaagttataagagttcgagattggggtactttaatttctgcaagaaaagattgaacccaaattatctctgcagtcagatgagctaaactcttgtactttgcctctgttctgcttctacagacagtggcttgctttttgaaagaccatgtaataagatttcttccaaggaacacacaatatcctaaagtacttcttctgtcaataggatcacttgcccaatctgcatctcaataaccagtgatgtcaagattcattagcaggcttctgtgcaatccatattcaataataactttgagataccttagaagccttttaacagttttccaatgagattgtaagaggatatgcatgaactgggacgcttttttgatagagaatgcaatctttgatcttgtgatacaaacatattggagtgtctaacctagactcctatatagatgaggatcttgaataggattactatccttagcgaaaagcttttccccacctgacataggggtagccaatgaatttgcaaactaaattttggctctacaaagaacatccgcaatatatttttttgtgacaaaata

SEQ ID NO: 190762 - DNA, 1670 bp, Cannabis indica
aaaaaaaattatatttaataattatgcactctaaatcaatttgagttttgaaaaattaatgataacattgaataaactaaacaataaaaataaaattgttggaggtttcttcaaagcttcaatctctcttctcattttctttttagctctaggatcagattgcatttcaccctaaaattactttcaaagttagcaaaaggcataattctcaaaatttatcaattgcttattagttgggagttttgtggcattatacaagtctcattaatttcatttggaaggttgattcatttgagttgacacaattttatatgtattcttaagagtgtttgagagtcaatggagtattttgtgggagttaaggtgtatgattcaagagaagctttggatggagtttgtacttataaatagttgcttgaagaataactgttgtaatatctgtgattatgtttgtaatctcatttaattagttgactaattcttaccataatttgctaaaaatattcttccttatataaacaaatagttacaaaaaagctaaattaaattaatttccaagataaataatataaacactaccaaaaatgtgtgtgtttcacccataatacctttcatagcaaagtgataaatctgcaaagaaaatgtaagtttaagtagtccatttttcacctataatactctttcaacctgaaaatgaaatacataagaactgctgcaggtgtgacttttccagccctaaaatgctaattcagtaaataattctacagtaccctttaaagagtctataaaatttaacctaatcaaccagagcaaagaaagtatgcatacccactatgtctatgttgtacaaaaaaaggggggagaagcataatataatatttaaggaaaataatttttaagaatgagatcacactagggtaagaaggcctttgacaaacatacatgagatggttacatgctataccaagtttcatatcatgaccttaaaatttgaacctttctgttacagaaggaatgttgggaggggatcggagcggtgatttagttctgtttatcttgttttgcagattcagaaggctctccgtcgttcttgttctttgttggagccaccttggcaggggttgaacgttcggactgagagaagagaatcaagaattgcataaggatggtaactaaccccaaaaggaaagctgagagtgcaatgcccttccatgaggataagaatgaagaccattggaggaacttcaaagccccgaatgcaaggagacatgcccaagatacaaccacctggtggaaagaacaaagttgattagtgcttctaaaacaagctctaccaaaagtaaaacggttgagaaattttaaaaatcggaaaaggtttcccaccacaagagatttttttggtcgaccggtgtcttgcaattcttgaccagcaaaagtgtcctcagctttatgtttatccaataaagaatcctagcattcaacaaacaacagccacgatgatcaatttataatttctcctattgttttataataatggtacagaaactacatataaattagtaaatacagaaaagttaagagaagaatgaggcatgactccgaaacttatgtgtatacatataaatattcaaagttcaaattttatatgtagtaggactacagaatgaaaa

SEQ ID NO: 190763 - DNA, 2345 bp, Cannabis indica
tgtttaaataaaatatatttatatacccgtgttttattttttaataattaaattagtgatatttgatttttatttttgactcgattaaagagatcatgttcgagtttaacaaatagtaattatacttatctcgacacgacaagtaaatacaaattatcaccccctaagtgcatagcaccaactctacaccaagcacaagtcgataagcaaagcacataataatctcttgacaaagcaataagcaaagcatattttaaattgtaacaattgatatacttcttattctaatttctagtaaattttgcctaagaaagtaataagttacaacacaaaataaaattagaaaacatgggtatgaaatctgagtgtcagaaaccaataatgataagcttcaaagttcaaaggacatattgtactatacaaactagtaatatctatacagaaaacctttacacgtggcaacttctccttcatcccattcgctcttcacgtgacgcgtatcaaaaaaaaaggaaattattatttattacaaaaaaaagtcactaattacaatcgccgactcctccggaattgccttctccgcataacgatatcacgtgcaccctactacgtgtcacaatcttctacgttcaaagtccacacagtcagtgcatccaacggttcgtgatcatcactatatttgacctttcactacttaaagtcgacttagctttttcgaaagataaagttctcatcacagctaaaaaatctaaagttgatcatttcaacagtaatgaaagctgctctgatccgaaccggttcggttccggtaaaggcccaatttccacacgtgtcagattctcccagagttcgtctcaaccggaccgagtctcttaccggcatcttctccggcgacaaatacgccgtcaattctccaaaagtctctttgcatttcgagatcaaccggcgtcggaatgatagagatgttattcgaagagctttgtcagagaccgatttgatccgatcggagactaaatcttccgttggatctcgtgttttcccgacgcgaataccggaggaagatgaatccactactccgttaagtagaaccgcgagtttttcggcaatatctacggaaatcggaatttccggaggaggtttcggtgaaggaagtaaatccggtggcggcggtggcggaggaggaggagattttggattcggtgcttacaacgatcgaagcaagcttggggagtattaccaagagatgttgaagtcaaatccaggagattctcttcttcttagaaattacggcaagtacttacacgaggtatacaaatttttctgacgataaatcaatcaacttaatcaattatgttcaattaattattgaattaaaatctgaattgtgaaggtggagaaggatttggtaaaagcagaggagtattacggaagagctatactagcgaatccaggtgatggagaattgctttcgctgtacggaaacctaatttgggagacgaatagagatgaggatcgagccaagtcttacttcgatcaagccattactgcttctcctcatgattggtactaattaatcacttttcacataatttgttctttaatttccagattaagtaaattaacacacgactaattgataatctgtgtagcactgtgttggggtcgtttgcccatttcatgtgggaagcagaagaagaagaagaagaagaaaacgacgatgatgaatctcagaagaatatgtcgtctcttcctttggtttctgcgttttgattggaaaaaagatgaagttggtaatcgcgaaacgacgccgtactacgtggcgttttgtacggcagatgaggaacgatggagattgaccacgtggcgcccctatactagtctcatttttccaatcaagagaagagagttgttttgtggcttattttgtgtgtaataatataacgttttatagatatataatatgaacttacctctaattaataattaatcgtgtttgatcttattgtgaactaattattaatcaaagcatcgccatctatatatgcgatttatgtaaatatctttatctatgtttctttgtagtttttttttttagtgaaaatccttatgtatgtttggtaatgttattgttgttcaaactaaaattgtttttatgaattttattggtgcaatattggtagcttcgaaaagtagtagttaatctatgagtaacagactttggcctcttactcaattaggacgtgtaaagtgatccctgcaaagacatgacaacacgatataaaattattgaaagttaggataagttgaaattgggtcgaatgataccatttttttttttttttttt

SEQ ID NO: 190764 - DNA, 1403 bp, Cannabis indica
agtatgattatttataggtgagacttgactaataaattaaatacactagtacacttactatatgtagttggcatttattttagctttaaatttctaattgaacaaaaaagcataactttctctaaattttgagttgtataatcaatttttgtaacaattatcttatcttataggcacaccccacgaaaaaatgtttgtataattttttaaaaataattaaatagaaatgttctttagagaaaaataaatattttgatcattttttaactataatttattttgaaataattataatttttgaatatggtgtagggatctttataatattatcttatcttataggcacacaccactaaaaaaattggttcaaaaataaaaatatatatacgtataaattaatgaaaatcaataaaacaaaatttacttcttagaaagaaactaatcattttaaatataaaattccctttaaaccattaatcataaaattagttggaagatctttgttcctttgaaaatggtatatctatatataatttaatttgaactattaaacaaaataattaatgtaaaaatgtgtctttttgtgacataaaaatcaaactatgatgatttatttgttgttttatataccctcttagtgattatatatataagatcttatcttaatgatactcacctaaaacaaaaatacatatataataaaataaaataacattaagataaaagttatatatatcttttaacccaaagccaaaagaatcttcatctcttaagattggacattgattaaaaggtaaaaacaagagctaaacataacaaaacaaagccacataatattataaattctttttgttttagcttagctaataaaagatacttattattattatcaatgccttgtgggagtgagtaagacttttgataacacttttaagtcacataataaaccactatattgtacatagtgctatgaaaatagattaaattaataaaagggggcatattgtattactttaatcaaacaatcttttgactatgtgcaccaaaacaagacaaggttattgatgatttaagaagctcaatattcttaacataacacttgtatagtgtgtatatataagctcaatcaatgtgattatgattaaaaagagagtaaatacattattgattagactctctattttattaaataataaaataaattttatattttttaaaattataaaaataagttacttgaacttaatttttgacaatttttttaatataactaactggaaaacaattcctagtacgaacagatgtacaaaatgtaactagttttatcataacacctctaaattaaattattatttaattttattttgataaaaaaaaatcagtttagagtcctctttgtatga

SEQ ID NO: 190765 - DNA, 2047 bp, Cannabis indica
tagcctattacattggagtacgctttagtacgatatgaatgttcttttaaagtacctctcaagtagctgtaactaaccaccaacttttagagaggagttgctttttgctagaatgcacaaatgagatggatcttgtatatattcaatacaataatgttctttattttttccctctttgtatagttgacaaaaaagaaggggaataatgaaccaaaattgagaagttgacgcaactcttttatcattttttttattcttaatgcgcatgtgcaacttttatatattattttcatatcggtattagtgacctaaactaatgtgttaaactgtctctgtcccaaggaaattattctattagctactgctaatcttcttattgttacgatcttttattagcctttgattatagaaattatcgttttggttgacatgctgctaactaaaagctactggttgtgaacacattgatgaatttcgttatgtcgttctcttcttaaactcagaggttcatcgggagctcacaaaatggaatgcaatcgctagagactcgtgttcatgggctggaactagcattggatgggatctcatatgatctggctctgtcaagtggaagaatgagtaaaatcgattccaccataacaagatgttgcatgctacctggcgcagatttcttaagctcaaagttctggaaaagatcagaaggcaggtattcagctccaaggatttctaactccagtggcaccccctcagctgcagccatgcgctttagagatgattcaaatggaaatgctgaaagatttaagtcgagccgcatgcttcgactgcagggtggtggcggtttcattgtgaacccgctagcggagatttcacgcaacccaatgggtaattcaatgtaacgatttgaatgaaaggtatgttgcaaaacttttatctttttgtctcgaactgctaacttgattaccaatatggaataatgagaaacaatgatgaaccttcttttatgatatgatgaacccaattttcttaatccaattttactgtgatttccatcaccgggttctgacagcttaaatgataccctttctgagagttctaagcaccaatttaggaaatttaccgtaatgagcattaatatttgatgggtttgaagcttggcatatctgatattttacttcttttctctgcagttgacgttagcctatgaagggtacaatttggattgcagttttaatttgaagacaagtcgatgtttgaactaatgaaccatcgaaatggtagaggccagaacaaggttatgtgcctatgaatatgatgatgatagtttattggtttttcaaaagaatcgcctctcctaaaaatggctacagcaaggagcatcatatttccttagtattattatgatgattataatccttttggagaaggaaaagtgggatagatatacacattaaaatctacttacaaagtgcagttttccgggctcttaagattatctttcgaaaaagaatgagactaccatctgaatatgatgccaatactatgccatattgagggtgaaatcaatgtatagcggagtagggactttcctttttcacgagtcatttgtatctttgtattgattggttatatagtaatgaaaattgatgatcatgatgtcatataatccatgaaatccagctcttattttggtgtctcaaattatacttgtctaattacagtgaacacatttgatgagcaaataagggtaataacactactaatttaggaaagagttcatagttgtactaggtctacatttaaagagaatcaaagatatgactataaagaagaaaaaaagatggatgtgatcaaaagttatttatgtgcagacaaaatgtccaaattgaaaaatttgatgattattaaaataggatttaaatttatctaatgataatatgtgaactcaatatcattaagcatacatatatggacccaaatatcaatatagattatagataaaaatgttaaaaagtaatacatgcaatggttccaaagtttattatataat

SEQ ID NO: 190766 - DNA, 3691 bp, Cannabis indica
ttgttactcaccattctttgacagaatattttgtttgtatttttgccttgataacattacatttttcatgtggtgtaaagtaaaatattatgttccaaacttctaggtaatatgtaaattagtgtgaagaggatttggtaaccctattttatggtcaatctatttaatgagatggttcttgtagtatattttttctgcagctgaagaagttaattatattatattcaatgtcaatagaacaaaattcacatagggcaagggtttgcctattcaccaaaatcgacaacctctttttatattttccttttcttttttgcttcgaatcttttctttttcttttttccccctttctttatagtgtttttgctttgaatcttttcagatatttcaactacagttctgacatgcatcttttctttttttgtgttttcttttcctaactttcaatgtctggtatcttctattttctcacaaaagcatccatctttcttgttttcctccataattaagatatttgagtcattatcattggctgaatatatgtttttcattggcgttagatttttttttggctaaaatgtgagaaatgcatatgatatgattgattgttccaatcattccttataacttattgacttacttttacatgtaggcctttgatacccttttgacgtctttggatgcacgtggaatcagggaatctcatttgcgcttaatgttgcaaaagattgagacatccttcaaagaaaatgttcgtaggagtgtccagtattcaagtactacaggcagaggtctgactgctgtaaaatgtgaaactgatggcacaaaatatagtcctgattaccatactggttttgacagccctggcagcatcatttgtggtacgaattctgattcagataatttggaaacatcaacatctttcaaaattgaacttggcagaagcgactctgagaagaaggctgccttgaaaaggtatcatgattttcagaagtggatgtggaacgaatgtttaaattcatcaacacttcgtgccctgaaatatgggaaaaagaggtctgcacaacttttggaaatctgtgatttctgtatcatttcttattactttgaggactcccattgtgtttcttgccatcaaacttttcataccaccagcaacgatctaaagttctcacaacacataattcaatgtaaagaggaaagaaagtcagatcctaggaatattcatgttttagatacttctcttccactgggaagcagactacttaaggccttattagccgtggttgaggtgagatgataaaaccataacaaagcttttgaaagtacttccatgtttaatataacaagctgatattattcttaattcttattggtatttagttactaacgtttcttttcgttatgcaatttacagacatcagttccaccagaagctcttcattcgttctggaccttagaccatcgaaagtcttggggtcggaatttaaatgcttctttctccagtgaacaacttctacaggtataccttccttttaagttttatgctttattatgatggttcatgtattgagttcatacagatcagtatattgtggtgtatgcatccctaggtagtgacccttacttcttgagcacctctaaagtgttgatgtgaaattcatacagtttgattatctattttctatattgttctaatgtatatatcttgtcatgcatgtattttgttagttgtaacaataattgtcgtgtacttaataaccaggatgcttctgtagttgcactaattaaatttgctcgaatctcatcgaaatgttcatttaacaagaaattcatctgtggtttaatcatcttatgattttgtttcttgttaaaaagattgatacgttgtgatttgcagtctttttttctgtaagatctgatggcacttttttttcccccttctatgtgattattgtaacttgttgtttacatccacttggtatgatgagtgctgatatggatctaccttgatacagatattgactatatttgagggcagcataaggcgagactttctttcatcgacctttgctgcaacagatgagttgttggggtcccgcaattgttcaagtaatgctttacatgattattcagaccacggatcggtttccatacttccatggattccccttacctgttcagctgtggctttgcgactttttgagcttgatgcatctataacctatctacctgaggagaaaactgaaccagctgaggataaggaatttggagaatacattgtgagtgttcctcccgttggaaggggccaaatgtgcttgtgtagtattgcattaaccctagatttctctaatcacagtcagtcttcctttgcacggtttccatgtgccatgtacttatttcttatgtggggtttgaattaagtctcaatgttgtggtgtctggcaagttgccaacaccgaaaatattctaatgagatatctatgcgatttagaaaaatgctaacttgtaatttatttgtgttccacagaagcttccttcgaggtttactcctcagagcaatgataaagatattgaactgaaccagctagactacaatgaatatgtgagagaagagaactattctcagaaaagtctacaaaataattataaacgtgggagagggggtcgtgatcaagcacgtggtaaaaagttgcagaaaagggctaatggctctaagtctgctgtggcccggagaaattctaatcaaggattaaggcagccaggaagaacacttaaacaagtgggtggaagaggtcgccggactgttcgaaaaagaagaccagagagcaaggtggttgaggagacagtgcctgtacatatggttgacattcacagtagtcctgagagtggaggagaatcaactagaaatttcggtgaagattggaattatgaaaaggttgatgcagatcattatatggatgatgataacatcatcggtgaagatgcaatggaatccgatgacaatgcccaagaagaagaatatgaacaaggaaactgggaggtgagttataatggtgttgccagtgattggaatggagggctaatggacgagagcgatgaggatgaggatgaggatgaggatgatgcagatgcagatgctttcgaagaggatgataatggcatggcagaggttgaagaagattcagagggtgatgttgatgtgagtgaggatgacggctcggatgaaatacaacatcctcaaaatattgaaggctctgatttttcagcttcagaagactacagcgattaaggtgtcaataatcaggtgattgccagtcaacttaacccgttgctgcataagattttttgttgtgcagcctccctagtggccaatttcgtatttagggaagggagattgagcgagtttccccttgttttttttttttccaattttttggttcacgatttttaattctttagtcagttgattagatcccaggatagattgcacttgtaattggataaggaaataggcatattgtataatcacgtaacagagaaaatatcaatagttaaatatctaataaaggttaatcaccttatacttaaaaaagttaggatggttggtgtctctcttctatattattcattgaaccgtgatggaaggcttttccttctctggttgtttctttttttttttaaaaaaaag

SEQ ID NO: 190767 - DNA, 2744 bp, Cannabis indica
tttttcttaccttcttttgctgacatagtagttgttgaaaaaggctagccttctactctgcaagtccttgcatttattcaagtaacctctcaagaaaggtctcaacaaaggaatgaaatcaccatagttatactcaaaactctgagccaatctacttctttcagagttaaacttagtagcttcaatgaacaaagggtcatcaagtgactcaaatttagtgtcaaacatcattccatacatgatattgtacagcatgagctgcagtctccttctaatcacaattccttcacttctcaccttcatatcacttctaagatcatccacaacaaggtccatttccctctcccacatagcactataaaagtggacaactttgttagtgaaaaacgggagagtcatgattctgcgcatcttgcgccaatgatcaccgtagacagtgaaaaccatgtcttgtccattcccggtgaatatgtcaaagacaacatttctagggcgagaaccaaactcgacaccctgagcatgcaagacttggttggcgagttcagggtcagagacaacagttaagttcttggaaccgagtttgagtaggaaaacagaaccgtacttttgagaaagtgatgtgagaaaacgatgatttagatcatttcccacctggagccaatttcctactattggtagggaaattggaccaggagggaggtttttcgaggagtgtcttgcaaagaatttttgcaaggcaaacaagattataggaatggatactaagataggcaatttagtgttgttggttgtgactagtgttgttatgataggaacaacaagaagaagagtgaaaatgattggtttggagttggaattagaagccatctttttaagtttgttgtagttatggaatgaagtagataatagatatagatttgagattaagaagggggaaatgagaaggctttatatagagtaaaaattaaggatgttggggttggtggtggtggtgtcaaatggttttgagaaaatccaatgggcaatattagttacaaggtaggagaaggaaattttggtttttatataaattattacacttttaaagtcatttttttaagattagttggttggtgaaaaggaggaaagtaaatagtatttgacatgttttgaaattatttctttttttttgtcaagctaaaataaaaaagatggtatttttcctttgtttgggagtggtcaaaggataatgttatgaaacctatctatctatggttctaggaaactacaaccttagtcaagagtttcatggtcatggtcagaatataacttcttcaaaaagtcaacaatgtagagttcttagattttagcaaaaagaataatgatacatatcataactttatatagtttattaaattaattcctcatgcagatatataattatttgtcatctaaaaaaattgaccctaaaatttagtgaaaaaaatacaaatccggattgtttttattgctattgttattttataataatataagaaaagggtattaatttctacttgacaatttcgtttttgggatttcttttttttagttctatgagcagcattaaataaaatttaattttttttaatctgcaattaatttaaatataccaaaattgtccatgaaaaggttagatttttttttaaagaaaaaataaaatataaaatcttaatttaacaaatatttcagaagagtgtttatgcttaaaaaaaccttaaataatttagtcaaaaaaaatttaaataataaaatataattcctcccaagtaatttctttcttttgcttttatccttaactttgttatatgaataatgaatttaatttgacatatatcaatcttcataaacaaataaaaaaagtaggtaatttggctcttaaattgtttttgtgctaaatttcattctattaaaataataaagagaatttctctctaaaaaaatatagagatttatgttaatataattaaataagattaagtctttttttttctaacaaaaataatatgaagtctttggttccatcaattaatacaaaaatacatatttattatttaataattcataatagaaagtaagataagcttcatgcattactaaataaggacataaaaataatagtgtacataataataataataatgtatataataatttataaggctacttttgttgtatagtctattattataacatatatatataaccaatttttatttatttttggatacccttttggcaccctatttatttactaatactctccaactaatgtttattaagtaaaaataaataaaaataaaatatttatttatttatttatttatattaagctgcagcaacaccagccaaaaacacctgaggacttgagcaaggagagacagtgtaatcaagagatggtttccttgcttctgatctgcatttgtctttgtaatcctcacttctcatgtgcttctcacgacaatcactgctgcaaaatgccttttctcctctgcaatacaatcccgaaaaaccccgattaatcgctaattacataatcaacaacttgttctacaaaaatctcgggttttgtgggagcaaacaacatgcctaacgattttgagttaggtttcttaggcaagtatttcgatcactcttcgcaacaaatagaaaaatagatatgccttgaatcctaaccgaatgaattagcttcaattcgcaagtttgaacttccactaagacgcgct

SEQ ID NO: 190768 - DNA, 1403 bp, Cannabis indica
tctgtgaactagaagactctcccgaattaaagcaaggtatttgttcatgagtgctttattttccgttaaattatcctctaaattagaaaaaaggggggtaaattttttatcattgggatgcaaattagtagaaaaatgagacagactgatatttccatcaaagccatagtaccatgtgggtcaatggagagattgagatagtcaacaatgcctttacccttctcacgatttgatatggaagatggcaatgtaggaggttgtcttatgtgaggaatgataggggtgatggtgtttcgaacaaggcgcgtaatgaaaagccatggtcctgctttagagaagtcttgcatgtactgattataaccagaattaggtagagcagaacctttcatccatggaccataggtgagattagggtcctttccatcatctattttctctaaacgaaggacatttattaataacatgtccaataataccacagtcatagcagaaatctaataatctttcatagcgatactctagccacaattcatcatcaatccatgggaatgtgaccaactgtcctctaagcagaggcttggaaacatcgatagccaccctaattcttaagaatggtccccaaccctcactaagagagtcttcatgaacgtcaaaaaatgtaccaatgagattaccaataaaacgtgcaagagtttcaaacttacttaattgtagtctaaaaacttgtatccaaaaaggagttgtggtatggaatctatatgtgcattctgtagaacactcggaaggcaaaggatcatatgttggttatgaaaatgtcatggttcctttgacatcactctgtttaggtctccttcacaactaaaggagaccatatatgaaccaactcataggtagaaatggcaaatcttcctttccagttagtcatgataaaattgttgaactgttttaggttgtaacctttgcgggagaaaattttacagatcagtcgatgagaagtagggcgtggtggtggaatagcaatattggaaaaattgattacttctctctctctctctttaacaaataatgcattggaaaggttaggatgaaaggaattcatcgtgaagaagatgaaaaccataatagaatcagcagatcaaacaaaaaaaaaaggccaaaaagagaggaagcatggaagttaattaaagaaggagaaaaccaggaaagttatgagcggagaaggatggaagcaggttaattattgatgaaagtaatgggcgaaaactaaataaaacaattaaaaagaaaaaaaaaacggaaaaaaaggaaaaccgaactaccacataacagcaaagaggcgagacaatgctcattgtgaaaataagattaaagttttagtataagttatattattaatattataa

SEQ ID NO: 190769 - DNA, 2168 bp, Cannabis indica
gaggtagtgattttgccatttcaacattcatagggcgacccccaacatccatattattcaataataatgcagctgttgcttcttcggttttaagtattctatgtaggcaaaatgctttgagtcggtgatggtacagtcaacaacagtaccacaaaaactaaaaagttgtttcagttgctcttcagtgagaagtgggctaagattgctaacttgaagtgttttctttagtgcatcagccctcccagctttgtcaggtgaacctgatcagaacagcattattccattataaaaagcaaagaataattgaacagttaaattgacataatcaaagaaaatccttgttttacatgaatagaaataaaaataaaaaaaggttacacaagtcatgtaacatatgagagaagaataccagataagtctttgcccgaatgagcttgtgcttgcaactgagcagcatgggcttgaagggcttgagcagcaacaattgcctgagcagcagccattgcagcagcagaaggagccatggggacttgacttacactgctcatgctagttgttgcagctaatgccgtcattagaaggttgtgaggagggtgattcaacttgcaatcagttttggcacaccgaccattaaggtattcccgacaaacttcaccaagagatgctccaatgccaggcaaaatagccccccctaaagcaccaggaatgataccagggatcattcccagtaatcctggaaatgcccccgaaacagatgcagtataatttggcatattgggcatggtttggttaactaaatttggataattagatgatggagccagaccaagtagccccccattagatgtagtagcagtagcagtaggagtagttggagtagtacctgcttagcaaaaagtaaatgttcagattagtaaaaatggcatacatagcaatgctcttcacaaaataaataaaagaaacaaacttcttcagctaaaactagcattcataagaagagtcatcaacaaactacattatcctaagctatcaacaatgatagaggaagaaaatttaacacataccccatttggcttaactaagtaattttgacatctttagcaatatttatacatcataactattttacctcacctaacatggaatggagtgctcttagctgtaagcaaaataaaaacttatccaagcaggacctttaatatttaacagtaagcagtagattaagactgtttagtaaaaatactgtgaaaatttttattagcaaaataactttacaaagaaaaattattagcaaaataaacatgtatgatcgcacaagcgaccaaaaactacacagtactaccataaaacggccattatgcttgcaaagccaccatagatttacactgtgactgtccaaccatcatggtcagataaagtaaatcgattccggttattttgcaaattttactatttcacattgttagtttgacaaatttcccgaactcgcaaagcgaccatagatttacactacgactgtccaaccatcatggtatcataaagcaaattgagtgtgattattttgcaaattttactatctcacattgttagttcgacaaatttcccgtaaattaagctacatcaaaaacaaattttatgtacctgcactgaagaacaccggaaatggactacccataattggtttcccattacactcaatagtaaccatataatttcctctctttggcaccacataggtaactgtataagtcccatcacccatgtccttaaccaccccttcttgctccgatccaccaactccaactccaggacaaaccttcaccttaatttgagcaccaccattaggaaccttccttccatcaacatctttagtaaccaccccaaatgacgacggagcacaagccgttccaccggcgattccagccccagccgccgtacacttagaaggatccaccggcccaatgggcttgttcgacaagtcctcagcttcttcgctctcgctatccgatgaaacccctgctgttatatctttcacacgattcttttccacgtctttgaatgtggcttcgaaagcagctttagctgcggcagctttctcagcctcgctcttgatcttcgcctcctcagcttgtttcatccatatcggttttgccaaagcagtattatta

SEQ ID NO: 190770 - DNA, 2275 bp, Cannabis indica
agagagagagagagaatgtgcaataatgccatgaaagcttacaaaacaggactatgcaagcacactaatgtgcaaaatcaaagaacaggtggaacttaggtcataaggcccttgatggaagacaacaattacactgaagtcatccttctctgatctaattcagaaaataggaaaaaattcacaagtattcaatattttgagagtaaaacatttgccaaggacataattaaatctagattaaatcttagcaagtttgactgtaaaggaaaaatggtacttgagaacgttaataaatcttcagaatggggaggaaaaatgtaaaggataggatcaaagaaagatgtaaacatagcgcacaaatgaacaagcatcgatttcattgcacatttcaaagtgattaattcagatatgatgttccatgaggtctggcaaaaattggtggtaaagaaaggttgaataattaaacctctcaacctatattatcaacataatattcctctactccttttaagtcagatttcttttagtaaacaggttccgtaaaagtgtccatgaggagcttttatgtatcaccagtcaccagactcaccacaggcttctgaaataagcttccctcgaaagacttctagcatactaaaaacaactccccacctatcccttttataataagaaaaaaaaaagtgcaattatctccaatcaaatttgacacaaccatcaatcaagttaactgatcactcaataaacaaactatactagacatagcacagatcttttatgaacatgcacatgagttcataaggagcttctaaatatatcacccattggcatctcaagggagctatcatcaaaagactacctagcatactaaaagattccccacctagcatactaaaacgagttgattatgataaaaatgctgctaaatttaatttaatattcaatatatatatatatagagagagagagagagagattactgtgtcaacaaacgaataagttctcacacttttattgagcacaaaactcaaatgacacttgatcatttataatcatagaccataaagacaagtcacattctgaatgactggtttattttaacattctttccttagtcaaattaatcaataattattaatctacttatctagctattatgtaccttaaacttagtaaactgccgaaattttaagaacatagctaatcaagttcttcaaagccttaataattatctagttattatgtatctcaaacttagtcaactgcaggaattttaagaacatagctaatcaagttcttcaaagcctgataatttgagaagtgtccttcagaatcattgacctttaagataagtcaaattcttaattatttacaagtaatcactcaatgttagtctgaacttcaagatagcaagagactacattaaattcacaaataacctcaaagtcctgtatattcactctattatttgtcgtatgatcaaattcctagctaccatttgcaaacgaaggtgagtaaaattcagtagtaactttaggacttgttaggttggtatagatggcaacatagacattggtgatcttcatacgaccagttggcaatttgcaaacaaacttcatattttaagaaaaatagtaaaaaaaaaaaagtcgataaaattcccaaaaagaataatccaatttttactgcaatatcacaacctaactacaccctttaaactaaatctaatacaaaaatattgcagtcaaggacccgaaaacagttgtttgatgcgatactgacattgcaatgtattaataagagccggtttgttaagcacatacaagttacaactcattgcaagcacaaagtggcgaggatgtcgtagctacatcgcagtatcatttgtgccattcatacctaaccatgtcgtgccgcaattataaaattaaatgcagtttaatataagagtttgagccatgctctaagcatatgcaaagagttaaaagctgctatccattggctagattagaaatttcatgtgtctcgtgaaaaatcctcatagctagtgtttatctttgcctaagcctcacgagattcttcaatattatatatcttatgtaccggagaaaagtccaaagatatgtttggagcttcgatttggatgaattaagggtaaaaatctgtctttggattacaaaaaaaaaatgatggcgaaggaagaattttggggaaagtgaaaagaaaatttcatgtagttcggagcattttagaattatcacaatgagaaaattaattt

SEQ ID NO: 190771 - DNA, 1921 bp, Cannabis indica
atggatttgtatgagggcaggacataccccagggttcacttatcttgctacgaccgacttatgaaagtagcacatgtcagtgatgacagaaaatacctatgttttcctctcactctagcgaaatccgcagaagaatgatagaagaggcttctagtgggatccgtccagaaatggcatggcttgcagtccatgttcaaaaagcagtttgtggttgtgagagattttgatatggaggtcagttctttggccaacatcaagcggcaacaaaaagaagcctcaagtcctatgttcaaataatgaaggaagcagcatcacagacaaaatctaacgatgatcaaaagttagtgacccttcaggctggagtgagattcggatctctgttatggaatgaaataaaaagaaaaaaaattgacaatctctacgacttcctacaaaagttagtgacccttcaggctggagtcaacattatcttgaaatggagacattggtcaccgaaattcataaacatgaggccttacttttgcacgtgttgcttgttattagccccctaatatttagtcctagctctgcccttgcttgtatggaaaatacttcataactttagagctaataattttgacccgtggacttaaatttattaacaccccaatcatgtaaaaaactttttcttgtctattttaattttattttttcaacttaatccttttttaaatcggtttctaaagaactcggtaaacatatataatatatattaaaaatattatatttatttatatataataaaataatatttaaatttcatttttactttttatttattaatttcccaatagagcttattatactttttctttaagtgatgaaaatttcatttaaaggcacaaagccatgatcaaaagattaatacaataatagtctaggattagaggcaagacggtaaatcaggccaccgaatttgagatttctcaagagttaaagctggacgagtaaggaaatgagccatagcattttgaacccttttataataatcaagagaaatagaaaaaaaagaaggctatacataaaaattatcttaaacaataatactaaattctgtctaacagttatctttcctattgactgcttgaacaaagcagaggcaaactgaaaaaatagtgatagagttgtaccctaatcgtagacacaacaaaaggagttgatgcctccgccagtgtggaaagaatgaggtcgctgctagagctaccgcaatacacgggaccatcccccacagcctaccccaattgcactgagacccacatttcctattatacttgattgaagaaatccttaaaaaaaacctaagacttatacatattattttaatgtgtttttataatgtttttaaattaatataagaaattaagtgtatgaattaaaatctaattaaaaaatagttcttaattgaattgaattagatcggatgataattttctaaatacaattattaattggattgaattgcaagcatcgaatacacaattatactaaattgatgtggaatcttcacattattcaacctcaaggatactaaattgttgtgcaccaaattacacactaatgatgttacattttgaagttacatcaaattggtatataacttttcttttcattttaactatttttttctttttttcttttctaaattggtctatacataccctcctacaatttcaatttttcttttgttataatttttgtcttgtctgtctacaaaattctggtctttgttgagtggtctataaatatttaattatgttgagctgttgttgagtgtgagtaagaaggggtggtggtcgtaattcaagttggaaatgatggtaggactttacgtctttaacgcctacgccaatttgtaacttgtacactgtatatatctataaac

SEQ ID NO: 190772 - DNA, 1405 bp, Cannabis indica
agtaatgtttattttttttttaagaagaatgaaaatagattcatccaaataagtgaaaattcattttgttattccaaattaatgttttaaattgcaaaacaaaataattttataatggaaggtagcctgattattagattaaaattgatgctccaaggttctcaatctccaccattctctatctcgcaaatttaaaatttgtcaattcgtatatgttaatattcttacttataatccttctaattttattcctaaattaagtaacgaagttgtccacttacatcttgttttcgttgtatttgtatcttatgttttttttttctccaactagtttaaaagatttttaattattaatagagtggatttcttaaataaataaataaattctagccagcttatacccttttcattggcccctctaaaatttaccatttcaataatagtagtgtcattttttttttcatagattatattaaaatgtccaaagcatctagacccaaaagctttcttgattcatcactaatctctactatctttttataatcatggaaaagaatccctcttaaaatataattttgttcaaaataaaatatattggcagaaaaggcaatattttcaactagtgaaaggggttgaattgaattagtttgctaaaaataaaaaaggggtgccataaccattactttagtgggaccaaaaattggtcatattaaaattttataagagggttaaaaaatgaaagaaagaagagtagagtatataatgatgaaaattaaagactatatatctatacatatattggtggaaccccacatgaccttatcttggtttatcctattcctatgtataacaccacacacaccaccattgaaggaggggagcctctctataatcaaaaaagtagtacggaacatacacaaagataacattaaaaaaaaaagtcttttctttttattcactcccactaatcgaatattcctatggaaatatatatatatatatatatatatataatcatttatatttatatttatatgtgtgtatgtgcaaaaacttgaggaacatttcatgatttttactacaatgttataataaattatgagtatatgaagttgggattgggtttgcattaattgcaatgaatattttttaggtttattttgaatctgattattcattaatatgttcatatatatcacttttcaagaatcacttttcaagaattttttttttaaaaaaaatatgtatacccaagttgctaatttattagtgcaataagtttttggttgactagattcatcatctgattgtgagtaagtggataaataaagaaatattgtagattggatattatatttgataatgaggtgatttgtttgcctctacatgtgctatatatataaat

SEQ ID NO: 190773 - DNA, 1568 bp, Cannabis indica
gagtctcccgcagccgctgctgctgcagccgcggctgcagcagcagccacgtcatcaagtcacgtcgctgtgattgcgttggaggatcggtcgggtaagccatggttggaagcctggccggaattcggaggaatcagaggctgtgtggaggttgaggaagtttgtattgctgacgtggttgttcccgttggcgttgttgtcggcggcggaggagccgaagtgggcatgtgtttgggtacggaggagagcgttgtttagccaattaggtgctgcgttgttgttgttctgattcaccgacttggatgtcgggtccggcgaggagtgggctatggccaactggtccggtaagatgttctggctctgttgttgttgctgttggctttggtcaccgaagtggtggtggtggtgaagggggaggtcttgtgatgagagatggttatgatacgccatcagatatgtattttatatatatttgttatatgtatacaaagaatccgataccagaaccgaccagtactatagttatgtataaaaaaaacaagattatgactttctcatcaacttgttgaaacagagttgagtagagagatttcggtgttggagctagctgtataagatagagatatggcgaaacaagatgaatggtttgcctatgttttgttttttgtttttaagagagagagagagttgaaagggaagtcgatgtggatttcttactacaaaaatatataagggggagaatttttagagagagaaataatggtattcttaattattaaagagctgttttcaggcgacaaaagtggccggaaaactgcttttacatgaatattgttgaaacttgaaagtgagaaacagagggagaaatagagagttgtgagttgtgagttaaggccttcttatttctatctaccttctctttccccaatgcaaattactgttttatttatttatatatatatatttggaaaaacaaaaataaaggccaaaagaaatatgaaacttttgtgtaactaattttatttttattaacattttttgtgtactattattgtgaaatcatagagcacttattacttttatcagtttatatgcccaggcaactactgcaaccgtctagaagaataattacaatttttatttaataaaactgctttttaccgaattacatttgtcagacaaaaactataattaactataattttattattatatactgttatctcgtacgtatttttaataatttttaattattataataaaaaagagtgggggaagttgagttgaaaagcttggtttggttaagttgaattgaattgtgttgtgtggatccaagtgattggtgggatattgcaaggtgtaaatgaaagtaatcgaacggctacgatattctcaacgtggcgacacaaacgcgcagctatcttgccgagtgggacaaaacagcgcgtgtcttacaatcgaggcttgggagagggaccaaggcgtagtagtacgtagatctaggtgagtttgctgggattagtgtacaaagatctgaactttaaaaacagatgaatcacacgtatatt

SEQ ID NO: 190774 - DNA, 916 bp, Cannabis indica
tttgtttttgtgacaaatttcttagtagctttagttttcaataataccaacctttttttctttttgatttgtatctaatcttaatacttagtaatatttttcttttcagttggcacaagtaccaaaccaagattggagtgctgtgaataatatgaggcttcttgagagatcaccatcacattcaaaagaaagcccaaaaagtccttttgccctaacttttgacaaggttgactataaaattctttgtattatttaacatacactagtcttgttgtaactaacataactaactcaaaaaaatttcagaaaaatcgcgcagttcgtaaagattgcgaaaatgacaaagaaaaaacatggcgattctcgcgtttctatccccttatagaggtaaaattctttacaaagtaacatttttcgagtacgttgagaatactactttatagaaaattaccgaaaagaatgtaattttgtaaaaatgacattataaaaatatcttctttgtttttttttaatcaggaacttgttgaaaaacacagcaaaggtgaactttcagaaatagattatccatggttgaataaaccaagtccaagttcatcaccatcttcaaaaccatttcataattttgtgaactcaaaacgtacaccaacatgggctcgatgccaatcctttcatgacatgtattcaaagtaagtttagatttttgctctttttgtattctcttctttgttttatgacaactttttaaaatatggttttttttttaaaaaaataaactatagcatattctcaacttaattatgaaaaggatattttttaggggacattacaaattttatgggtttttatactttcggtttgaaaatatgattttatgagaaaaattaaagaaaaagttaaaaaataatgcgaaaatagt

SEQ ID NO: 190775 - DNA, 2434 bp, Cannabis indica
caaccactgccaatctacgcatggaaatgcctaagagtctgttgagaaaactgacagtacaaaaagtaatgtccatagtcttcctcagctgcttcacaaaacaaacagatggtgatatctagctgaatatgcaccctttgtaagtgatatcgagtaagaagtcttgcattgaaaagctgccaaatgataaaacggtgcttaggcacactcattctgttccaaacaaagtgttggtactttaccttgtcaagtttgatgaagcttttgtatactttatcaacatttcaaacttctcatggtaacaaggtccatctattttttcctgagaaaaagtgtctcggatatgacacaacttctgccaataccaactagtatcgaccttaagttgatacgtccaaaaatcttagccttttaagtaaaatgttgtttagccatttaacctaaagagattctttctgatgagtaattgcccaaacatacttgacaatcataactttattccatttagctccttcaccatatcccaatccaccataagctttaggcaacacactttttcccaagaaattaaatggaagttacttctcgttccattatttcttcataaaaaatatacatagtttatcaatctctttaattatgctttgagggagcataaaaatgctcatctagtaattaccaatccccaaaagaatagaagaataagttgagatctacctgcataagaaagatgacaacttgtccatgagtgaagtctcaacttaatcttcttgagaatgattccaaaatcttcaggtttccactttattggcctcaaagggaccctcatatacttgagaggaaaggatccctcttcaaacaggagcaccggaagtaactgctctttttccaagttagacactccacaaaataaacttgggatttgctacagttagccccaagacaagtactgacacagaactcatcaaaattagtttccttcacacagaaccgatccaacattagttttgcaaaaaataatatcattcgcaaagcataagttgataatcttaagactcctgcacgttgggtggaatctaaagctgttatgcttagtcctaagttgtaaaatccatgtaagatactccattacaaaaataaacaacaaggaggatatggggtcaccttgatgaacacttcttacaccttgaatacctccctgaatctcccattcatcataagagagtatgaagtacctttgaggcaaatcatgacctaatagatgattttagaggggaagcggaggcagaatagatacctttccagaaatatccaatcaaccctgtcataagctttgcttaagtcaatcttcaaggcgcatcttggagaggtattcttaatcaagtcttggaacattaaaatgttatgagcaagtgatctatacttcacaaaggctccttgattttaattgattaagctggccaaaactttagaaagcctactacaagtcattttagaaatacacttgtacaaagtgttgcagcaagaaataagacggtaatccactgctcaagtaggaatatcaatttttgacatcaaggctattgtcgtttcatttagctcggtaggaatcttccctgtatcaaaaaactcaagaaccgcatctaagatttcattgcaaatatccagtcaaataactttataaaaatctgaaccatactcattggggcttggacttttagtaccagaaatgctcaacaaagtcttcttgatatcttacttactaaatttcctaattaaacctaattgcatatcaatatttaggcaaggtcccatctcaatgcattgaacgttaatcattttagttgcaaagctaacacttcgcataaaaccattgaaatgattaacaacttcaaaataatcttcaacaaggtgccattgttcattttgaaaagagacaatagctcttctcttttggatacaagtatgaaagtaagcattgtttccatttcccttttgtaattacataattttacttcgctgaattagaaagctctgataaaagtgggcatgaaacaatttatagtattattgtctcgtaatcaagtaaaaattttgtttaaaatattaattagatataacaattgtgataattttagtaaataaatataaataaaaaaatattcaattttattagaaaaataatataataataaagaatattatttttggtgtaatatttagtattataattggagtggaaagagatatggacaacaaatttagtgttagcatgatattaaatttcgtgttaatgttagagatgctcttacattttagtagacaaaattatatataaatatgaagattctaacttgaatgtggacattttgtgagcatatactttgctagtttttttggcttgaaataaatttgagttatattttcgtttgac

SEQ ID NO: 190776 - DNA, 5083 bp, Cannabis indica
actattcaaaattttttaaaaatgtataagtgatcctatatagttaaagtaagagatcatgaaaaaaaaaagttaaagtaaaaaactctctttgatgctgaaacacttaaagaaaatctatcgaaacaaccctttaaaatagtgtacatatagatttaccccataacataaaatatttcatatcggattagtgtatacactaggagttaaaataatttaataatgataaaatcttgttaagttaagagaattgattaaggttgacaacaaagaacaaaaggagtagaactgaagtggtattaaaataaaatgtccctttactagtggatttatgattttaaaatagaggaatagtattagaagaaacaaaacatggaatgagaatatatatattacacaatattggattgggggacaagcatgataaataataatggcaagtaaagacaagtagtcaaaatggtgtcgataaatatatttgcttgaagtgagaattatattatgataattgatttcttaacttttagataatatcgctgactaatcgtgaaatgtcacctatgaaaagtgctacactaataatacctaatcataatactcttatattatagtagagaaggtggatgtggggacttataaaatgatgatggatgcttcctggaaagcctgatgtgattaattagctccatgccttgcgctttaggtggctttatctctttaatttctttattacgtactttcataacataaaaaactcatgacgggtttcggtgctgggtggctccgatccaattgcccacgacaacgtatccttgcaccaatcattgactcgaccagagcagagctcacacacacaaacactctcattttgtcatttataaaaaaataaaaaatgttactatcaatagtacaattctaatgacacttttgaatgccttcttgcacgatcttcgtcttaccatcaatatccaataaaatcatatcccccatgtcccaactagtactctttatttactatttcatactctttaacataatttttttccaaaaaaaaaacaatagatgggttgtgatttttagatttctctagatatctttggatatacactatgcgacacaaagatgaagttctcgatgtcttccttaaatgaaaaaatgatcgagacttaaacaggcaggaagatcaagagactttgatctaacaatggtggtgaatacaaattagaacctttcctacaagtgtgtcaagaagaagggaaaatcatatatttttcagtacgtcgtacactgtagcaaaatggcgtggcagaacgtatgaaccgtactttggttgagaaagttcattgtatgctatctcaatccaaattgagcaaaacattttgggctgaggctttgtcatatgcaatcgatattgttaacacactccctacgattgcacaagatgggaagatacctaaagaggtaaggtttggaaaacctgtctgtgattataatttcttacgaatatttggatgtccttcacatttccatgtcaatgaatccaaactggatcctagagcaaagaaagttattttcttgggctttaatgaaggagtcaaaaatttttgattttggtgtgatgaatcaaagaagatcgtcttaagccgagatatcacatttgacaagtgtgttatgctaagacagactaccttagagaaagaaaatgaaagcccaaataatctttctaaggtggatcttgagattccaaaagatctagaaaataatgatcatggtgaagatgagagtaatgatcaagaagagatctcagttaagccagaggttccctcagcatcaccactagtcactcaacaatcagaatctattgtcgctactcaatcgagaaggaagattaaaaggcctactagatacacagatatggtagcatttgcacttctaaaaattgatgatgacgttccatgcactttacagagaagctgtgcaaagtgttgacgtcaagaaatagaagttggcaatgggtgaagagatgaagtctctacaccagaattagacatgggtgttggttcgaacttctaaaaaaaagaaggttattggccgcaaataggtctgtgccaagaaagaaggtgttcctgaaaatgacaacatccgatacaaagccagactggtagcaaaagattatgcccagaaagaaggaatagattacaatgagatgttttcacctgtcttcaagcattcatctattcaaattttgttgactttggtagcacaatttgatctaaagttagttcagcttgatgtcaaaaaacttttctccatggtacgttagatggagatatttacatgtctcaactagatggttacaaagttccacgacgtgagaattgggtttgcgaatagagtaagtctctttatggtttgaagtagtcaccgagatagtggtacacgcgttttgacagcttcatcaaggagcagaagtacaccctcagccaatacgaccactgtgtatacttttgaaaacttcaaggtggtactttaatttatttcctcttatatattgatgatattaattgcatctaagagcaaggtggagattgttaggctaaaaactcagttaagttttgaatttaaaatgaaagatcttagagaaactaagaaaattcttgggatggagatcacaagaaatagagttgcaaccagtttgtctaacataggctcagtatctgaagaaagcattacgaatgtttgacatggacgagaagactaaccttgtcagtacacctcttgcacctcattttatgttatgtgaaaagatttcacctagcaccaccgatgagaagaagtaaatggagcatattccatatgcaaatgttgttggtgacctgatgtatgcaatggtatgtaccaaacctgatattttacatgttgttagtatggcgagtcgctacatgtacaatctcggtaaaggtcactagcaagtagtaaagtagattttacggtatatctacggtactgtagatatttatttgaagtttgagagagacaagactgatggtaaacatcttgtcggatatgttgattctaactacactagagatctaaataagcgtcgatcaactactggttatgtcttcacaataggaggaggaccagtttgctggagatcaactttgcagtcaactgtagctttgtcaactacaaaggcagaatatatggctataacataagcattcaaagaagctatatggcttctcgggttgagcaacgatattggtattgttcagaaaaacgtggaggttttctgcgacagtcagagtgccttttgtttggcaaagaaccaagttcaccatggtcacactaagcatgatgttcaatttcattttattcgtgaaatcattgatgaagggaatgtttttcttcagaaatttgggactgcaaataaccctacagatatgtttacaaaagtggttacaaggatcaagtttcaacactgcttgaacttgattaacatctctcagatttagagcgcccagggcgcatgtggaggcaacgtttttagttttggtttttttgccaaggtggagattgttggatttggctcaaaagtcaatttattttgaagttgtaaatgtatggttcaactttcaaaagatttaggtcttcctatttgccacatttattttttaatatcttttgtcttatgctctctcattgattacatatggttgtgagttgaggtttcccctctataaatatagagctcttagaagagcattgccaattgagtgtagtaattcaactcatagcaattcggtgtgtacgaattctgggtgaataattcgagtacaactttatacaatcaaggtattttagaaatttgagagagagaatctgtatagctaaacttcgagaaacactttgggaaatacttgaatgatattattagtagtaaatttgtacctctattctgtatattttttacttagattaataatattagttgctttgtgtggagtaggtgcacctaattttgtgagttctattatttactgatttgatatatatatatttatcactaattttactatttattacttccacgcacaataaacagaattgtgaagaggtcttttgtaaattagtagaaggtgggcaaataattggttccattttgtactaatttaacttacgaaaattatcaaattatttgaatctcgaagtatgtattaaaaatttagagaaatgtgatgtcgtccacaaattattaatttaactattaaattgttgactgtgctacgacactatgattttaagatgataaagacttagagattctaccatggcggcacacccgttgacataaatatacaccacatttttaaattgaatgcgcatatagtcacaccattaatcttattaatttttcaattaacaaatttaataatgtcgactaacataaacaacttaaataaatgcttaacacctatgtttggtaggaaagatagatagaaagctaaaagcataaataaataaataaatatataacttatattcttataaatatagaaaacgaattagggaatagaaattcaattttaaccaaccaggttattatagtgaaaaaaccaaatcaatagacagacaaaatagtattgaatagtaccgttttctttttcttcaaattttttggatgaataatgtaatttcacaactttgtagctcattcagattttacttcttagctagaaaacaccataacataacaatataataaatagtaatgctatatagaaatgggttatgggtgaaaaagataacttaaagaagaagagaaatattcaaatcacatgcatgcaaaaaaaaaggaagataatccgtttctttctagcaagtagctctttttttttgttggccatttttctctgtataaaacagatggacccaaagatttttacagaaagccattcttaaaaaacaaaaactctaaaaaagaaagacttaaaattaaccaagctaccttctctcttcttcttcttcttcttctattatggatttccttactatatccaccagtaacaacaaaccaacc

SEQ ID NO: 190777 - DNA, 4356 bp, Cannabis indica
tcgggccctgtgaggtatatagcatatgcatagagattagagaagaatatatatcataatattatatatatattatattatattaatatgatcctagccctttttctatattgctcgtaaggctatttttgattcactcactggtaccccacctaccaaaatcacttgagtaaatgaagtgaaatcaaattgatttttgtgctatagttagtgctacactttttcttgccttggctactttcctattacttttttgattgtttaaacagaacggttagtgatctactaactcctaatgcaatgttcgcttatgtttccattaaggacagtgaaaagactccccaattcttctacaaagatctaatatttcaagtttcaataagacccttttcttctttctgtaattgattttttttaatattttctgactcttacttttgcactatgcacatataactttaagttttttttttttttttgggtaataaactaaagttgtacttttgctctaatatttcatatagctcctagtttcttatcagtaaataaaatgttggaaggagaaattaggagaactttaataagctagtatttaaatatggtacatttagagctcacaattgccttaaatcatgccatttcttgactttgtgtaatcatgccaactttggctaaaatctcgtaaacaattaatcgcaaccacacaattaaaaatgatatgattctcatgctcgtgtgtagaaagttttcacaatgtttgtgtctatagcattattctttagcataaacccatttgtcgtttgtctgtgcttgataattaccacacaatgagaaaagctttgtctttttctatcatacataaacacaggctttaagcacatataacattaagccaatctaacaagactcatattatataggtcagggaatcggaggtcgatggaagaagagaaaaaaacgtagtccacataaacaaatgcaggtaaatttggctcataaatgcttcactattttagaaattttttagacttgaaaaaggtcccatctcacctaacaaagagggacttcatgcctaattcttctccaatgattgtgctgtagcctgattcttcttccctgcattttggtcatacattttcattaggaccatatctgattgctgtcataatcatccttaatctaaatttaatgacccttgacattatatcgtccccaacattagtcatactcatgttccctctatgtgacactattttgcagatttttagagaggaccaattgtgtaggcttgtgcagtaatctctgtaaggtaccatctcagaatttcataaaggaatccctggggatgtcagtcaacatggtcccaagtgagtaatcgattcatcagtcattattgcagtcttccttctttgattgaattttcatacttagaacttaaatgccttcagactatttagaacccatttaaagaaatgaaacaggaaaacttatggcaacagagatattgcactcataatcttcttatagtaaatatattaacaaaaatggaaaaaaatacttgaaaaattaacagtagctgcactttaatgtggagggccatgctcatcatgtcaatggagggtcccctgtgtaagccacaaagggtgaaaaactgcaagtagagccatacaaactcagttgggaattccatcatatgaattaatagtaatactatatagattgatgtctgaaatggtagccacaaagcatatacattatgtcctgattagggtcaaaccaccatattgttgaatgagatggaaaagaaatcaaccgctgtgtacttcttttccccatgaaccaatgttttatgtaaatagagccacgtacaactctgcccaatctcatcatacttttatatgcagattttgaagatatgagttgtcagatgatatttggtcaggatcctccagcactgatggatgatccagcattcaagcaaccatgctacaaattatgtaatagcttgaacacatttatgaagagtactaggaattgttggatcttaaattctaacttacatttatatgtaactcatgcaggcaaagcaaaacaaaggcacaataccaaatgtcctacctaaggcttaagacatggtttgctgatcatgttgagatggaacaaggacaattttgaattttggagacaatgaatcaaccactgctatcagaataatttctctgtccataataatatacatacacatgtaaaagttcataattatcacctgaatatcagaacaagtgccatcttcaactcaagcttcttacacatgaagattaaattacctcatccatcaagcagtacaaaaaaaggacactttaatatattccctaaaatcagaaacagtttctcaatttgtttaaaatacaagatgtcaatcagctttaaccagagctattcattgttataaatatgatgagactttcggtaaggatgatgtaccctcactctcattgttggtaatgaaaatgggcaataataaattattgaaagagaaaatgttttgactcaagatttattgtagggtctaaaaccagcatagtggactaataatgtctcccaccttttatgtgctttaaaaaattattaataagattcttcgaatgtcttttctgtctcacgaggagagcgaccgagtgtcctgaccactaatggtttcatttgaaaattaacctgaaagtgggtttacttcataataatattttgaagtggagaagggcaagggaaaaatgaatgagccaaatctatgggcagcaattacttttctccctaacctgaccagttttgtatctcaatacacgaaggatgacatcacccctaaggctatatgatgattttcccaaaataaagggattccagaaaacgaattagagcacttcaatcttcatttcaatcgaactgcaaactaataaggaaaaagaaaaacatatatatattataattaatcacagcacctaattccagcgcttgttcatattgataatcatgacatcattaggatgtcattatgaattcatgaagcaagtgaattaatttcttctggatgtgaaatcagggccccttaatataaatagtactaataaacaatatctaactaagggtcttgtaaaagttttatcattaaaagggtcacgcaggcacaatgaatcaaagacagattaggaaatacatgatagactaatcaacataaaacttgccatttatataaaaaaaaacataacaataatagggagaggggaaatgggggtcttacaattgccaactatttagtttatttatttattgaaacaaagcatcgtcattcatttgttcaatcaaataagagaagtgttacaacaatgaaaaattgacataatgcgataaaataagaaatcagatgaatcaatgttaccaatgccatgagcaatgagtgagaaactcagtaaactaaagattatttttaatggccaaagttctccttttcatctgatgtcctgttctgcctaacaggacttctgggaggagccagagccccctcagctgcctctttgttgacacttgattcttctgttttctcaacattcctttctttgaataaattcccgccattagtcgtggtgacagatcgcattgccctcggtaattgtacaggaatgtcagccccatttgcattgttatctagcttctgaaattgcagttgtggttgtggttgtggttgcgatggttgttcaacactttctggctgagatggacgtggtggaggattggtaacgagttgtatcgaagatgtcctccatttctttctcttcataggctttggtacatttggcttttcagttgtgttaccaatgtcagaaagagcttttcttcttggaccaagaccaccatcttcatttgtctctgtagttttgtcaaccaacgcagtctgtagaagcatggctccatgagaaacaagaagtctatccttctctgcttcatcagcccttacaccatttacaatcccttcagccaaatttgactgctgagatttttcgatttctcgattggcacatttactgaccatgcaaccacatgagaacccacaaaacccaccagaagagcggcattgacatttgtttgttttgcatgatgagttcttggagcaagaacagcatacacctgaacctgaagcattgttctccttatcaccaccaacagcacaactccctcccctgaactgtctaatgttaggctctcatgatcgttgttgtctgataaatgagactcaatgttagactggttctgattttaaagtctttttctttaagtcgttgtcgtctggtatgtcgtcttcac

SEQ ID NO: 190778 - DNA, 2374 bp, Cannabis indica
taattaaaaaaaaaaaattacttctccctccttttaaatgttaagtcttggttagtgcttttcaacatttttctaactaatatccacacaataaattttgtagggtccacatatatacatctacaacaaacaaaaagaaaaacaaaatttattatccagctgtttgaaaattgttgtatggtttagcatatcattattggctctgagtcttttatttaaccataaaaccgtcaattacgattcatatataaatgcttttcatttgtcaaaataaaacaaattcattatattattagctaaacggaaaacgttgaataactaaaccaactgtaaattatggcatatttacgcggacagtctttgaaaaatcactaccatttaatggaaacaaaagttgagtcatgtgaataattttacaagggggaattttcgggccaattcatgtgctaattggaataggaagtaatatcttgtttaatcaattagtcatattataattataatttttataatattgaacttaatttcggctctcagtgatactttctaattgatcataacatatgttgcttaatatttagtttattccaataataaataatattaattacaaaatatgatattttttttttcaagccttagaaaaataataaatattttagaatcaaataaaaaaaacaatattttagaatcatattcatctgttttacaatctctcacattatttttcaatacagtcaggaaaaaaaaccattataattttttctattataataaagattgtgcttatatatatagtcccttcttaattaatctatatttttcaaattaattaataagaagtacttgaagaataatatgcaactatgggacttctaacttgtgtatcaccatcatcccaaaccagagccccagaaatcatatttcgatcatttgcatcaactctagccctgaccttcacaacaaacgatttcttctgtccaacataatcaaaacgaagagtccttggtttgactatgactttcattccctttggagatttgacaatggcgttataggtagaggccggtgacccaacatttgtgacagtcctatgaaaagtgcgggtgataggtttggttgaggttgtggaaagagcgaaagaaggatagttcaaatcggaggcatgtaatttcttgacttttgagcaactgctgctcttatcaccagttacaagtctcagagatttggtgctgtaaccttgtccacacaagaattccacgtaatcgctctctccagcatcgtataccaaaccaggcctgatcgatcttagagggtctatgtgcccagacccataagcaaactcaccatctttgttaatctcatcacttaatggataagctgccaaaccacataacaaaacaaaaagccaaattatatttattaaaaacaatatagggttgttctctataaatgtacacctcttgtttctagtagtacttaaaaattataattctatagttcaattcatcgaaaattagtttcagataaatttacgttttaaaaaagatcaaacaatacattcagaaaggaatgaattgcatttcacacacacacaattatataattaacataattaacatacaaaaatatttagattataattaactatctaaaaatttctaagtaattactaggtggtacgtagtattgtaattatataagtaatgtaatcactaagtatacgtagtgtaattaattattaaggtagtaattatattttattttaaaatataaaatatgtagttggacgtgaaatgtaataattgcatatatacaaataaattaataattatgcagtttaataatattaattatttaaaaataataaaaatactatgttattacattcaattagttaacacccttaatgacctctcatcaaattttctaattattctaattattttgaattacactcaattttaatttttctattagagtgactttttaaactaagactcttattattaaaacatatagctacctcactcgttgtaggtggaggggtaaagaaaaacatttcagtcggcgcaaacaagaataatagtgtgatatatatactatcataaattagttatttttttttattttattgttttaaataaaatgtattacttggactaaaagtgaaagattacataataaaattagagaaaaataggggagccaccgccccacacatctgacatcttccttttctctttacgcaccaacaacaagtaacttacaataaatcttaaaacgtatatgtatataattaaagttaagtttatatatattatatatgtatataatatgtgtttaattgatcaaaagaggttgtcaaacccat

SEQ ID NO: 190779 - DNA, 1622 bp, Cannabis indica
ttccccaaccagttgtgccaagtatgtatccaacaatttggcaccctagatgaacaccgaaccaatgattccatctcactggaaatttcctgaagtacctcgccacaatgaccccaacaggcaacaatataccccaacccaccatgttcaaaatcccatgaacctgtacacacaataaatagaaagaaaaaagtcattgaatttctaggacgaaaacacatcacacaaatcatacacagaattaggaagatatctcaagataaaaggatcaagaagcatgtaaaacatagagtggaaggttctaaagtctataacatgactcaaagtaaacaaattctctaaggttgaataactacaaagaaaataacaattattcttaactcaagaaaccataagagcaaacaggaaaatcaagtttcattgatcaaagttatgatgacattgttgtgttttaaaaagctaaagaagagttaaaattaaaacaattaccgttctaaagtaacgctggttgtgtccaacgcctagagtatccccttcgcaagtcatgttaaaggtctcagtgctgtcaaaattctgaagagaaaaatgatgtattctaggcaccaatctttcaagatcagcatgatagccaacttgccaaacatggttcaacttctcaacattgtagagctgattattaagttcaagtgtcgcagatattgttatgtatgaggatgagacttcccctgtcatttcttggactcggaattcagctttaaaaagttcaacattcgaaggaaggagctcacaaccaaccttgttgttgctagtgatattgtatagattggcttgtactgtaccattactctgccgaatgccaatcacggccctggttccaaccatctctggcctgtgtccggggttcaagccccacgcaatccattccacttttgcatactcgtcgctaatcccaaatatgatgtcaattttggtagttttattttcagtgcttcggcggtatttccagccaaattcagctttaaaagtgggtagtattctgcaacttggaatgtttttcttcttgatgatatctttgaaaccgttattgcaaggagtggactcaccaaatttgaagagaagggagtgaaaagccaataaaagaatgagtgatttggtagaggcaaacatatttttttgtctatatcctattgatctctatttttgtacatatatgttaaaggaactagttataagccttgaagtaaagcatagataaaactagaagtaaacattattctctttagatgagttcaggagaagttatatgcatatctatacactctatacctttgttattgttcactacgtatggtttaaatcacggcagatgctttcagaaaaaagtttgaaacttcaagattaccggcttcaaaaagtgtctactggacagttgggcagttcctgtacttttgctgtaaaaagtaaaatccatacagagcatagattcactcaataatgctttgtctagtgttgcaacagttctgtggaattggatcaagaccgtgtattggcgagccccacggtggcattgttgtaattgtaaatcaacgataactcgaacaacgtgtttgacgttagctttt

SEQ ID NO: 190780 - DNA, 2145 bp, Cannabis indica
atatataaagatacaagattagttctagatatgagtaagttaagcccgtacttaagatcctcactttttgtgggtccaaaataaaaaatgaaagacatcattacgtttttatttaagtgaaattatatttattgtaaacaataaatatttataacttaattacatggggtgtatgatacaatacaaaatatcgtaagtttgagtgacacgatattctttttgatatttttcatatatatatttttttttgaaaataaggccccaaaaatgtcattgatgacattattgattatcaacttttttgcttttgtatcttgttacaatatgagccatatcagaaaaatatatcattaattatgaaaccaaagaaatgtgttttttttagctagggtgcatcattttgggttataaattatttaatatgtatggagagaatgaagaatctaattccagcaggacttctactaagatcgaatttatgctttacgtagatttagattctatgagaggaaaatggacaataacttactttatagttattaatttattagagatccaaataatatgctagtaaattataatagagaaatcctaaaaagtaccttaaggtgttaagtatcacaaaaagtgatactgttatcgatgtattttaatattgaatctgttacattttatttaatagacaatataaaaaactgttaagtattgataacgcaccatatcatagtgttgactaccttaaaaaacatggtttgctgaccataaaaatggttgagtggggctttattttgtatcacatctaaattgttagaataaaatgtattgtagggcagtttagtataagggaaggtcaaattttttgtttatattttaagagaacaagagatctagttattgggagagattcaaacctctcaaaatgtttgtgtcaaaggtaaaggtttagagctgattaggagtggttgttagaagttagaggttaatttgttagttttgttttcagatctctattgttatataattttttgtaatctctaactttgcaatgaatgaaacaaatcactctttcccttttaaagattactctcacatgatgtcagagctctgatcaatctttaatggagattctgatgacagcaaccggtggagcatcaagattgaacaatgctcggccacacaacaatcaacaagttcccctacaaaaatcgtacaccatttttctttcaatcattctttgttgattaagctagatgaacataattttcttccttggaacatcaggtactcgcctcgatcaaagcaatcgacttcaaaagtatcttgatcctactcaagttcttggaaaattattaatagttgcagatgagcatccatcaatgtcaatcctaaatttaaggattaagaacaataagacaatcttcttgtttcctagctcctctcattcatgttttaaaaagactatcaatagaatgattgtctatgacaccaccgctcaaatttagctaaatctcaatgtgcactatgcaatttgaatgcaacaaacatgagtctctacaaaattctactttgaaacactaagatgacaaggtcttttaatgattgtcttctcaagattaaagatctcaatgatcttcttgctactataggtcaccctcaaatgtctcaagattagatagaattcatattcaattgatttccatttgaatatgatgtgtttgatacatcaatcaccaccataaaagatgcctacatagctgctaaaattgaagctatgttcatggctcaatctgttcgaataaagaagaatgccaagaatcttcatatctccaaggctgaagtaaacctctcacaaacaagacctccttgttccaatttatatggtcgattatcttatttggcaccatctgtacctcttggtttcaatcttagctcacgtcgtggtccatcttcaaacaacaatgggggtttttactacaatcctatggcgtgtggtggaccctcatatggtcatggttgccctagtagcacagcatctcgaggtggtccccatgattttggggacaattcctagggacaaaagccataatgctaactatgtcacaagatgggtcatattgtaaagtgataattctatgaaaatagagt

SEQ ID NO: 190781 - DNA, 3290 bp, Cannabis indica
tatttttatgtatgtaaaattattcctaaaaattatttgaaaaatgaccataaacagtaaattaaaaaataaataaaaaaatacccaagtttttaatagaaacgatcgcacggcggctttctccaggccgccaccgtctgtatttgtatattccgaataaaacatacataatctctgatttgattatttatttttatgcttttttattaatattttatactaaaagacaaatctttttatataaatatatcattttatttttagtcctgatttaatcaaattttcaatatctttaatttgaacgacctttcccaaagctccatcaatggcggactccaacttcgcctacctctggtttctcctcatcctctcacctattgctctcctcatctttctctatttcatagttcgaccacgtccagtcaagatcgcaataaaaaaccgtcacgtcttcatcactggcggatctagtggcatcggcctcgccctggctcaccgggccgcatcggagggtgcacgagtctccatcctagcccgatcgctcgaaaagctcaaggaggcgaaggaatcaatcagtctagccacaggcgtcgacgttgcgatcttcgccgttgatgtgagggagtacgatgccgttcgtatggcggtggaggaggctgggcccatcgatgtgctggttgtgaatcaaggggtttttattcctcaagaactggagaagcaagatttggatgaggtgaagttcatggtggacgtgaatctgatcggtagtttcaacatgataaaggctgctttgcctagtatgaaggatagaggaaatcgtggaccggcttcaatcgctctcatgtcatcccaggctggtcaggtaggtattagcggttaattaactccaatttccttaggcatttcatagtgtgttgaactcaaatactaaattgcatttgatttgcagaccaagttctcattgtgagtttttcacagggtattgtactagttaatctaagactcacagagtgatagtaacacatttttggcatatgattttgaaaatgtctattttcactgattattcatttaatttgaagaccatgtcctcatttggaaatatgtctcgaaattttaataaattgaaaatgacagtgacaacatttatatatttttacaagtttgtttgactgtttgagaaagctctgttattaatattattttttaaacctatttctttatgattttttctaaaaaaagaacaaaagcaaatctacactaagcaaactgtcaaaaagggttttcaagttttgttttagaagaacaaagttatacagaacaaagtaaatatatctgaatttctcctaaatgcttgtattaaatgttaggtgggcatatatggttatacagcttattcagcaagcaagtttgggttgaggggtctagcagaagcgttgcagcaggagcttatctcacaagacattcatgtctctctcatatttcctccagatacagatacacctggcatggcagaaggtacaagaggaaacctttaaacaatcacttttttcccctcaatttgtagtacattttgttctatgtgaatgaatgtgtgatttcgggcaatggcagaggtcaagagacgtcctcagctcaccagcgtcatagctgcagcatctggtgcaatgggagctaatgaagttgccaagaaagctttggatggcattaaatgtggtagctttattatccattgcaacttagaggggctcttactgtccatagcgactgctggcttatctcctcagagatcatttctaatggctttcgttgaggtgtttgctgctggcctgatacgtgttgcagcactttgtttccagtggaattggtattcaagcattgagaagtggcatgtacaacataaacaataaggtatatttttaggccaacccatcttagcagaacaaaaattgcaaaacttgtcggtgaatctaagcgtattttattatgatgttttgtgttttttgtcaagcttaatctttgttgggatctaacaaaagaattagctctaggctttcttgcaatctgaggtgagctaatgtcctaagttgctacacgggtggaatccacacttaaatgaatgttaggaataagcatcggtgttattatgtaaatgtttttggttttcttttttaattccaggaaccattcacagaacggttagtgcttgattttgtgaagttttaattgcaggtgtggataatttgatggatagatgtaaggacttttagccactgaagtgttgaagtgaagttgaagagttagatttgactctatacatgagtgtgaaaacaacaaacacaagtgcttttgtaattgaaaagaaccattcttttttatcttacaaaaatcatgctcttttcttaaccattgaacctttctgatttctgtctcaaagtttggtctgtgtgctacttaaattggagcacccaaaagtctagactgtaaaatgttatcacaaaataaactgtgtaaagataaaactaggggaagagatagccttttgacttttacaatgcaatttcttgtggtaaacgacagttttgttttattattgtatatgaacctcaacacttatatataaatatatatttgatgaacaggatactgaaacaatcagatcaacacaaagcaaaatataatcaaaatagagtaagtttgcggcctacaataacaacctgtttttaacttgttacagttcaagtttatgttgtagtatatgctaattgcacagtatatctttagaaaactaatgtttggattgtaaagtggaatttaaagatgaacttgagaagaaaaatcgagttttacttgtcacaatctctttgtttattcagccaaaatcttttaggattttaatttattcttaaaaataaattgtatatttttgttttttaatgactatagtggttggttagtcatttaagatttttttaactaaaataatgtacaattgtaaaccatatcatgcaaataagagattaaaagccatttaaaaaaaataaacattaaaatataactcatttaactgtgttctaaatgtgtaccaaaaactaatccaaattatatatttttatatatttatatataaattaattaaaacattagattataaaatttacattaaattttacagttgtgtactggaatataatgttaaaattttatacaaagttgttttttttgtgtcaaacttaacacaatttttgtttctctcattacaaataggtagggatgcatatttcccccac

SEQ ID NO: 190782 - DNA, 2434 bp, Cannabis indica
aaaacagtggaattgatatctgagtttgctgtggcggcggcaacggcagtggcggtggctgtggcggcggatgatttcttgaggcgcttgtttttccggccgccgccaaccggaacatttcgaagagtgccgcctttagtccaatgccttttgcaagttctacaaaagtgtctaggttgagacttgttgtagttattgtagtaacaaaatttagtgtttgatgagtcacaccggggacacttgagttgctccggcgccggcgccggcgccgatgccggattccgccgtgttccgggagatgacattgccggagatttttgctgcggttgagaattggtgggtgagttgtaagtatggctcttccaattatgatcaaagcttaagctttctttgctattgatcactacttgttttgaacttaatcccatttatgataataattataaagattggattttgattagtgatttgatgattataagtgattttgagcaaaacccagttggggaatttggatttgagatgttgggaatgaaaaattggaaagatttgaaagaagaagaagaagaaatatggttaagtaccaaatgatattattgttttgaaaaattgggaaattggtaggaaggtgatgatgaatagtgagcatggtctaaaaacaaaatgaagtctctcttctcttctcttatcttatattaatttatatatatagatatatataatattaatattaataatatatatatatatatcaatgtgtgtatatatatataataaggggtgtagcggctgagcaactctagctagtaagctaatagatgtctctctattgtaaagtaacaattttgttataaaatgagaaaaaaaaagtgtatattgttaccaaatttatgtttggttcatataattttatagaaagggacctctcaaattaaggaaatgagaagagagagatagagaatttcttagcacctaaggtgatggtgggttattgacacgtggcagaaggagcaccattgatagtggtatattacatgggaaagttttgtattattgtaaaataatagataataattaacattattttaccattgtgttttgtagagttacttatttcatttttcattttgttaaataataaaatagagttagtaattagtatttttaaattagtataaatatgattctaaatttaattttcgatattttctttaatattactaactcaaagacaattaacccaacatgaataaatgtaaaaaatatataattattttatcataatacatctagatcgtattattattaagttttgttttgacaaaaaataatttatgatattacttagtactattataaaaatatataatcaaatttattacttaataaataaagagtccacttaataattttactaaaatataaaatttaaataatatttattattaaaataataataataataaaataaagaggaagtcgatatgtgcatggtgaggtgtataagtgatattgattgatattgaagaaattgaaaacttagtcatattgatattgactatataaatatatatatatatacatatatataagtgattatttcttcttatttttcatttttggacaaattaattaatgcatacaacttttgctcctatattttttgacatgtttttcaaaatgacattttgttatttttgtccatggaagccgttagtttatcttataatttcattcaagccacttatactcatttaaataaatttatatatatagtgattaaaattacttatagatattaattcaaaaaaattattagacaatcactactcatcgaataatgaatatattcttttaactcactaactaagcaagtattaattataatgaagtgttatgtaagttttagagtaatttgtggtataaatatttaaatttaattcttaattaaaaataaatatacaagtttaatttttaacagtaataatatgtaaatgataattctgaaacttttataagtatttgtgtcaagttaattgtcgcatagatataccaatgagtaaattaatgacacgtggataataacttgacatttaacggttaggtagttacaaatgttctaaaaatataacttaagtatttttaccgtaaaaaatatttatttaaatatttattatttactcaaaaaaaaaatatttatttataaccgaaagttaaatttaaatatttatgtcataaattattctaaattttaatggtacgtatttgttatagatatttaattagtttctaactaaaaataaagtgaactaaccaaaacaagatcaaatacaaacaaaatatttaaaaaaattaaaattagaaaacaacttaatttagtagatagtttttgtcataaataatattaatgtgtaattaatgaaaaaaatagaag

SEQ ID NO: 190783 - DNA, 1594 bp, Cannabis indica
ttttttgctttcaatagattttgaccgctatgttagctggatcaatttgtgtagtatcttttctttgatctgaaaatttttgtagtatctcgaaatggggaaaataggttctctagatatcgaggttctgagggtctcaattaagcatcaagtttgacaatgataaaaaatatgaataataagatataaataaataaattaatcaaattgggttatatggtatctttggagagagaagttcgtttataaaagttctcatattttcaagtcattctgtcttataaacataacagataaaaacaaagcaatacatcagaatggaaggcaagaggaagatttggagcttccattgttcaacctgtctacaataattatagctacagataatttttcagctaacaataagcttggagaaggtggtttcggacctgtatatagagtaagttttccatatttaaagttacattagaaagaaaagaaatgatatatacattgacaagagaaaagcaaccagtttgttaatgtgagaatttcagggtacattagaagatggacaagaaattgctgtaaagaggctttcaatgagttctggacaaggagtaaatgagttcaaaaatgaagtaaagctaattgcaaagctgcaacataggaatcttgtaaagcttcttggttgttgcattcatggagaagaaaacttactggtttatgaatacatgcccaacaaaagtcttgactcttttatttttggtcagtatcctaagaaccttatgatatatttcatagtttctttattttgttgccacttttcaatttttttttcctgcttcatttctgaatatacatttactagatcaagcgcaaggaaaactgcttcaatggacaaaacgctatcaaattatatgtggaatttctcgaggtctcttgtatctccaccaagattctagactcagaataatacatagagaccttaaggctagcaatgtcttactagacaatgagatgaatccaaagatttcagactttggtttggctagaattgttggaggagatcaaatagaagagaaaacaaacagagttataggaacatagtgagtattcttgcatgttttattttttgtctatgcttttgttccattttctctaaccgatcatgtcttttccagtggttatatggcaccagaatatgcttttgatggcttattctcaattaaatcagatgtcttcagctttggtatattagtcttggagattgttagtggaaaaaagagtagaggctttcaccacgaaaacaatggtcttacccttattggacatgtaagtgtcaataagcttcatttgttgttatttagagcaatatctcctagttctcaaaactgatgacaacgaattttgatatttttaggcctggacattgatgaaggaaggaaggccgcttgaattgcttgatgaatgcttagtctcttcgtatgaaaatctaggtgaagtcttacgctgcttccatattggccttctatgcgtacagcaaagtcctgctgacagaccgaacatggcatcggttgttttgatgttgagtagtcaaaatgaacttcctcaa

SEQ ID NO: 190784 - DNA, 2263 bp, Cannabis indica
gtttcaaccacaccaagtttgtctaccaagaaatgaaatctggattgagttaaacttttggtgagacaatcagctgtttggtcacttgagggtacatatcttacttcgatttctttgtttatcaccttgtctcttacaaaatgaacatccaattcgatgtgttttgtacgagcatgatacacagggttgtatccaaccttgtcacaccaagtgacaggagtacaaggcagaggaaactcaaattttttcagcaatgcttgtatccaagctatttcagcagcgacttgtgcaagcgctctgtattcagactccgtacttgagcgagaaacaactgcctgcttctttgatgacaatgatacaagtgtatctccaagataaacactgtgacctgcaatgctttttctgtcatcaggacaacacacccaatcttcatccgagtatcctgtgacagccaatctatctgatggttttatgtggagtccatggtaggctgtccccttcagatatcgaagcactcttttggatgcactccagtgtgctgtggttggggattgcaagaattgactcagtttgttcactgcgaatgaaaggtctggtctggtgtgagtcaagtattgcaacccacctataatgcttcgatattctatcgggtttgaaagcagatcaccatcagatttagacaaaggttttcctactgtcattggattgttgcacggtttgagatgcatcatctcagtcttgatcagtagctctttgacatattttccctcgtttaaatacaatccggtttcatccctatgaacttcaattccaaggaataaatggagaggacccaaatctttgagagagaacatctcatttagtttcttgatgaacttttggagtttagcaacatcattccctgtgacaattatgtcatcaacataaatgagaaccatgattatagtactagaggtcttgtagaaaaataaggaggaatctgctcttgaattctgaaaattccagctgagaagagtcgtctttaacttgtcataccaggccctcggggcctgttttaaatcgtagagagacttggcgagtttacacactgctttaggttgactttggtcttcaaaaccctgtggttgcaccatgtagacatcttcttgtagagtctcgttcaaaaatgcatttttgatgtccaattatcgaatttcccagcctttagaaacagcaattgtaagtataattctcatggtagaagctttaataacagggctgtaggttccgggtctttgattaaaaccatttgcaactaatcgggcttgaacctttgaaaactaccatcagcattcctcttttccctgaatatccatttgtttccaatgatattcatacctggcctttttggaaccaagtaccaggttttgttccttctcaatgctgacatttcatcgcccatagctgagttccaacctgggtgacataaggcttccttgacagtagttggttcatcatttttccactgccattgtgcttggccaagatagactttcggtttgaaaatccctactttagaccgagtgatcataggatgagaaggttgctgaatgacaggtttattgtgtgctgtaatatcttgcagttcaggttgggacatgaagcctatgttttgagttaaagaagcaccagtactttgctctatatcagcagagttatattcatgagagtgagatgcagaagattcatgagagacagatacctgttgctgatttttatcactataatcagaagagttggtgtctaaggttgctacttcagggacctgagatgtagaaattggtgtggtgctgttgaggtgattttggtggactgaaacaaggcagaccaggaaggaacactcacacaaatagaatgttcaggttgataattattgagaaaaaccaaattggaaaggaaagttatcctcattgaaaataacatttcgagaaatgtagattctccctattgaacttagacatttgtaacctttgtgagagtcactaaaacctagattgacacactttactgaatgaaattgaaacttatgagtttggtagggtctaatgcaaggatagcaagctactccaaaggttttaatgaatttgtaatctggtttcttgctgtacacaacctaaaatggggatttatttctcaaatttggtgttggaagtctattaattaaatagacagccgtttgaaaggagtcccaccaatatttaagaggcatatgagcttgggcaag

SEQ ID NO: 190785 - DNA, 1351 bp, Cannabis indica
taagttgtactaaaacagtatgaaacagtagttatagtagaaaaaatggtgtattgccagatttgattatgtcaaactctaagaacttcttagataactacactacactcactgacagacacttgtccggtaccaaaaaaaagatgggctttttcccaatcaatttgggccatggttcgattatctacgatttagggcctctatttattaataatgaatatgagcctataaagattaatcggatggtgagaatgaaatctataaagggtgtgacgtcatgccatgagatagattaaaaattataattttgtgtatttttgggtaaaggatattctcttttgtgtttcatggtctataaactcttgaattatataagtaagtgggagaattgctttagaatcttatagtgacatattttgacattagtaatccaaaaacactgttttaataaactattatggataacaccacatatatccctcaatcacactcatttccaaaagtcattgtttctgtcttttttttagtcttgtcactctctaatattattttagatcgttatgatgtttgtgtatttttcactaagtaaaaattaaaaaaaaaattacaatacttatgcttttagaaccaactagtttgatgaacacttgtatttgatgcttttataataaagaattctttaaattttaaataaagccatattattatatcaaatgtgatctaaataaaataaaaatttaaaagttagaaaaatatcttatatctatttaaaattacatgattataaatatcttattttaaatttaaataaggtcaaaatatctaaaaagatttaaattttgaaaaaaaaatcttaaaagataagatataattaaaaatatcttaaaagacttaaatttataccaaatataatgagtaattctttcttggaccaccactactaatttaactctaagtcaaatttgcccataaagtaggagatttctaagattgaggatttattgttgggttttatgccctaaataaaactcatttcaatataatcagatttacttattaatatagatcagaaataacatttaatgttgcatggttcacatgatttatttcatgattatatgtacataatgtatgaattcatctgaaacccttttcacatacttgatcctgtttattgtgctgtcaacacattggaaagtaaacatgactatgtgaataaagtttcctagatttatcagacacagggttttactgatatgataatctacaacagagtttacttgcatttggagaagtgctatgttctttccagagcattggtaaaagtaaagcttaagttggattcatggag

SEQ ID NO: 190786 - DNA, 3085 bp, Cannabis indica
acatgactatacctagctagaaaaacaatataaatatgaagtgagaatgtgtgctagcaatataaattcttataagaagtgagtgttattttataatctcatgcttattaagcagtggaaatttaccagcagacaaaaaaaagttttatcatctactaaattttactttttaacacgtaaataactttctagataataaacacagggacagggtgataacttcttaacagtcaatacatgaatgatctaggagtcgcacagcttgtccaccacacattctcaattaaaagaataaaaaattattaagggatcttccagagcaaattcagttttaaaaaaagtaatggtataacaagttattatagtcttctcaatctattaacagaatgccattttattgtacggtgaaaacaagtcaaactaaacagtagatgtttaaagaaaataaaagaaaacaaaagcaaattgtagacattaccacaagcttctcatcattacatttgtagaacaccagttcctctgacaatcctttcattttctcatccaattcttcatttcgaacctcagcatccttagcacgtttatcagcttcgttcattaaatgaatcattgattccctatcacgatcatgtaacgaacactcttgttccaatttcttaccaaagctcaaaagacggctgcactcagaaactagtttctgattgttttcaaagaaaccaaaaagaacacaaaagaaacaaccttttttcagaaaattgaaatacatattagaaaaaaacaagtgacaattccagcctctgaatacaaagataaagaaaatgacaaaaactttttgtatacaaaagatgttcttggagtgcaaattatgcatcaagattcaagaatcaggaactgatactttagatgaaggaacataccctaacgcattcgattgttaggtctttatcctccaattttgactgcagtagaagtctttccaattctgacactgcccgatacttcacctcaagcgtgctagtcgacacaggaagtcctatgatgtaatcaatcgactctttgatgcggtcgtcgactatagaaagatccattggttcctatcaattcaaaaccctacataaatccccaaatacgaagattgaacaaaagaaaactcagaaaaaaattccaagtccctgaaatttaccagtgatatagcgcaaaaaaaatcggagctttgatgggggagggagaaactccacaccgtgaggacgtttccgaaattgaaatcctggaagtagaagtccgtacagatcaaaacgaagaagaaaaatggaaaaagaagacttggaagaggatttggggatgaaagaaaagggaggaccgaccgttatagagcgcgcttgtaaattgtaattgctaagtcgttattggtgacgtggctaactaacaacattattatccaactatccaatgaatttatgtatatttttttggaattttttttgaaaacatggtaaatatgaatgaataggaattttttttaaaataaggtaaatagttatcttatgtaattggttactattgacctcgctaaattaattaaagcgattagaaacaattaataataataaatatgcaaattaaatacaaaaagtattatagagatttggtctcgtgatgatagtaatagcatactattatttttcttgtattgacttgtgagaaaagaactacgaaattcttgatattcctcgaaattagctcttacaatggtcttagcagcttaagtgatctatggaatgaatgatttcagatccccgaatagtaaaatagtttcactattatgtatgaggaataaattcgtcagtttagtttctcaaaataaataaaaaataaattaggaaacttaattactttcttaaaacaagagaaatgaaaagaaaaactaagtaggttttctcttctcctgtcgaattgaatctatcccacaaaattagggatttgatcgagatttgtattgcttgaacatttagagaatatcctttaaaatattctagttgcatttactctgctcgatacatgcgagctgactgcaaaatggacaacttcttctttaaactagttgtttatgtcataaatcaccttagaaggtacaccatgaattgaattgtctgtccaggttacaaaatcctttccacgtgtcagctaaatagacgtcacatcactttatgcgaaaattgggataacattttctcccaagtccacatgagaacttcttgctcgcacatgaacttattcagccactaagttagttggatgggtgacacatgtttactcttcgtacaatctttgatctgatgtgactgaatgaagatttaattatttttttgatatcggaggcatttaatgttaccttgagatctggacctcaattggtgcactggcggttacaatatatgcatattgtcgtatgtacttcccaacatacgtgataattatactttcttaggggaaaacccaaaatttgaattttagattaccatattacccctctaactgccaatataataggtcaaaaattattttaaactcttttagctatttttattctcaaagaaaattaatgcaaccttgattttctctctgaaatctttgaagaactctctgactgaagcttgatctttaacattcattcaagcacattttagaatttctaagttgtgagtaaattctctttcttcttttcatgtaatttttttaagtacatgcattattattttgaattactctgtaaaatctagattcttgaaactgttatgattcgagactataaattttatggcttttgatttttgacgttaacacactcccatgacatataggtttttgaatttctaggttttcctcattgtttttgctaggaactatttgaaattaataataataataataataataataataatatatttatatatttacataaaagactttcactgttttgtcttcttttgaaatatacatatacatgtaaaatgtagataattatgaatgggctttatgggcccttgaattttgaaagggatgattttttttttttttgtaa

SEQ ID NO: 190787 - DNA, 2667 bp, Cannabis indica
aataaaaagctcgagcaaattaaggaaatgtgaggcagaagaagaagaatcattaaagacaggttggattcatcatcgttactttatatgcatgcaatttgagaacacacaaggaaaatgtggatttcaaatactacaaaattattgaaaataggattttgatattattacctctaatttcattccttaaaagggtcccatcatcttgatactcttattctcaatactgtacacatagagcctggcaagcccttcaaatatataggaaatttcacctacagtattacaaacataaaaccaaaattaatataaccaattatgcaaaaaagaaaaaaaaaaaggaaaaaaaaatcaaattttttttttgttttgttgtcatgaatgtttgatggtttattttatgagagtctcaaagtggcaataacttttgacaatgcgtttcaacctctgctggcaagccatgcaaaaatttgtctcttttatcttttggaagatactgaagagagttaatcaagtggttgaacctaatttagaaggatgtgaaaacaatcactgtgactgactacttcaattgggctcagcatgtgtctgagttttgtgtcaaactctgacacttgtaacagttacaaaataaataacggaccaaaacttcaataggatcttcttttttttttttgacatgtataaaatatgacctcacatgactctgttctgcaaaagcttaatcactggtactagaaaaataaaagtaaaaataagtgaaaaaaagacataaaatttctcacgagaaagactatataaagtaattaaagtaaaccaattatggtttctctgatgacttctattctataatcaattcttctatcactacttttcggtcagtatggaaattataaaagtcagaacactcaaatcttttcgagggtgaaacttcaaggggtataaaaataaaaaattgaaggtggtaagtattatgtatattggaaatagtagtaactaaaaaaggactaataattagtttgattgcattttaaactaaaattcttctgtaataaaggaaccagaaggtaaacaagtttaactaatcttatctataaaaatagagcatttattttgttaggtaaagtaaaagatatatctattttaaatgtaggggaagaaaacaaaatatgatatagttgaggaagaaaattacataacaatatctttacaacggtttgacttatataaagaaaatgggaaaaagttagtgccccgggcgatggaactatgatgaagactttgatagcatgaaaagatggtatccgcaggaaccaaaaacaacaaaagaaaaagaaaaattaatgaaaagaaaaagagagagtgagaatctttttgatcacaaagacaatcacaagagagctaaaagaaaaagaacaaaaaattaattaaaattataaaaacataaataaataaataaaaatagatgagagattttgattatgttagtaggttggagtcctttttatcacaccattgattggttaaaatctgaccttagaggtggtctgtgctttcacagacaaaggtagataaaagagaaaaccttagtgctaatgtggaacaacacccagtacttttttaacagagagcaaaaagcctatgagatttttcttccaagatggaatacataactatattataatcccttgcaataagtcactttttttttaatattaaaagatcccaacaccccatgaacatgaatagtcacatacactcaacacaaatacatataaggccttagctcaaaatttagaatatattagactataaagtaagtgaattaacatgttgataataataatattattactttatattagtataaatcctctttttaattaagaaagaaaaagtatactatactacatcataatgatctctctccataaggatttgttataatctcctttttgtccatattctgttggagctacataattaaaagcatggtgaggtacagtttcctttttatcatttcttttatcttgtagctaagtatggtagaatcttcttctggacaacaaaatgaaaaaagcatgcacctagctttgagcatttactttgattatttcttaataaagagagaaacaattataacaagccaataaagatttctttcaatcaaatcacccctagcttcttccattgatcaatggcttggataatcaacggatttattgaaactaaccaccaaaggactagtgggacacaactattaatgctcgaaaaaacaaaaaatcacagtataaactgaacttaatagtaactataataataataataaaagagaacttaccagaattaaaaaaatatagttgaaagttgttgatgaagatagctgaagctgaagctcaaatacaagccaatagcaccattttggaatgaaaaagctgagaactttacttaccctttttcagaaacccaatagctgaaacatatgaaggaaagaggtatagatacaaacacctttctgaggtaacccaaaaaggagtgatttaatactcccaaacaaacacatacgcatctgtgatattaaggatcagctgtagtcttgtgagtatatgcaacgtgaattaaagatcatgcatataatatatgcctactagccagagagagtagtat

SEQ ID NO: 190788 - DNA, 1397 bp, Cannabis indica
aaaaaaaaaaaaaccaaaagaaatttgtagacatggtggagttatgaagctgaattgcaccaacaaatcacatttttcccttccatttcctccacagattatcgggaactaaacaggggtttaaaggacaaacatcgtcacaagaacccaaaacccacaaacaaaaacgcaagctttttgatcattcgggaagcgaaatcgacgagaaacacgagattctcacctttcggaaccgaatttcttctaaagttcaaaactttacggtggagaaacaaaattcagtgaagaaaacaaaaatgatacaattttaaggttcaaacacaatccatttcggtgatcttctctttctgaaatgaaaaatctcaacctcaatctcaatctctatctgatcgccaaaaccctctgaaaaccacccaactcttgtcttaaacccccaactcttataccattgacccctttacaggacttataggtaatttcattacggccaacgggctatagccggtttcattaaaccacctaaagaccggttcctcgctatcgagtgacccacccatatttttaatgtccttaagattgtgacacgtggaaatttctctaaatcttgtggccacctacagtctgcttgatcgagaaaaacgttcattcacgaacaggactatttatttatttatttattttatctattttcttttatttttgtttctcaccccataattttggattggtagaaaaggatatccatttgttttattctttttcattttatttgcaatttgttttttctttaatatattataactaccaaataaaatcccagtgtttggttatcaagaaaaagaacgccagtttgttcatttcacatattggtaagtttcaaagcaaaaaaaattcacatattttttcttttttaactttgttaatggtccaattttgcataattagtttaactgcccaccaaactcaaacctattaaactcaaactaattacaaggtagtaaataatatcaataatattttcctcatatattattaactatttttttaaataaaatacatgaatacataagaaaatgtcaaatttcgtagtcattacaaaataaattagttagtataaagaatggactgatcataccagttacattacaactaaacaccgacttaattatattatgaccgtaaaattatagagtctaataataaacgaaaaattacaactttattaattatcacaccatacatatatatatatatcaggtaaaacattgttattataaattataatgccatgcatattaaagtaatcatgtaataagcaaggaattaggggttttactcttattttacgtttatttataactttacagtttaaaatttttaattatcaaaatatattt

SEQ ID NO: 190789 - DNA, 2327 bp, Cannabis indica
acggagatagaggagataggtggagatcaagacagccacagagagagagagggggtttatttgagcttttggggaaactaataaaagaaaaaaaaaggattttgattttgattttaattttctcattttccatttctccgaaagtgaaacagtgttgttgttgtgagatcagagcaaagcaaagcccctaaaaatggaagcagagatggaagagaagatcaccaaaacggtgcgttccattcttcaacaatccaacatggatgacgtcactgagtacaaggttcgaaaacaagcctccgaccaactcaacctcgacctctccaaacctccttacaaggctttcgtgaagaaagttgttcaatctttcctagaagaacaacaacaacaagaagaacaagaagaagaagaacaagaagaacagcagaccggtgatggggagtacgatgatgaaggcaatctaattgtttgcaaggtttgatttttttatgtggggttctgtttgtttctcgagaaaattagtgggaaaacttaaaggtttgatttttatgcataattagaaaatgggttcttttggttccagttatcagagaagaggaaggtgacagttcaggattttcgagggaaaactttggtgtctattagggaatactttaagaaagatggaaaggagcttcctacttctaaaggtactatttttattttttctcttttgaaattttccactttttgatatgataatatgactggatttggattgttctagctagctagttgagaggtgaaaagggtgttattgatatggttgtttggtttaatggctctgaaatttatgtagatttcttagactagcttattactatgtttagttattatttagtatcaaactacaactactttaggtgtgtaaaattaagtcaagggtacttctagtaatgctattatgaaaattagacttgtcatgacaataaatgaattatgaatttgaaaattatttcattagttatgattatgtggaacaagttttgatgatatcaatggctacaaagttcttgtaaagaggtaaaaatgaggaaccttttgactaatgagttgtagaaagtagttaggtgagatgctaaggctgcaaactgataagaaccggttgccaaattactcaaaccagtagccgaacacacccgaacacagcatcagaaaagatagcaaaacagtagagaattgtatattgaatatgtgagaaaaccaattacaaactattggagcctttcggcccctttgatgcatagagttttactcaattcattgcataccatttctcactcaaataccctttttatatattatatgatcccattgcctaacaaaatggtggagccaaaccacttgagagaaaacattttgtgtttttgatagtctatcctataaaaggctataacagctagtaatctttctaaggctacaagtaatggttatttcggtggattttcagaagttatccgatcgagtagtgtagctgttcttcttgtgagatattgtgaatcattttccgatcatgctttacttttgcatggattgcttgaatacattttcaaaagttatccgatcgattaccaatacttgattgtattgttttgtttcgttttgttacagggatcagtttgacagaagaacaatggtcaaccttttacaaaaatgtacctgctatagagaaagccattagtaaaatggaatcaaggatcatgtgagactgtgatctagccattaaattagtgaagctatctcgaaatgtaacttgtacttcttatctacttgttgtggctttgtcaatttaatgcagtaacttatgactgtagtagtgtatcttaatacatgggatagaacaacgaccattgttgaaatgaacttttgtgatgtttctatctagctctgcaaagcaaactctactatgcattgtttggtctcaatctgttcaagctgtttcatttgtggaatgagttgatagaacatcactttttgaactgatgtcaaagttatctttcaaatttaaatgagaaaatgggatttattgtagaagagttttgagactgaattgtgagaagttgtattgaaaatcacagttattgtatgagatttgagtgttttgaatgtttgatggaagattgtttgaagaagctcgattgaagttaatcttgtgttcgaaccaatataattcgcgctgtgttttatttttaacattcttaatttcatctctaattaggggtggtaatttgtgttgttgtgtcgtgttgagattttgaatttactaaaaatttactgacacaaacataacc

SEQ ID NO: 190790 - DNA, 2194 bp, Cannabis indica
aaaagaaacataacataacagaaatgatataattatgtaactgttatattttaggaagaatttttaagaggccatatattttaagagataaaatcagatagtatcgaaagttcagaatgtaaaaatactaattattcttatttattcgatttgtgcacttgcacataatactattaaaattatttggggactcttattttttcaaaataaatttaaaaaatatacctaaatgaacaaaaaaaaaaaaaaaaaaaacaatatatttttaccacaaaatcttagtttttcaatagaaaaaattgaattaaaaaagtgaaaatgactatactgattaacttttgaagaggttaagaatttaattaaaaagaaaaagggaaaaaagtgagggattggggactaagtgcaaaacatgagtttgagttggagatttttgctctagataagttatagaataaatacgaagaataaattcactcattcaaattaaaaatcacaaagtttttcttcacggtgctctccatcgtcaataagtgtttgattttttttttttttcaaaaaatgaaaaaattctttatatagccagtaagagaagaggttacgaattttccaaataagggaagaaaaaaaatgtcttctgccttgtatttccaatagatatatatttgctatcacataaaagagtttacgtctcatcatgcaactaattgtggtgagcacccataaaagtataaaatataacctaacaattccatatttaggaaaagggcatagctagttctacccccaaaatatttatacatagatgtatctcaaaacaggtttactttctcatttggttttccttagatttgaattgatttggctacgtttgctgtacattatataatgacttttagggttgtaaattcttttcccttgttttctagttttttttacctctccttcatttactctccatgcatgtacaaaaaatatagtatcctccactttgatatgtagctctttatccttgcaaaatcatccccctttttcatacaagtatttatgagagagagagatatttttatttatttatttatttattcatttattttaagagtttgctatagtttcttgttcgtacaaaatgtgtatgatgttatggtgtaacctcagtttcattaggtggcggctcaaaatgctagggagcttgctcgaggttgaggagtagtctagtgtagtctagtctagtctagcataggaaaggatggtcaaagagggcaggtctagtgactagtttttgtctctcttttcacttgctcatttaaggtcatacctaaacctctcctctactactaactctatgtaataattaataataataactattgaaggaggagagccagtgaggggtaggggcctagcctaggagataggcctctggtcctataagtaaaaacaaagtaaacattatcatgtttctagaaagaaactgaatgttaaactaaactattttatatatataatgatgatattgctgctattataccaatatacctacctaaataatcctcttaaagattcatactcatgtttggtgataaaatttaataattctcttaaattgatgttattataccaatatacctacctaaactatttttgagtctcactgtctgagtttattgaaaaaatttaataattatattttgttgaagtgttatttagaagtagtgttgaatgattttagtttgtctttttgttgttttaataaggtgagttttgtgtattgtcctagaactaggcagaggcacatagatctcaagagtgtaggggtggtaattcgtgtttacaggtcgtattcgtatcgtatcgagactcatgtatagtaagtatatgcttgatccgaatatgaccctgtttaataatcgtatcaaaaaattaaagccaaacacgacttctttataaacgggttgatatggcacaacccgtgtaacccgtttataagcatatggtctatttatgataggttaaagtactaaaataactttaaatatgtcattaatgggtcagttttgtgttagtcgtgtcaacctgaacatgatctgtttattaattaaacaggttagacgagtcaacctaaatacgatccgaactcatttaaggcaaactcaaattcgttaactctcatacgagtttcgagtcatattatcgt

SEQ ID NO: 190791 - DNA, 2154 bp, Cannabis indica
ttttttgtcttgatctatatatgcacccaaaaagcatattatatatattaattaggtcaaaaaaattaattaataattatgaggccactatatgcagggtaacacttttgtctctactaatatataacaacatctcttatgttttaaatactataagaaattataaatattcattttttaggatagtttatatattgtagttatagtacatattttatattagattttaatatattttaaaaaattattaatattgaaaatacagttaaaaaaatcaattacaagtacatgaaaaatacaagtatatgcttgtgtcaaaaatgtttaaatcttattttcactataaattatattctcaattttttaaacacgagtacatgtatatacaagaaaatttgaattgtataatttatctaagtattgagaaatggagacgtccttatcaataaagataaaaatagtgtacctatatagtgtgattattttatatatatatccatatgtaaacacttgatttatttagagaacaataagataatagtaataaggattatatgtataattaattacccaaaaagagtgtggcattcatgggggtgcctgttgaagggtgcaccttagctaaccatgatggtaccaaacgagcccttccaatcacacaaaggtacctagcttggcctaacatggccaccaatagagaagctacaatgcccaagcttgctcctgctcctacaacattgccagcccaattccaccctatgctctcaaaacccattgaaaatgatgcttttcttctatctatatacatacatattttaatttcattatgatgcacattatatatttatatatttatgagaagctttttaggtgggacattaatttcacttttattgtaagggtgttttctattatatatatttttatttttgttaaatactacaacaaatgtcacttctatcagcacactttgctacttcgctggtaaaaataacttttaccaacatattttacaaactgcattggcaaacagatcaataagttttatcagcgcacatttgcagtggctaaaatctaacttttaccaacgcatttacgtgttgggaataattatttttactagtacttttcattttgtgctggtaaaagttctaataccaacgttgatttgccaaccccttttgccaacacatcaaaagtaaatttcattttaccaacatcataccaaacttacaaaagtgacctcatttcttgtagtatatatatgatggtatagttagtagatatttggtgatcagttttcaattttttaaaaatattttaggttatcaaaataaagttaatttagtagtactgacctcattataagggaccattaaacacaaagagaagctcattaggcaataaacaagagaggtaatgacaactgaaccaacaatcccaattggaagactttttgaagggttttggatctcttctgccatggttgaagctgaatcatagcctatataaccgaagtagactattgctgccccatctacaacgcttctaattccatgaggagctaatccattaggctttaccaagttctccaaactccctttggaaaacccaccaattattatgaacccaaagaaaaccacgtgaaacacggtcatcaccaagttcaacatcgaactttcctttgtgctgcaaattaatataacaatatttaatatatacatatatattattagggtcactttcaagatccactactcatgttgatgataatcaatacatagcccaacatataagactatgtatattaattctattatacatatatatgtacgtatgtcaactacatatataagatctcaagaaatatatataaatatatactaattaattaatatacattggaaaattggggtctaaagatatttttatttttagtacttagataaattataacttattaaatttttcttttattattatgtaattttagttataatatgatatattatttcatttaaaaaaatttagattaatttatcatattataaattgagtataattaatttttttagtttgcatatgtagtgcttattttgattttttttattataaaaaaaaaaaagaaagtaaaaatataaatagtgatagaaa

SEQ ID NO: 190792 - DNA, 2346 bp, Cannabis indica
aaaaaaaaaaaaacttgagtcaataattattatacaataattactattagtgcacttgggataaactttgcttgcataagcaagatggtagagtaggtttccgagacatacatttatttaattaggttcttttatcgaaacaagcttcaagtatttacaatgttccttcttctttggctggttgtgtgttaaaagagttgtacttcaagaaaatatcattttctgagattaaaaaagggctcttttgtttggaaaacattttatgggagaagaaactttttgattcaggagctatttggcaagtggggaatagaaatgacagtgctacttactctaataagtggattccttcagtcccgaattcctgtattttatctccaccttagcttgatgtttcgagaaaagtttctttgttgtgcgatgcatctggtgtttgagatagagatttagtctatgtcagttttccttttttcgaagcagaagctattctcactattccttggtcctctttggatgctccaaacaaactgatatggaactttgagaaatcttgttggttctctatcaagagttgttattagcttgctctttataagttgggcttgggtcgtgcttctctgggagtttttcgagttggtagaaaaagatttggactcttaatctttctcttaaggtgaggttgttttcctagaaagtttcaaataattggatccctacgaagattaatctagctcgccatggtcttttatctgatggtttgtatcctatttgtgatatgaaagataaaactactcatcatgttctttggggatgttcttccttgatgccttgtaggttgctttgtgagttttctttaggggatccttttggtcattgtgaggtttatcttactttaattatagatgcattgatccacttcgacaggaaatgattaatttggtgatggtgattatgtggagaatttggcacatgcaaaataaaaaggcccatagtaactctaaattttcgtcaattctagtggttagttggggagagaataccttagaaaatctcaacacaagaagcacacgacgatggtgtcttcttcttctaggttggtggtgaatcctcatgcatccccgtcgattcttatatggttccctccttatttgggcagtctcaaaatataacactgatgcaatatagatgtggtgggcaactgtagtggcttgggcatggtggtccaagatgagttgggtgttgtttgagctttggcaagctggaaattggaaggtcattttgattttgaagtggtagaagttttcgctatctgcaaagcgttggctaattgtctctcttttgggtatggcaacattatcattgaataaagtgttcttaaaattgagggcttgttttggatgactttggtggtctttgtaacaggttccaagcgattagttttgcccattgttatagatcttgtaatgttgttgctcattctttggccaaacttgttttgtcaacaagtagtagtatggtttggtagccagatttttctagttgtatccatgacttgttgataacatgtactattcatgaataaattttcacccccaccttttaaaagtacttgttggtcttggtgtttagtagtttagactttttttaaaaaaaaaaattcaaatagaaattaattgaagtatagaaatctaaatcaaacatatgaataaccctataattagtctcaagtagatactaacaaaaagaaaagaaaacaaataatttatctttattattattattataaaaaattaaacgtctcacaccttgctaatgaatgaagtgtcaatattaatacaaattctaatttaggttcactgaataaattattactcctgcttgatagtaaatgtgagagctaaagtaaattatgatatgtgaaagctcaaagtaaattaggatttattccacctaatttttttaagtttgtgtttttgataatttttttattatttattttttgtatggctatttctttattttctctcttagtagatactcttattaatagaattctaaaaattttgttttcacaaattcattaataattataaataaaaatattatttctctctacttttactacatatttgaataaattcatctcttttttgactctatttatagtagtatgtggttcaacagattggttttggatttgaaatttctaatcggaaaagagagcttaatgatgttcttaactggattcaaaagtcaaaagctttaagagtaaaagaagagttcttttgagtgtcattatagtcacaatttatcacatttagcatgctaggaacactatgctttggt

SEQ ID NO: 190793 - DNA, 6812 bp, Cannabis indica
gagagagagagagaaaagtgaagagagattcttcatctaaattcttaattcaattcccttaattcttttccatttcacggtagatctatctgttgatacattcttcgtttaaacgatttgtttttggaaaaatttgacatcaggaggagaattcggtgatatagtgtcaaacccagaaagacattttcttttacaggtgagtaaatcgaggttgtttgagtcgtttatgggattttgtgttttgtcgttgaattgtggtttctgtttttcttcttcttaatgtaaattgggttttgagaattcgaatgttttttggcttgatcgttgagtcttttcgtagaatttggctaattcattccgatccgatcgaggaactttcaaattagctgaattgggtttctaactttgtatagttttttattgtttgatcttgtggatacatcgaagtgagctcaaagcaactagcttgatacaattagattgagccttcaatcatgaattcttcttataatcatttatgattggattggaatcatcatcaaatgatcaagatctttctcgaagtctgtctttttttttactacgtcatcaaaaactttttatttattagttatttttccgttataaaattactgatcagggtatatgaagttggaatttgggtggaccatttaagtaagagcgatgtgaattttttttaatcatctctcttacaatgtattcaattccaatgatgtttaataatgggtatgaattttggttgttccccttttaactttgagattgctcttggtgtttcgtgtaattacgaagaataatttatatttatttcagatgaattcctgatctcagtgtcttgatgtgaatttatttaagatgacttcttgctttgttggtttagctcttgatatgtttggattggaaaagaaagaaataaagcacccttcttaaagcgttgcaattaatatgtaataattcggcattatattaatatatggaattgataagaatgtggtgtgaatgtgatgcaataatttgataaagtactttgatttctgacacctgtttttccctgcttatttcttgtctgtaaacagccaagataatgcaatagtaatgatttgagggtccttattggatatggtgttgaagaaaagattagaatacggtttccatggcttccaggtccccacaatacctagagctcccagatcagctagggtaagtatctgttgaagttttctacatcttgaattgaaaggttatttctttattttagattttagagatgaattctgatttgtcatagttgacttctgatgtaattgatgaatcatggttatggtttcagaggaggggcccaaataagaagaaaacagaggatagccaaatttgtgcatttgaattattggcttctttagctggcaagttattgcaggagagtgaaagttcttcagcttgtagtaatgcttcggaaggaaatcatcgaagttttgatgaagatgttattaagcatgagagacatgctgaagatacgttattgaaagaagagtgctttgaccaggggagttctgaagagagtgcttttgcatctgagatctcttcacaaaacattggtcagaagttactttcaaagagattcttacattctgagagagatgttgtttcagaacgcacttcaaatcgagctgacttggttaatgttattcccacattccacaattgtcctcctaaagtagagactggtaccttgagtaaggctaacctatgcaactccaaagacccaatggagttgcaagtagagtttcccacaatggtcaatttggaaaatgatgtcaaattgccatcgcttagggaacatgtttctaatgcttctttttccaagcataggaatgacattaaattagttggtagagatgatgacgaaaactgtgcaggacaaaataaatccagcactaaagtgaaggcatttaggccttcagtgcgtatcggagaccgtaaaataagaaagttgcttacatccaagtactggaaggtggccccgaaattgagggactgcgaaagctttagatctggtatgttgcttattcatgttttctgtttgatgctatattttgtttaatattttctcacatgcttgttcgtctctctttttctatgtatgacaattgacaaatatatataattgtcttttaatgaaagtgaatgaatttggcaaccgtagatggtggaatgaaacctctgtataacaagagaaaaagctgttacagccgtgacagatatcagcataacactttctataagaggagtaaattatttgaccgtggctcagtggtgctatccgatggagggttcagtagtgagagtgtttctaactcaccggagaagggaaaaagtggggaaaagaatggctttaacggaatgctacatggaggtccttttctgcctcacttaatttttgtttggttaattgaactttttcttactaaaagttcatggtgtaagttgaaggtagttttctaactgattgttttgaatgcagcagctggggtatcttcttcagtcattagtcgccaaggatcttttcactctaaggattctcatggtattagaaatttaatgttgttgctatattgtaaaattttaatttgtttttgtctaggtcttcagtgggttcacagtttcttatcgggcactatttttacttgtgcagtgaagctaagtattaaatccttcaagataccagagcttttcattgaggtcccagaaactgcaaccataggttcattgagggtacagacattctctcatctgtaattattttgtctgtatgtcttgtctatactagatgcaaacattagatttatttgtacttatttttgtttggtgtggcaccatcactgtgattgaactaatccaataatttgtaattatttaaccacagtttgtttccaacttcttttcctttggttttcaatttctgtttagtttcagaataggatttttcacataaggatggcagttatgttttttaagtagtctagatttatgggtattgttttcggagcccttgctttctgctaatatcttgtttctttccccttcccttaatttgtgttcattttatttatttttattttgtcagaggacagttatggagacagttactgctattcttggaggtgggttacacgttggggtacttcttcaagggaaaaaggttaaagatgacaacaaaactctacaccagactggtatatcatgcaaagacaatctcgatggtcttggttttacactagagcccaacactatgccggcttctccgtccatatacactgatgatccacttccttctctgtcttgtgatgaacctgaaacgttgaggtaattctagtcagtcttagaatgtctttttgctataattggcatttatggtgaccagtaacatttcaaagtggacacacaatgaaatttcaaatgcttcttccttgccatacttgtgtgatctttctatttgtgttttatacctatcactggcttgatatacatactggaatcaggattctatgtgcattgaaaagctgtgttttatatcatttctcccaactcacaaaatcgtaaaattatatgaattctttttcaggtccctgggcgcaccccttgtagattcagtgatttctgatgccttgtttgaaaccactctgccctcgaccaatacaggaactcttgttgaaagtaatctcgaatcagtttcctgccataatgactcattaactgacaacatcatgtcagattcccgagctctagttgttgttcctgcaataagcatggaggcactagctgttgttcccgctaacaaaaaatctaagagatcttctgagcttgcacagcgtcgtaccaggagaccattctctgtgacagaagttgaagcattagttgaagcagttgaggagcttggaactggaaggtatgtccgttgcccttaatttgctagtccagagtagggagttgtgttcttgttttctaaggctatgcatggtactcatgatgcttcattctgcaggtggcgtgatgttaaattgcgtgcttttgaggatgctgatcatcgaacttatgtggacttgaaggtaaaattcatgctagatcctcttccctcttatttggagcctttgggcatactaacatgagtggctttcactaatggtgtatattggtgtttggtgtcttaatttgtttatatcagttgggccttaaaagattgtgtaaataaaataattttgtgtcacaaaatctgctgctaatgttgttatgtggtgctattgaataggataagtggaagacattggtccacacagcgagaatttctcctcaacaaaggaggggagaacccgttcctcaggaactcttggaccgagtattggctgctcatgcatactggtctcaccatcaagctaagcaacagggcaagcagccgagcggtagtttgaagattacggactctccagtagacagaaatggtgtggaaggtagtcattcatcatgatgtaaaggtaaaggaaactaaagcaagaaaataatgttgacagaaacaggggaaaccaaaacaaatgtacaaatcacgaaactttgtaatattatcacactcacttttattcattgccaacttcattgtcaatagagattggcctttgtaaatggtttgttggaataagatgattctaacaagaacttaatctctttttttttttttctttttagatttaattgattcatttccacaaatttgtgaatcgtgatgtagaaatttgaaaggacagtaatgtagctcttctattgtcgttaattagtcactttcttctttttcttattcttttgctttcaagtaattgtcgttatgatttagcttatgaaagtaaaattagtaagtcacccttttatgataatgaaaacaaagttttattacagataacatttgtcgtgaggtttttactatgttcaaagattcaatgaaaaagtaaatagtccatgtagagacaaggtgaatgaaacaactcaaataattcttttttctttttattttgaacatctcaaataatattaataaataataaataaatgctttaagcttgtggccaccccaataatacaagttcacagattctcggtaatgatttgattccaataaatgattcacgatcctgatctgctttcagtggcccagtggccctcgtgacataaagtatcatgcttcacttattattattattattattattattattattattgtaaagagaaatgctaaaaactattattggtgttaaatacttttttacgtgttaatattgttattgatctaattaaataatcgagttctatataatttaatataatagcttagagagtattaaggcgacacgttttaaaggtgctaggcaccactaatattcaataacaatgttctattgtaaaatgtatgtttacatgctgattttagtgatttaactgatgtaattgaaatgtctgacataataataataataataataataataataataatatccaaactgaaactgagtaattaagttaattagctttacttgactttaacacgcaaaggagtttgcattgtattagaagtcagactctgaaagtctttgcttcaaggatggctgcatcattaagtttggtataacctccaccctattacacaaaacggtctatttttgtcattagaaagaaaaagctaattagatcaaattttatgataaaataaaatgtaaatatattatattatatattttatacaattactattatccatccaccaatattattattatggttatatatagcacgtgaaacattcacaagcagaccaaacatataaataaatcccattgactagatttgaatggcagggtgtgcacttctgtcaaattttaattctaacaatgagtttgttttgattattatttattatgttatctaaaaagaaaggctgtccagatctgattaaggtgacacctatctggtttcgaaattgcttttcaacaatctttgttggactaggaaactaataaattctaatttcataaatatattatatgtatattcgtatttaattaatagatagtaaatcattagctatttttacttacacggcacgtcgtgtttaatgaccggcttcttcccttttttcaattttcaacttcatttttggtaatagtaggtgtactacttacaaaattattgaatcattattatgccattgttaatcccgaaagtcgatggagttaatttttgagattagtaaacacttagtctcggagagtgagagacatcgactttaagagtcggtcgaagaatgagagacaattatgactggaatatggatatcaggatctgtagtctgtgggtcttgaggatgacctgaagatgcagatggtgcaattagagttcttcttgtattaaccatgacgtttgatcagatatgatatcgacttgcactcaataaaagcaccaaactgttgacctcgaaaagtggtcaactgaccgcggggtcgtattaatttgatgtttgccacatgttacacactaagaacaataaagtaaataagacaaggatttttatagaggttcgcccccttagtttgcgggtaatgacctactcctcttttagttgtattgatactagtgataatactattcagattattatagatgggatctaatatagctctcttcaaagttacaaagtatgaatcagtaggcggcagatctctaatgaaatagagagagagagagag

SEQ ID NO: 190794 - DNA, 1078 bp, Cannabis indica
tattcctactagcccgacccgacccgaccaccggacccactcagtatttactatagatggaaagaaccactttttcataattttcttaactctttctataaagcacatgcacccgatgtcgttgtctgatgtgacatctaaactttcaaaacccagtcaacttttttgaactaaaaaaaaatctcaataaataaaataacaccatcgcccattcaaatagaaaaacttaaatatctaatttaatttcttatttattaaaaataataataataaaaaaagtaagtttgagatgtatgcttgtgtacatctgaagaggttttggtatgaaataacttgaaaaaacctcttacagaatgaaaagctaataaaagcaaaatatactttcattttatgagtttgatctgtgcaaactatggccgcgctactatcaaatgctgcagcatgcggatggaagctttgcacattcctttttattaaaaacaattaatactacatatataaaaatatatatatgagatctgtttttcacctcaaatatcagtttttatcatttgaaaaaaaaaaaaagaagagagagatggggtccaaagtaaatatgtaaatctatatataaaccaaggtttagttggttgaaatgaaagaaacatatgggaagaaaaagaccaagatgagagaagctgaaggaggctgtgtggagaaagtagtctgtattatgttgtcttatataaggaaccaaaacctcatctagggcaaaactttcaaggctttggagttatggttcgggcagcgggcagggtagacactagaagaagctatggtggttgggcaatgagattatcagtaagctgcccgtaacagtaaaggagaatattaaagtttttcttattaattattccaataataaatatgcaagttgacagtattgttgcaattgtaataatgaaggtgacgtgtaatattaggtgttgtacatgcacattggcccttggcaaaacaaactgggcatttctttactgtttgtcagaaattgaaaatgggttccaatttccaaacgcactaataccttagacaatgtttg

SEQ ID NO: 190795 - DNA, 1533 bp, Cannabis indica
aaaaatctcacatagattaaaaactacatgattaatgtacttctaactatataaataaaatactcttaaattgactttgatttgtctaattatattatgtacaattgataatttaatcttacctaattagttataatttttattggatttgtacgttgttaaaaattctacttgaaatatgcactttatttggttttggttagttttcttctggcataaaattctacttgatagttgtcaacaaaagactaagatggttatataaaaccaaagaagaagactgagatggcattttcggggcggatgtggcgatgctacatcaacccacatatgtaattaaaattatttttaaaaagaaaataataaaaatagagaaaaaaaataagttaaattttttcacaaaagtacttatattttatgtctacttaaaataaaataatatatatatatcgtgtgtggtatgacaagttatgttatagttttgtatttgtgttgatacgtttatgacatgacacaattaaagtatacaaatacaacatatttattaaacgtgccaaaaacctcacacaccaacataaaacgattgatagtatgtcatataacacaaatacgacacaatacaattaattagcatgccaaacgaacaaatacgacacgatacgattatccaatgaaacgatttttttaaaaaaaaaaaattaataaaatatacggaaattaattcgtgttattttgtcaacacaattatgacacgacacgattaaagtaaacacaaacacgacacgaatgtcaaaacttaaaaagttttcacaagttattaaatactaaacaattttttattattattttatagatgttctattagtaagacaaaaattcacaaattagaggttttctttcaagttttattaggatacacaatgagcttttttacataaaagaaaccctcccactttgtataatgtagttacttttattatttaaagaaaaataaaagaaaataagattaacttatttcataatcacttgatactatatcagcaaaatagttatttgattgaaaattataattttataacaaatcttgcaaaagactaccatatcacttaataattaatgatttgtagattatgctaaacttagagtgtaaaagatattactttgctactttaggggcaaaaaatatactaatatcaaactaacaagtcaccgagcaaatccactaactcttctttctcctcctgttcttcctagcctagtcccttcaaagaccactggagtgtcattccattgagtttttgtgtttctatgtggacttgttttggttttatgtttgaaagaaagaaactgccattgttgggcaagcagatattgaaagaattagagagataaagagtgaggaatgtggccttcatatctttcataaatatgaactgtactaaacaaacataaatacatatataagtttggctgattctacaatgcacccttttaaaaaagtaataatgatgcaccttttactgtttcagtata

SEQ ID NO: 190796 - DNA, 1783 bp, Cannabis indica
gagagagagagagaagagggttttaatttgataataatgagctgcaaaagaagccaggttagtgcactgttctatgtaaagggaaagctaagtcacagagtgaggaaatcaaagagggctcttggtcttgtcttcatcattgttattgtattgccttcaccctagctgtctctcaccccctgacctttattttttaaccaaaaaaacgaaaataaaaacaagtataaattaaaaatttctctcttttttctggttgggtctcaactctcacaagcacttcttcaggttatattattatcatcactttctttcttttcatgtattgactgcaaaagaagaagaaaagtcgtcctaacgattgagacctgactgaacctcaaaaaacaaagaaataaccccaatccaagaaacaagaaaagaaaatatatattttctttcataacaagaaattttgggatttttataaatttcatatatgagtactaaaaataacaacaaaacaaacaaaaactgatcaccaccatcattatcatatagaacaagggcatatactagatttatcaggatctaataaactatttatatatatggcaatttgatctctctctctctccctggattttttttaattatatcatggtaacaaaggaaaatagaaatgagtacatatattgataagagctgaaaagcagatctcccattaaccccaaaaagagacatagtatcatattcatgtatatataaatatatatgtaaataaatatgagtgataccgcgagaacgatattgcaaaagttgcaggggatgtagcagagttgctcaggcgcaacatcaacgctgcagctcgacatgtttttgttttgttatgtttttttttcttctttttccttttttttttttcaatttctcagcagaggcaatcaagtaattccagactgattctctccctttatatataccgcaaaaaccaaagaagaagaaagataaaagcaacagaaattaataaataaaatagaaaatatctctcttctctttcaaattacaatatagagatgagtagaaagcaaaagctagcttttattctctctctctctctctctctctcttttcttctactacttgctttgaagagagcccagctatcacaacagtagtactaaaactttgtaatattttggccctatatatatagagaaatttgggggatgagagagagattctaaagagaaggagttggagtgaataagaaagagttataataagggtaaggtaaggtgaggttataataataagtaataataataaggggtaacaaagaaaatataaaattattttttattttctaatttgtttaaaaggtgggttcagtactagtgcccacggcaggcaggcaaatgctatctggggccattaaaggaattaataaagacagaaatgaaaacaaaaaattaaagaaaagaaaaatagaaagcgggttcatggaaaaccggatttattttgatacaaaaatggtggttcagcttaagaactattgagttttgaggagtatattagggttagggtttcgtagataaagatgagatatagaatagatgtagggttttggctctattactaattctgtccacctgatcaaaatgcttataaccatttattatgaattgagtgtgaccactcccttctctgctacaacatctagtactactacagcggacgaggggggcgaactttttctccctttttatttctttaattaaatatattataaaaatacttttttttt

SEQ ID NO: 190797 - DNA, 1523 bp, Cannabis indica
aaaaaaatgagcaaaagtaatttctacacattaaatcactgtcaagaatcaacttattatttttttctaaatgaatgtttctcatagatttaaattttagattgaatttttaattaattagagttaggacaagtagtgattaaagtgtatagagttccatctataaatcaactgataagaaaagtgggccatttatcttatatatgactttttatttttacacattaacaatgtgagactaactctaatataataattaatatatataacgacgagtgaagatggcattaataactagagaggcgatggaggacggcgaggtttaggtctcaccttttaaaatggttaaagatgtgagggagatgaaagaaacaaaaaggttagagagagtagtttgaatgagatgggtattattgtcaaaccagacagttggtatattatgtcaactttaaattatgttggtaacttggcatattctttgtcacaacccgagccctagggcgtgataaatatgttatatctataacttacactttgaccttgtaaaaaattattacttataaatgatattttaatttatattacaaaatatgtatttaaaaataatataataacttttataattataaagtaaacattcctaacaaaattaagatcattcattaatataaaagaactatgataatatccctacagtcatatagtcaccgaatagatagatttaataagtcaataaacactacaataatatctaatatccatcactcctcatttctaactaatacatagctaatttaagtaattcaaaccatctattaaagcttaaatacaagatcagttttcaatggaaagtttgaaaaataggataagactaaactaataacgactttcttcctcaatgataccatcctcttcgactagcttcaaactgagttcctgaaatgagaaaaaatagagagtgagcttataaagcccagtaggaaaacaactaatatcaaatgaccctttatttaaataaaaatttctgcatggatagcttttaaaaataaaacagctcatcaccatagcaatgcacattaactattggtggtggtagaaattggtgtaccgaaaaagctaaaaataggaatattatatatcaaaacgactacatcggcgagtaaattacatccatcccaaccatttatcaaaacggtacacgacatcaccaaaaagttgccaaaaaaggatggagctacaaaaacgttaccgaaaaaaatatcatatttaactctgatgtctttctaaatcccatatttaatgttttaaatcttgtttctctttgtttgaagcataaactagagaagccaaatgaactgatttttttatcaaaaaacttgttttgaatacatagaaaaaaatttatacacaagtttttaaatttttatggtattacttcttatctatgatgatttcatcaaaaaaaccgattttttcatcaaaaactaatttgtttatcaagaaattgattttgattatataaa

SEQ ID NO: 190798 - DNA, 1723 bp, Cannabis indica
atccaatttgcagactgattcattattaattgacgaatactaaaaaagacagttcacatattctgaggtgatcaaaatgacaacaactttgaaaaattcttggtaaaggtggatttggaactgtatttcatggcttgatagatgatggtactcaggtagctgttaagatgctttctcattcatcggttcaaggatatcaacaatttcaagcagaggtatcattcattttttctatataatttttttttgaagttgtactgcatatatatatatatttgtacatgtattaataagctataattaatgtatatataccactttgaaagtacaggttaaacttcttatgagagttcatcatagaaacttgactagccttgttgggtattgcaacgaagggtccaatatggctcttatttatgagtatatggccaatggaagtttagattctcatctttcaggttaagtgtactgtattaattagtttcattatgttagtatcactttttatttttcttttaagaaaataaattactattaataaaaaaatgggtaatatcttgtttgcaaaaataaatagagaaagatgcaaatttattaattaacataaatatctatactttttgcatttgcagatggtgttagcaatgtattgagttgggaaggaagacttcaaatagcaattgatgcagcacaaggttagacaaatattgatccattgatcactatatgttaacatttttagtttattttaataaccaaattaagtgtgtgaacattgaaatgtagggttggagtatttacacaatggttgtaaaccacctatagtgcatagagatgtcaagactcccaatatattaataagtgagaattttcatgcaaaaatggctgattttggcttgtcaagaatttttcccaccgatgatggtactcatgtgtcaactgttgttgctggcacaccaggttaccttgatccggagtaagtaaatattcttctaaaaaaaacttattatgatataataataaggacaaatagttttgttttcgatcttaaacttccacgtacatacctttgaaaagttttgctcttccaacttttttgtatggcaaaaatctctcccaaattatctcaactatattgcaaaagttataattaatattgaagagtttttcatattgttcattttttgtcatgcaaaatagtttcaacgaaaaaactttacaaggagaataattgagggagaaattttttgtcctataattaatacgagagcaactaattatttttattataaatactttctgatgtcacgcacagtatacgttatttatgttaatgttcttatttatacaatttttttttttgaaaaagaacctacatacagtctctcaaatatagttttaaaatatgattaattttcaggtattacgttacaaataggctgaacgagaaaagtgatgtttatagttttggagttgttctattagagatgattacaagtcgtcctgttataagtagaacccatgagaccagaactcacctaaaggaatgggttagtgttatggtggcaaatggagatattaataatatagttgatccaaggattaaggggacattttgaaataaactcagtgtggaaagcggttgaaatatcaatggcatgtttagcaccttcatccaataaaaggccaaacatgactcaggttctgagtgaactaatgagtg

SEQ ID NO: 190799 - DNA, 2817 bp, Cannabis indica
tttggaagacagaatgaatcatcagatcagataattaaagttatgactaagaaatcttaaatgcagaaaagcatctaaagcaatgttcaagtttctatctatcaacaaaccttgcgaactacgacgtagtcgccaattgacaaattaagctccacatcagattcagcttcatatgaatgcagaacctgaaacaacaaagcaacaaatttataaaatattaaacagcgtttcgaattaagtacagcattgtcaaatttataataataataacttctgacctcgcctaaaaagtaatccatgctgtttgcttgtccattaggtgtatctgatgcatatacgccattaacttcttcatatggtggaggtgggggcatagtgttgtccacagcaggggtaggagctgcttcaatccgttgcctttcagatagcatctgtcaaaaagcaatataaacattgcacaaatccataaaccgataacaaagaactattggggtacactgtaagatcagtatccacagaagcaacaactaaatggtaagacaataaaacagcatacctcgccttcaagctgatcaagtatttgaaggatcctttgatggtaggaacgctctgcttcaaccttaagccatgacatattacacagaaaaagcttcagatataatcaccgaaccaacatgttatagaaacataagtactttgacaaaagttaagtttgaaaggaaaattcttgtaccattgtaatgagtcgctggagagtcaatctctgctgttgaaattctacagcagccattgctgatgcagcttccttgcccaatattgccatgtttgacttaaggtcttccagctttgcttctgctgcttccaatttcataacactctcagaattacctggtgtttcccttgctctggtttggcgtttcaaaacttcaatagcctgtctaggtttaagaaaatggttaattacaagtaggtaagagataattgaattaatgatttcaaattgactaaacttactatgttacaaattattttttgaaaaatgaaatatcaattttattaaatattagcattcggaatacaaaagaactctaagttcagctgaaacattatgctcaagaaccctacgaccagagtaatatcgagaattcctaactacataatgagctactcgatttgatgatcgtctaataaaatataaactaacattattcaaagaaataataaaacttgacaatcatgtaatcaaactaaaaagagagtgcattgattgatcgctacgaatgattccaaaatggtccaataataatgtacattacaaaagatttctttttaagacttttgtgacatcataattttaaaatgtgggaaagacactcagaactattctttaagagctaataagttcccaactaagacatgaataagtaatggaaaggaaagtactgaatatatactaaaccaaagagatagctttgtcctagaatacctgagcttcagcttcttgtcgcagtctatcgtaccgttgagcaagatgtcgagcatcctccaatggagctcccattaccatcgctcttaaaggctcagccacctaataagaagcatataagactagattaagcacaatattgacagccttaaaaaagcatagatcaaaacatccttaccccattcccccaactaaacaaacaatagtatcagttatatagcatagattagaaaacttatcacctgtgtgccaagagctttaatcaaatttcctcgttccttctccatttgagcacgagcacgtccgtaatttagagcagctcttgataatgttgcaccactcgtacaagtgttttcagcaccatatttcctgctatcttcggacaactttgttcctgttaaacagaagtgtcaaaaaaaaaacacagaatcgaaagggtaatatcctgtctcaacctctcgggcaaaattgagatacaaaagagcaatgagccactacaccatctcaccaatttcaacttgtttggacccggtaacaatatatccttccacgccacgaacaatatctctttgataatgctgttactcaaatgacaaactattaattagcaagtaaaactaaacaataaacaacaaaatatacaagtaagatgagacagaacaacttagaaaccttgccagcacgtgtagatatgtagagcttctcaagcttctgatgttgagtaagttcagcctcatctgtaactaaattatcagagcccccatatcctccacctccaaactgtttgaaaacagcctgtagcaacattcaattcgatcagaaaacagagcaaaattatgtgattccaattctacaaacaaaatccaatatacaaacacagcttcatcatccaaaaacctcttctttccattcaattcaacaatatatttcatactggcaatccaatatcgaatgccatcatattgaatcagtcttacaaaattcaaaaacctacacaaaccaccaccattaccaagatcgtcttcaaatccttacatccccattattacttttcaaaaagaaatcacattttggtaataaaaaaaacagatgcctcaggtcggatcaaacatcatcaaatgaaaataattgaaattgcaatactttgaggaaacgaattagggtttgaaaagagaaagagcacctgttgttgcctggcgacctgatcgcgaagtctactggcttgctttctgattgcgtccattgacgagccagaggagccgaaaacgaaaacttctcacagttgtacgattcttacaacaaaaccaagacagcgatatatatatatatat

SEQ ID NO: 190800 - DNA, 761 bp, Cannabis indica
ttttttttttttttgataacatattttgagaagctccataaacgaagatgaagacgaacctagtaatggaacttgtgaaatgtcgttgtcgacaactgagacttgcatatgaggatgtcttggaccatttccaacccaggtcgaagatttattcattgcccaaaatcttgaaggtttgtgcaagatggagagtgttaaaatttaataaggtgtatgagattccattccaaaataaactagcaatgagaggagtgagattctctaacattccctctcaatatggaccgtaggtgcgatgatttagttcaggggcgaggtctctagttcaagtccatgatggtccaactgagtcaaggaaaaaaatagtataagcattaatttgactcctttatgcatgcttcacttgactcgggaggatatagctcattagttggtagagttccgctcttgtaattgagtcgttgcgattacgggttgagtgtctaatttttcagacaataatgatagcatcgtgtacttgaattggtggctcactactgaaaaatgccactgaaaactctactgagataaagatgggctgtaaagaacgtagaggaggtaggatgggcagttggtcagatttagtatggatcgtacgtacatggacggtagttggagtcggcgactctcttagggttccctaatctgcgatccatcatgcaccatgaatagcacatagcaaagcgcccaagacccctacaactctcatcatatgaaatggg

SEQ ID NO: 190801 - DNA, 4491 bp, Cannabis indica
ttgcaaactagccctaccaataaaagttacatgtataattttattttaaaaaaaaaatatgcattttttaaaaaaattattaaattaaaaattaagattaaaagacttaagtaaaaattaaatcaataaaatttaaattactctttttctaaaattaattatacacatgacgttaacataatattatataacaactaaatatttatgtcatcattttatttactacgtgtgacaaaatttaacagaagaccaatcataataatataaaattgtattatatacttgttttatatgatgtaaaatatatactagacttaatgaaaagtgagggtatattgaaaaatctattaaaaaaaataaatatagtttaatgaaatataatataagaatatttttgattaattgataaaaaaaaattaatttctcaaatgctaaacggtcatccaaaatccaaaccaaacaaaaaagggagtgccccaatcaaaacccaaaaccagaaacataaagacaagtgtcgaccttttaaagcgcgttcacatcaaatcccaaagactccatttttattttcttcttcttcttcccaaattcatcttcatcttctcgagagagagaaaaaaaaacaaggttctctgtctgtatctaaatttgtgtctatccacgattctctctcctctgtctcatatattcaacctcgtcacaaacatttattgtttcgtgggtcgttttccacttcctcatatctacaaaataatcaatcggggcttcctttgttttttgttatgtgaaaatggttgcagaagtagaagaagaatgagagagttaagattagaaacaaagaagaatgcgaaccctttgtgacgtttgtgagaaagctgccgcgatcctcttctgcgccgccgacgaggctgctctatgcagttcctgtgatgacaaggtctttcactaatttaagcttttaataatttttaatttaatttactaacttcaaatcattggtatgaagttatttcaattcaaatattatttatatgaattgggttttgtattttgttatctgctggaattttcattgtttactttgtttagcattattgctgatttcttttttgtttttaattccaatttgcaataaaggttacatttttattttattttatttttgggggtggaatctttgagaatgtgtaactcttatctctttggattgctttttgggtatggggattttgttgctttacactatggatggtaaagaatgatgggcattatggcttgctttgtataaaaatatgatatagttaagtgactaaatctgttgttgtattcttttttgtaccctttgaaatgtttttgaaagcaagattggcctactacataattggtgaactctgtatgttgatttaagctgacagtgaccccagatatgacccattttggtactgaaaatgtttggtggaagtgagatgcaagtgggaaaatgtacttatttggaataagtgcttagaaagagtgtattggggtaccaactttctggatgtttgtgtatagaatcacttattatcttgttgcacagagattctaagacccttttttgcttggtatcttttctactcaattatggcaagaacgtttatctttgtttctggtgcttgagttgcaggttcacaagtgtaacaaacttgccagtaggcatgtgagggttggactagctgaccccagtgatgttccccgatgtgatatttgtgaaagtggacctggtatagtagtttttgacattcttaaaaatgtatttttttctgaggacgtgcgtgtacattaaaacttgtattaagaatttgctgttttttttttaaacattttctgaatcatttttgtaagaatttgaatccttttccttccccttggacaatgtatgcagcctttttttactgtgagatagatggtagctctctctgcctacaatgtgatatgattgttcatgttggaggtaaaagaacacatagaagatatttgcttttgaggcagagaatcaaggtttgttccctgaactggagagtgttaattctggttttgttttcgttttggggcattttgtatttcaatctctctgctatgttgttatgtgcattcttttgtagtttccaggtgataagtctggtaatttagaggagttacggctaccacctccccttgatcccgatgaagcaagaagggaacaaagccaaccaccgaggcttaatcagcagaatcacagagctactcctgttgctgatctgaataatgataataataataatgatggtggcgcaaaaatggataacaaactgattgatctcaacagccaaccccataggatacatggtcaaccttcaactaaccgggtattttttatattgtctatgaagtctctctggtatttgaaatcatttttatatttcacttatactctaacattaagaactgtagattttgatgttctagttatatgagattataggcatttcaccattttaacatatttggaacagggtatcgatgcccttcgtggcactaatcatgaatccacaagtgtagtcccagtggtgtcctttgaacgagagcctgaaaaatgactaaggtacattcaaaactttttatcattgtttgtattactatcttctctgatttttcttttggaaaaggtaaaattcaatgtttactgatgaaatcctttagctatcattggatttagtctgtacacaaatgtcctgtgcagttgagaaatatgagtacaattgtagtttaatcttgctataaatttgtgcatctagaacattaaatgaggaatgcaaagatgtccactatagttttgttgaagttctttttctttttttggtaataacacatttcttttacccatctctgataattgagcaatgcaagttttatcatggctcaactaagattactttagccagtaaaaggaagcaaagaaaaataccaactgggaaatgacttaaacgttacaatctcgcctataggttgtgaaaaaaacactaaagctgccttaagtttcaaaaaaatagaacccgaacaaaagttgcttaaactgagttacaattctatatgtattgctttgtcttatgtaatatgtaagtgttcttcaacttatgttttgattaaacaagtcattaccatgttaaatatcaccttcatagggtcattgtctattaaatttatgaaatacccttgtgactgcagattttctgggcaattcactcctgtgtctagccggataacaaaacaaaggactccgttcttactcctgtttacacatgtctttccattttcgctgtctgttatatttcttgtgcagagttggtttagataaaatcatccaccaaaataagaaaaatagttaactagatggatagtcactacttctgtattgaaaacattgtttgtttcttataaatttgatgcaagttgttatcttctgtaagtctggaaccgaagttgaacaaaaactatgctcgattgctgttctgggtttttaattcgtctaaccggaagaaagaggatgtgaaaacttagttgtgctcctctgttttttatgctattactataggagataagatactataagagatggtataatgtgaaagttcccattatcttggtattcaatcttagaagattatattatagttcttttctatttctattattaatttattattaccacctcaggtgctgttatgttcctgcaattgtacgaaagtcccagcattatttcattatggtaaaactgaaataaagagaacaagagaggaaaatattgtattttaatgaagaaagtgttaagaactgaaagtattatttttatgttgcttgtgagaaaagtggtcaaaaggatctaagaaacaaaagaagttatgaaatgattgataatgtttgtttcatatataccatcagaaaaacttgtattacactcctaaaagaaattatttttgtgcacatttatttgtttggccatttaaaaaagtgttttacatatttttttgtttacagtaactcatatttatatagtttactatcacaaaataaaaatataaatacttactacgcgtataaaataaaacaatcatggtaaattattcagtgattttagttaactacattatacatgatcattaaactaaataacttttctattgattatgaagaaaataattggactaattattttttctattaatcatgaagaatatacaatatctacaacatatacgatcatgaagaaaaaaattaaactaaaaatcttttacgaatcatgaagaacatagaacatacaaaatttttttacaacatacacgatcataaagaaagaaatagactaaaaaagaaaattttcctaccgaaattctctcgggtgtactataaaattacccaacgaattttcattcttgtcattactattatgcagataaaacaaactttgttaaagatagc

SEQ ID NO: 190802 - DNA, 2027 bp, Cannabis indica
aagacaacacgggatttctgtcccccagataactttgcaataggagtaagatggttatggctaggaagtccaaactttcccagctttgcacgaacggcttcctgcttgctaagaccctcttggtctggatggagacggagaaggtactggactggtgtttcatccattgtcaagaggtctacaaaatgctgagagtaccttccaatcctcaacttttgactcctacgtacttcaccctcactcggaaccaaatcaccagcaaggaggttgagcaatgtagattttccagctccattgggccccacaatagcaacacgggtccccatgtcaataccaacatcaacatccgacagcctaaaatctttccggtttggataactaaagctgacgtcgataagttgcaagagtggaggagtaagctcagtaggttcaggaaagtggaactccacactataatctcgccacttctgtggggcctcagtaggagcatcatcttcatcaaccttaactttgcccttgcctttacttttcgatgcctccttagctgcggcaaactttgctcgatccttgaccttgtccagctgagcacgattaccactcctttttgcagctctcatctgtttgtcataaatctcaaatttcttgttcatctctttgcgccgttgctcatacccagtttcaaaatcatcaaaatttccacgataaaagtggagcttaaggtcatgtagatgaataatttccgtgcaaactgtgttaaggaaatctcgatcatgagaaacaaccaccaaagttttcttccacctacacaggtactcttccaaccataaaacagctctcaggtcaagatgattagtgggttcgtcaagtaacaaaagagtaggctgcacaaacagtgccctagctaatgaaattctcattctccaaccaccactaaacgatcgtgtaggacgaccttgcatatcctttgtgaatcctagcccagcaagaatttttgatgcttgagcttcagccgcatctgaccccattatctgtaacatctcatacatttcactaagcttctcccctacatcatcagcttcatcattttcgttgcttgcatcattccctgtacctgaagataagttttgcaatgcttcaacctcttttcggagggtgacaagttcaacattggctgaaacaacagcttccaatgcagttttttcatcaccaataacttcctgctcgactaggagaacatcaatgttttttggcaccggaattttcctccaagcaataagcttcaatagagtagatttgcccataccatttggtcccaccaaaccatacctctttccatgagatattttcactgatgcattcttcaagagttcctttcctcgggcagaaacagaaaaattttcaattgttatgtccttgacattagcatcaaggtcattttctccatcgagaaccgaagcccgacttccaatgacaacagtgaaagcatcatggtcatctctaagagcttcttttcttgcctgctcaacagcgtaggcagcaagaaggtccttcttctcccgttttttcaactctttgtcagtaattgatgcttcgattagtttggaatcgggccttttcttttgtgcgtcatcttgttgtatctcatctcctgaaacgtactcatcttcatcttcatcagagggaggaagatcaatatcatcagtataagaagtaggtttgggagcttttttagcctttgtacttgtggaagatcccttaggcttttcgggtctctggtccatgttagccagcatggcagatacagagagtttttttccatctttagagcttccagccttaccaccctttgtggctccaccagcatcctctgtcttcttcttccccattgcaaatagtgatctgatagagacaaaaatcatattacaggttagccatgccttgtgatcaacgtcaatcgtattacttcctaaaatagaatatcggcacaattggggtttcaaccctcccccccccgcgccgccacaccc

SEQ ID NO: 190803 - DNA, 1130 bp, Cannabis indica
ccttcggacctccttcttacaatcggcaatcctcttcttaaagttacatctctactgaaatttattaatgagttcaattcaaagattcttttttcaactgtggttttcaacctgagacacagagaccatgttatgtcttgtcttttagttttaaccacaacaacaatttcaaatttattacaaacatgcttaattgtaaaccacgttaatgtcttaagaacaagttaaacccatcccaaatagtgtttagaaacttgtatttactactgaatccccatgtgatctctgaatttcttattattatattatttttatcataacccagaacctgtataaaatgtagcccaaatttgtactaagaaacacttttttaaaattttgttcactacccattttcatagatgtgtttttagctctgcccaagtacttttgcatggagaaaaaccaatatggacacagtaatttccctatactaaatgacacatatttcagagaaccaaacatgaaaaaatgataaatgtaggctggtgtgacttgtgacaatagataaaccattaatttctctatttctttattaggctataagttgagacaccttagctttagctacatataaatatatatgtttatatatttatattataatagaaaaaccctttggtggtcctttttggattttacttgtttgttgtgttacttgaaacaggaactaaggatttgattcttatttcagaatatttttccctcattgtaagggggggatcaattagtttcaggtgaacataataataataatatgcaattaattgtactatatataaaatgtttatatatttgtaattaatttctcccaacaacttatatatacataaggtaactttaaataaataattgtttgatgatatgacacacaacctgactttttctcctgaagatgattactttctgagctgaattttataagggttagtgggtaaacagtaaaagagagcagttaaaattgtaccattaaactgtttataaatagtaaaataatcttataaaatagtctggtctgtgtagtaagttattagtaataatgggatccagctctttcaaaatttcataattcttcctcaggtaggtactct

SEQ ID NO: 190804 - DNA, 1642 bp, Cannabis indica
gttggtgaagagaagtcatttgagattgtttgaaggctaaggtgttggaaaacctaaggattatgtgtttggagagttgaaatggctgatgggaaacataatgtgaggagtcctatagtggttaagtactaacaaaggaatgaaaaattgtgttaaagaaaacaaaaaaaaagtttgatttggatagatgattgtgtaaatttgattagtttataatatggtatttgtccttaaattatgtaacacaatgatcctaattttatgtttcattttggacaaaaaaaattaagattgtatgatggtggaaatttcttgcattaataaaacttccatgaatgaaatgaaaatgccttttctttttttttttctttatttatttatatttatttaagatattatatatatatatttataattttctaaaattattctcaaaagggtcccaaattaagctattcaaaatgtggtatgaattaataaataaaattgagaatgggaataaatattgttatgagaattagcttctattttaaacaagaaaaaattgttattaaatttattcttctctttttattgcagatattatcgtaaaacaaatacaaaaacaagtgattatctttgtccctttgtgccactttaattagcccataaattatgaataataacttatgaaaaatattaacctttaaatattgcaccatgtgttacaaattataactatggatactaagttgatatttatttttgttgtgccaaattcgagtacattttttttttttctttttgtgtttgtgtctcttagattaattcatttcaatgtcaattttcataataattatgaatttccacataaattattattttccataatacttattatttccatagctattattttccatattattttgtattttaaatacctaattttatataaagaatcataccatattttatgggatttactaatgaattattttattttgacttttattaatttataagtttatccctatatgtgtcaccatttaaacttttcaccttattttaagttgaataatgcatttctctttatgtgtcatacacatcattatttttattttacatgaatattggctgtcattaattatttattttatttttctatatcaaggtacctctatatagaataagacttaaaaaaaaattattttgtccttacaaaaaaagaaaaaaaaactgttaatatatattaatttgtaagaccttttattatttctttctttatttcttttgtaattcacatttcaaacacacaatatttttaacatatttttatcattatattagaaatttctaactcctcaaaaaattattctgttagatttttttatcgacattcatgatagttttttagtttgtttttttttataagcgatctcatacgttatagttatttaacacggtttataaattttcagaaaattttaaataaaataaaatctatctaaacgggtagatgtcatgcaaatttttctcatcaattttcttacatccctaattatagattcaaatatgggagtaaatcaagtcaaccaaaaaaagaaaaaaaaatgtagaaaattttggacgtaaaagtgaccaaatgcataataaaaaaaag

SEQ ID NO: 190805 - DNA, 3147 bp, Cannabis indica
gcaaaaagtacaagaaagtaaaatatgagatgcagttttcgaagtagagcgacaaattgagcaaatgggagagatgtcaacatgttttgttctgagattgaagcagattggcaaaatcccaaaagcagctcgccaaaagaagttctgagattgaagcagattctgccaaaacctcgaattgttgttgcttggccttggatttttactatcttggatcattttgtactctgtgttttacaaaagttaccaattggacttctgttttgttaaataataaaatagactttgtattttctaaaattgtacaaataggatcatgaatatttttttttattcaaaataaaatttaataataatctgatctaaagatgttatgataaaaccagttacattttctgtatctgttcgtgttagaaattgtcttaaagttagttatattaaaaaataaaattgttaaaatttgagttcagaatcctatttttaacattttaaaaaatacaaaatctattttttcatttaacaaaatagaaaattcaattaataattttacaaaacacaagatgtaaaataatatttacatctaatattatcttacataaattggttatgttcttagtaaaaaaaaaaagaaaaaaaaaaaccttactacctgcgggatggccaaaaagaaaaaagctatatttttaattagaagaaaagaaagggactcatagcctcattcctttctcattctcatgtttctcttttctctcaactcaaactgctctgttttgggggctttaatctcaatcccaacactgaaacaaacaccatgatcgaattcttccttacctacaagaatttgttactccaagcccttctctcactctcactcaccctttttctcgtcttcctcaaaatccccatcttcttcctccacggtctcttcacttacattcacccagacaacctaagtaatggcgtcaaagccgctattcggagacccgacacctccgattccacttccaaaaacaacactgagctcagaaaaaggaacaagtccaaggacaagtttgagttcgatgaaaacaatgcccagatcttcagactcaagctcgacgaagcccatcttcaatcacgcctcttttccgatgactatcgtaacgcttttacaatctcattcgttgctatttcttgttttttacttcatgtatacttgagtagtagtgcatcagaagaatctgggtttgggattttggttccggttcttttaggttccgttgccgtttttaagttactgatattgctggctaaactttcgtttgaaaaatctgcttcgaggcgctcggagaagctattatgtgttgtttttgggattttaggattgatattagggagtgtgacttgttgtagatttacttccttggttttagattttgattttggttcaattgatgggtttggaagaatgttcattgctgtttttatgagctgcacatccacaatattgttcatgccctccatgaagattgccagatcgttttggcttgggacagatcaaattaggtctaatttatcagtgatgacatgtgaatggtatggtagatttgtgttgtatgcaaactatttgttgatgacattatcagggctattatggatcaagcccttatctgagttgcttgttattaataataacaacacgaaaaatagtattcgaaatgcagaaagattggcagggaatatcgggttttcgccttctgagtttgataaactcagaatttggttgttggttctttcaggtgtcttgcaacttgttgcattacgccccaacttgcaaatgtacctaaatgaggcacttctttcatggtatcaacgattgcatgctagcaaggttcctgatttggattatagtagagcaaaggttttcttgcacaatcactacttgtgccttgtagttattcagttctttgcaccaccaatgttgatacttctctttgttggattttctcaagttgatggtcactattttgataattaccaattcatgtgcagcctactgccttgttctgcctttgtgaaagaagtgggtttattcatggcttggtgggttgtctttgtttcagctgtttacacttcagcaactattgccctttttcggtgtggcaacttgtatttatcttgatgactttgttctcatctttcaaccttcaaaatggttgttcagttggatttttttggcaaattttgagtgaagactattctgcttgtcacagaaattttattaatggatcattgcatttcgtaactcgtttcaaaagataagcattatctggtattgtctcaaaccctcaatttagtgtgttatcttcattacttgtgctcatactcatagattaattatagcagttcactttcttatatataagcttacttactagcatttaattttactagagactgatctttttaatggggattctttactagtactaacgcaggattttctatcataacaaatgtatgtgtagtttgtttttgattgtaaaaaatgtatacattcacatttgaagctataaattagaactttaccttgtcagattcatcatttcttgtggtcaaacaagtaatgataccatctgtaacaatttattaaattttgataacattaactgtaataatattatcatgtatgttgaacagcataccactttgcttcaaacccaatccaaggtgtcgttgtaaagtgtctctcactcaacagtcgattttgttattttctcattcattttacttttcactaagcaaattatagtggttggtgttttgttgcaatgatataaaaagtggaattaaagttatatttttcttttctattattgtcgtctctgtccaacatgagtgttattttctcattcctgcgtggagatcaacatctgggaacagtgcaggagatttagctggtccatgcaatcacacactaaattatgcactaaattgtgtttaccaaattctacaattttgagtctgcactaatttgatatatttttttgtattctaatctttattttcaaaattaatcttatattttagtcttcaaattaaaatttatcacaaaaatagtaattgatttaaaatactaatatgaccgggaggtctaattttatttat

SEQ ID NO: 190806 - DNA, 1312 bp, Cannabis indica
ttggcgattgcttggaccacagagacgacgttggttttggtagtgaaatgtttcaatcccaagaagcctttgagctgttgacagcaaattatgacggcggttcctcccatgaaaccagttatagttgaatgcgaataaaaaatcaaccaacactcccaatctgcaaaacttcatttatcattaaatttttctaaataattttctttttaataattaaaaaaaaaaaaaaaaacaaactagttggccacctttagtgaactagaatgtcgttctcgtttaaaaatggaaacaaaattcaatatatattatatatatatttgctcagaagataaaatcccatatttgttttttttttgtcagaagataaatctatttttagaatatatttttttactcgtttaagtcgggaattattttatgatcagttttttaaggataagatacgagacctagtttttaaaaactaataaaaataaaaaaacaaaccttagaaaacctataagtgattgaaagacgccggtaacaaaggcggcagtgaagaccaaatgaaggtacaatgttggctctgaaagcggcgacgccacctttccgatggtttcagagatgagcaatgaacacgccgccactgttcccaccgctaaatgctttgagtcaccgaacaccgcatatataagcggcggtacaaaactcgaatctgaatttaattaattaatattcaaatccatcaaaataattaattaatatattcttttatgttaaaagcacgtgtgtcaaatttattattacataatatataataatataaaatacttacaaagaccgacgatggcaggaatgttagcgagttttgcgtaactgattccctgtgggatagcaagactggtaatggtgaggccagcaatcaagtccattcgaaacagacgcaaattatagttgggaagccaatcgaagattggaacaaagtacttcacagctttcttggctcgacggaatggattctcttcgtttcgaaagcggctgaaagggtcgtcgggaaagaatgtctcttttagatcggatcggagggtggtgccgaatcctctcggctccgagaacttcaccgccgcggcgttgttatcgaccttattcagttgagtttccatgtagggtcacgagggaaccggaaaattaaagcgagtgtgtgttggtatggggagggcggtttgaggtgaaagagtagtagagaattattgtgtgttgtgtttgtgtatttataagggaaaaaaatacttggtgtggaaatgaaagatgtgtaaataataataataataat

SEQ ID NO: 190807 - DNA, 848 bp, Cannabis indica
attagttaatgtgtatgtacgtgcacatgtacttgatcaataaaatgaaagcacgtgtacaaattatatatgtatttataaattagtttatatacagatgactcactaattaattcccaatcccaaccaaattaataattaattatttgaattagaaggtcaaaacatatttataattagttgttttgttgttggaaacaaatagtcaaaaaccagagactgacccttatcaaggtcgacctcagacaatttctaagttttagtagttttagcacgatcactactgtacgtatgtactatattatataaataataataataataataataattaattattaggttgcaaacgtaataattaaatgcttgtcattttgtgttttcgaaaatactacaaaaacgatttttaaaaattatcatcaaataattcctctctcacctcatccagctaatttaacaacaatattatataacatatttttcttttttttttaaaaaaaaaaaaaaaagtcaaatatatatacatttgttgtttttggttacaagtgatctctctctctctctagttagctagcttgcttattttctcatattatttattttaatttctacacttacatatatacatagggaagctagcctttgtatataatttcattaattaatcaatggatatattactttgtaaacatttttatatttgtggggattatggatatatattagttaaggtttatcataaaaaatattacttgccattaaatataaagaagttgtgactaattatacattattatttttatgtgttatgactaaaattaaagctcgtgtttaaatgtattagttac

SEQ ID NO: 190808 - DNA, 3942 bp, Cannabis indica
atttgattctgattctgtcttaacaatctaactattttttttttataataaacgagagctaagacttgtgataagttaaattcacactttgatattttaccttttcaacaaggtcaaatatcagcaaaattagggagttttcagtcaacctgattttacaaaaaagtgacatcactgaggattggtgaacaacttcaccaaaactatgaaattgactaagtgatgttaacatatcacttaggcataaaaaaaatacaagtttgggacattttttcactcacacaacgtctaggttgactttagtatggcaacatgggtgtccggtgtcaacgtggacattggatcctgaataacttttagtaaaatagccataactcccttaatattgatctgattgatgcgactcaacttttgttttatagctatttcaaatctattttaaatcatgtctcacacccatatcgtaattttaaagattttaagtccaaaattcgtccccaatacaagtacaattttttcacaaattacccgaaaagtgatccaacagacgagatttgagctttgaaaatttctaataatcatccgaagtcatttttactattagatcatcatcaagagccaagatcaatccaaaagttttttttttcatattttattattattttaataggatatgcttccatataaaatgagagcaccactagttcattttacacattcagaaaagagcccttaaggtcaaaacatttctctctagttttgcctttctcaattttttgtgtaattctcatgagcaacaaaaactcgaagtaagcatagttccattaccatcacaacacaggggaactactttaaatcttgtgtgtctctctcatttactctacttacttctattttctcttgcacatctatagcgagtgttggccaatcttttgcgtcaaccccattagatttaaatcaaacgctacaaaaatgtctctacctgtgagagcaaaaaaacagtgttctcacctaagagtatctctaatgatacattatcatataaattagtgtggaatctttacacttccactctatggatacattaaattttataccaaattaatatgcatcaaattttacaccattaatgatgttatatttagtatctacaccaaattggtgcataattttttcttttcatttaatttttttattgtatttttaaaaaaaaaaatcataaattatctgttgaaaatatgtataattatgtcttaaattaactattattggttattaatgtaaaattaaattctatttatacccacaaaaagataagtacactccaatatttaaaaaaattaagcttaaaaaaaaattaactcttaatattttaaaattttctctcatatatttgtattaacttaaatagttattataatttactttctatatatatatatatatatatatagagagagagagagagggaatgtttggtaaaatttaacctttgaactatagaaaacaatgcatttttctcaactttatattgtcaaaatgcatagaaattgaccattatcattgcttgttagattataaaagagccatcttaatctattgattgatttaacattaaatgaagtcaaaacaatatatatttggtaactattatggattgaatgaataagctacatcttgaaaagtacatctcaacatatatatatttaggatcttagattaggactaactaatttgattctagcataagctccatttaatgatgactaccacaaaccaaacataaaatataagaatgtattctatgtggggttgtcatgatcactttacttcactctatagtctaggcctcaaagcttcatgattgttataattgctagccattatgaagttcatgattgacatcattgattcatctttagtaaaaccatgtatatataattgaagttgaaatagaattgagactcaaatccatccaagttgttacagcaaagcataatagaccaaagaccaacaaaaacatttgctgtgagagagatgttgagaagaggagctgtaactacatctatgttatcaaataatcccgccgtgttggcagggtggtgccgcccaaaacgaaggctgaggaggaggagaggagccactgttaggctcgggaacaagcgcagaggattctctcttggagcacgcccggtggttcagtggggattcatggctggtcctattcggatgctgagaaagatcataacagatatggtaccgaattcgcagtttattgaaggtgtttattggtcattaccatttctacatcctcagttgtttcccctttgttaatttgcaaactgcaatttttcttttggtgggttttcttctctttgtttctttcttcttataatgtgtaataaagggcttacaaaaagacctttttgattgatatagagtatgtgcctatgtaattactacagttgaagacaatcaaagattgaaagttatgttttataaagattatgacttttttttctctcctttttctttgttttcccttataatatgtggatataaatgaattgattcaagaaaaagaaccgtatgcatttatgtacaaatacatagaaacacaatacaaaatcatagcaagtgatttgtcctccacttgactaaagcaaaggataattagaagaaagccatggaaataaaggaaaagtcccataaacaatcctaaaaaagggcaggagaacaagaagatcaaagcttttgaaagttgatcttcttctagcaagcagatttgaagagtttactttgtacaggaaacctttgccgctttcttcacaaaatttcccacctacctatagtatagtacagcatagaatcactttttagcaaaaaatgaaagtactgaaggttgtttatgatcaccggcactcttcagttttggtttcttcctccctggactagccaggcttattagtgtcgtctgaagtagcctttgaatcagctgaaagtcctcctcgtgttcccgcttcatttggcaattctctgcaactccatgtgaaaaagccatgacactagatttggagtcatgttcttctttttcggtagaagagaatggttctgttttcactttcgatccagggtcttcttctttcaggcattttgcagaatcaagcttgacaaccttctcgtctgagtttaactccacttccttctttgctccttttgtcgagaaaaattttgatatcggtacgttcccatctgccttcaactttgtctggagacaatagtgcaatcagcaaatagcagctttatcaaataccaaggaaagttataactgaaaacaactaagcaaagctcattctttgtcaaacaagaaggcaagcaagtcgaaaatagcaactgaagcagaaatctctcgtgaaataagagtttaaaattagatcatcattctcatgcacacaaccattgtgttcctaatcaaatgtagaataaagcttttaatgctatattcatgacaagttatgttaataatcagtgaaaaggaataatatggaaaatgccaacttgtcatacctccttaatgcactctggtccatcaaaagatggcttacccattgctggtgtcactgggtaccaaatctgaagaaactaaatgtcagaattcaagaaatgtgcaaggatagagttaaggcatattgagaaagcaatatcatgattattgtgggatcttaccagatctggattttcatatggtttaagcaatgtgtcgactttggaagaagaaccatcaagccatgcgtcacttgcctccttgtcaccaaaaattacaggcatacgatctgcaataacaaataacatatattgtagcgaaagctaaacttatgtaaagatgtgcacccgaaaaacaaatgttccccactaaaaaaggaatccagaattcctagtctc

SEQ ID NO: 190809 - DNA, 3965 bp, Cannabis indica
attgactcttagacatgatagatcttactagacttatttgtgcaaaactacacaatgtataaacttgaggccaatggaaaatgaagctagaacatatgcagattgggttgcatgcacattaacttagatataaatgatgtaacatatagaccaaagcaaacaattgaatgggtaaacaagggccacctaaatgggtaagaaaaaatcagagaatataacagttaaagttgttaaagcattgattttcagttttcatttctttaaacataattgaaatgtaagtagataattcagaacctacttatatgacccaaaagctatatgttgcaatagtctcaaggtgacaaaattatcaaagatatttggcgatctaatcaaacactttctttggaagttcttgtgttatttattatatgactaacgattggcccactcctaatttattgacaaaagttaccaactattttgtgtaattaatcttattcatataattgctaaaaaaattgactatataatgatgatgtagaccgaggatgtatatatttatatcactattttatgccctggagctaattcacatcaaagaaaaaaacgaagaaacattcagttgaagcaaagcaacaatatgcaagacacaagtagaaaaaaatgatatgttaagaccatttacactaataatgatgaaataatactaaactaaaagagaaaagatatagaaagtacagtccatcaatggcccatttactggtagatttgttaaatagacaatctgttccactccatgggtgttgtggtggaacgcatggatcgccattccatccaagtcgaactggaagccccaatgctgtcttaagtgactgtaaggccctaactgaaaaataaagatagaataacttaaactcagttcagtccctactctatgaaattattctcaattgtctgaacacaaacaacaacctcggatacagaagaattgttttctttcctttccacaacaattgattcaacagctacatagttttatattgtatctgaaattccactgattattgatcatttatcactatgatgacacaatgattttttttaatttacaaaatgttgaaggtagaatcttgaaatctatctcaaaaatttcatgattgatcattagggtgtgtttaaaaagccggagcaattacaagatgtaatgtgcttgtttaagcatataattacaattcacacatataacgggaagtaattgaggagtctcaaccatcatctccaacagataggagaaaacataaaaaaaatcatatgtaatttaataactagacatccaaactcatcttatattttaaaataaaatgtacaaattctttcaataaaataaaataaaatgtacaaatcaatataaagaccccttaaacacaattttgttcaatttattttcaatataatgaaaatatatctactttatttacaatatatattaaaaaatatcaaattgttatactttcaataatcaaatccctaattgtcaaaactttaataattttgtcaagataattaaataaagtaataattggcttttcttaagtcttaaaataataataattagacactaacaactagttgtgtttcgaaaaatttgtttagaaaacttcaaagaaagaaagaaataacataattgatttttttaattaaataaaattattatattccttttcttttcaatattgaatagtaattcaagaaaattaatattgtttttttaaaattaattttaattattagataaaatatgtaattataatatcattattttggtaatattgatattctttttttctaatcaaacttaggtatgttttacactaattttgtttgctacggatgtttttatactactttgtcaaatagagatgagtaagtaaacaataactataggatactaatattggcatatatgtatattagacatatatcattgatatgcaaattattggacttcacaccatgaacttctctaagtaaaagtagctagaaaacattgcaacctatttacatagaagttatgcaaacatgtcagacatagatatttcccttgaaagtatgtgcaggagtgtgttagtatgagaaaattctcatgaaaataaaagtataaaatctaaaaatgtaccttcttcaggcaaagttctagactcagccctgataacctcaaagacctcgatggcattaataatagcatgactacctgtcttgggttgcaaagttattgtcaaagtcctcccattcacagcaacagtagtattaagtacaagtgcagtatagcgatctccactcatctgaataacatctactttttcaaatgcagtgtgaccatttatcaggatgtcaaataccctttcccctgccttagaaactgcagagtcaatctctgcaaagtgtaaccatatggagtggtttttgttgggttccacatccattgtatattctaagttaggctgactatccgtactaacaattgcggaccgataaagagcttctggataatggttgggtatctttgacgcctgcttaatactattttcaacagatctggttctatcagaacctctattgaaggttgtaatagaaccccaaaatctatctccaccccaattactcccgttataatctacatcaaacttcgatttcccatcaccgcaagtaagtcttgctgctgttctaaggattactccttcgccccattgtggaccataataatatgcttgattatcaatctgaagaatttcaagggaaaggattgctggatctccatgaccagtgctgtggaagcagatagaagctgtgccatcggtaagaaatgcaagggcttcaacaaatacttgatcatcatggttgctccaatcagatttcaaagaaaaaatctgagttccttcaatagaaacatcaaacagaggctcattgtcaaaatttacttgcttaaccaatccaaagaaaattctgattgaataatgtgcctttggaactcttcgaatgttgtagcaattttccggccctgaagacaacgggaaataccgcagtgtctgcaatggaggacttatgtaacttggacgagttgcatttgttggaatacctcctgtgtatgcaaaatccttattccacaaagtattggtaggtcgggtatggacattattccttgctccacagctaatgcgcattacatatggatctacatccagtaacagataagagttttagttcactagatagaaattagattcatttgtttcgcaatagactatcatatatcttgctttatgaacctcaaaatcaatgagactaaatataataaaaactaaaaatactactttcaaaaaaaaaattaaaaatactactcatacctaggtacataaactaacgctggtaatttaagtgaaactaatcaattgaacactattatgaggagtagcattttagtatgacctgaccagtatgtagctgcttttgattattttcttacctcttccaaattgtgaatagccgattttcaagacaacaattacccagagaccaagagatgcaaactttccagaaaaagcatgagttagtgacacactgctccatttttcaatttcgtacgcaatacccaaagatgccgtaaaatctatcgttatcagtaactaaatttgaattgaaaccaacccaactatttcaaagcacagattcacaaactaaatttaaactcatttagcttcaaagcaaaactcttccaatgttataatcacaaaattcagttccattaccctaatctataacctcaagcttcaatcagttttccaaaacggaaaaatcaaaaaaagcaaaaaaccaacttgaaactcaccaatattattagctgaagccaaatggaagatgaatacccaaagccatggcagaacaaacctcagcatttcagctctacgcgcttctgctttttt

SEQ ID NO: 190810 - DNA, 2457 bp, Cannabis indica
aatcaatattttggattccgactacagacccgaatctaagtctcccaccacggccctggtaatgaacccggcctctaacccaaacctgaatctgactacggatctagaccaaacttaaataaaattaaaaaataaaaataaactttacataacacacttttattgttcaaaagttaattatttaaacaaaatttttaaaagtaaaatttttacttaatgtcaattgatgggagtgaaagacagtcgttttgctgataaacacactggaaagaacagtcacgttgagccttttgctctgctgcatgagtgagatcattcggctaagtgttcgtataattcttaagttttataatacttcacttaactccattgctctacagatcatgaattatcccataataaatattaatattatgattcatgaataagcagattcaagaataatcttaatttctgcattgtttcaatcatcaacgaccatagggataaagtaatgtgcttttgaagataattgcatgtgattatttctacgtgctaccctccccatcatcatcaatcacaagaccactggcattaaaatattgacaaccgtaaacaataaacaaaacatatatataatatgataaaaatatagaatatattgttgaaaataagtaccaaagatgtagtgatgatgtagaataaattacttaatttaggttgtttaaacaggaaagtactgagaataacataattaaactgaaatacgggactgatgaaaccagtcactactagaacctccttccttcccaacaaatatctctcaattccccatatccctctccctctcatctgaagaaaaagaaatggagctccggcaataatgggggcatcaataaccctcaaatgaatgggaaaacaccaccaccttcacaaatgttcactcaactttcgcgtttcttgtgaagtcagtgcatgtctggcagctgcattcagagaatcggcaaatttcacagccgaagcacacacaggaagtgcagcccttgcaggttggagaacgagtgcaacccctataaactctgcggcttgctctctcttcctcatcatcacatgttattctgaaatacagcaaaaacaattcaagttagttttcatcttaaaagtaatgaacattatcgcaagcaaaattttttgaacaatacatcctacgagattttggatgtatgtactgcctcagacatacatgaatctttctttagtacccagtggtttcatttttaatttcattttctgggccgtgtttcttgaaggctcatttcaattcagctgatcacttaacagtagtatccatcgtatgtataaactgaattcactcctcaaaatcagcagtaaaatattgtcttattacatgtccaaatctaactaaaaggggccaccctcagttccacttcctagagttttacaattactgattatagctttaacttgaggacatttatcaatcccggattgaaattgacatactaaggaacatttgcctcataaactgcaggcctatcttgctccctcacctatttgtttacattacatagagtgacattttatgtcaaatgtatcctacgtttttgttgttcctctgtttaagacagttgagcaaaacccaacatttagtatttgagtacacatggttccaaaacaaaaggcagcattttcaagagcttatcttcaatcattcgaatgctgacacatatcttcaagatgcttggtcgaccactatgaatattatttaaagctggaatggaacaaccaatagacgtgatggactggatacaacatcattcaataactaaatgcctcatgcttataggaaatgtggatattacacttaaattgataatactttcataaaaacagttgttggcagatacagaagaatgttccgtgataccaaaacgaatcaatatgtcacaatgcaacacattcatagattatgtcatatagtaatttcaaagcccacatgactgaatattagcaagaattacaacgaaagacaagttaggatcttaagcttattcatatatgaaaaaactatgatgagaaatttgaaacaatgataggttccttgaatgtaatgggactactatataaaggaacaatcaccataataatattagtgtattaaaagtataataatttaagaagataacatacttgtcatatggaagatcagcacatttccaattcacatctgcaaaagcatcatggtgcatcctgcattcctctttggttcgcaggcgaaatcggcgttccttgttgcacctagtacaacgaataaactcgtcacgatgacaggctcgtccattgtgggacctatgagatccattggctgtttttgatgactgattgtagtatttcagcagcaccgtcttaaacagtggaaccttttccccgttaactataacccaaatattattcttc

SEQ ID NO: 190811 - DNA, 976 bp, Cannabis indica
aaaaagatacaagtataagtttttgtcaataaagcttggagacataattgtgcttgcaattgtggccctcctcaccttttttctcacttgttaggcagtaaaaagtatttgacataacagatgaatagtaaccagtctgctggaaagtggaaagaagaaattagtcttacttgtatagtttttgctacccttttgtgctcttccattttcattaacttgggtatttgtacccttaaaaaaaaaaggcttttaaaagggtgtggtgtgaaatagtccttgttaaatgaattcaacaggatgaagatttagatgtcataacagaaggattgcacacattaaaagacatggcccatgacatgaatgaggtttgtcttgtacccttttgtattcatatctctgatgtgaaaatactggtatacattaacattgtaatttgtcagtttgatattattactaagacattttatgttttatatttaaaggaattggataggcaggtccccctcatggatgagatagatgacaaggtaagccattctcatatagttatctatatatttaattctcttcctttatatattcatatcttcaactctactactactagttcatcagctttatttcattgttggttttcatttcattattataggttgacagagcaaattctgaccttaaaaatactaatgttaggctaaaggagacaataattaaggtatatatggatttgagattactaccagatttggattaagctttccatctcattgtccctttcactccaaattaatgcttttcttttattcaattataataattttcttcagctgaggtcaagcaggaatttctgcattgacatcactcttctgatcatagtaatgggaattgctgcttatttatacaagtaagctagctctttattctctgatttgaaaacacaaataaattaaaaatgagtaattaggggcatatacct

SEQ ID NO: 190812 - DNA, 1556 bp, Cannabis indica
atatatatatataataaagtgttgtttttcttttccaaagatatatatataaatggggaaaaaaataaagtgaataaataagaggatgggttcatacccgtttctctctttatataggtaactaattacacctttctatccatttcaaggtcgtttaatatgtgggacatatttggtattcatattcttttgtcacaaattaaaaattttatatgtcatattatgtaatatttacttgttttgtgtataagatgatatatgtatagagaggacaaaatatgatcacatgaccttgttccactaagatctaatgggaaagttactactagcgctttttgtggggtacttttctctttatgaatatataatatatggatatatatatatatatgtgttatgtattacactaattgattatgtgaccaaattaatgatataattaataggttaatttagttttttatttactagttattttatgctttctgttgggttaatttggttgttaaattaattaatgtaacaaagatgtgttgtttatattgtacatatgtcaaaggcaaaatcctggttggtgcatgaggtcaaattttgataatgtatggagagaaggaagaatctctcaatcattatgattgattgaatatatatagaattggttgccatttgtttcaaaattaattgattgataatattatatggcatttttctttgtgtggcgtagtgtggtcgacacctatttgacatttcctttttcttttctttttttctttactgtaaataaacatttcaagaagaatctaactaaaccaaaaacataaatacaagttatcaaaattattcagaaagaaaaaaaaagaatattgattttaaggaaattaaagtgaaaattataatacaaagtctttgtggcgatttaaacaatgaaagtgcctttaattgtacaattaatttgattctatcaaatcagtgcatgtgtaatctcctccagctatagctttaattaaaagatagagatatatagatgggagaaaaggatctaacgtaggcttattatacatacataaaaaaaaaaaaaaaaaaacgtagacttatacataacttatatgggtattaattaattgtaataaaataattttttttttcttttattttctttcaaatattatcataaagaacattataagttgtttgatgttaaaaaatttcacattacttataaaaaatagtaagcaaaaaattgctgctattttgaagaatattatataataatatatataaaattttaggattatttttctcattaccaattatttttaaaataaaatctcatacattttacaacattttataattttatatatataataaatgaactcatttatatattgtttttcagtagtctctttttgacatcatttgatcgttgaaaggaatttatagttttttttattgtaaagattaagcatatgtgtgagtttggtgcaactacacatctcaaaacagctatataacccccttttctaattattaaaaaaagaaaaaaaaaaaaaaaa

SEQ ID NO: 190813 - DNA, 2914 bp, Cannabis indica
gggacaaaattgtgtccctatatgaatatccaagaattgatttttgtatgaaaaaaaaaaaaatcaacaaactcaacccaaaggagcaactctaggggtttatgggtgcgatgagtctcatgagggctttcattttgcttgccggcaaccaataatgttccttttggtctggacaaaggttgaaggagagaggaaaaaataattggtgaagataataggagaaaaagtagcacatccgaaaaaaaaaagaaatatatttattttataattattatttatattaaatattaaatgatttttaaagacttatttaaatttaatttagattaaaattaaatgacatgaccaataaataggtaacaagtagatagtgacatgacagaaaggtacctatagtcccaaaagcctaacagaaaatattataccaccaaattttttacttaaattaacgataaaaaataaaattagttatttatactttaaaattatagagtaagaagctcttcgaagtgcttatcaaaatatatatatatatattatatttactgcaaggtttcaagattaggtacataacatatatataagattgtagttgcacttcctatatatatgccgtaaagagcaatttggaacttgaccatacgacatgtttcaatctaccaatctaaatgcataactacgtacgatcgccaagaaagatataatgtgatatcacaactagtcaaaagcttatcatcatcatcctgaagcagaactagggttgaccccacatggaaacatgtccttgctcttaacctttccccacaaattccaaccccatttcttttctttattaccaccactttgttgatctctagttttcttcatcatcatcagctttgggttcagtctcttcatttgaaaacaaccctcaacaaaaacctcattcttattcctcttcttcttcttgtcaatgctttcttcttgatcataatcttgttgacaaagactctccaactgacaatctctcttggatactgataactgttcataatactccttgttcctcttctccaacccatatatctgtccttgcaaatcctcaatcttcctactcagcatagaaaccctttgatcctctctcatcatcaccaagcatctagccagctccgctgccttcctcttcgcaaaaatagattccgaagccaaccctctattctcctccatcaatgcagccactctataccccaaccttgcattctcattcagcaatatcagcctctcggattccagcacctcaagcaggctcttctggagctcaatcttcctcgaagactcgttgcaccgtctctcagactgtccgagctcgtccaacaatatgtccaactccacgttctttatgacaagctcggagacaacaatggcctcgtcctcatgtttgtaggcagtattgctattactggagcttccgaacatggttttgtcataggaaagagagctctcaacgtcagaatagtcttcttgatcggtcatagtagtggtggtagtgccgcaattctcatgttggtcaaagaagtattcgttgtcaattgtggtggaaacttgtgaggaagagtgcctgcggtggtggtggtggcttttggagatagatgattgcgtgtagcgatcggacaaagtaaggtaagcgttgtacaagtcttggagtaaggccagcagttgaggctgttttctgtagtaggattcggctcgctctgcgaatgtgtcttcttcttttgggttaattgctaaattgttcatccgctcctccaaatctttcatcacagagaagaagatattaaaaaatgtcattttttataattgatagatcaacacatttaaataaatatttcctcaaaaaaaaaaattactaaatatacaagaagataatttaaaaataatgtcacaatagccaatatgtttttacacaacttataaaagaaaaaacagatgcaatcatgtttatttatttatatagtaacaattaattttacatacaaaagacttgtacttgaacttcaatcagtgcataaataaggaccaaaaacacaatattatacatgttttccccaacaccagagccctaaaaagaaaaagtaaactgacaaggtgaacatttatttattgctttttgaatttttacatgggaagattacgaagaagagttcgtcaacgtaatcaaatcaaatgggtaacgatgagtttaaaagtagttgtgacaaagctagaaattattttacatgagacggatttactacaaatttactaaattttcagttttaaaggaattaattgctaaaatactttcactaatatacttatatacttcatataactgaaataaattttaatgaaataatatctgtagactcatgggtgctgaagcaaaaagaggaaaaaaaagttaaaagagaattattagttttatttttttcactattaatagagtattaactcaaagttgaatgcaaatacgtatatataataaaattaggtggggggtatatgtacatatatatttaatttctaggtagtatatgatgatagtgtatatgatatggtgtgttaatatagcattctacatgtttatttatcaatcaattgtttcttggcaaaagatagtattttgaggtgaggcagctacctttcctggtttgcatgtggcttcgtacatgatagggattattgctataagacactattagtgtctgcttccattgattaacaatattttatatcaaatatttaatatggtccgatactttaattatgtctacttagcatttccctttaattagagctggttttaatattagctagtagctactgtgttgttattcaacggagacgtcactgatgaaaggtctccatcactaaaataataatataataatgataa

SEQ ID NO: 190814 - DNA, 4875 bp, Cannabis indica
aaaaaattattttgctcttgattcaatctaaaaagaaaaagcaaaaattcaaagtaacaccttaggtagcattgatattgaagacacttttggtttgacttgtagctgtacacattacatcaattcaatttcatttatttgattgcttaatcatttttctccaatttcatttctaagtgaatttactattttgtccttttctcttaatagttttggtgtttatctagtttgaagttgaacccccaaagattttctttctttttttctctttaaatttagttgagtagatataagaaaaaaaaaaaaaaaaaagaaaaagaaattgttccatataaaaaaaaataattgttctataagaacaaggcaaatagcattagtccttatctattttctttaatctttaccaagattctctttccaaaaaggtaatttaaactttagcactttaccatctgtatttttatttttattctaaaatatgattttatttttttattgggtgaaaaatgttataaggttcttgagtaatgtgtataacgtgtagttataaagattatccctggtaaaatgacataaatatatatagtattaaaaatgtcacatcatttttgacaaatatattatatatataataaggtgtggtgtgatcccaatctatggaaaaaatggtatcaatttcaaaaaataaaataaaataaagaattgatggaataaccctaaatacactatagtcaaattgataagcttaaaggggtttgtttttaatagaatagctaagctaagccaaaagacaaaacactactttgtactttcttaacccaaccaattttcatataacaaattttaaaatagttgattgattttatgtaaatgaatattaatactatgatttgtaaaagttattaactaaatctctattttgtaaaataataaatgtgactttaaactcaattttttttttttttttgaatagactttaaactcaattttaaatatgtatattaatataattaatttgaacataatttttagcataaatagatacaaaaatatactcatttttgttataatgattctaaatcgaattattattaatttttattttgataaaaaaacatcactttaaaatactattttacatcattttaaaaaatataaaattcaactaacaatgcatagatttaattagatttaaaataacatttattctaaaaataataaaagcaaatttacttttattataatgttttttttaggacctccaattttctagaagcaatagtggaacactaatcccgtaatttacggaagaaaaagatagaagagaaaaaccactaattggtaattaattttaaagtaaaaaagacttaatattaaacaaaacaaaagtaagaaagaaatgtttgtttttgacttaattttcgagtttgggtttgagctggaagaactggagtttttaagtttttatcattatatgagatgagggagtgacctgtaaagtgaatcaacgatcaggattgattccatttttttgggttgccaattgtcattcattatatattactttctatttttttaatatataataaataataataataaccacgccacgcacgtaacccaatcaaatgcatgataagtgggaagtgggcaagaagaaagaagagagcgcataaaattgaaacactcaaacactacactcatatactagtcatacataaagttcatacataaatatatatatatatatatatcatcatatatcattacattttcacacgtactcaatctactgaacaccacaccacacgtgcactaccctcatatcattacttctactaaaatatttacaagactataaattatttgtaaattttttaaaaatttacaagaataatattgtaattataataaatattactacaaaaaaaatatttcaacatgttattttgaatataaaacaattataataagaatttataattaacaaagatcaacttttaaagattagtggagaaagtacaaatttcctataaaagcattctataatgcatcataggttactctcatgccatatagtttatgttattggtactaatagtatataactattcgtatagttattcactaaataaggcttatactttttaatttaaaaataatgtgtgaaacctcatgaaatcatttaagtgttaaagattacaagtagttcctaataatgccacttcttattgatgtaatttaataataaatcacatatattttaattaataactagtatttacttattgttgttggactggacaccacgagtacaataatttaggtaaattaactcatttttaatcattttgctaatcaaaacagcatatttcatgttttcaaccgtataaactatttaaatttttaaaaatagaactatatatgtaagattctaaataacttaaatagtttttggattttggattgttaatcatgagcactgttttatacatagattattttgaaaatataatttggacactatattatttaaaatttcacaaaaatttataagatcctaaataactatattatacatcttaaaaaaaatactaccaatggagccgaaaagcatgtttctgtcgattatcaaatgtgtgggaaatgctatttttttttaaggaaatactgattatattaattcatctcatataaaataaacgtgatcaaggatacaagaaaagtaattaggccacaaaaccttactaataacttccgataatgcatatttagtcaagggaattggcaacaacactaataaatctaaaacagaaagaaagactaacaaaattaaattcagaataatattattattattatcccccaaaaaaaaccatagaaaaaacatactttaccaaacaactctattatactagtataaatcaaatgaaaaaaataacattaaatatgaagttaggaaacaactctccaattatacttacctgccctaaaaaaaatgttgttacagctaatttcgaagtggggattatataaatgtgaaaccttttcttatggttttggtgaagagaagatatattatcaatatatataatagggaccgacactacacactcactaggtgtaggtctccatcaatagagattctattccaatttataatcaagtgaatgaatggttgtaaagtgttccaagcatatacaataaagatatttatatgtatatatacatacacacacatgattcaataggccatgccgtactactgtccgactctaataagatgggtcactctgaaaatagtttttatgatgagggattcaaatcaagacaatgaccaaccaaatctaatagattccacagaagtttctaaaaaaaataataaagcagtgaaatatttattatagttatgttatgttatggcacacaataatgaaataaacactataaagctcgtggggttgtttgtgtatgtgtgtgtttttatgttaaatgctatacagattaaacccttttctttctcaatgtgaaattttctatgaatgtacatgatatacaactagatacctcgatggaagctgtttcctcaggatatgcttgatctcgaaagagttagaaactcgtcgtctcttttggctgctggctaatctgcttgtgttgtgtactacaccaccgccatcattctaataaattaaagatgattaagagagcacgaaatggtcattaccatgaacgttgttttgaagatgcccgagcaaagcttaaagccaaaaatgttttctttttcatttcagtttgttttcttgtagctgttcatgaggttccgagggtaagaaagacaagatcttcatcctatggacataaaaagaataaacaggacagagcttagttttccatagtctcatcatcagtaatgtcagttggaattaaaacatttgaaaatttagaatgatttataagatgcaaaaaagatgatagctttagagcttacgataatgcatcagccacgtaaaatattggaagccttcccaatcttgtatctccccatttatttctttgagaagagataactttctcggcctctgagttgctcgctgtcaaaacaaactgaaacacgcattttgttttaccattgcaatgagaatacatccacttcaatttaaacaactgggaacagaaaggctttttaagcataccagtggatacagcatagccataacaccagatgacacgaaagaagagcaaaatagaacgggaagagcacatggactacctgcatcgacatcgaagtaattttaaaaaggtatcttgctacaccgcttaaggaacagaataagatttaacatctccattttatattgttgtaaacaaactccctcctgtattcaattctaaatcataaatacattaaacttctgatgttcatctcataggacaaactattgagtatccaaagggaatgtatgttctaaaaatgacattaattttcttagcaaataaccaccacagagggaggccgccgcataacttagaagttaccaattcaaaattaaggtcacaattatcactcatgtagaataaaccactgctagcagctaaggaaatgaagattatatatgtgacaaaactggctcaaaaaacaataataaaggtgaaaaagtactttaccaaacctaaaaacgaaaagcccagttagattcaaaaagacttagccgtttgtccagttccacattatgaagattccatttgtaccttacaatttcaaaggagaaattagtataacactatatgcaatagttagtggagctcagaaagaataagagagagagagagagagagagagagagagagagagagagagagagagagagagag

SEQ ID NO: 190815 - DNA, 3204 bp, Cannabis indica
tgtattgttttatagaatattaggatgtaggataaggtggaggaaaatatgggatgcgttttgaaattattgaaattattgatagttgtgcctacctagctagctaagcttgcctcgggagttgcagagtacaccttttgttttgggataattaaaagaagatgatgatgatgatgatgatgatgacactttcatactattcctccatttctacacgtgtccttcacacgtgccacttttgctttctttcaccgtaaataattaataaaaattaattaagatttttattttcaaaattaattaaaatttttggttatttatctcctctagtatatagttaaaaattgtgagatagaatttctactcatcttctttatgttcttaatattgcgattgacttgtaagtttttatttttctaccctattaaataggtaatattatctcaaacatctaaatagagaaatgccagcaataaattgaagaaaataaaacattataataaaagagaaatattgaaggatactagtggtgtttagcacttttttacgtgtcaatatcgatattagtttaattaagtattaggtctcatataatttaatataataatttttaaggagtattaatgttagcaaattacaacatgatatgtctagtatgtaataagtattactaatatttaataacaatgttcataataaaatattgcttcattaaaattggttattttattggaaaatactcatttatgaagtaacattcatatataaaaaacaaaaatccaatcataagattagataatcataattcttacaatattaaaaacaatttattcaatcaaagtaaccatgcaatattttaagtataaaaagatttatatatataagactaatttattgcagttgtttgtttatcatcaaattttgaggtaacccttttcaataaagctttgaatagtgtcccttagagtgacctctaatggtgtgaatttaactcccaaacttagtgctttcacctttgatgttttgggtccttccacaagaggatatgattcacatctataccatacaaaccacaaattaataatcaataaaaaaatgaaaatataacatacttatacacacaaaaaaaaatgtttttatattagggtacaatctatgtgaagtaccctaattaattttcttttctatgacaatatctatattataattattaatttattgtgttcaaactatatgttgttctcgtctctaattttttcatacgagtaaaaaaaaattgttcacaccctaatttaagtattataaaatttaaaatttattaaaatttttgctgagcgactgctacaactacactaaacaccatcaataaaataataaaaaagaataaaatattagaaatatttcagttacggtaaactttatatcccatataatagggttttgtgatgtggattagttcaaattttgggatcgaaaaataaaaataaactaaaccctagctacgtaccattgagcattttttgcatacccgacatgtagatataatataaaattatttatatacatatgttgagtgtataataaaagttctacattggttagaaatgagaagagtctttgatatataaggaccgacattatttccattagaaagaggtcttttgagaaggttctcaaaaataaatttgtgagggcttaggctcaaaacagataatatcactaatggagaaatagatagtattcgacggtacttacatttaattgtaatgtatatgttgcatggaaaaatatgaaaataattaataactaacttacttgttaggaatggtgagtgtgggatagagttgttgtataatttgtagagtatgagaaatgtgcatataatttgcaacaagacaatatcttccattagctgagttcttctcaaatgcaagaatatgtgccattgcaatatctctaacatcactaaaatcatacatcatgtttggaaaattttcttctgcaacaaaaaaaaaatatatttttatatatcgatatgcaatagagaaatcagaaattttgttcactcagagcaaaaattaaaagaaattaaatgtacacaaaaaggtataaacgtaaaaaaatattgaaaaaggggcgcaaatgtaaaaatttatataaaataggctaaattattaaaatatatataaaaaattaaaatagcaaaaatttgagtagggataagatttttaatccaaaaatttacaaacaaacttattaaatattcttttttttttcttgtaatatgttaaaaggataaataaaaagttatatttaattatttttataaaaaaataggaaaaaaaaagtcaaattaattgtcacatgatctattatataatctaggctagtatatttataaaatattatttgattataaaatgaaataataattaatgtaatacatgtaatgtaccattatttataatattgagaatcatttccatagtgaaattgagagttggttgtaagaatggaccaatcacaaatccaggatttaatgaaaccaaatcaattccattttccttagcaaatttccaagcaccttcctcagctagggtttttgaaagcatataccaaagctgcatacaatgtaaactcattcatgaataaattctaaatttttcattttttttttggatagaaagatattatttttaataaagaataaataaatacatattctgctctctaaatttcggtcgaaaaaaaatcttccctatgttagatattctcaagatcaatcttagattaaggcgggctaagcccacactaaggcccatctaacatagaagactgactctctgaatgtttcttgaactacgactattatgggatttttgttaaataattatgactactattatattttatcattaagtttttatcactatcaaatggtaccttttcataataaatatagttatatgcaaaaattagtgtgctaatcttcttaatactaaaagataatgagatttaaaactcctttgactttgcttcaacgaagagtttctcaaatctagtcatactaaaaaatattttcaccaaataggatttaaagaactattttctaatgcttttactaaatatgacacaaaagttaattttttaaaaaacacaaaagcccacaaaagtaatcatgtaaagtacaaagtcccaaaaaat

SEQ ID NO: 190816 - DNA, 2015 bp, Cannabis indica
tctctctctctctctcttccaaacagacacaactcagagagtcataagctttatttctttaccttttagtggggggtattttttattattattattattattattaatttttattagttttgatcacatggtaattgtatgggggttttcgattactgaaatttaatcttcttaaaaaattagagaaaattaactatatactatactttatatatacagtgcatgtgtgaaatttcattatgtttgtctcatcatagctaataaattaatgtatatatgtatatttggtgaatactattttcaggggtactaatggttcttcgggaaataatgatgaagataagttcggtaataatactattagtactctgagtcatcatcattttcaacctaggaagttggaaaattgggatgaagaccaacaacctctcttacttggaaataataataatgactcaccagctcatgtagtcaagcttccggcaaccgccgccgctgccacaaccaccgtggacggcgtcgatcagggtgagggtgtaaagcaagagggaagttccatgaaaagagggttggtgtatagtcaattaggcagagaagaagagtgcttacagggaatgaataggtccaataataatattagttggtcacctcaagcactagtttcttcacctaagtcttgtgtcactactactgctactactagtttaggtagtaataatatgttggatttctcgtattataataacagcccagatgaaagttcaaaccaaaatacagaccatttctctgaggtaacataaatatttttttatatatatatatgtgtggtcatttaaatccggtattattattaattaattattaaattaatttcttatgaaatagttgaattcattgataaaagtttagctatatatgtatgacacacatgtttcgattgggttaattaatctaaatttggatttagtattatattaataatctttttttttcgtagtgtcatagcacagattccagaggaccgagtaataagaaggctagggttcaggcatcctcaagccaaccacctttaaaggtatcacctaattaattaatatagacatatttataataaacttattccctatttctgatccaaattgagatgtatatacacattaatatataattttcctgcatagtaattgtttaatgatgtttgcaagtacaggtgaggaaggagaagctaggtgatagaataacggcacttcaccagctagtttccccatttgggaaggtaaaccaaaattaattataaaccttgttaattaattaatattaattattaattcagtcatctcataattattttacaaataacacaaaataataacatctcctcacttgttactttaaaatatatacttccagctagtcctataccatattactataatatatacatatatatatatatatattatatgggattggtttttgattttgaaaaataatgggagggatattcgataaaagagaaatggagaaagacgaatagggtaatgcatgtgtgttcctcttttgcagactgacactgcttctgtgttgttagaagccattgggtatatcagattccttcacactcaaattgaggtgatgtttctactttctttcttattccatattttctatactcttttttctctgcaaacaaacaaactatttattatcatgataccccagttcagtactacaatttaaactcaacaaattatagcatatgcatgcgcatatatatatatataagcacttaaagtactgacaatgattttactaaatattcttcaggtataactatgggtccgtataatatatatagtcataaatactagtaatataaaaaaaatatatataatgattatttcaggccctgagctctccttacttgggtaatgcatcgaaaaacatgaggaattttaaccaacaatatgtaagtactcatgtccccttttccaaatttaaattatcttaatctg

SEQ ID NO: 190817 - DNA, 1167 bp, Cannabis indica
ttattttatatataattatataaaataataataattatttatggagatctttagaaattaattaaaaataagagttgaataactaaacaaattaataaagagtggagataggagattaataaaaaaaaaaaaaaaaaaatattaaaagatacttttagtatttaatattttttatgtgttatattaatttgttttataaatatttaaatttaattttttaattataaataaatatttaagttatattttttaaaactttgcagatattttaatattaaattttgtcgtgttattattttttttgtatatttaaagtaaattttttaaaaaaaaattcatgacttggacttattaaaaattgctacttgataatttaattaatacttaataactaattttttacataatttcaaaaatataatttaaatattattattattattattaaaaattaaatttaaatatttatatacaaattactcaaataattttaaaagatatggccaagtgcatatctatctctaaactaaattggaagattctctaggagagtactttagactttctatttctaactcatttaatatatcttaaaatttattatgtcacgtgactagtttggaacttaaatgcaaatggggttctagaagcaagtgacgtaagtgagtacctatggattgaaggctcaggtcaatgttgaattgtggaccccacaaataatatggataatttttatgaccccataataattaatgtgaatgtaagctaatattttgaccaattcaaatgcaaaatgtaggctgctatgctattgctagccagagaattaaaactcaaacccatccaaactatattcaacaagataataataataataataaaagctttttcttttataaatgaatgatgcttaaacaagttgtactggccactgttagtgagtcaagaaaagaaaaagaatcatggtaaggttgagtgattcagtgtcgtacatttaattactttgtgcctctttcaaattcaaatattaaagatcaataataaagaaccactattccttatatatcacaattcttaaagaagattaaatattgacccttgagactggttttaagaacaaaaaatattattgagcactcatgaaaaaaaatatgtgatattttaaaa

SEQ ID NO: 190818 - DNA, 2315 bp, Cannabis indica
ccgttcttgacatataattatggatgttatgtagtaaatttgggcatatgcaatgcatgatatttatattcttcattatattatattaaagttattaatttttaacttttaaacgttaatttgataatatatacattcaaaagtcatatgtacgaatggttaaaaaaatatactatactataagaacaaaactaaggtgcttgtcatcaaattattctataaataaatatatctatcatggttttaatattaaattgaaaaaggcaaagataatttaacgattaatttttattttaaatgtatccagaagttgaaactaaaatatattttgctttatatttgttaggaaaagtctacaaatttataaatgatatggtattggtgttactggttttcagactatcaggtactgaaattatacttttagcaattagtttttcaaattttattatttattagtgattaaattacttttttattaacttaagttacatatagatatcaaaaaaatgtgctatgtgtatttgaatttgttttcaagaaaattgtgtctagaaaacaatggtgcaaaagcgttgcacctcattgcaaatattttgattcgaaattgagtcaaattttggcttactgaattggacccactcaacaccaagttcttttatgaaagaaagagtaatttggggagtaagtaaatactaaattgaataatagttaaattatatttttaaaatttctctaaattctaacatttaagtgttaaattattatttatatgtcatttttattgatatatttaaattaaattttaaataaaaaataaaaaaataattatctaaattgtcacataactattgtttttaaaaaaattaaatttaaatattctaaataaaaaagtaattatttgttaaaaaacaggattattatgaaactaatagctggagaatttttaatccactttttacttggtgaaaaaatagtaatattagaaaatatagaaaaaaccgtaaaatacataaaatattcaaactttttttttctttttgagataataaaatattcaaattttatctaaaggtgtttcatacaataaagaatgtaattttatctaaaccgtgactcatataattgaggaaaagctttgaaccaatcagaatttgccaacatcaaattcttcgaaacatggattgagtgagaggaaaaggaaaatgttgaacgcatgaacagaaaagggaaaaggggagagagagttcataataaaaacgtgagcacggtcgtattgtatcattttcgctatgtcgtttggaatttagtaagttaaggagttggtactacgaaaacaaagaagcttatccactagtacaaataccattataaaagcaagtctcttttacagaaaaacgaaaacaaattctcaaaaaaaaaaaaaaaaaaacttccatttctgaattctctgcttttcagaaaaaaaaaaatgagttcaaggaactacatctacccaacttcgatgatcaataccaccaccgtcaatacaacagtctctgattctctgttcgaattcgacgaatccgaaatatggaattcgagtccggtcctcaaccaaagtccgcctttggaatcgtcggctgtggcagtggcgacgaagaaatggataccgatctcgagagaaccgaagaaaattgggatgatgagaaagatgagcatggccaaaacgacggcgtcttcgtcggttccggtcaacgtaccagactggtcaaagattctcaaggatgattacaaaaaccacagtaaagtcagagatttcgattttgacgacgaaggagaaatcgagggtgaggatcacgccgtggccgggggtggttttgatggtggcgattggattccaccgcatgagtacctggcaaggacgagaggagcttcgctttcggtccacgaaggcgtgggtaggaccctcaaaggaagagacctgtggcgcgtgagaaacgccatttggaaaaaagtcggttttgaggattaattattattttatttttctttaattaacaatgggagatagaaattttggtaggtgaagatagtattagtaggagaatttgttataattagtctctgttatattaaatattagagcactaattttattttttattatgtattttgggtgtctgagttttaaggaaggacctctttttaattttcatgtttatgtatttgtaattattttactttgtaacttgaaaaatcatgggattttgaatgtgtaatatttgcaaaaacacgcttaagaaaatggaaaaatggaaaaatatgttattttg

SEQ ID NO: 190819 - DNA, 2244 bp, Cannabis indica
aagtagttggtttaattagttcaaagagaaaacaatcaagtagttgggtaggtatctatctattgaatataattaggtcagcaataaataacaattaatatatgccatatatccattactaaataaagaatttcctaaataaataaataactaatttgatcttgaaacaaatcttttctgctatataacaaacaagctagcgatcgaattataaacacttctacaaaaccctattccctaattaagtacgtaataattaactatttaaagtactgctcattatgcattcataaaaatgataaaataaaaccaccaatctctcatcttgaaaaagaaaaagctagtaatataaggaaacattgtatatatttatggagatcaataagattgaaattgttagaagacaaaccataaaaccatcttatccaactcctcctcaccaaaaacacttcaatctctcttttcttgatcaaattgccccagcaatatacacttcgatcgttcttttctatccaaagaattataacaatcatattgacctcattgatacatcttatgatcatcatggctacctaaagaaaacactctcaaaaatcttggctcgtagcttctttcccctagccggtagaattaataacaacacaactattgagtgcacagacgaaggcgttccgtttttcgaagccaaattcaaaggctctctctcaactttccttgagcaaaaatcacacaataatgtggttgagttactcaagcaattccttccggctaataatatggtatccattgatcaggcaactagtacttggcctctattgctcgttcaagtgacttcctttgattgtggcggcttggccatcggtgtctgcatgtcgcataagtttgcagatgcagccacactcagcatattcatgaaaagttgggctaaaacccctatcaaagcagccatcagagatggctgctgcgatcaagcattagacccggattacagggctgcgtccctgtttccgggtcgagatttggtgacattgccgcctgctgcggactctgagttgaataacatggtagatattataacaaaaaggtacgtgtttggtaaaactaaaatagttcatcttaaggccaaagccactaaggttaataaccctactcgagttgaagttgtgactgcattcgtttggaattgtgcgacaaatgcaaataagcgacataggttctcagttttggctcagtgtgtgaatctacgaaaaaaggttgagcctccttttccagaaaacttagttggaaatcttgttgggtatttctcagtgagtgtagattgtaaaactaatgatgaagattataataaatcagatcaattttgtgatttggtggctaagttgaggaaaggaaatatagaatatagtgagaacgaagcaaaaaaattgagagcaggaaaggaggggttggaggtgttatctcggtggtctgaagaaggaggagaattggttagaaaagatgatgcgaatgttttcatttgttcgagctggtgtaattttggattttatgagattgattttggttggggtaagccaatttgggcgagtaatccaccttatatttcttatgaaaatataatgacattgatggacacaaaagagggggatggagtagaggtttacttgactttaagtaaagacaacatggcctcctttgagcgtgacccttatattcaatcaatgatcacttcctcaatttgattaatatgtatacaaaatactaagtatgtaaaattcttacacattataacttttgccacgctttttaagttactatattatatgtgtagtcaatgcaataaaatctaacttaataagtccaaatatattatattttaaatttaaatatgtaaagcttttcgattgtttgtaattaattatttgaatcttatttacgtcattaattataaactattcttaaaaatttaacctatttttgtgttgtgtctgtaagttataaactagcacttaagggtttttattttttagtagtttttaagtgttagttcagtggtattggcctaggataagcaacggccggtctcttcttaatcaagttgacgaggatggcgtctatgatctaaccaggtacatacctatcgtacgttgagttagaaaactgccattttaggcgctgattggaagaaacaaactggcgtaataatgctgaattagagcgtgagatagctacagtcagggtggcaca

SEQ ID NO: 190820 - DNA, 2394 bp, Cannabis indica
atctcgtatattgatctgggtatgtaattttgatttttgttgtaatatagttgtcgtacagtttctcgttagttttattgacgttcaaagaattgatatatcaatacttatacagtgattaggctatactatttttagtgttatttgtaaatattcatatagacaatcgaacatagggctctcataaaaatgattctaatattgtaagtttgttcatattttaattttggttgagttgatgttgatttacagtgttcttacagttgattcttcacaaaataacctcaaattacaagtcgtcgtttatcaattcaataatagttggttaaattttttcttaacaatgtccaaatatatggttcatacatagttgctaacacgttgtccaatggttgtcgtactaacatcttaaggccttagatttccctttcattttggattttttgggggtccctgatggagccttctccgagatcgtttccaaggactctcctaaaatgacctctaggatggcagccagctagagttcccttgtaagaactccctacgttccctcagtggtagttccttcggtagggacgatggcagagctgtccttgatttccatcgtgtcaagattgaactctacattcaaatccatcactagcaaaagaaaggaagaaaaacaccaagcaattaaatacccactttcaatatgacgaaatgggtatcggggaaggcctcccctaaaaatttcatggataggtccccgttgaacccgtcgctttcaagaacatatttctcacaagtaactcaaggcaactaattgggaacctaagagaggcaactaaaaatgacgctgatacaaacagttttagaaaacaaaggccattgtggattcataacaactccttataggcataacagaatgaattttttgggtgtacattcaaaaatccataaactaccattcaaccctaattccaagatcctatcagcatgcaaagtctacaggttattggtgactatactctaactagctacacagtatggacactcatggtgcatgaaattcacacacaacccaaccttagaaacatgtttttagaggaaacatttgaccattcaaacacacaatatgttctagacctagcttgaacttaacatttatatcctagatatgaaatagcgtaaaatcaatagagcgtaagggaacttacttgatgtttagatggagaatggaaggttatcgtgcaaactacccaagaacgttgaactgagtcgatcaggtggttgtagctggcctacgatcacgtggttgtagctggcctaaacgttgaagttctcatttggctaggggtgaagcaagtctggatttatgggtttagcgtttggaaaacgaaatgaacagaggttaaggaattactggatgagacagtcgagagcttcttgcattcactgttaatggcgacgataaagtgagagtgtttggaaaataatggccttggttttaaaattgcaagagggcttctgaaggttgaagatgataaaaaaaggaaaaataggttcttgaaacctatttatactttagttgagatcttagcaatttgaaataaatagcccatatcgattcttccaaaaaagcatcttttaatctgatggatggggagttgaaaagatcatatttaatgctcagcctagacatttaatattaatcattgcacatctcgtatctcgtaacgcattaaaggaggggtcacctcaatcgtcatgccatcattacaacttcccctaaggaatgcgcccccaacgcgcgcgtcactagtaaatgcattaaaggcgccgcatgcatgccatgccaaaggtacatgcagttaataactcattacttgatgacaaatcatgggatacatccgtgattccagccagcaccatgtgttaagagtttgccataaagaagcggaggagtactgcaagctcctagactgcgttacatctcgagagcttgatgggtaaatgttaaccgcgtttttgcgaagtatgacacgtggcaattaatgggaaaaactaatttaatccttccttaattgaagtcatttgatattgttctttcacataaattcttccaagaaacgggaatcatcttggatgaaaaggaacgcggaagactacccatacctgccttaacttcccgaacactgaaggcaaaacatctctcccagacccgaaagggtctaatagggaagattgctcagatgatattcagacaggcattcgaaagatctaaaacagatatcgaccatcatgaagtgtcacagatgttgaccttctatacatgctaggtcaccaaagtgacagttatgctttttttgacgagattagatcttatctcctacatccgagcatggtagtgtg

SEQ ID NO: 190821 - DNA, 1326 bp, Cannabis indica
tattttacatatagttttaactgttgtttgttgttctagttactcattgagcctagttatgggaattcagctagtttttgttcttgatacagtggcatttgctggaaaatgcattcaatgctattttagaagctgaagatattcctaattctttgtactggaccgaaatggtgcttcaaaatgtagctcaagaagactatatgaaagctgtcactctgataaatgcaatggctcttgcgccattcaaaatcagtgaagatcaatggaaagaactttttgagaagtacgaagagaaaatcggtcagaataacttagagaaactgctggactatttggatgatggtgatgtaaaatcagaacccacagtcgtcaacttatcaagagcactgcgccgtctctgtgattccggcatatcaggaaatttctctagctcaattgattgtggcagtgaagacgtaaataaatcatccttgtatgataatgttggaatgacttttggcgaagactccgactcagatgaagatcctcctagcttcagcatagatctcactagcatggaggttgatctcgataatgacagggaaagcaaccttctaaccagcacaacagggttaactacagatgaagctttgaacggtgaatctagtgaccctttacatggtagttactcaacaactgatataactgaaagcttggtggatgtggatgagagtgaacttgaaaaactgttgaatggggttcatcattctgataaatctgacttgccttctgcatatgaagttctagaggcttggaaggaaagcaggagaaaagatggggtcttgttctcatctcgacttggccagaaatgagtagtttttggttttttgtctgttgcaactgtgtatatatgtatgtgtatacatcaatgaacgttttcgatagtaatctagttaaatcaatacatcatagcgagtcacagttgttcttgaatatatgctgatattttaaaattgaggaaaaattgtaatgtgattcataccattggtaacgggtagaggataccaaattcatcagaaaaattgattaattaatacaaaaatcaataaaatgactgacctctatatattgtattagtttattaattttatttatgtttgtaggaacttttgcgaatgtgaaagagttctagccgtctttgatatggccaagcacgtcctttgattatcttttgttaattgttaagggaaatttgatatattatgcttaaaagttaaaagtggtgtttaattaaaccaaaaatataaacatagtaaatatatgtcaatttttcaatattctcccaaa

SEQ ID NO: 190822 - DNA, 3221 bp, Cannabis indica
tcaattcttctgctgtagatgggtcatttgcaacctgttctttctcttcatcaatagtcttgttagtagtttcctgattctcagcttttggttctgtgatgttgtcatcagatatagcagtaaccgcatcctccttcgaatcgtctcctttgctgacagcaacagcatcctcagtagaaactttgctagcatcccctgcatctacttctttcatttccacatctttacctgcttcactttcctcctttacactagtttcgtcctttgattcaactacctcttcgtccccatcttcattatccttttcttcctgcttggaacctgattttttatgctttttctggggaggctcattttctggtgattctgtctcacttacttttgatttttcgcttaatcttctagaacgccttggagtttcacctgtacagagattgcatagtaacttcactagatatagatctttgctcaatttaaaagtgcacacatcaatttgaagataggaagaaaaaaggaaaaaacctgtgctccaattgaactcagaaataggggggcctccaggatgagacttgagatatttatctagctgtttcttactcttaatcgtttcccctgtaggtgcaataaatattatctcatttctccttggtgtcccagttttttttgccattagctaaagaatagaagtaaaatgtagaacaagaaattagtattaataatgataacagagaatattattgctaattatacacataaggtaagacatcaatcagttacaagcaagattcatttgtatatccttcctgcattcttaatctttttttttaattgttgaagcgaacattttaaattgttaaacctaactacaacccagggtgtagtagtccgtgtaccaagtgtgatataacaggacaatgaataaaggctatccacacaaacttcaatccaacacactgcatttaaatgtataggggtttaaacggattctgttctgtaatttagttaagaaatggcattattataaacacacttttgacattgtaaacttgcagagagaggaacagttttggatacagaagcagaaaccaagaaacaattaccaatttacagggcaaaaaggaagctgccatatagtaaataaaacacaatatccatcatctcccttcactttttttcctaaaaaatctttcagaggtagcagtagaaaatagattattaggatacacccataaaatatgatcctgcaaagagaacatcagcagggtttgtttgtaaatcagaacagactagcagaatctcctctctggacctttaactaaaacccgctgaaatacattggaatttatccatgatatgataaattggcaatccacttccttctctagaaatcaaaacaccaattaatattatattttcatatgaacactgatgtatcagagaaaaaatagccacagggaatgagattaatgacttcaccagaagaataataaaaaatattactcaaatctccattcaaccacattaattctttagagtgatccagaatcgaaaaaatccaacatgcatcactatttcacatatatctattttcccaaaaaaagaaatgctaaggcgggtcacaccaggaacaattgtcaatcccatcagcttaacgagaatagaaaggaaacacactgatgttttttccaataaaggttgcatttaacgcgaagcagtaaaagattccataacaaccatttttttccttatataaaatttaaagcagagatcctaactaaacaaggtcaggatgaaaagaaaaaaccactactgttcaagaaaagatagaaaaaaaaaaccctaaaaagtcaaattgcaaggtcaaaacttaaacgtactacaaataaagataaaaattcaatttatatatttttttttactttaaattaaaaaataaaggtcttacagaaatgcgtcatacaagagtacgacgagatttatcccaaaactaatttagacgtaaatatgaaagaaataatttgtattgtaagaaaaaaaaaataacaaaattatctcaactgcatttaatttatagatataataattaccgaaaatattaaaacaaacttcaaaaaattaacaaaatcgaacacaaatcaaatcctcaaccgctaatttcagctcctaaccccaaaacatttaaaattcgttaattacagtacacaagtgaatcttcagaccgaaacaaaaatagctacgaataactcactaaagaaagacaaaaatccaacaataccagtacaaatagaaaagaaaattcggacaaataagttgcaggaaaacaaattagggctaaaatgaaaccaaaaaagtttgaaatcaaagagtgagaaaaagagaaacgaagaagagaaccgaaccttcttggcccagccttcaggtgctggaaggtcgatcgagcctttttcatccttgttctccgccatggtcgccatttttttcgagtttcgactcgtgaagttcccgctcttacctcctctctctcctctttctctctctctctctctaatctacgcacaaaaatacaaaattttctagatatgagaaaagcgaaaacaattgcacgcgaaaactagaaaaagaagattcaatagacgagattatgtatttatagtaaggggaagttggtgttggttctcgctatatgaatgggcgcgttgaggccggacttcacgcgcactgtcttaagtgaaattgaattactcgagttacgtccggaaaattaaaattgtgtttctttctgggtagatagaggagatagtagagtcgtttgctcccaaagttgttggatcagtgaacagtagccgacagaatggtggagatcgaccgttttgatcttgacacgtgtaatcttacattacggataacgatatcaccacttcggtccgaatccctattttgtttaccgagcattatattaacactctatacctttttatttcattttttaatataaatttagtgttctaatttaaaccacttctaaaaaaaaaattgtatttggagggaaatttgataaatcatgtttgtataattggtcaataatttaaaaataaatcaaagttgaaatttgttaaaaattagtgctcatatttccattcattctaaaaatactcataacaaaaaattaaaggtagcaattcgtggtcgtgggtcgtattcagggccggtcctaaggtata

SEQ ID NO: 190823 - DNA, 3041 bp, Cannabis indica
gtcaaacctttacataccctcttgatgttgtcaggaggcaaatgcaggtaatgttcctcaagttctttcaaattactttttgaattttaggactgtaattgatgacttatatttcaacaggttcaacaattctcgccatcacacgccgcagaagttaaaggaacgatggaaatgcttattaaaattgcccaaaagcaaggatggaaacaactgttttcaggacttagcatcaattacttgaaggtagttgaacccccattctgtctacttttatagccttttccttctttccaggatttagataaaaaatttagctttatttcatacaggttgtaccatctgtggcaattggatttactgtttatgatcttatgaagctatacctgagagttccatcacgagatgaagttgtagttgaagtggtaaccaacaaaagaaatattcagccctcgtcccttcaatcctaatcagattttttcttctagatctaggaaagaaaaggaaggggaaacgttaaatgtttctaccatttgagttcttttagattaaaattgtaaattcaattctttggagttcctagcaaaacaattcccttctttggagcatctgtttcatagcagatttgggaggtttcgtccatgcttctatataccggggcatgaccaaggtttccaaaaaggaggatgtccttttgcgaagacgggattctcaatcaatgtacatagagatggtggaagcaaataaagaactaattgctgtgatgttgtattgtacctatgactgaataatgattcatagcagccaggcagacctaggtaactaggttttatgattaaattttttgtagatttgataaacagccatcctcttcgacggtggcttagtaatgcagccagcagattggaactatttcaattccatcgagtttttaatgttttctattctaagtatctggcagattgaaagtttctggcacaatcacaatttactgtttcatattaataatgtaacagtgaacttaaaataaaacacatgaaagatgcataaatcgatttcctcttcattaatttttagtgctcatgaacaattaaagattggtgtgtatagtgtcgtagttaaagactgataaccacacagatgacttggtatacagatcacagaagcacaaagggtgaacactaggtagccaatgttgtataaaagatatgcacataataaacttgctatattaaatggtgactaaaaaagttacaagaatgatttacaaccaagcattttgttaacttacaccgctgctgagtttcaagccaaaacttgtgtatgctctttcttggtacaacactagtaaatttcttgccaaacttactattactagtggaaatctctatcaattgtgcttacattgtcttcaccagtaatcaccacaggagcattttccgtccttgaaatgatggaaccgcttgttatctcgtactatcagttcccttccaacaattttggacatgatttttattgcattgtggcaatcaccacagatccggaggttcttcataattctaagagttgtccttgggggagtactgatcagaccataagcaatggcgaggcgctcgctatgatactgcagggcctgctcctttgcttcctcatcaatgtcatgaagcacatatcttgtatcaggcacataccctgcttccttcatctgcccatttaaacctttcaatttctggtatgcctcttctttgtaaggattagaacagcgaaactcactgaccctgttcttctcctcaagcatgtttgtcactgaagacctcttcctctgaggcaatgggattttatcctcattgaccttagaaggatcaatactaaccaataactcttcaacacggtcttcaagttccagattcccatggattcgagcaaaattcctaatagcctcccaaacttcaaaagtaggctcaaatggcattctctcaatgaactcctctgcttcattcaaatgacctgatttcccaagaatatcaataactcccatgtaatgctcaatttcaggcatagttccatattcattcttcatttcttcaaagtatacaaacccttcttccacagcttcagcactggcacaagcagccaaaaccgccagaaaggtttccttatctgggttcaatcttaccttcttcatttcttcaaacaatagaatcccatcattaccttgcccattcgctgctaacccattaatcatcaaattccacgagctcacacttcgctcagtcattctatcaaacaccttgcgtgcatctttcatactcccacacttcccatacatttcaattaatttattgcttaattccatatcaccacggaacgtaaaccgcttcaagaactcgtggacttttttgccgagttcaaacgacttggagtcgcgacatgaatccaatagcgcacaaaaaacgttgtagtcagcagaaacgccttcgtcaatatactttaacgcctcttcgatcttaccctggtgacaaagagctatcaaatcaacattctgctggcgaccgtgaaatgggtcgctttcattttgattgttcaaccgatggtcgttggaattgggctcattcggccgttggagctggctcttcttgcgcctctctgaaggttggagcttgttcggataccttgggccttcacgctcggagggtccgccgtagcgacgagagactccgtggcttttggcattggggacggcgtaggtacagataggcttggatgaggtgatattaagagaagaggaaagaggatgaagggttcttaggaggagaaagtgtgttgtggggtgtgagagctgagtgattgtggatttgaagttggaagacgatgaagaagaaggtactgtggagtgaagtgataacggagaaggagaagccatttctgcggagacccagatgcactcacttacagacaataatcaaagaagacactagcggacttatatactattccctttaccactatttcttaaaaaaaatatactcttctttttttttttt

SEQ ID NO: 190824 - DNA, 3169 bp, Cannabis indica
ctctttgaagatcaatagttgtaatctccaagtctcatttttctctccaaatatgtgcctcaaaagttatctagaccccatttttgaattaggttaattaaacttaattagcttcagatttcgtatgcaggtcgtgtggcatgagtaaactaatgtcttggttcgtgtctttttttaaaaaggctcctggtaccactttgaggagatgggtcgtagcatggcttcctcaatattgcaattcgtgtcaatatttttgggcaagaaaggtttccatgtcataacatttcatccaaatatagtggtctgtgtccaagacaaaataccaaatcttctgcctttttgggccaccacatgacttttactaagtcatggctcaatcttaagcccttcaaaaatcttctttcaagtcccgagcttcaaccaagttttctcaagacctttaaagactctgctttaagcacacggacactaaaattaacatttttcttcaattttcaattaattttactcttacccctctaaatcttcctcattcacaaaatttaaaaacacgagcaaactaaagcataaaagtgtaccaaatgaaataaaactaattaaaagaacttaaaaacatgactcaaatataacgtcatataacacctaacaaatgtataaataacatgttaaaaaaataatatttattgtgaggtaaaatttgatctgtattatattttgtattaaaatttggcacaatttttaacatgtgctaaatttagacactattggagttcacttttatgaagattgactaaaatatttctatgcataatacttttagaattctattggagatgcttttaaatcactactacgaattattattcaaaataatttattaaatttttttttattttagctcaaatttttacattacattatatatttataataattttataaatgatatttttgttaagttttatcacaattactaagtaaatattaatgtaattagtgttataaatacggatcagactttttcaacagaataaaaacttgacacgagcatgattaggcaaaaacaatatgggtgatattataatattaatattataattatggtattaaagctattaaaatatgtaaaagtaaatttatttatagaatgtaatataaaaatttaaatatttataagttaatatttaaattctaataatgttatttattttttatgtgattatggtaaaatattattgagaaaatttataaatataactaaagttataaaatatacgtattgttcaataattattaaaaaaaaaaaaatagtaaagtatgaattcaagcctgaatatgaaaatgaagtaatttgtttaagaaaaataggcaagtacgagggacaaatttgagtacgacacaaaattattatgcctataatatatggtagttgggtgagcttcttgaccttgtaagctccgctccgtgcacggacgagaaggtgaaaatattgggcgtggtttgcgtggtgctacaggctctggctccacctctactctctgctacccttttttttttttttttattttaaatttgttgcctggatataacagtcatttacttggtttggtcggattgctgagtaatctaatctaaaaataataaaatagggttcaagattttgtctaaatggcacgtttcgtctccatcttttcttaatttaatttattttgtcttcgtatttatagccatttaacggtcaatttttttttcatttgacttttatttgcagaaccaaatcgaataaattgtacaacccctcctcctttcttccttctctctttctttattttcaccccaaaactcgctacaatggtaagcaactttttccatacgatctttgattatattttacatttatctctggtatataaaattgccccctcttttccttaattcatgctccgatcatattcgattaggtttctgttcgtacctttaataatcttcgttcttttctttacttttcttttccctttgttgcatgcaggagtgtagatttacctattctaaattttttatcaaacaacatttttttttaattgtatgaacttttcgagaatcattgtcgcaattttttttcttgaatctatgcgggtaaattagtctgggttttcgttgttaatctttgggaaagtttctttttttttttatttgaaaggaaaaaaaaaaaactctttttgggtaaagatgtttcgttgcttagatcggattatggaaatcatgatgaagaaaacctttatttatatattttattttattaggtattatggataaatttgagttaaaaaatttacatgtatatttagattgataaatcgtaatttgtaaattgtaatcatttaatcatatatgtttgttaaattcccttgggttgtgttcttagttggatgatttgcttgaaaatttaatttttgaggatctatatgtagaaatttatgtcctttgctgttttactttgacagactacctcaaagcgccttgctgataagaaagttgccaagttccagaagaacattacaaagaggggagcagttcctgagacctctacaaagaaaggaaatgactacccagttggcccaattctcctcggtttcttcgtgtttgtggtgatcggatcatgtatgcaccctctaactatatgacattttctcatttctctctgattatttgacaaattcgtgttcgtggctggctactaagtataattgtgctatatttgtttgtcattttattagtgtgtgggacataatatcatgtcttgacctttggccttttttgggtataaattattgtttcggaacatgattgaataatgatgaacactaagacctctgtcatgtcatattgatgttgttactcattgtgaagcgaaggcctactttccacatagaggcaatgtatactcatgattcattttgttaatattgttgtacctcttctttttttgccacttaaaactgatatttgctttctttttcttcttgatttgcagccttgttccagataattagaacagctacaagcggtggcatggcttaagggaaatggcttcgcatgaaacatggaagtcttgtacttgtttgttgtactatactatgcgttaaagcatagttaaaataccatgtat

SEQ ID NO: 190825 - DNA, 1171 bp, Cannabis indica
tttttttttttttgaaattgatcaattcagacagccaaatagggtatagcctaatactggaattgtttactgctataggagcttctgctgggggaaagatgaatgcaattaaaccagggaagaatggtaaaggagggcttggtggaaggaagccacttggggaaatatcaaactctgctaacattgccccacctctagcacatgcctctaaaaagcataactccaaaaactttgcttctactaatgaagttgcacatgaaaaaagtactgctaaaacttcagacaaagtggagactcgtagtaggaaagccctctctgatatttcaaactcagtgaaaccacatctccaccaggctccaaagaacaggcaaaacatcaaggcacctattcttgatgattattcctttcccagttgcattgcagaggaacagtttcttcatgaccatcagaaatgcattaaagccaatgctgcttcagaaatgaatgacttctttaatacaattggactaaagaatggtatggaaagctttatcaacttcttgcattatctttaacttttgtttaattagttgtttgtttattgttgatctcctgttttgtttttatttctgtagtttctctgaaacaggttgattctcctaagagcttttccaagtcaatgaaggtgggtgcttctatttcctttttatcttctgaaagttactctattttttgttctttttaactaactaacaaattttttttaactcagaatcagttggaatttgtggagatacccgagtttcttgaagatgagtatctttggaaacagaactctccaccaaagactcctaaatcaccaaattacaacgcttcaaattctctagatgtttggaccaaggactttgattacgtcaatttcaagttgctctgaacttctaaacatgtttatggtttgatgcaaaagctcatgaacatccttgccttcaggctttgtcattcttagtcatgtcatatttttttctttctgtattttcctgtcttggtgtaaagatgtgtggttcgtcctcattcttggaggtgaatcataagtagatcagaaagttgaaagactttgttttgttgcgtcaatttcaagatgtttggaccagcgactttctttgattacatcaatttcaagttgctctgaact

SEQ ID NO: 190826 - DNA, 1175 bp, Cannabis indica
tgataaaaaactattttttgttctcacttttaaaaacataattctaaaaactaaaaacacaatcaaacaacttcttaacttcacattttctttaaaatttaaaaacaacaacgttcttccaacatgataatgcttcgttcttattctaataaaactaagatttatttatttatttattgaaaataatataaaaaaaatcataaacaaattacggaagaagtaatattaaaagtttacggattgtaacaaggaaaaaaacaagcaaattatgtaatttaaaaaaccaaaaacggagaagcaacggcaaaacaaaatacgttataattatattaaacgttattttttattggttataacataaatagacagaaaaaaaaaatagagaatttgagtccatccacatatgtatcattaatgccggctgtgaatgtattttctaattttaaaattttgttgtatatatcctattaataatctgacttaatgtatttttataattaaggaaaaagagaaaaaataatccatcattaattacatctccatatatactaacaacacagagatattataccttactaatagaaatccaaagtagaatataatgtaaatctgtttccaaaatagtgcatagaaattaaacaaaagaaatccttggtaatagctcccagataactctctatttctgtcttaaagattcattaatttataattaatgtgtgtgtatatatatgtgtatatatatgtaagtatatgtatacaaactgaattatccctttttaaaatattggacattccaataagctacagcagctgttggttttgctaggaaattaatataatctcacatcaatggagtattggtggtttggttctatgaagaatggtttattatctataatggtattggtaatcttatcagccatgcaactagtttcttcgagagatcaaaggtttcatgatgacatcaatattcataataatattggccagaataactgtgactttttttatgggagttgggtaatggataactcatcatattctcctctttacaatgaaaatagctgccccttcattggtttcaattgcctgaaaaatggtagaccagataaagactacctcaaatatatatggaaacccaacgcttgttatcttccaaggtatatatatatata

SEQ ID NO: 190827 - DNA, 995 bp, Cannabis indica
taaactaaaaattattttgaatgcggaaacactgcatcattgcatcccttataagttttatgggggtgcattgtacccattagtttattgaatcactgacaatatgtatgttttagtgtaccattaattaatttgatggttgtaattggtttatacttttataaatattgttacctctgtatgtatcataatgagctatgaaaacataatgcagactgtattagcatgtacatataatatttgtaggatgaatttgttcaaactggcagtggtagtggtagatcaaatgcttactaattgctactccagtttctttttcttatgcttagcagcaattcacctaattgggattcagaaaagatatgctgtgaaaaaatgatgttaaattgaatgaatggcttagaataacacctttccttttctctttggcagttggccactatagaatctagactaagagtaagacaactttgagtaataccaattgtcaaaccaaagccaaaatctaggaacaaaacgggcgctgagagatctccattggactgaaaatggagttcttggacgaggatgccaggcccaagttcctctttaaggcacggccacaacctgctccttcggccacagaaccacaaactcaccccaccaataagctatgcaacccaatcctcctcctcacagtttcactctcattccttctcttcctcctctccatcttcttcctccaatccgaaccctttaaatctctcctcttatggctctccttctccttcattttaggcccattcgcccctgcttccttcacaggcggtgacattagcgttggtcaaggtccggttcttgatctcccagaagagtcatcccaatctgatgaggaaaccaagaagaggggttcccagaagaggtctaaagttcgtcgatatgaggaagtgccagttgattcagtaccagtggttgaaaatcttaatgggtctgtgagagaacggaagaacaagaag

SEQ ID NO: 190828 - DNA, 1215 bp, Cannabis indica
ctaaacaaaaaaaaaaaaaagtaggggtttcgtttggaggtatatatatgtgacactcgaagtgtaataactgccattgatagctattttcatttattcatgattaataataataataataacatcgaatagaaagagactttttatgtcaaatgatatatgaagtttagttatagtattgaccaaagagacttgtatttttcatttaataaaacgcgttaaatattgaattgaacccttcaaagacgttttgatgaaaatgactccaaaaacactttctttggaatttggttattacctttagacaactaagcataacatgtcgatgtgttgaaaatgtggcattaattcatagagatttaaactagctaggtgtgttaagtttgacatgtgaacgttattttttggtgattctaacctcattcatgttctatcaaaaaaaaaaaaaccattcatgtgaatggcaatttttgtgttagagctatattaatatacaaatatcataaccaagtagataattagaaacatgaattgtctcctaggaggaaaaagtacacaacctttgcaaattcaaagtgtgaagagcccacctatttataaatatcatgtcatgatatcattactaccttgaaatcctcattcaaaattaaaactactaaattaaaggatttgaatccgtagtttttttttaaggagaggtataaaatcactccactataccacctcttatatggtaattgattattatacttgtcataaacttattttaacagtatattcctattgaataagaaagtaaaagagtagaagaagtagctattcggaaaatttcttttatcctagttactataggaaatatctaaggcaaccgcttctttatatttttttattccttattgtatgacatttttggtatcttttgcatctttttcgccacatttttgtcggaattatggtgtcatgaaattggttgttttttcgtatttcttttttaggagggtaataggaaaatactgacagaaaataatagagtatttctctataaaaagttctattttatacggttaaagatctcgtgacatccaattataagtcgagagatattatttttacaattattatcttttaaatttagagcactcccaataacttttctattctatcttttaaaatacctcagtaaaacttcattatctctattttagctcatacatt

SEQ ID NO: 190829 - DNA, 1702 bp, Cannabis indica
atgcatacaatataataaaatatttaattatttacctaattttgactaatatatatatatatatatattatattgctagctagttaacttactttagtggtaaacagttatttttgtattaattatggtaattcaacataaaaaaaaaaaaaaactatactataccttttaaaaacatagttgttttgctactttttatctgattggtatctagagttttttagtcctttttttcataattatatatttaactatttaaaattatttgtaaatttattgaaaattctgaatatataatttatagtgccaaaataaaattcaaacaattatttacacacgtgtaaaaaaaaataaacatgcaagtaatataataaaatattaattttatttttaatattataaattattcagaattttttaaaaatgctgattgaaatcatgaaatataagtgtgttgatatatataaatatatatgtgtgtgtgtcgagtgtgaatataacttgagagcaagggcagaccgagaatttggttcaatatgggtgaaaattaaaaattagagagaagagtaaacgtaaaaattaagacatgcataataaaaattaatttacaaaaaaaatattatagaagaaaaatacaaagtataaatgtaagaaaaaatattaaaaaataaaataaatataaataaaaaaacttatttattaaaatatcagagtgggtattgtattgctcaaatcaacaattacattttacaattctttatacactttccatcccaatactctatctaactatacaaacaacaaattttagttacaaacaattcctacatactcaataaccattgcatgtcttcctctttggttttactagggagaatccccaatattattagcttgctttcatattgaattctttgcactataatcctgatttgccatagtttctgattccataatacatcatttttagccctccatacatggtaaactaatccagccataactgcctttagcatactctttcaagctgatgaaaatgccttggctcgattgatattttgcagcaccttctgcaaggtttccactttcgacccccattgcagctacaatttgatatccttcaagcacttcttgctatattcacactcaaaaaatagatgctcaattattttttcttgtgtttcccacacaataaacatgtgtatctatgttggcatcaaattttgcaagtctttccctagtatttaatctttcccaaagggccagccacaatataaattgtgtttgggaatgattattctattccaaacagctctacccgagaaatttttacactattgttgaatagtattttcatatttttcatgtcgaaaatatttttaaaattaaccaattgaattagagtaagaagaataaaagaaaatcaaatatatatagacacttttataataatttcctagaaaaatactaagagtatgtttggaagtaactgaaattattaggtagtgtataattactagtaattacactatattctaaaatacaatgtgcgtttggatatgaggtagtaatttcatataaattcttaatatcatttttgacaaaatagtttataattacataggaaaataatatattttttagtagttagtatttaaaatggaaaatttttagtaataacacaatataattacactcaatt

SEQ ID NO: 190830 - DNA, 4658 bp, Cannabis indica
gtatgagtttcgattgttgtattggccattgaatttcatgctaacttgttgtttatggataatcctgtgaattatgaatcagtgttcttttttattcggttgaaacgaaggtaaagatgtcgagttttgtgggtgtcattgtttctgatccatggctgcaaagccaattcacccaagtggagctccggactctcaaatcaagagtaagcatttggcttttgtttttcattgttggttatgaattctgcgtttttagttgactttggattatgatactggttcctaattttttccttaatatgataaattagcaatcttagtaaaatgtgaaatgtgttgcattggttttagttcctctcagtaaggactcaatcaggtagagtcacggtgggagatttgccatctctctttgtgaaaatgaaggccttcagtgaattgttcaccgaggatgagattaagactgctttggaggaatcatataaggacgcgggagaagaaatcgattttgaatccttcctcagagtaagtcctttatagatgctcattttattagcttattgcttgaatcttatgttttgtgtaatcctgcaatgctaaattttatgtatacaatcaataggtatataacaagtaagcttcagtatcatatgaaaaggaaataagtgtgtggcactgtggtagatatcaaagtgcataataagcatcattttctcatgtttttggaagatgaaatgaatagaaataaacaactcttataattgttgattggcaggctcatttgagtttgcaaactcgggctacagaaaaatcaggtggttcaaaaagttcatcttcatttcttaaggcaaccacaacaactgtccaccatgcaattaatgaatccgagagggcttcttatgttgcccacattaacagctttcttgctgaagatcctttcttgaaaaaatatcttccaatagatccgtccacaaatgcattgtttgatcttgcaaaagatggtgttcttctatggtaggtgtgctagaaacaattgaaaattgtgattagtgattatcaaaaaagaaaaagaaaactgtaattagtgtactgtcctacttttcaaatttgatgatgccaattactgcttcatgcagcaaacttattaacgtagctgttcctgggactatagatgagcgagcaatcaacactaaagcagtcctcaatccgtgggagaggaatgagaatcataccctttgccttaattccgcaaaggctattggctgcactgtagttaatattggcacgcaggacttaattgagggaagagtatgttactgactgctagattttagttgaagttctgtttgtaatatatttttcttggatgatattagctttaaaacttctctctaatgtttgttctccttggttttcactctgcagccacatcttttactaggattaatatcccaaataattaaggtattcttactgtttcaatttgaaatcttagaacatagaagctattcattaaaagttgaggtaatgaggtcttaatgatatgatttttttcattcggtgcatcagattcaactactagctgatctcaatctgaagaaaactccacaacttgttgaattggtggatgacagcaaggttatgaaatttctattttatatccttctagtttgataagttcattgaataaactttttttcacaattcctttatcatatattctataatttatttacttgagatgctatattacttggcaggatgtggaggagctcttgggtttatcacctgaaaaggttttattgaaatggatgaattttcatctgaaaaaggctgggtatgagaaacaggttacaaatttctcttctgatgtgaaggtaagataatgcctctattttttattggctgttcactttatgcttaaacttaattgctgtaatataattttaagccaatatttaaacatgattcgttaagcttctgagatgtcatgttttgtattcatgaatcatgatggtattatactcgtttatatgcaggatggagaagcctatgcttacctccttaatgctcttgcaccagagtactcaggtcccgctacattggacaagaaggatccagcagaaagagcaaatatgattctcgagcatgcagaaaaattggattgcaaaagatacctgactcctaaggacattgttgagggctcgccaaatcttaatcttgcatttgtggctcagatattccagcacaggtaaggagcaacaattgttgtttggttttctgtaatgtcttggagctattccccatcgggcatgacaaaagttgttaattccactttattctgtgtgcaggaatggattgaccgttgacagcaaaaaaatgtcatttgctgagatgatgactgatgatgctcaaacttctcgggaagagagatgttttagactatggattaacagtcttggaattgctacctatatcaacaatgtttttgaggatgtcagaaatgggtaagcttttcattctctcccggcttctcaatacccgtatatgaatctgcaacatggttgagccatgattgagtgtattcctttattcgtatgtttctgtagatgggtccttttggaagttcttgataaaattacacctggttcagtcaactggaaacaggcatcaaagccccctataaagatgccgttcagaaaagttgagaattgcaaccaagttatactgattggaaaggatttaaattctctcttgtgaatgtagctgggaatgatattgtgcaagggaataagaagctcatactgggtaagtttgtaagaatttcccagtaaatggtgtcttattagtacaatcctactcatttcctgcaaccatgcttggttggtatgtgaaattttggaattttactgcaagtacttggattttatccatggatggtagagttacattctttttcagatgaaactccatgtaattttattctaccaagttttaagccttgaatttgatttttctgttgaaatgacgatttaactttggctattatatatatccagcatatttgtggcagttgatgaggttttctatgctcaaactcttgaaaaatttaagatctcattcccaaggtaagaaggggaaagagattactgatgctgacattctaacctgggcaaataacattgtgaagaaagcaggtagaacctcccaaatggacagtttcaaggtaaaaatatgaaaaatgacatcttttgctataaattttcatttaccatttggcctgggaactcatcatatatttatgctataggataaaaatctttcaaatggaatcttcttccttgagcttcttagtgctgttgaaccaagggtggtaaactggagtgttgtcactaagggggagactggtaaagtttcactatcaactaatctttacttctagcaccttttccatttatacatctccttagaatgataatgttttttatgtttttgcatttttattaaccattctattttgttattaaattgtcagatgaagacaagaaattgaatgctacatatataatcagtgttgctaggaagcttggctgctccatttttttgttacctgaagatattatagaggtaaattatttgtgccttcatggatatgaattattatactgattgcctcttttgtgtaaataaaagtaaagagtttataacaacccaatcggaaagctcgaacagtcaagtttgcagtgtgctgtttgctccctcaaggtttgaggttaaagtacctcttaagcacttaacattaaaaactattgtcgtgcctttgtttgccacaggtcaatcagaagatgattctcattttgacagcaagcatcatgtactggagcttgcagcaacaagctgctgactcagagaatgcatctgatggatcgcccacagcttctgtcggcagtgaaaatgaagcagctctgtccaatgaggtctctaacatggcccttgatgatctctcgccagaggttggagatgagaaatcaaagatggaaaagattgagccctctgaaaatgttgaaaatgaagtgccctctacaaaagatgaaggactagacaccgaagataaagagtagccaaaacatagaaatgttttttttttcccttttccatatatattttttaattactttctcaaatgaacaggatctagaggttttttaattgcagtttacaaattcttgcttgctctaggtggaagagagaatggttaattttaatttgcttgtgaaccacagaaaaaagaaagttagaaaaaagggctactgtaaattttgattatagatttttgtttctaggtctattctttgaaaggaaattacattaattttgccgaataatatgttggctggagaatgcattattttcttgtccaatatcattgtactgatgacagacagtatattttttcattcaaatatacaccattcattattcaatgtcaatattagtaaataaatgatgcaaaatcagcaatatgtcaaatgtcccttgacccaaaatcagcatgttatgagttatagtgaaaatctaaatgtgtgcttatgcaaggctggggttaacagaataagaagaaacaagattgaaaaaacaatcagtaaataaatgcattttta

SEQ ID NO: 190831 - DNA, 2853 bp, Cannabis indica
actgtttatctttgttttttcatagtgcaacatcagtagtgatggttttattatcattattaatttattatcaagtgcaactcaattaattttattattgtatatcattgaaaagaaataaaaaattacgctcaatattaaaagggatactgaatgatatggcgaattggtgattaacaagtttaatattgttttggagtatgagttgatttggtaaatttatttattagcatttcattataaactttttctggcaatattgaaggggtatggggttgcacatgtgacagatcatgtatatatagaagtgaagttagtattagtatttagtaataaggtaaaaaatcataaacatgaaaaatttaaacttaaattttcactttcccttcagtcaccatggataatccgctgtactaggaaccaaatcaatataatatcccttctttcagtttagtaggtaagtctttcttgggtttctagcaattgggttaaatttcttattggttgggaaattcagttagaagacaaacaaacaggtttagtttagctccaaacttcctatataataattgctatcaataagtagactattcttcatatctgccagaatcgtactgtttcaccattgactgggcttgttgagtatttcgggaggaaaaaaaatggaaagaggcatgattcaacccttaattgcagttttaatctcttctttaatcgccgtcagagcttaccggagaaagtccctcaacctatccggagctcttacgggctttctcgttatgaccattcacttcgctgttggatacaggtatatatataaatacacattttcaatcctattcttttctttttatgtatccataatcataaccataatcttacatattatatttggttttcactgtttctttcttcattaatctttcaaaggtacggggcattgatactggttttctttttcacttcctctaagctaactaaagttggagaagagaaaaagcgtcgcgtggatgctgatttcaaggatggcggccaaagaaattggtaatcaacgtatttcagttcctcaagccttgtttcttgctagttcattattgaattgggtttctgttttttttttggaagggttcaagttctttccaatagcggtatttctaccatattggtactgattatctggagagtgactcagtgggaggacaagtgcttggactcaaagagttcgactctggttacatcgttgattggtggggtgattggtcactatgcgtgctgcaatggagatacttggtcttctgagcttggagtacttagtgatgatcaacctatattgatcactaccttcaaggtccaattttcccttcttgtcctaagttttttttcgtttttcgaattcatgcatatgattttggcaaccaactaccttatttgccattgccactccctttttttgctactgctatttggttttgaagcttaaatgctattcctcttgattattgtatcattattattagtagaagaattcttaatagtatgttctcccgttaaacccagacaattctaccactctgaaacattgttaggtaggtcaacacgaggctcctcttgatcattataagcacaacctacacatacatatttgaaaatgcttgtgttccaatcgagtggccctgtttaattgatttttggacacactacaaattccagttaaattctaacagtctgcctttggtgtctgtttcaagttctgattaatcccatatgcatttcaaaaccgctgtgtattatttgttctttctcttttttcttttttgaacttaatattagtcttataagagtagttttgaatttagtttatccttagattgggataaagtgcaagtagaaaacttacatgtttaacttggtttttccatggcttctagcctgttcgcaagggtacaaatggcggggtgactaaagctggactcctagctgctgcagctgcaggggctgtagttggggtaacgtttgttgcctttggatttttcactgctaaatgctcatataatatagttataaagcagctactggcgatacccctttcggctttagctggattaactggtagtttgattgattctctactgggagcaacactgcaattcagtggattctgcactgttcgtaataaggtatgtcatatcatatattttggtctttaccgccattagaactgaagtaatggatggtaaccaaactagaaacaagaatttaagaagcaagttcaaataattattccttttttttttattttttttaaacaagcacactttttcttgaagttttgttttttggctatgattttaggttgttggaaaaccaggaccaacagtgaagaagatttcaggtcttaattttcttgacaacaatgccgtaaacgctgtgtcaatactgctgaccactattctaacttccattgcatgcgtatacattttctgaaaaccatgaggtaataagttcatagggttctgaagaatttttacaactgatatctcttatctctttagtactaaattgcttacttcctaagcccatgaattgcagagattagtttatagtttctggataaatggggctcaagtcatattgataatttgatactattgtaataatacaagaagaggaaagccacccttgatgggtgtattttgaaggacgagggatcatgcaattcctcttctcatttttcttattttctgcttaacatttttttttagtgctttataataagacttgaaattataacataaggcaagagattcatctcgttcttcatctcttctattgtttactaaccaatggtaagtg

SEQ ID NO: 190832 - DNA, 2267 bp, Cannabis indica
ctagatttcaaccacatttctttctcctctttaaacactgataggctctccggaatatataactggaataaaacatcgagtaaaatattgagtaatgcaaactctttatgaccttgccaagtcaaaaattccactcaaaataattgttcacgtaattgtaaaccaaatatatagtttaagttaaaaataataataataatattcattttaaaatgctgtcaatttataactggtagaattagttaaacaaaaattaatgtaaatcttgtggtaggtggtttcacagtttacagggctcaataaaaaggtaagttgtcttgtaaaaacagcaatatccaaagtacgttttgctgaaattaattctaatgagaaaaaacaaaacacatggaaattactcaaactttgggggggaaaaacaactctttcttaactccattccacaaattcttgatcctaaactatgtggctgaggcataaggttttatgcaactaacacattaaatgaaagtttatgaataatgtacccttgtatcaacaccaaaagctttaataaatctcatcttccgggacatcgggagtcaagaatttccttgcatctttactgatgtcgtcataagttagtcttggcttcaccctttctggtacaggcacaagaggaataatgctgtctctatcaataactccatctaatattccatattcaactccttctatgggagacatgtagcgatccctgtcgatatctttctggacttgttcgaaagagcgaccggtgcaatttgcaataatactggtgacattatttttgttatgcatgatttctcgggcttggatttccacatctatggcctgtccgctagcacctccgagaggttgatgaatcattattctagtgttcggcattgcaaagcgtttacctttagtacccccagcaaggataacagaagctgttgatgctgcaatgccaagtgcaattgtggatacgtcagccctgacaagctgaacaacatcgtagatagccattgtagcactgaagtacataaaatcaagaaattagcgaggcaacacagagtactgatgtcgaaacaatacgaaaaaataacaaatctcaataatcaacctaaaagtgaaataactgggtcaatgattaaagataaagaaaagaaactacataggatccctgcttaaatctacaatatttagggaccgggaaactatattaacaattgccctaaatccacaataagtctggcacacaacacaatgaagaagtaacaccttggaaagcctaagctgtgtaatcaattaattgatagcactgataaggggcaaagtgccatcggtctgcaaccacaaattcagcgaaacactcaattcgggcagattaatacctgaatggataaaaaagtttgcaactagatttacttgctctaagtggctaaaactagaaatgacttggcatagctgaaaattgttaactttaaaccatatgcatttatgtaatggttcgttacaatttcatgaatgcataaacacaccgaaaactttaactttctcatcaagttttgaagttctgactgctcttatctaactggaaactacaccccacaaacaagagaccagagatgagttattcaacaccaactcacgagggcttaagtgcggtggaacaagcaaaacatgctggaaacaattacaaggctagatcaatccttgactaccttaagacattttttttccttttaactaggctcttcatctaggttctaaccccaacaatatttgaggaccgaaaacctctatcagttgatatctaagtagccagaaggaacttgaacctaacaccttagtaccttactccatgcctgaccatttaagctacccctcttgagtgaccacattaggccattaaatacacaattggaattcataatctaagacaaaagggttctcaccataagcaatcagctcagcaaacttattctagtgaaaaatttcagctaaatagggttaacagcaagaaattgggaatcagctagttagttttaagggcgtctaattacctatgcacatatatatgacaattcaactccaagcagtttaatccattaaaagagctaaactaacaacaaacaccaccaaaatcaaacattttatagattcttgatttaaatttaagcacacccataatcactattcccaatatacattccatattcaaacccaattcaaaaaattgaacctaaaattaaaactaacttatacaa

SEQ ID NO: 190833 - DNA, 3440 bp, Cannabis indica
gagcaatttagtttaaattttgcttcagcagatgatcttataaaccccattattttagacttagagaaaatgaagactttaagataatctgaaagaagttaaatttaaagaatatactaaaattgatgactttggttaataatacaatgcaattttcaaagaaaaatggtaaataaaatctattcttttttctctgatctctttgctgatcaaaaccagctaaacaaaaattatacttgatgacatgacagaggcactgtaaagaaaatctattctgtttgctcagcttcaacttcaatttcagcttcagctgttcttttttgcctttttctctttctacttctcttgtctaataatcctttctctgctagtgtctttcgcttctgttttttccgttctttggctttctcttcaaagccatcgtccctcattttcattatcgccactcgcctggcactgtaaatctgcacatcaatgtataaaaataatgagcacatttcgaaaatgagagatgatatctttttaattgtttggtcaacatgccatcgatcgaaaagccgttcatatattttcagaacaatcaacatcaccagctttgcattcctaagtaactgaacatgacatttaaaaatcacatctttgccaatgccatgaaaataaaagcaccaccaagatgtcaatggaaggcataaccattaaaacaaacttcctagtgagttgataattaggtgagtgataaagcacaagccttttcagcatgtacttgataacaatctacaatactcagatccatgatccaatgtctaatcaaggagggaaaaaaagaaagaaacttagaagagacttttatgaactcttaattgaataggtaatgaattagataccataagtgaaaactaccctttttacaagacagatcaaactttacctttcttatgtcggaaagcacctcgtgttctttgcattgaaattcttctaattgtttcccaataacagcttctatttcgtgaacaaggtctacatcagtctgcaataaagcaaagtataaataataatattaatttaaaggtaaaaattgcaataaaaatcaatgactttacaaaatttcggttattctacttacttgggaaacaaagctgatagccaaccctcctctgcctgcccttgctgtacgtccaacacggtgaatgtaatctcttggaaacctggacgagagcgctgttagattttacattaaagtgcttggcaaaaacaaccccataaaagaaaagataagaatctaaacaaaaaccttggaatatcatagttgataacaagatcaactgttggaatatccaaaccacgactggcaacatcagttgcaagcaatacgggaacctttccagatttgaagcggtttaacgcagtgagcctgaggggctgtgaattgaatgaatgcattgccacagctgtttgatcaagatgctcgagtaataaactcaattgatgacaagttctgcaaccatattaaacaacaattcattgattgaaaaagcactcaaaggaaaattctaaatttcatggagcaatatcttttaatgttaaagaagatcaaagtaaatggtgaaaaaaggttcagatttttttcaaggttaaggactacctgcaagttgagacaaatatcatggcagaccgaacacccatatcttccattttagacagaatatgaaccagataaacatccttgacatcattcggtacaagaagatactgctgcttaagagtatcaactgtcttaaacccttgatattcttcataaaagtatgccttatttggagaaacctccagtagtgcctgaaggttttcagtcattgttgcagagaacaacaaagtttggcgtttctttgggatgcactgaaacaccattcttaactcctcttcaaacccaacatctaatactctatctgcttcatccaaaaccagaaactgatgcaaaaacagagtaaatacaagcagtgagttcacatataataatgcaaaatctaaattcttctaccctctaccggccacatgcgacaattaaaccacttgtttcatgaaatttgcaaaactaacaacatgaaaatgttaaattagtaaatttatatggtcgttttgtgatcagcatagtgtaatttctggtcacacaagcaaaacgttgttattttgctaataaattttttcataacggctatttttacaaaaagaaaaactcttactggtttctaaggaaaacttcgaatacatgatttccaacatcacaaagtatttgcctagatcaatacaaggttacatgagcttaaatacataaacactaaaaacttccaaaatcattcttggagacataatcagagatttctggactaaaatattttgaaccaaaaaaaaagccattttcacctttagtattaaaaccaccactttctaaggaaaacacagaataaataactcccaacaacacaaagtattagcttgattcattacagacagtatttttgtaatttttttttgttgtttttgtgtttaatttttttttttgggaaattatcccttcattcattcttagagacataatcataaatttctgaactaaaaaacaaagcttcttctttaccttagtattagagaagaccggaggaatctcagaattctcaagcaagaccttaagtctaccaggagtagcaataaccacatgaggcctttcaaccaatttcttcatctgagtaagcatatcttctccaccaacaataacagcacaacgcaagtgtacagccgaacccaatgccctaaactgctcagccaactgaaacgccaactcccttgtcggagtcaccacaagcgcgaaaaccccataaggatccgccgtcagccgatgcataatcggtagagcgaaagccgccgtctttccactaccggtctgggccaatcccaacacatcccttccggcgaggattttgggaatgcagtgagcttggaccggcgtgggtttcttcatcccgagttctttgcaggtctccactgcccattctgtgagtccgaggttcttgaaagttgtggtggtgggacttggatcggcgtctgtggacctctcgaagtgtggctctggattggaatcggcggcggtaggtttgggtttggagagaggtttagggttattggagggtttaaaaagagggaaactttcgtttacttcatcttcttcttccatggttttgatggattgagtagattgaaaattggaagaaccagaagtgagttaagtgaatgtatgtattgaatatcgattaatagttctatgaatttttcttgtatggttgaaattttctgggaaaatttacatagaaaagttttagggtttaagatttctcccgctaatgacaatacctaacctaactaagtaaaagtttcttttcttttttttt

SEQ ID NO: 190834 - DNA, 5722 bp, Cannabis indica
aatagtttatgttgaatagataataatatgaacgtggcaaatactattttagactatattttgtaaaagttagtatttggactttttattttgttaatcccgtgtttttcaaaataacacaaaataaaatttaataataacttaatttagaagtgttttgattaaattaattatatatttttgtatctatttacaataggtcagttataattttatattataaaaataacgaaaattacaattacaatctattacataattaatattataatatatctcaaaaaaaattaatattataataaaaatataattaaagaaacttaaaaattagaaagtcagcctattaaaataaatttattcttaatggattataaggagtgtctgcctatgttttgtgctctgtggcagttgaatgtcccatatgggttttaaccgtttttccttcatttcttcccagtattgttcagtttctttagcagttatcttcattgccttcatccttttctgaattctgtataatttttatcataatactatttgtttctttcccctgttcttgccattttcgatttttacgatttccctgctaattcaatggatccattactgaacaaaatgaaagcaaaaatcaacttaactgaggatgaagaatcagtttttgagtttcatgacactgaagccgcctcacctcttatctcggttgacactgtgttatatgcgaaaattctcaccaaaaagaaagtatggctctccacactgcaaaatcaaatggctgagcattgggatggaagattccctgtcaaaatctctgaagcaatggacatgtttatgcttactttcggttgtgaaggtgataagattcgtgttcttgatcgagagccctatcattttcaaaatcaccacatcgtcctgtacacaccagaggttgggaaattttttacctcagatgatctaaaatttactcccttttgggtgcaaatttatagactttcgtttctaagtaagactcgatccttggctattgctcttgggaacatcataggggagtaacaacaagtgtaccatttttcttgaaaaattggataatggagaagaaccattattggaatatcaacctttcatcaaaggatctgccttaccatcttcgggatatgatcgatatcgtattgattttgctaagggtgatgcttggccattaatcacaaggcttgccaagaagagtttcacctctgctattcctcaacttaacaaacgttgtctgccacaacctagtattctgtatgctggggagtcatctaacaataacaatgtgggttagctaagtttgctttagggttggatgcagactttgtttggataggagaaattccctatcctgttttctctgatgttgtaaatgaccttaatttataataccagtgaaatttctacaaaaaaaaaaaaaagcttaggtaaaacttatttatcatctttgtctcttggaaacaatgatggtaaatcgagcaatggataaaattggatacagatatcatcaaaattaatgttaatgcagttttgtttcacaaaaaaaattcatatggctttgagattttggcaagacataattcaagaaagcttttaaacttaaaagtcgtgtatcatgaaagtttacatgcaactgaggttattaaagctatgaacattaagaaggcactattaaaagaaaatagagattaaaactgattgtataattacaatacaagacattcatagtgatcaacgaatttggtttgattatttataattgtaaatctttacattttcattacaaaatatcaggtaaaatatttataacaaattcaataagagtactttactatgtagctagacactcgccatatttatctgattatagcatttttgaacacaatgctccgacaaattttcaagccctactctactttgggctaaatttcaataaagttactattttattattttattattatttttttaaaaaaataaaaacacaaaaagaattgaagtaccaccttatattcactcaatattgcttagcaagtgaaaaaagaatccatagaagaaactcttcttacataagaaaagacaaccagtcaaagtcaaaagtcatttctttctcataaccaaaagaccttgtctcattcttaccatcaccatcttcatcttcatggtcaatgaagtttccaagctctggttctagtgttccacagcaactgtgccacttattatcatcatcacttcaccaccataatcattacttacgcactcttctccacttgaaacaaactcacactctactactcaaattctccactactcactctcatcatcatcctctcagttaccatcttttactgcctcgattactctatcagctgcttcttctccaatcccctcctgctgctactgctgacactctacgttatgccctcaacctgtttgatgaaatacccaactgtagaaatgagtttatttggagctctctaatacgttacaatgtggtacttgataagttcaaggaatcttttgttttgtatgctcaaatgcaacgaaagggcgtttcgccatccgggtttactttctcttcggtgctcaatgcttgtgctcgctttcctgcaatattggaaggtagagaaatcaatgccaaggttgtacaaactggttttttggggaacaaagttgtgcagactgcgcttcttgacatgtatgcgaaatgtgggtttgttagggaggctagagatgttttcgataggatggttgatagagatgtgattgcttggacagccatgatttgtggttatactaagaagtgtatgatggaggaggctaggctgttgttttgtaacatggggcggcgaaatgttgtatcttggactactatggttgcagggtatgcgaattgtggtgatatggaagctgcgaaagagttgtatgatgaaatggaggagaagaatttaatcacttgggtagcaatggttgcagggtatggtaagtgtggtaatgttatggaagctcgaagagttttcgatgagataccaaagcatgatgcatcttcttgggcagcaatggttgcttgctatgctcagaatggttatgcaaaggaagccattgacatgtataaggaaatgagaaaacaaaatgtgataatcaatgaagtggcaatggtgggagctatctcagcttgtacacaacttgtggatactgatacggcagccaccttagttaaccatgtggaccaagggtgttgttgtaggttttttctctctattgttgtactattgttattgttttgtcatctttgttgatttgttttatgttctaaaattgtggttttgatatcttgttttttgtaaaaatactttttaggtagatcactttatgtgtccaatgccttgatccatttgcactcaaaatgtggtaacttggatgaggcagtgaaagaatttaatagaatgaacgaaaaagatgtagtctcctacactgcattgatcaccgccctcggtgaccatggaaaagccaaaagagctttgcaacttttctcaaagatgcaaaaggatgacataacaccaaaccaggttacattcataggagtgcttaatgcatgtagttttgcaggcctagttgaagatgggtgtcgatattttgagctcatgactcgggtttatcgcatcaaaccgttgaatgagcactatgcttgcatcattgatcttcttggaagggctgggctacttggaaaggcatacactttcattaagagaaacgggaatgcctctgatgcaaagatatggagttctttgttggcatcttgtaaggttcatggtgatgaagtattagccaagattgcagccatacatctgttcgaaatagagcctgagaatacagaaacttatgtgcttttggcaagtatatatgcagcaatgaataagtgggatgatgctgagagagtgagaacgatgatgattgaaaagggcatacgaaaatctcctggatgtagctggatttcactcatgagatgaaaaaccaacaattaattttaactctctctcaggactggatggaggctactggttcagtatagttcctgctactccatcagcatgaaaatcttactgttatttttccttgttccatatcaaatgtggagcaaggaattactgtgatgaagcagcaacttcttgaaatgttagttctctatgcttatctcggaatataatgccgtagtttgaactgcttactatactatttttctttctgttatacaaattttgctttttccaatgatgcagttttctttctttatgcaaagtaaaatagagatcagggaagtccttgcctatcattacaacacaattttgaaattgcagaaattgaactgttttgtgtcctgttcatatgtgatgatacgatctatagggggaactgtagagttttatgcttattgaagcttttgaattcatattgggaaatgaaactagaaaaggttaatacttttttttttctttattatgtataataactttgagaaaacaggtatttgacactcatcttgagtatctagcttgctgcatctgcagtaggcactctctcataaatatattgtgcaactccatggtactcaatgttaacttcttttagtattcaaatgttgcctttctgctgggtgctgattgaattccaatttatagtcattacttaagttcttatagccattcttttctagaaagtctgctagttacctgcaagttttaaagtatgtttagctgattttactttgtatttaccaggctttggtaaagatagtcaaagttgaagaaaaaccatcaaaagattggggtggcgagagtgcataccgttatttattggcggatggcgagggcttcctagccacaaaaaattgctactctaacaaaggtaaagcatcctatagcacaaatctcttgtaaaccaacatcattgtatttgtacaatctctttggtgggttttgtttgttgccttgtccctcctagtcttgctcaaattttttttgtttgatttggaaatatcaagatcagaatgggataaatctggccatgaaaaggaattggaaattagcatcagagcaaaatacaatgcttgggttacaagagagaaggagacatatatggtattttgttttctcctttaagcttctaattcattgagattctctgacaaaactaaaagcttattatatcttattttgaattatgcagatattgcaatgaagtttttataataatctatgggattaggaggatattcatatggggccacactctttaagagtttttttttttcctttggttgatatgaataaataattcatttgacactctttgattgtaagaaaaagaatctattttggtgtataaatttatcaatttattgatataccatattcccctctatctctctcacacacccacaaacctgcattttttctgaaatcgtaaccgaacggtccaaattaatctgactatcgacaccgaattcgagaaccatgcctattcctaggtattggctaaagaatgcaaacaaagaagattaaagtatatcacctcaagttcactcaatatttattgcctggtatgttaaaagatccatgaaactcttacaagaacagataaaccagtacagttaacacctttaattcactcaatatatgccttagtaagtgagaaagaa

SEQ ID NO: 190835 - DNA, 2183 bp, Cannabis indica
cttattgtttaattaagatcataatgtatgaatagtcagtttaaatagcataatcattatttttagaatttatttttactcctcaagtatatatttagaaagtgaaatggccaatttttatataaaaatgaataaaaatagcatataagaataaagttcgtagtgtatgaaaagtgtttatatgaggtagttgtgtaagttatcttattcacgtggtgacataggaacttggtgcggtttcactacaaaattattttgtttgatcctacaaaacaaattagggaatgaaatattggatcatcgttctgtcatcactacttgcattttaagtattattaaatattatgtttatattattgtatattgtaattgccaactctcatacttttatatctttctcaacatttgtatctgtaaagtgctctaaattaataattatcagagtctaattctcatattcagagctgtaatgtaatgtgaagaagatgaatatgaaagttatgactgtcttgtttgttgaataatatgcactaaaaaagtgtatttatagtgttacgcagtaaataagtaaaaaaataattacaatcgaatataactaacaaaaacagttggaactattaacaactatctaatttaattaactaatttcttgacagtccccttcaaacttaagggagctttggaagcaacattaactttggacctaagatcatcaaattgagagcttgagatgggcagatagtcagcaatttgagcatgagtaagaacatatattcacttgaatctgatgctaaaggatcttgtcacgaacaaagtaaagatcgatcttgatgtgcttagtccttgcatggagcacatgattagcagctaagagaattgtgctttggttatcataccgaatcgagggaacaccatgagcatgcacatagagttcccgaagcagagattgaatccaggatgtttcagagacaacattagctaggcttcgaaactcaattttagtggaggatcgagaaattttgacatgtttttaggacttccaggctattaagttaccaccaaaatagatgcaatatctcaaggtggacctcctatcatatggatcaaatgcccaatacacatcacataagacttccaagctaaaatttggaacgagtttgatgtgtagaccatagtctaaggtggtcaaatgactatattaaagtttattctaaaatttatcctttataactttagaataaactttaatatatcatttactcatttgtggtgaaatgactatttgcccctagggcccaaaatcaacacatttagtgatcaagggtatattaatcatttccaattttacacatggtccccacacaagttgagataatcatgaccagccattagtgtttaattttgcaattattttatctctttttttctaatccatataatttaaatcctaaccttaagtgaaataatataaaagaaataggatgctctcattctcatccaacctaataacctaatttttattctgtcaaataactaaaaaatttgagagcctcctttcctttactaatttggaaatcctctctctccctcttcataatttttaagactatagtgaaagagtacatgcccacccatagcaagtcaagtactcaatcatactgtgaagaatccaacacttgaaggagaatcgggctcagatcttgttaatactctgtgacagaaaggaacaaggatttgagatctgagtgggaggagacatgttattctgctgccaccaatgtaaggttacttaaactttatatgtgtttaattccattattttagagaattcttatttaaggtgttaatcaacatacttgttagtaaatatagatcttggtaaaatatattacaacaaaatattgttaggatacaaacacccattaccataacagtcttctttctcacacaaaaagtggcatcttgtttacttaccactctaattggaccgaatgtttggaatccatatgctaatctaatgctaagtccccattagtgggttcattatgctcaattaatcaatgggatcttacaaataaggtccacaggtaacattttctataaatagagcaacaactccattgtataaggttctatcttttttcagttcttaagctaagacgttattgaaatagagaatagct

SEQ ID NO: 190836 - DNA, 5330 bp, Cannabis indica
  modified_base (5292)..(5292): a, c, t, g, unknown or other
gcacagtctttgctagatatccttttagcaccaataggaacccctaagtatgtaaagggcagctcctgtttggaaatgcctgaagcattagtaattctattcaattccctctcagacacattgctgcagtatatgacagatttggttgcattaggaaacaacccagatgtaagtgaaaatagcttgagtccctggagtagatacatcacactactgaagtcactataacaaaataatagcacatcatcagcaaagctgagatgatttagcttcatattctgacacttttcatgatacttgaagacaaatttcatcccaactttcttcataattctagacagatattccattcccaaaacaaagagcaagggagacatgggatccccttgtcttaaccctctctttcatgcaaagaatccatgcagagatccattaaacattaaggaaaatttaagggttttaactcaatccataacaaggtgaatgaactggggaggaaatgtaaaggcttttaaaatttcctcaataaagcccaactctattgtgtcataagccttttgtagatccaacttgatcatacaacaaggcttgttagctttccttccataatgtctgagtagatcttggcaaatcataatgttgtgacctatatatatcgacctttaacaaagcctccttgattgtgtgcaacaaaatcagggaggatatgcttaagtctagaacatatgagtttagtggccaccttataaatgacattgcagcaagcaatgggtctgaaatctttcactgtgtttggacacttgaccttaggcaccaaagtgagtactgtagagttgatctcttttaaaatctgccctctgcatcacagaccacaaccccacaatatcccaattatcttgaaagaagaaactagaatatccatcagctcctggggctttaattccaggtatatcaaagactgcttatttcacttcctcacaagtaaactgtgttgatagaatagcaacctgttgtggtgtaacagtaggccccatttccatgacagaagccatcactttcttcctgctctacatactagaacccagaagatcagtataataactcaggaatgcatcagtgatcttaccagggtcttagattctagtgctatcagcttgttcttctccctttgatactagcatggaaaattgcagtattataatcaccagcttttatccatgtgatcttggctttctgttgaaggaagaaatgatagtcattctgtttctgcactaacatttgcctaacttctagttcatgtccctgcaattctgagttcagagggtcatttctcaatgcatcttggaatttctctagtctttctttggccctgattgtatcagctacaacatcagagaatccatctttatttatttccttgcaaaccttcttcatttccttaaacatgcataccagctggtacatcctggtgccactatattggagttcccacacctctttagcctgctgacatagtctttagtgactgccacatccaaaaatacataaaaggttttttccctaagtccatgctaggatgtatagtcaaaagtccaggagagtgatcaaaggttccctgatttaggaataatacctcagagggtaggcatctatccaagatttattagccaacactagatcaatcttaaaaaaattctatcctcgccctactgcttattactccaggtatagaagcaccttgaatactttacatcttcaagattgcatctctcaatacaatcaatgaactctctatcaacatggtacttgactctttgcccaattctctcttctttagccaaaatatcattaaaagtcatccattaccatccatctgtctgttatgttgcattcctgcaactctttccataagagcttcctgccttggctatcattaaagccatacacaatagtaatgtaactagtaaacatgtcccccatgctctgaacatatagatgcatagattgactagtacatctcaatatgtttacctaaagatcatcaggtcccaagctaaaacaatccttccccctttgtgtcagggaacatttaaaaagcaccaccctgtgaatatgttagagtataaggccccaagtttcttggcctttacccttgtcttgaggagatcaaccaatcccacatgttgagccataataaattgtttaatataactttgcttttgagggttgttggctcctcggaaattccagcataggactttatccattgacaagagagggacctcccccctctcttgtcttaacatgttctcccagtgcttcatctgtttgcatatcagcaagagtcttgccttggttatcctcatccagtgcttgggaaagaattccctatctatgttacaacttcgacagttttattcttcaactttcctatttttgttacttgttggaaaccctcattgtcaatctttgaagcctcagaacttgcttttggtcttttatcctccttaaccacccattgtgccttagtctctccctttggccttttgttttgggagcttaatttaggttggttttgttggatttgcttgagttgggctgctgttgttggtgttgagtaagcatgaggtcttgaactcaaagcttactcaataatgggaagtttggtttttgtggcttgattgtgtttttatctgttggaatatgttttatatagtgtaaataggtgttctggaagcttgtatgagatttgggtttgatttggttcaaaaatgagtttttttaggatttttatagcagaaaacggcagattgtttctaaaaaaatagtctaccatttttactggcagagacctagaaaaacagtctaccatttttagagaaatggcctgctgtttttggggaatttttccaattttttttagcatttcctcgatatttagggtattgcctcactctttatcgacaggaaaacttttagttttaaaattaagtccctgaaattgatttagcgagtaacttacgaagtttacgtacattgtgacttagggccttaaatcgtcaagcatcagtttccactcagggttaccagcatacttgcattcagattcaaggtaagattagtataatagttgcatatatgtatacatgtttagcatcaatgtgagttgttgtcaaaataacatattagggtatcagtgaggtgtacatagagttgcactgaggtaccaatagatacatgttaggcaaatctgtagccatcagattagcatatcaggatattggtgaagtgtacatatagttgcactaagatatcaacagatatatgctaggctttcagaaagtatgaactaactactaccacatcagtccgactagagtactaagtataggcaggattcgtggttagtcatactttagtcaagaacattcatgacctagttataggatcatgactaagtgtatgtgcgtctggttatggtctggttatatgtttatgtttatgcttttcttactaagtctatcgactcgcagttattattttcatgtgcaggtaagagctagagctgaaccagaatgagtctagagctagatagtgattgtacatatcaagatgattaaacttagagtgttcgggtcttcgggatagtttaggctcactttttgttggtctttgggtggcaacttttgtataaacatattttgaaaaaaattgtaagcttttgacaaaattccagaattatgtaaattatgtttatttattaaaggttaagtttatttaaaagtttaaatgaatcacgttttttaataaacccctttgattagcgaaggtgtgcacagtaattaagaaagcacgataatacacttaaactagtaggacgttacattttagttttgaacttaagtaccccaaaagggagtttagtcacttaccagttttatgtaaattgtgacttagggcctttaaatcgtcgagcagcagtttctacttaggttgaccggcacacctgaattcagaatcaaggtaagtttagtataacgataaacatacatacatacatatttagcgcgtatgtttttatgtttgcctactagataacatatcagtaagagcggtgttagtgcatttagggttacactgaatatcgatggatatatgcttggaaatatagtatgggttgatgctatcacatcagtacgactagagtactgagtataaactgatattatggtcaattatattgtcattacaaacatttgagacttatatgcgttggacgtgggataaagaattgtaattaggtttataggcgcctaattatagtttggttatatgtttatgtctatgcttttcttactgaatctttcgactcacaaatatgtttacatttataagtatgggaaaggcaaaggctgagtagtagtgagtctagagctggacaaagattgtacatatcaaagctattagacctgtagtgttcgaatcttcaagacagttggccttatattttgttagtcgatgggcgacattgttatatgtaacattttgaaaatggttgtaaaacaaaaatcaaaatcccaaaattgtataagcttatgtttatttattgtaagtttattttgttcataaattttttaattaatcatgtttttcaataaatctttgatcagcaaaggtgtgcatagtaattgtgagaaaacactatagcgtgcctaaacaagtagggcattacaattattagtagggatgtcattttcacagaaaatatatttccctgtgctactaatgaaactcccggttcatgaattcatactaaccctgcaggtatatcagactttgacactaaaccaaacgcactagaaaacttagatgaagaacatgatgtgaatatggtggaacttgttcagctagaacaagctcaaagaagccctggacctagaagccaagtttaggtggaagcagaactcaaaagaacaccccaacaacatctgatcagatagaacatccatacgaacaaactgatacataagcagatagaaatgctgaagacgtaattgactatcagttggtaagagacataactaaaagagctcctaagcctacacaaaattttgtttaatgcttggaatgaattgatggcctatgcattcctagctacattggaaattgaaaatacaaaacccaacacctatgaagaagcaatgcaaagctaggacctaagaaaatggtcaaatgcaatgaaatggggagatgtgctctttacataagaacaggcatggaaattggtcaagngaccaatggtaaaaatgtatagtatgcaaatagtgttt

SEQ ID NO: 190837 - DNA, 3046 bp, Cannabis indica
gccccaagagctgtggtctctatgtcagctggtctcactactgggctccccaacaaatcagcctataataataaataacacaacttttcttaatcatgatttttgttataacaaacaaaatccaaaagttagttgataaaaaaccaaaaagcattataacaggcatttcttttaataacaaattaaccaaacaaaagggtgtcttttatactcggtttgtgtctttttacataattcaaaactagtcactttagttacaaatagagtaattaagaaggggggcccaatttactctctaaattttaataaagacaacacctttaaccaagttttacatatattaaaaatgtactgatttgttactgtttagttcctttattctgggaaattagaatgagtccagaaatattcaataaaaattgtaaaaaaagagtgaaaaaggtgaataagccaaacctgaatctgcatcagaaggtcattaacagcagcaccaccatcaactctaagcaaaaactctcctttctcattcttagtctcacccttttcaccagcatccttgtgcattgactccaacacatctctcacttgaaaacacatactctcaagcacagctctagcaatgtgagccttggtggtgaacctagtaatcccaatacaaacaccgcgagcatcgtctctccaccaaggagcaaacaatccattaaaagccggtacaaagtagacacctccagtggtctcaacagactttgccaaagcctcaatctcactagcactactaataacaccaaggctatctctaagccactgaacagcagcaccagcaatagcaatcgagccctcgagagcataattagccgtagagttagggcctaacttgtatgccaaggtgctcaaaagaccattctttgagtgaataatctcttcaccagtattgagaagtataaaagcaccagttccataagtactcttagcttctccttttctacaagcttgacccaacatagcagcatgttgatcacccaaacatcctgagattgggacaccagtgataccccatccatctgtgatgttcccaataacctcagagttactaacaatctttggcaaaatcccagcttggattcccaaagtttccaatgtaggtttgtcccattcaagacttttgaggttcatgagcatagtcctagaagcattggagacatcagttacgtgtacacctccattgactccacctgtcaaattccagataagccaagaatcaatggttccaaagagagcatcaccattctccacagctttcttaatagtctcaacattttcaagtaaccaaagcaacttcacagcactgaaatatgtgcttatgggcaaaccacatgtttcaacgaaatgagtccttccaccagacaactccttctccaattttctaaacacaaatcaaatcccaaaaaaacccaatttcagaattacaccaaacaacccaattcataaaatctcatccaaaagagaaaaaaaaagacccattttagatttacagctattacaacaaacacattacaaacatttcgtcaaaaccaagaaacacacacacacacacacacacacacacacacacatatatatattatataaatgaatacctgcaaatggaacttgtacggacgtccatccaaacaatggcatggtggagaggagcaccagtagatttgctccaaacgagagtagtctctctctgattggtcaacccaatagccttgagaccattttcaacgtcgtgaccatcttccttggccttttctacagctttcgcaatacaatctttcgcactcttcaaaatctccattggatcgtgctcgacccatctacccaatacccaaaataaaaatcaataattaaaaaaaaaaaacaattttgataacaagataaacaatatatatataaatatacaattacccggcttcaggataatactgtttgaactcgacctggtgagatccaacagggcgagcttgtttgtcgtagattatgaacctcgtactagtggtaccctgatcaagtgacccaacataactcgacgacatctccgctctcgaaaaatcacttcttttcttttttttcttaataaaagataggaaaaggcagaggaaaaacagaggattttatatatatagataaataataaaaaaaaaagactaacttttagagatgagaacgaaagcaatactaaaatggtaaaactaaaaaggaagactttttcaaggttttttttcttcttgtttttgggaatgaagagtaattaattagtcgttacttatccgttattattaataataataataataattaaaaatgcattgtcgttatatccgtctaaattatcatttcatgaaatttaaaaaattaaattaaaactctcttttaatttggagcaattagttatttaaaaagaaatggacaaattttaatattcgatttttttttagtaatcgtgacgtcatgtctccggacttcttggttttctaaacgaatgaaatgccacgtgggcgtccgcgtaatctgtatacgtggcggatttttattggtgagtttggtttgactttatcccttactcgagtgattttcacggaccaaagtttgtagttattgagtgttgaatattcaaacgaattatattggacccactcgccatctccatactacaatttttttaataaaaaatatattcgttttctttaaaaggaaaattgctaataatttttaatgggaaattttgctttttatatatttattgaattaaagatttacctaaatctaaattaactcctattaatagaatagatttttattttataaaatttaattttactcctttcatttcaaatatttaactctctctatttcatccttatctctctcgctctataaactcatcccaagaactcgacccacaactcacattatctaaatttctccaaaataaaagccgaaaatgatatgaatttaagctcagaaaggttaagttgagatttttttttgggatttttacact

SEQ ID NO: 190838 - DNA, 3498 bp, Cannabis indica
aaaagattagtcaatattataattatcgtggcggaactggaaatgacttttccgctagttttagtagtttagtttaagtttttttttctaagttctttgtttgctttgttttggtgttgtgttagtatgtttcattatgatgttagttttattaactttgtttaagcttctttgtttgttttctttccttaagtgtatttgtaatttaattttatatgtttgcttaaatgtgtaatgttttaatttttttttatgaggtacttttaattaatggatgtagtatatggttttcttattttgatataagtgttacaaatatatatatatattttttttgatgaatttaactatttaattaacgtgtatattttttaggggtgttaatcaattaattttttaatatgcggttcaaaccgcaccgcaccgcacattataaaaatacgaatttttttatttagttaggtccaatatgtgaatgtccaactcaagccttatggtatttttgacaagtgttgctcaagctttgttgtatttgtgatagttaaattattggcgacagttcaaaccgcaaaaattgaccgcatcgcaccattatttgcggtaaggttttcacgattttttagtttcgcagtgcgggtgtggtttgggaaattagaaaaactacatgtgcggattggtttaaaaaatggtcaaaaactgtactacccgcaccgtaaacacccctaaattatttttttagcacacttaaaaatataaaaatacaaacaaatatatttataaaagttttgattaatatttatttataattatttagttttttaaatattatataattattaaaaaaaaattagtgctgtctatagtgcccaccaaaatatggtgggacactataaataaacccaaaaataattatacaaatgccgtgcggttgaatttggttttggtgtaatatcacaatgtaattgagtttttgcatacccattggggttgaccttaggtcaatatataaatttttttcttaattcaacaaaaaaaagttgaatatgtcacatcaatttagtgtcccattagattatatgtaagattgatctatcttagagcactgaacactgttatagtgtctttataatagccaaaaggttgaaaatttttgctaaaagttcatattaactcaatccatcaagttctttgtaatttagctaataatacatttgcattctcatctccacatgtaggtatggagagaaagtgagctaaaatttattttattagttttataatactttattactactatttttagttatatataatgtataatataatattttattaatttacacattattagtgtattcaatatatattattttaataatatcgaataaaaatataaagaaattgatgtataatataatataaaaatgtgagataaaataaagaaaataaggtttggtgatttatttttgaagaataaaatagagaagttaataatgagattgttatttagattgtatagttaagattatttattaaaaaaaaataatagtatttctttcagtattgtcttaggtttgctaatagtgtggcacacttagcaaaattagctcttaccttaattgattattatatttagtggcacgatcattctgattgtatcactagtattttacaagccaattaggttttctctattgagtttactcttagaattttagtgttaaaataaaataataataataataataataataataataataataataaaaagatgagaaaaacatgcaaaattatcaacacacactttctctttttttttttgttccattcttaattattggcttgtatttcttttttagttttttgcgttgatggacttgcaaagactcgggtagttgtacctaaactcataagatgatgtgaatagtacgaatatgggcatttttatttcattcgaaagaaattataactcaatttgtgtgaagagtaactgtgattagttagtatagtatataaaagtgataatcctattagttttatatacatttacaatttcaatatattatccctaatacatttacaagtacctattggccactaggtctatattttattgcttgttctaatcttttattatattattattattatttttctaaaaacgtatgggcaggcaaaataaacggtggggtagggtagcatcatctagaaaaaaataagtggccactagtccaatgactccttttgtgaggaatgagcaaattgaagggtcaacaagcaacagcgatggccacattaccatttaccaaccccttccgggccgtgccgccgccaagaccatcgcatccacctccgtgtcgttcttttctttttttaatcaccttttggttttagttttggacaaaattattatgatggggacatttatgaactcatctaccgcccactcctgaagtggtcttttaatatttaatcatatttaccttttttggtttggaaaggctggaccgcctccttcggaccattgctaataccatcataataaccctgaattatgatcactacttacatgttgtcgttttctggatgcccacaaaaccaaatcttatctttaacccatacttcagaacagaactattgtcctttgtgtaaaggaccacagttccattccaaaaacgataattctatatgattgtaacgtacgtcattgaaacagacctaagattagatgatttgtttgtggaagccattccatattctgtcagttcaaatgtcgtgtgagatgtgtatgtttgcattgcacagttttgcacaattatacatacacgctgtaaagttgtgcagattgatcaattgagttttggacaaacaaaaactaatagaaaatgtatgatgattgtatttctgttatttcactccgtattctttactcttaaattttacattacattagtgctatgtgtgagggagataaaaacaaatgtgttatcagaacaaaaggaggcacaaaactacgcaacaaaacaagaaaaaactgattctgctgagtgatctatcagcttgcataacaagccttctaattcttggactagcatttcccactagatgataagaattgggatacgtatacaaatttgtaatcgagtttccaaacacccttgagtaaaccacttcgccaaaaatcccaacattgggatccaacaagttagcaactgtgctaccagggcttagcataggtgaagtatagccacccctataaacgctgttttgattaggataatcacgttgataaacttgtggattactcatgtatgggtttgtactagtagttcttggtgaatcaaccccacaaaagggaccaagaggccttctcggtattactataccaagatttggagcctttcctttagagggtgtagtagttttgcctctgccgtacagagggactaaagagctctgactgacttcggctttgcaaacaggacactgtggctg

SEQ ID NO: 190839 - DNA, 2289 bp, Cannabis indica
taacacttaacaaacatcatgactactctctttaaattgaaatgaaaatgggaaagcatattcatcaagaacccttagatataattattcatttggattttcatcaagggattttttactagtggcatactgatacttgtaacactcaagagctgttgagaaagaaaattaaaacattggaacatggaaataaaaacatagtattattgttgacattttgaaaggtcttcaataagtgggtatattacgtggggccataaaagaaaaccctaaaccctagctagtggagttggactcaaagtattttattaaagtgttaggaaaagacacacacaacaaagtaaaacaaactttattagaaaggaggggagttaataaattataattaatttgtatgtgtgtgtgttattttatttaacatcttaacaaaaataaggtcaacatgtattatttatttcccattgtgggttttgcttggctatttaaattgaaaaaaaaaaaaaaacaattaattagcaccactcaaattaccaaatacacaatatataaataaataaataataatgattcttttacatgatcaataacttttgtaatttgttgtacatgtataaatcatcataattttctttttgatttcatgaaaagggtcgcatgccttagcaccatccaaggtcaaggtcagttttaggttaaagttaattgttttaggttaaagttaattaggctcgtgcttaagatttacattttagaagcctaaataaaataaatatcttttaaaaatatatattattaaaaaattttaaaaatattatttattcttataataagggtcaatttttttatctaattaaagaccattcgaactcagaatcggtcctggcatcatcatcctagattgtgtatcgcaaatttctaatctaatttttaatattttcactcaaaaataaaataaaattaattaattaataatacaaagattaggtaagtctattgtagtactatatatctattgacgcttgtcaagtatatcatttttgtatttgtatttgtatttgatggaaatttacacaagctagcagaagtttcaaaaaatcatgtctaataataagataggacaataatatatagcttccactaaggtttaattaatacattattatatattaatccaactcttagtcttatcccattggctttttattagggtcactgaaatattgtctattaataatatacccacctaactttttaatggttttttttaatacttatcatttccaaaataattaaggtagcctaatttgctactatttgtatatgtatatttggcataatcttattggtcctaaagctttatttccctaaatcattggtagaaggatatgtacaattaatgattataaatttataataataaaaccttttgtcattataaaattttcactaaattttcttttttatatataaaagaaatcgtgtaaaggttctttgctcaaattccatcataagcagtgtattaatcatttaatattaaatttatggtaaattatactattgtatattttaactatataactttggcttatattgcttgagtggtcaatttgtgtttggtcaggtcagatattagccactagaaaatatatgaatggatcctatatatatgtaattaatttgataacttttaatgctccacccaagaaaaaaataaaataaaattaaataaatcatagtatgcatgtgtggaagaaatgtactgaattgacattattattatttttttttatagatttataataatatatatttaaatttgtattactgaatcggatatatatttcatctctaacaaagctgataaggattaagtaagagataacacagatatatattaatgtataataattaatatgtggtgctttataaaaacaatactattatatgacaaattaatgtgtatataaatactgttcgatatattgaacatttttaacgtatataatttccacacacaacctgtttaaaaacagtctctcaaaaactatttcatactctgtttttttttatttatttttttatattataaatgagtgacgattgtttcttttgtccttatattgtgagcgcatgctctctttaatatttattataacagcattagatttgtgatcaaatcgaagttattatattcacatatataatattaatgtgtttaattattaattttcgaaagtgaaatatttgtaaaagttttttctttaattaattaatttcctgtacttaata

SEQ ID NO: 190840 - DNA, 3434 bp, Cannabis indica
ttccgcaatccaccttcccggaataaatgctgattggaaaggcgatatcaaatcattcatgagaggtctcaacctattagataaaatctttgcaattactttgtaggagaaattacaaagacttatcggccgaaattgctccatagtcaaaggaaattccacctttgggattaggcaaataaaagtactgttaagccttggatcaagattcccattggcaaaaaattccttcactgtagtgcacaaattctttcccactatatcccaatactttcggtaaaaacatcccgagaagccatcaggccccggggccttcaaaggatgtaggccaaagactacatctttaatctcatcctctgttgggattttagtaagactctcattggcaatactgtcaattttatttgggaataactcattaaaatcagcttccagacacggttgggaagaggtgtataccttcaagaagtactcattgatgatgtttccaattgccttcttttccttccaaatcctaccctcattatccttgatagcccagatactgtttcttctttttctgatgactgtagcagcgtgaaaaaatcttgtgtttctatcacccaaagcgagccaagtttctcttgacttttgcctccacatgctttcgagtttagaccaacaaatcacaatctgaggttgaatgaaagcttcttcttccttgagattggttgatatgggctgactttgaatccattctaaccgctgctcaagctttttaatttcaccttcattaatctcctgattgttctttttccatgcctgaagagcctgtcgagacttagctatattccgaataaaactggcagtaccatttatatcatctgtagaccaaaccttggctatctcctccttgcacgaagcttcccaggaccaagcctcgaaaaagcgaaatggaatgaatcctcttgccgcgaacaggtgagtatctaagatgataggaccgtgatcagaaatagtgataggcagattacgaacacccgcactttcataatgcaacatccaatcaggagagcagagtgctctatcaagtctttccctgatgagacccccactgaatctcatattttgccaagtaaatttatttccaatgaagtgaagatcaacacatcccgagttcatcatgaaatcatttaaccatcttgtatcattgtcattaacaagccgacctccaatcttctcttcttggctacaaatgcagtttaaatctccaatgacagcccaagggatttgacagagagaacattcactttccaaactcttccaaaaaacctccttgtgacaagtatatggtgtgccataaaccgcaaacaatttccaatgcatctgagtttggaaatcccagatagtagcatcgaaaaaaccatcatcaaagtaatttatcaccaagttaacattagtattccacattaaacaagagccacccgccaaacccgtagctccaacactaaccacttttgaaaatcccaacaaacgtgctaggtcctccattttattcttactaactttagtctccattaagaaaatacaatccactttgtatttcctaacccaagcaacaatagcttggggtgtcgggtctctcgcgaggccccgacaattccacgaaaggcacttcatggggctgttgggggcttgataagggccgcctcctcgcccgttgagtaagattgtgaactcacgacttgcacttccaccaaattcagggattcaataaggtttttctttgtagcatcaacacttccagaggtgccggatgtattcttgcttttcgaggaaatagctaacttggaacgtgacccctttcttcttcttttatcattctttagagatgatgaggaagcacccgatcccattttgaagttcgaatctggagctggggaaaattcatggggttcaggagcttctatactaaattccatagtattctcctctgttcgttgcacataaggaaccaaagttaagcttgcttttctttttttgggctgtgggcagtgatggacaagagtggacacatcaataggatcatgaaaaggagtgggaatgggttcaaatttgtctattggtgctgggcccataagttcctcagccaacccaatttcctctgcatagataggccaaggaaagtgggtgggctcagggtgtttatggggctgtctagattgacacacatctacatgggctttttctaccatttgatcataggtaggcccaatattagccattatagttgtaaggattccattgtctgcagcattgggtggtggtctagatgaaaatttctttaatatatcatcatcagagagtgtactattattaccttgttgatgaaatcgtgcccctctaggagagactgacctagctttccttcctcttgcagccattcgcaggtctcgagatgtataaggtctgttctcagttctattgaccgtcgggtttggcttgtttgtctctactaccttcaaattttttccaattgtagaacctggttcattgttgtttaccctgataactttccttaatggtttgttgcaagttggctggtgcaggttctgatctctgttgtcctcctcgacaggtctctttcccatcattttggatctcgaggcaggcatggatggagtcttcgccggtacggaactccggtcacttgaatctctgaaaaactctagctgatttctggtattgaagcaactgtacacagccgtctctgccttcatccatggcccatatgctggaactgcttcaccttgagggggtaagcatacacagtcgttctatagcaagttttctatcatgccccagatgaccacaattgtaacaaagtttgggcaatttgaagtaacggaactggatccattcctttcgacccctcttgatatcaaggagaaacctgagttaattgatgcccagtgtcaatttcgacttgaaatttcagaaaacctcttcggacgactactcgattgttagctaaatcactttgaataatcttccgcctttgccgctagtgtacgagtattgactccattgagataaggagtaggtagtcctgaaaccatcacccagaaaaccgcttttctcatgtactgcattgtaccagtcgccatcttctggccattctcggataatcagaagcttgccatttatcatccatggtctgttacgaagaaccgccgcacaatcttcagattgatcaaaaaagatgccccacaccccaggcttcaaagtcttgaatttccagtgcccttttagtttccaaatatgattcaggatgtctttaagctttgttctggacacccctttaccatctaaaaaaactcactagtaccccagtattcacgacctcagcagtgagttcaaaatctggttccaagtccaaggtcatagactccagg

SEQ ID NO: 190841 - DNA, 651 bp, Cannabis indica
ccgcacatatggggacatttttgcttgtgctacaatggtcgaaagctaatcttagatacagatcaagtcaaaaatcatggcatcaaagatggtgatcaggtctgtacgtgacaagtttctcattttagctaaaaatatctcctaaattgaactgaactcctccttgaatctttgtaactgagtttattatatagttttgatataaagtattattaatcacagtaaattgcttagattatagtaagaagaatctagttctgcaaggactataatttcaacaaccaacaaatattccccttttgggtaggtttggttggaatgaataggaaagagaatatgaatgaaatagaattaaatttgatatgttttttttttcatttttgattccaattaacggtggaaatttcatttccttagaatactttaaaatgtaaccaaacacacccttgatttccaacacaaacatttttttctctacaatgtataaaattgctctctgatatgctccttattgcatgcagcttcattttgtgcggcatgtctcaatcagctataatctcgtgaagaagagacctaataagaaaggatatgttacttcaaagcagacaaataagtaaggatcaagatgagttctttctagcacatatttct

SEQ ID NO: 190842 - DNA, 1001 bp, Cannabis indica
taataataataagcaagacaaccaaaccgtactcaaatgtgcaacccatgttcgaaactttctacaagcttattctgatatcgatatttatagtatctacacaccaatatgtattaatactaataataatcctccttcttcaagaccaaaactacatgttgctccacgcctcttcacacaacatgtaagtaataagatttaaaagaaattataaattatagtaaatagtggcattttttaaagattataaaaaaaaggtgtatttttctaaagaaaatttgtatatgaattagaagaaattaatatttttttttcaataatatgatgatatttttaggagttatgggatcgcgtcccagcgggatacgatccatgcacggagaattatgcagtgaagtttttcaacagaaaggatgttcagaaggccctacatgccaatgtgactaacctctcatatccttactcctcttgcaggtaatatttattgcctttctttcttttcactttcttattatttaatggccttagggaaagagcgagagacaaagacacagccccaaacacagcatttactcatcactgaaatctaacttatatataatttctggtagagtacctactctttaatgaattgtgggccacaatatggcttcaccattttgttttcttctatatatctcttttgtgttattaattaacatttttgctgcacttcaatttcaatatctatcaaataatgttttaaaaatttttaatatcgttaaatatttctttaaactatattaaaattgttgaatttaaaaatttttgtctaattttaaaaaaaaattctaacaaaataaaagttgaaaaaacataattttgtatatatagtatgatttggtagatattagaaatatgatttagtagataaacagttaatgaattagtaaaattaataaaattaaacaaaatttcttaaatctaacgattttaatgattaaaaaattcaaaaaacataa

SEQ ID NO: 190843 - DNA, 1995 bp, Cannabis indica
ttcttcttcttcttcttttccttggctcttactcctcattttcctcctcttctccggcttcgcaaccagcttaaacggcggccaaatagtctctgtatggcagcatcaccatgatttcaagtctcccgccaccagatcactcatgtcctttcaatcgccgtcggtattccttttctttgttgttttcacatacaaaccctctagactttctctctttctttaatgttaattatgaatttgaaattgaaacagtgaacacgagcttgaggatgagcatgagcatgggacggctttaaaggctgctcttgatgggaaaattcacttggtgtggaagaacagtaacagagtaatctggtctttctcttcaggaccaccaatttatacttcttaccaggctcctccttcccaacatgctaccaccactgttcgtaatcaaaataacttccatattgaatgtggggatgattggaacttgtatgcacaccatcaaacacttggaatacatgtatgtatattatgtcttccctcttctttcaaaattcaaactttatatatttttttctttaatttaattccttaaaactaaaaaaacttgtagaatttatcgataagtatagaagatttcataaaagggactccttacacattagaggatggagcagttacagttgggtccaagaagactactgtgtttgaggttgatcttagaactggaaaactcattcacacttatccatcatcatcatcatcatcatcatcatcatcatcatcatcctcattgagcccagcagctcaacatcatcctgtgaagcttatgcgtctgcaaatcatgaggacagactatacactcaagtcatttgttccaagctcccacaaagaatcctggaatatgactgttgcagagattggagctgctttactttgtccggatgttgatcaaccagttggtgaatctcttctcactttgaaagttaagaacagtcatgaaatcatcagtgatattgccttgccactacgatgtcaaactaaagtacctgttttccgctacaaaaatcatgtgttgtttgaatttcccagcattgaaatgctaccaggaaaggcagtgctcccagaacatgcttcaagaccaatgcttcgtgaacaaaccaatgatgatggtgattattcaagtctagaagatgagcatgatagtatattaagtaagagtaacttatttgattggtcaactgcgttgtctcttgctttgtttattggtatagtagtgggcatagttatctaccaccacgctccaatgattataggaaaggtttggttgtttaatgagcagactagaaattcaaattctagagcttcaccttccaagagaaagaaatctaggaaatcggaaaagggcaagaaagaattgtctgaaaatggagatgatagtgaggacgtatcaggcttagacctaaataaacttttctactgcggtgctgatgggcgaaggattggtaaacttattgtttcaaataaagaaattgctaagggtagcaatggaactgttgtgcttgagggaatgtatgaaggtcgctccgttgctgtgaaacgccttgtccgagctcatcatgatgcagctgttaaagaaattcaaaatcttatagcatctgacagacatccaaatattgtgagatggtatggggtagaatgtgatcaagattttgtttatctttctctggagcgttgtacttgttccttggatgatttggttcagatatacttaaattcttctcagaattcagcatccaccagcgaccatgctatgggatctataactgattataatgtccacttggagtcagtgaagaatatcatgccggatgttattttacggaaaccaaatggctatccatcgcctttatcactgaagttgatgaggtttgttcaggacagtttattgctctttaaatttgaagagaattgagtctcaagtgtcaatttttgtggttttttttatta

SEQ ID NO: 190844 - DNA, 1121 bp, Cannabis indica
gagagagagagagagagtgaagcgttttaagtagtaagttgaagtagagacaaagaactagactttatatgcatgtaattaattagtaatctgaaactgatcttatatagaaaagacagatacatacaaattctataataaaactacagaatttgaattatagttgatgatttgagcataaagtattattgaaaaagagtaatatctgatgactacgatatattttatattgtatgagaattggcatgtctgatttttctactttttttaaaaggcatatagttttggtcattatttatttatttgcaagcgaaacacaccatatgtctaattattatatatattaatataattaatgctataattaaggccatttcttctgtaataggcatacacgtatatgtaataataataataataatatgtagttaaattatagaccatgtggtattgaattagttagcgtacgtatataattaataatgtttagtaattaattacttaacgctagtttggaccctagattgagttaagtagtgggagatgagtactctcactatctcactaaatttataacacaacttccaattaagcccaaatcaaatttgtagagcttgcgtacacactcggtacaacgccctacacaagactattgtttcttgccaataaaactttatgagcgctacataaatttaatttttttttttaaacaaaaactcctcttattcattggaagaaattaaaaaaatatacaataataatccccataatatatacctaaatattacacacatacaaaaatagtggacatattctagtttaaataaaagtgatttgctagaaaaaattgtcacgtgatctctgagtaaatagtgtgcacatttcattactttgttaattattacttaatcgtttatagcaccagaccacgtattttttagaatgtatatcaaacacattgtagatataagttgtttttttttttttttttttttttttttttttttaatggattaactcatatggataacttataattccaatttcattacattgtcttgtttattattgctaaattgaatttgtttcacatatatttgagtacatgcgctttttaataa

SEQ ID NO: 190845 - DNA, 897 bp, Cannabis indica
aagtataatttttcaaatttccccatttataaatgctcccacaattgggaccttacccactaactcaacccaaacatcattgacaataatatacttaacattatatatttgaaactagatatagatatatttgtatgtatttataagttaaacgataagaagaagaaaaaaaacacaccatgaaagttgacttaaaattaatataaatacgtatttatatatataatggaaagattcaatatattgattaggtcacaagtgactctgcatgaactaataaggtgggacctaattaccggtcccataccggagccagaagcagaaagtttttgtaaggactaaagtgcaaaataaataatttcaggggagcaataaataaattttaataaaaattataattaaaaaaattaaaaaaaaatattttgagggagcatggccaatgtatcactttattattaactaataatttttattttatattatccattgaatcaaaatattaaaaatacagataattaatgtttaattggtagagataccttttaacatgtctcgtgttaattgacataaaatatgagatcatttctagtaatttataattattattaagaaataaataatgaaacttggattagaacaaattgattggtttttccagaattttcttgtccccttttcattagttattttgcttattattattattgtgaatcgtaattaacatgtaatatataattaaaaagaagtagctagttaattgtcattttcatttgataattatatataggtatataattgtagtactcataagaacattaattaagtacacacgtgtctctattatattgattaacacatatacttagatacatatcatgatcaggatcaggttataat

SEQ ID NO: 190846 - DNA, 2390 bp, Cannabis indica
ataaaatttttacaaaaaaaaacctataatgtatgtattattccttctaaatatccataagaaacaaaaactagttggagtgggaccctgaagtaaataaatatagatagtagatagaatcatcatataataaaatatttcactaaaaagaaaggccaatgagaagacatcttatcatattagaaattagactagcattgatttaaaggtgcttaatccaaagtgttcatgtcaataaaggttgtaaagttccgaatcaagccgctaatttagtaaatatatgaataaatttcaattgttttcagatattcattcatgggtatggggccaataagtaccatattccattatcaaaaaacaaaaaaccatcattctttgctttccattgagagcctataaatcatgtcaattattaactccaacaaacttaagactttccttttcttaattactaccataaccatcatcatcattataattattaagcttagtgcttgagttaagattatggttagattattagagaagattaattggaaattgcaactcataaaaggacaaaataaaaaattacttataggttaaaaccaaaagtagattattttcctaataatgatcatcaagtagaacaaattattagaatcaaagtacacgaaatggtaagattagtgaagaaaagacaaaaacataaataacttactttaacaccaaaagaaattataatccaagtaaatgagtaagttacattgctactaagaaaaaaagacaaaaatagcaacttaatttaaattaataccaaaaggaattagtacattatttcactaataagcatcaagtagaaacaattagaatccaaatatatcccctttcctctaataattttaatggttacaataaaactaatcaaatattaaaagctaatatgcccaaaataattaactctccaacctccaaaaggcaaccccaaacccaattaatatatatataatttttttatatatatatataaatataccccctcacaagaacaatcatatacaccgtgtgtggtgataatatgtgcatgatcatttcgcacgttttccttctcatctctctaattttttttttcaccttttgtctggtcttgtcctgtcttgactttaatccaactcattaaaggcattgataagggtttttgaaaataattttagatccaaacccttattgacatcatctttcctagtgatcaaattttcaacttcatcaaagtaggtgtgatgagaatcgagtagtatagtggtagtagtaggtccatctagtcataatatcgcttcttggatcccaatattaccacttagatataattgtgtgggaatttcacatttgtggggacctgatactactgttgcttctgtctgtcccaaagtcaacgacccggtcaacgctaacaggggttctaacaaaaatgtttgattttgatcgttttgcctttccttgtttttaccaatatcttctagtatagctttaccagtatcaatacctatatatatacacacacaaacaacatcttctttacatatatataagactaatttaaaactaatccattttgagttaagttaaaaaagaacaatttttcatacctgcaaggaatccgccgtgtacatagccgctaaatctctcgcttgtgtgttcgccgctgaaaaatatgcgtcccactggagcctaaccaaagaaaaaaccatttctttaaaatttcgaattcaggggacatttattgtaagcaaatgtggggtgaaaagtgataccttaatgtcacggaaatcttggtcattagtgatgagagggtagttactatagctgccacgctgaaaacggttgctccaccagcgaggaacaagaatattagtagcatcaggaatattggggccaaacatatctctaagaacttccatggcttcttgcaatgtttcttcatcagattgagattccacacgctttgattcctcatttgtcaacgttacaacaagaatatttgagccaggataagcattctccatgtgctaatgacacatcacattaacgtacaagattaggagccagcatggcttaaaagacggcgagtagttggaaggaaaccagattaaaaagatggtatgcttatcaatcattcaatctgatatataaataaatatagaaagatacagatattaaatttggtataaaaatagattatagatatagaatccatattgataaactaaataacattggaaatgaatgagacaaaggagatcccacactgtctccgcaacaggccacgtgtgctcattataatatatcaattctttataaatacaaacaaattgaccaattttaaaagatttgacgtccttttcaaattaatt

SEQ ID NO: 190847 - DNA, 5414 bp, Cannabis indica
gaaaagaatgagatacaattgtcttggaaacctgaagcctttaccttctatttatagaataccacacagggttaaggttgaattacttggcatttaaaaataaaaaataaaatgataaaaagaaacaaagtggccggccatagaaaatggaaacaagcctctcacttttgcaactttcctattttatcattcctagttttccaagaaaataaaaaaataattatttaaaatataaaattcataacactaataaatataccagtgagaccctctgctcttgataatgaataagcagcgaggtgtcagcacacggcattaatgatgaatagcgttcctttattaccagcggaatctcatatctttactagcagactgttccacccctaataatggtatttgttgttgtgtatactttagccgcaaattttttagtcacaatatcgatttgatgatttataattagccacaacttttttacttttagtcacaaaaaaaatttttgtagtgtaagttaatatagtcattgatagaatatgcaagagagaaatgtgaagtgaatagtttgtaagagttcacacaagcatccccaaccttaggtaattccattaaagttgtatcatcaagtaccaaaattcatctaacaattaaataaaattaacatgaaagttgaaaacactaatggtatggggtaccaatagaaacagaagacttaaaagaaagtgtaagtaagtgaacaattcaagaagaaaaacttaatggccgctgatttcactggcttcgccgctgatttcactggcttcgttaggcaaaagaaaatcaataagacgaagagctcaacgatttgttagccactactcaacaagatcaaattcattccatgatttgccaactgaaaatcaataacataaatatctcaagaattcaaaacccacacaaatggaaatcaacaatataaacgataaagtatatttagcaaaataagaaaaaacatacatgatcagtatattaaaaagaaagttaaaaaatagtggtaataataaggagtattacctggttaattatctgtgatgagatgatttattgaattgtaggtattatacctaaaaaagttaaatcaactcataaggtaaaatgaataattcacttcaagaaaatttggtattcatattactaaaatattattaaaaactcttagttttcataatttattttttgaattatattgaaaatattattgaatactctacaataattttcaccttaacatcatttgtggagtagtatgtttaactaatttaggactctgtttttcgatagtgcaaaacaaggtagtcaaacatcattaaattagataaacaaaaaaactaaccttaacatcttggaacaaccttctctgatggacatacaacaaaagagccgacagcttcttgtatagtaatcatcggatggctaggacgaaacaaataggcacttggtgagataactttgtctttgtcaacccacacttgcatgaatttagatccaagagtaatcccatgaacttctatgttcggatcgctagaacaccaatgacccagcaactatttcatccttccagtaaagtaagttgcaagcattattcacattagaaaatttactattctttctatggactacattattgtcaagatgattgcaagaagagcttgaaggctttaacaacttgaataactcagcaatttgcttcttcatgctacctagttctttattataagcttcaattttatcttggaacatgttaacaacagctacttttgattttgatatccctcttccttggccaatgtgacgaccagattttggtataccaaacaacattgttagtgcatcctcgtcaatattatttgtagtttgagaatttggattttcacgtataatgtcatctagttgtccctacacatcaattagaaagttaaataacaagagtaaagtagaaacataaaaaaaaaattacgaataataagtactcaccaatttttcagaagctattgagttgattggctaaccattctttttagtatgggctttttgaaatatatggaccctagttatttttataccttcattttgtttagtctgcatgttgcataaaatttcatagagcaaattaactaatgcaattacatacatttaagtaacgcaataaaaatataataatagtttatgaaataccatattatcaattgttcgagcatatcctcttctacttaaagtgtgtggaattgctttcttttttctatcttggaattcagctcgtaaggcctatttagaagagtacaaagtaaaacaaactatatctaaaaaaaattaaaaggctagttatagtggactaaaaaaatatttccctgtaagagaatattttcaatttactagcaaaaagaatagtggtgacataactcagagaacactaaaaaaagtataagacttggcaactttaaaatgccaagtataaaattcacctgaaactttatatgtatatacaaaactttatatgtatatacaaaatatacaatttttatgttactaaataaagagaaaaataaatatataaataaataaagagacaaatatatatgtaccatgtgttctttacttatttcctgtttaacaaaagccctcctccactctacatcgctcttgatgcaatctggttttagtgcttgttgtttattattagttttagcattgataatgtcttaacaagtctagattttgaggctctctatagatcaaccatcatttgaaagcaaaactttttttccaatcatgatgaaaatcatatttggcctataataagatataaatgttaaaactacacataatatatttaggaagtaagttatctaaaattaacggttacctgaatagacgcccaaagaatatctctcatcattggtgtcattttcctccaatcggatagagtgtaaggaacaatctccttcacaagaataccaacaaaagatgcaaattgtactgaatcatcactaattggttgcccattcatgttccaattaatttttatcaaatcaccattccttctagtaagattagctagcatagttctgcctctagccttcttggtgatcatctctaattcttcatttgcattacgatcctgaggtgttgcatccagctgattttgaattgcaatacttgtattttgtaatcgagctgattttctacaagtgtctagcttttgtgagtcacaataggagaatcagttatactttggttggttggagcctctactactttaggtgaatcaattagaatcatgcgacgagttgctacccttgtactaagggcaggtggtgagtcattgacaaccctagtagatggtgcagccaatttacacagagaagtttttttttactaagtggtctttcatgtagcaagtcatgagtaccaagttgatacttcaagcttgttttccttttgttgctgtttttgcccattcgtaggatagtcatctgcatactaaaaaaaattgaactctaatcataagagaaatcataaacttatgaatatatctgggcaacattgaaaatttgatctaaagagccaaattcaaatctcataaaaattctcaaatcactaaagcttaaaaagaaaaatctcaagagaaattgtttggaaattatcctagctagaataaaaaacacaccatacattaggatttttcttgtcaagagacgcaacaaacaattcacaagaccaaatcaaataaaaacaaaaagacattatacatattgcataaggtgattaataaaatcccaatcctgcaaaaattattgctaagagaaaactaaaaaaagcatagtaaagccatgattgattattaaaccgatatctttgatctcattcatttttactccctacagcaatacctactctttggactgcagttgaaatatgaatttcaaggactgtatccgaatgtataatcatatgcctcaaaaaccaccaaaaaaatccaatcaagaaattatatccaaaagatcaaattatcaagacgaaatatgtatcatttgaactccacacacttaaaaaaaatatagcatctcaatatcattttttatctctattttactcttatatctctaaactacctagtccaaataccatctaaacacataattgaagtatgttactaacaagtggccaacttccatgacttattctttgaagtcttgtgagtggacatggtagaaaaatggcccaatagaatacttgagggcttgcctggtggtctaaaaaggaaccccacaaatctaaacaagctcttccaggagagctaagaacagctcattataatttatcaacaaaaatacatcaagaacaaacaactttaggtcccaacgttcttttacacttgacccccctcttcaacccctatctatattgttatagaaagataaccaaagtaatgaaaattcaataatttatactagattcaattagctatagttggtataaattaaaataaaaattataacatgaaaataaaaattgaaatgtacctttggagtgtgaggtcaatagtcatcttaggcgtctatgtcctgacaaagggtccaagtgaacgatctcaagcatccaatgatcactaatacgaaattaataagaaaatattaaatgttaattttaaaaaatgaaactatatttagatagtccttatatagtacgtgtacatactcgtggttccacggtataaagaacatttgggaattgttattcattgtattcaaccattcaaccaatttgataacttcttggtcgataactccatctttgtccatggcgttgagaagctctgggtcaaagaacttgaaataatcccgcatattcgttaaatcatcccaaatgcatctgcataaatttaccatggttaagtgttatattttaatcaattggaaagaatattatgtaaaacatacttaattcaaaaaatcattatgtaaaacatacctaattccaaaaatcatgccttgacatccaatataattcaaagtcccaacttgctctacatcccctgatgtcaagataatatttgtgcaaggtggcatgaaatcaaaatcaattggaacttcaacaatgttgtgcatccctttcctccttagaaattcttcaaccaaaaagtagagacatgtaggtatttgagcccaaaccttcgaggagaatgttttcttcttttccactggatctctcctgacatttgattgtgatccagtcaaagacatagcaggaagatctgacatctgtttccccttatatggtgatctatgggtggttgcgacatccgggaatatgggaacctacaaaatatgaattatgacatcaatatataataattatgcattaatcatatatgacaa

SEQ ID NO: 190848 - DNA, 515 bp, Cannabis indica
tttatattaatttctggttttcttgttcccagtttttattgggatttttatttgtttagctgaatgagaaaagtgtttgggagaaatttaaataaacgacatcgttggtcgtctctccgtaaaaggtcctatatctgtcgatataaattataacgacaagtcgtttgtaagatcaatttccaatgttctctcaactcaagtatgtgagttagcatgtcaaaaaaaaatatgtgagttagcaaatattaaattatataaaatagttttcagcataactatttaagtttaattcttaattattcttcgcggatgacagtttctttctctgcaaagctaagaatttcttcggtatttcacttaaacgttcccttgatctctattgcaaagcttctggactgctaatcaatcaagcaaaatctagtctatctttctctccaaacactaatagagatgacaaagcaagattccatcagatattccaaatgccaattcaacctctccatgaaaaatacttg

SEQ ID NO: 190849 - DNA, 7110 bp, Cannabis indica
attaaattaataaaaaaaaatatgcttacttaaaaaacgttcattattcctaaaaaaatattttcaaacattattttatttataaagacatcttaaaaatttaaccaaaaattattgtaaattcaatttttgcatttaaacaaacttaagtattgtgtagagaaaattcagtttattttatatttacaaactcatatcttaaaaaattaaaaaaataataattaaaaattcgataaaaaaataaaattatttaagaaaaaaaatagaaattaaactaaaaaagtgttacatttaaacaaatcaagattttttggaggaaagaatagggtcaaacttgttcctataaaatttagtttttacaaaaattaaatttgtcatatacaattttatatttaaatggatttttcaataaaatagttaattttttaaattacttaattagtttacaaattaaaatttatttcttaattttttaatcattcaaaacaatttttttaacataaattattttttaagattaaaaaaatgttgaaattttcacatttttatttagaacggattacaatttgatagtgtcaaagttcagggagaaaaattgttaatttacaaagacacgtttgcatttaaattaaataatagaatgaaacttaacaaaatgactaaatttcggtaaatgtaaaagttcaggaaaaaattttaacgtagctcattagatagactatgttggctatttctcaacatcaacaaaacatatttatgtcaagcatacgatttgtgtgcatatgtctactcttttttacattaggtcctaacaatctacaacaatctcctacaattccttacaaaactctagttcataaaatgtataactataggtttagtttcaaactcagctgaaaaactacccataatttcttaatgaatgttactaagcccaaacaacatgcattaaacatctttaacaataccaaatgaaccttagaaaaatatctccaagtctaagtgtcaaaattcaaacaaaacgaatgctatctaaaactagttctaccatacaatggtcgactaattgtcaatgttcagtccattggctactaaaacatacacgaatgcataacatcataaacaccttttaaatgaatctcccataatatatattttaacactcgaaccaaatttttaaaactccaaacctaactttatctttaaattctcaaaattaaacaaaacctactaaatttttaataaatatcatcaataaatgatccataaaatccataaaaaactattagataatatccttgtttctatcatcaatacataaaattctaatatcatgcactttcattcactaattcaataaaaacccctttaaacctaatagatggtctaaagcaagattttttataataaggtaagaacaattaacttaaatcttaatggatgctaacttacttaggcaatgaacaattttgatgagtaattaagttgctttaaagtttgaattatcttattattaattattattattcttactttgttatttgtgttaacaatatataggagcaatgaatcaggtaacaagaaacttagcatgtgaatgggcaaaggacaacattcgtgtaaacactgttgctccaggattcactaaaacagacatgttgggaagtttttccgtatgtattctgctaattttttttaataaccctttttaaaatttaaattttttcattaataaatattctttaattaaaataataactagaaattttacaaacaaattaggttgagaaaagaaaattggagtcacaagctaaaatgaaattatattatagcttctcaatgtacatatatatgtttgtgttgagtggttttttagccaacccacatagagtcataattaatgagaactaaaacaaaaatgtaataaatacaaatgaagaacaccataatttaaagaggtttggcctcaagtattagtaattgcctattccccatgtgttttattaatctgacatgcatgtcaagaacagactcttgaatacaagaagtcaaatggtagagtttctcttagtgaatatgaattttggatttctttctaaggccaggtatgaccccttatataggaaaagggtgggtgcatctctcttcaaaagacacgacttaagggtctactaaaccctaattgtgtactggaatatatcaattgttcccttcatttttgagattggttgagggacgattcttgttgtgatatcctactatttttcgtgggtttgtaaccacttttgagctttgagcgaggttaaacattttgtatgcgctaacttatcaaatttttgccaaataattctttgggagactgtcccgataggacttgaccttgtgtcatatccattggaaagatgaatttgcttcatacgttaggactccatgtccatgttcatgtgttatttcaatacttgcaattgatggagattaactcatgaacaaggattggtgttgaatactcgggacgaaccttgagatcctggacaaataaatcattatccatgtccaagtggagatgaattatggttccaaagttggacgaggattggggctaacaccctctttgtatagggagactttggcttgggtagaccctaggggctactcaacctcagccgaaccctaggggtactcgacctaggccaactctctatgaggtgattgtggcttagttcgtcttagagggcctttcatgttaatggtaaaacctaagttcataagggttatacccttgtgtaaggtgaccttacgtcttctttgtgtgtttattctattgtaatctcatgccacatgtcttcatacaaactaggtcattcttatcaaaatatggataaaaaaattcaccccaactttctagtagtatgacaatacgttaacaacttttcctgttagagttacgttctttgggtccatcttgatggcttagttgccttataccaagaacaccatgcctctactactacaatacatcccaaacttaagaaagaaaaaataaagtatccttttacataattttacagcataaccccaatagtaatttccactatactattaaaaaataaatttcaaggaaaaataaatggttacaaggaagataattagctcccttgtggaaaataaaaattagagaagaaaattccaagctgtgatggtgcatgggagcctcttcgctgtatttcttgtgttctcgggttgtaatctttgaatgggtaagtaaaatgttaactcttgaaaaaatcttatttttttatgcttgtgatgtgtagtgtaggctttgggtaactcaattttggctttgatttcatgaaatttggactagtaataccccacttttggtattgtgactttgggtgttcttacttttatgaagaacaccaagaacgctatggtcatgagaaacattattttttatttttattcatagaaaattctctaaaaagtgtttttggatggtgtttgtagatagagggtgtagtatgtaccttggtaaaactttgaaccaacacttattagggctagaaccaataacccatgggtgcatggcccaacaccactcaaccatggagaatacctcactaggcaaagaatggcttagccttactcaaataaggtcgagtttgttactgagcatattatcatgttgtcacgcgaccttgaacgatccttaaagaaatggctcaatactacttgagtatgactgagtacatcattatgatgtggttagaaattccactcagattaggctttatagctcattaagggtggccattttccactttgtttgggtcaaaactaaaaagaccgagtcatattaggtagaaccctaagggttgagtgcagccttgatcattttcagcaagggccaagtagaatggattgtgaggttttgtctttgcttgtattcttctcccttggttggattcttgaggatagacaattagtggtcaacatgatcacatgcccatggccacccgtactatgtgactagagccgcatactttgagaggtgagagtaggtgacccgctttacttggttaactagggcacacttaaagatttggcatggaaataaggaaataatcacaagtgtcaagatgaccgtgtagtggcctatatgatcgatatatgcggcctggatgtttttgttcattaggtacacatcaagctaacttagttatcaattctaaaaattctttgctcatgatacttggattacgacccatagcattcagcctaagtaccatgttcatatcaagaatggtgtgtgacgcttttgtggtgaaaatggtctaaaatacacaaagtactcaacctgaactggtccctaggggtacccgatcgactccaaaccctaaggggtactcggcttgggatgcctaaatttgatatattatttaaagatctttccaatgccactagaattacatcaatcagagttgttagtagagatatatgctcaaaacactgaaggttacagtggaaggtactcgacttgagctgacccctagggggtactcgacttgggctgcctagatttcaaagatcattaaaatggatttccaatactaccaaaatcttgtcagtcaaacttgtgactagggatatatgcataaaaaactaaagattgtggggtaagtacttacatgagctaaattctaggggctactcagcttaggccaacctctaagggtgcttgacataggccacctagattgaatagatcattgaaagatccaacatcaccataatcacatcaatcagggttatgagtagagagatatgctcaaagcactgaatgttgcatggaaaagtactcaacatgagctcaccacaagggggtactcgaccgaggatgacccctagagggtactcaacctaggccacctagattggatatatcattgaaagtgctttccaatgccaccgaaatcacattaatcaaatttgtgagtatagggatattcttaaacattgaaggtttccaggcaaggtactccacatgagtatgcgatcttggtgcatgcaatatggtttgcaatcctagggtattatgcactatgaaggtcctaatttccttaagttatattgcatggatcaccttagggtgcgtggcttaaggccaaggagtatgaaggtcttggcacgtatgcgccatgttcttgagtcatctattaacaatatttaactcccttggtgtttgagacattaacacttgcctcattaacatagtttctttaagacttatgccatatactttgcattgtcttacattcttatgactttccatgtgcttggatcttgagccaagtcttttcattgttgtttgcatgttatatgtatatacttgtacccctccttctatagagatggatgcctttcatgtttccaacccatgcaaggagcaaggagggggtaaggcttgatcgttgataactttgtattttttcatctagtgaggatggcatccaagtggatctacttatactttcatcaatcagccttcagatagttttttgttactatagtccatacctcagatatgtttcctacaatgtcatagttgacggtgaaaatttgtcaaccaaattatagcatgaaaatcgaaatttagatgtagatctaggattaagatgaagatcaggaaatatgaaaacttattgaaaagtgcagagtagctatgaagaacgatagaagtgtatatttctctaggtcaagtgttacaataattttacaaccccttatcacatctgaaaaaggggtattgataggctttaatttcctagggcacactaatggtcctaagggacatggtgatatccatggcctgcaagctacaggttgcaggtggtggtcttgcaccttgtacctttttctagtgaccggtggtccctagtggtaggagtagtggctgtaatgcacccttggtcaggttgtcaagctttgcaagtgtggtgcctccactacttgtacctccttgccattagaacttgcacaagaattttttgtacacacctttcatgcaggccttgtccttgtgatcggactcttgttgctttcttcttcaacacgtaggaaaatttaactaagtatagctatgttgctgtgatcgtactcttgttgccttcttcttcactagatcatggctgagtgactttctctaatgcatgatctagtgacattccctaatgcatggctaagtgacatcgtggaaagcatgatagtgaatgacattgtgataagcatggctgagggacattgtgagaagcatggccactcaaatgcatggttgagtgacatatgtgagaagcatgcccgagggacctttgtcttgagatggctgagtaaccttgatgctcacatggccgagtaacttcaagcaatgcttggtcgagcggcctctcgaattgtcatggccaagtgacttcaagccatgcttggccaagtgaccatcaaccctactcagttgaatggctcccaatctatagtttggttgtgtggccctaggatacatgcgtttacctggtaattccttggctgactattaaagtcggtttcttttatttatcgagactaatcattgactaatctcaaaaattgaacttgttaatttttgggattgacactgggccccccaatctacaagaattcatttaaattttcttgtagactaagttcggcaagtgccatccctttcacttggttctgcagtagtctctttaggcgcttgtaccttgagatcttttatttgagggagtctttttccatttgagctttctcaacctcttttctaatgtaaatgtatgatgaagggactatagactctttaagtagccttttaccgcttacttattagatattaagggagttgttagcctcttgggctatgcttagccttttttaacttttttgattctattgagggagttggtagcccttaggtggtgcttgacctcttacattgcatctgtggctcttaaagtgcattttgaaagctacaaaatcagtaatccttttagagaggcttccctctcagagttctatccaattcttcttttcttcttc

SEQ ID NO: 190850 - DNA, 3315 bp, Cannabis indica
  modified_base (3258)..(3258): a, c, t, g, unknown or other
ggttagtacatatatatatattatactccatcttaacatttatataaatatatagttatatgtagtctgaattaaggtagattagctagttctgcgcgcgactgtgtctaaggctcactgagccaaaaaatatataataaaaaaattaattaaaagtgtaatacatacataataatgtagttactatttataatctcttttactaaaaaaaaataaattactatttataatttcaaaattacgttttattattattattgcatattcgacgtatttttgatctttttctgttttaattattataataattaattatactgcgtaattatatacaaattatttgttgtttatgagaagaatttttttctataatgataattagttgaaagaagaataacaaaaggcggatgatattaagacaaaagtatatagtaaaacttttaatttttgaaatttggtgacataggacaaaaattatcttcgatctcttgttcctatatatatctttgtgtcatctacatatatgtcattaattataaaactcttgtcataattactagttctgtgattcgtaaagggaaatatcgggtaaaggtcaagtgggatgattttgagactctgtagggtatgagactacacagttgaaaagagcttaaatagattgattagtactacctatatcaacaaggtgcatcttattttctagtagcccatctcgaaagaaatctatagtcaagcatgcttgacttggggtaattttaggatgggtgagctcttggaaattttttccaaaaagcgtgcgagtgaggacaaaacacgctggaaacactcgtattggtttgtagggtgagtcatcattccatgaagcagccaaagtgacgtactcgtcgtgtataagagtcatcattccgtgggtgtaagggcccaataaaggcttaaagcaaggacgttacaaatggtatcagagccttgacccaaccaggtcgtgtggtcgacgaggacgtcggaccccgtaaggagggtaattgtgacagtcaatagtcccgtgagccgtaaagggatataccgggtaagctgtgcaatctcacatcgcttgagaaaggtcaagtgaaataattctgagactgtgtaagtatgggactgcacagtaacttgaagaggggacgttacaaaactctacacaacaatatttacacgtcaattaagaaaattagagaatattatattgagaatagtaatattctaaataatgtcaatatttatttaaataattacaaaaattatttagtgcctatatttaactataggggatttttttatatatagggcttctaaaaaaagattctatcaatgggtgggtgcttcagagtcaatattaaaatgtgacgcattatttaatgaatatatatatatattttattttgaactagatatgtcaaattattttgagtgttttttttaatattatttttgaatttgtagtgtcacctagtagttggttggtaatattaagcatgaaattatttttggtgatcaggtaccattttcaattttttttttatttattatcttttgaggaaaacaaaattacttttcatgaaagagaagatagaaattcaaattcaaatccaaaattttagagatagagtgagagagaagagagagacaggtcaagagatcgagagatcgaggttgaaggtcatttgaatctgtatatgttcataagtctgattcctaattcgaaccacaaaactcagtattaaccaattcaatctcacctgaaagcttatacaatattttattttctcatgtgaaacatcatgtaaatgacaaaatcaattaaatatatatgaactagtagccctgctgtaatattatattatatagccaagtattttattatttcagtgtacgtacgtgatgatgtgcaacattattaacattaatttatatattaggatttgagaatattattttgtttgcactatatattctatataggttctttttttaataattatttttttaaaaggttttttaatattattttagagtggtccggtacttgacaaattaaagtatgtatattatttttctttgacataaaaaatatatatttcagataaaattttgagtgggtataataatacaaataatatggtgtgaacacatgatatattacaaaaatatgggaaaaatcaacatttacattatatgcatttggcacaatttatcattcacattttttagaaattaattacatagaaaaaaaaaactaattataaatataaaattaatatttgatttttaaaaataaatatttacaaattcttataattcataattttgtacatatatgagtatcttatatattatattatggctctatgtaacattttatttttaaaaattcaataaataatgtttgttctatattatatgatcagtcatgtaatttttttttcttctccaattacaggaccaaacccacttcatggaggacttaaatcaacaaagtcaatttttggaaagtcaaatcacatatgggtagaaggagaaggaatgcttcatgctctctattttaccaaagtattaaaattagatgaagaatactattggagtgtcaactacaacaatagacatattaaaaccgaaactttcaccctcgaaaaactaaggaacaaaccctcttttcttcccgccatagggggcgattccttagctgttttatccgcttatctcctcaatttggtaactatatagttacttttttgggtaatgttttttagttttgataattcttatataaatgactatcgacattatgatattcggtcaattgtcatttgtaagaaaattatcaaaacaatgcaaaattatttttgcatttcaaagagatttgtgaaaagaaaattattttgcaaataattttttgaccaattcattactcatatatgaattattatgtgactttttagatgagatttgggaaagtaaacaaatacataagcaacaccaatgtgtttgaacattgtggaaaggtatattccattgcagaaaatcacatgcctcaagagattgacattttcacattacaaacattagccaattggcatctttctccaatttggaatagacctttcactagccatccaaaggtacttacattattgtatttattaagctcatttcttatgtacttatatacaaattagggttttcaaaattttgtctcctatatacattcttagcaaactntagtttgtacttatgtgttggtgtaaattaaatttaactaaaaacgaaaaaaaaact

SEQ ID NO: 190851 - DNA, 2936 bp, Cannabis indica
aaaaaccaaagacacaaaataaaacaaaagattattttatatttaaatattcttttcgactatatatatatttatatttcggctagtatttatttgagcacagcacttttctcggttctcattcatcatctttattctttactactccatcaaaattttattttataaatatattgatgattttcgccatttgggtcacagtgggtagcatttaattttcagatttgttttcttttttgaggtcaattgttgaaagttttatttttgaaaaattctacacgataagttcttccgaaaatcataaaattaaattctacagtgggtagcatttaatttccctacgaacccagtgtgcggagaatgttgcaaatttcccccgtccaatggtccaactcattacacacaaatgttctctttcgagtggggttattatcgtcatttcctcatttcacgacatttcatcttagacaaagatgactttcttggaaagataaaacttggaccaatgctaaactaagaaatctacaaaatataaatcatattaattttttttcgctattattttattagattaaataataatccaatattttcctttcaaaacaatttattattattatttatgttgtaaatgtggttcgtgagggtattaacgtaattaaatgacttgtgtaggggtagaatcgtaaaaccaagataaagaataaagatgtttacatgcatagcatgtacgaagccagacgatgaagacgaaggtggagcgcgtggcagcggaaccccaagtactaaagaagccgtcaaaagcctgacggcgcaggttcgtaatcctgcaccttcacacacaagccctttctctctctttaatttttctttatatcaaattctattagctctggtctttgcccgcttgcttcccctacaacctttgctttttttcagtttctttttctatctttgtgaaaacaaacaaaattacaagtcgataggagtgtctttgatatggtggggaccatctttggcatctttcacgtttttatatttatatatatatatatttatatggatttaactattgcatgtgactcacttccatacccctccactcctcttcgtactctctcgtacactacactactattaatattcatttacttatttttttccccttcacgtatatttatcttacatattaatgccattggctcaaaaacttggatgaaaaaagtgtccttgtctgctcatataatatatatgtatttgtgctcattcatttatggtatgggtattactaatatcgatcgagctacattgccccattgaaaggaaatattgctaattatgacatacacacacaagttgatcattaagtattgcatgaaattcaaagtgctaggagcattgattatcttctgtggaaactggaaaccacaatttaataactagatattttataattttaaattatcaagtgtctgtttggcctttgggttgtcataattaaaaaacttcctacagtctggcctataaggctatgaatgagtatatgtgtgtgtaaatgaatgtattagtgtgcctacttactggtgactgtataggttcggccactagactgtccgtgaatgttacccatcaatgagaaagttgaacaataatatatatacttgggaaatggcgtacataacccttaactccttaactgacccgactcttcatgcgtgcctttctggtcagctaattcatttattattgttttctataatgttttatttgtattcatttttccagaaaaatgtattttcttctttaaaaagaaactatattacaaattgtaggacatatcgttaatagaaaaaacagctattatatttgagatgtctctttgtaggtatattggatgaactaattataagtagtcacatatttggacaaaaatattaataataagataatggttgtcgatcggtcaaaatgactactaacttcctagaatatgtaattttgttgatgatgtcagctagaacacacatatatattaatatatatatatatatatatatataaattccccaattgtgcaaagtcgtgggctgtctgtctttgaataaaaaagacagtctcttacttgaaaagacaggcgggtgaatgttgctggctcggcccaccattgaattcttgtcgttttactatttcaaattcttctgaatctgaacacacattcacttgattacacagttgtattgttgggattctctctgggcctttactaccctctctctctctctttgctccagtgcatgtttgctcctgttttgcctatagaattttcagggtgcttcctttgaggtggacaagttttcttcttgtggctgggtcacttcataatattttttacctctctcagtagtaactaaaagttaaaaaaaaccattgtttgttttttatccagctattaaatatacatgactgttgaactgtagcttttgttggggtttagaatattttacgagtgtttatggttgaaagtaataggtcatttgagccatcaagataatacaatacattatttgatgcaacatcacgatccatttatttatgcatgcatgtgattttgtccatgttacgtgcgactttaagtttctgtaactatattgacatgacaaaacgagtggtgacattcagcaatcaaagtaatcttaataaatacacaaatcagcttcttgtgggtatatatatatatgataaaattatgtatgtaatttctcttcgagctacctgacccttttcagtttttttctaatcaagttgaatactgtagtcttatttacacctgaacaacaatagcgtgctcaacaacagtattttctggataaagtatctacttttaatgacatttgcatgctccgaatagaggaccacaaaaactgaccatttcagca

SEQ ID NO: 190852 - DNA, 3497 bp, Cannabis indica
gattcaggttgctcctcctcatactaaccaacttagcagacacaacagaatgacagttacacctaactgtcattattgtccttacacgccccctcaaacttagaattggtaggactaccaatgttgagtttgtgtctgaaataagagaaaacttggctagaaattggtttggttagaccatcagcaagttgatcaaaggctagaacatgcttgacttgaacttgctgatgtagaatcttctctcggacaaaataaagttctagctcgatgtgtttagttcgagcatgtagcactgggtttgctgtaagaagaattgtgcttaagttgtcacaccagacaataggaggttggggaagctaaatatgcaattctgtaaagagagaatgtaatcaggtgagttcagtaacagtttgagcgaggcttatgaattcagcttcagtgctactccttgagacagtgctctgcttcttgcactgccaggcaatgggattggagccaaaaaatatagcaaacccagatgttgaacgcttatcatcaaggtcagtagcccagtcagcatcgcagaatgctgttagttcaaggacctctgttttgtgaagttaaagaccataatcgattgtgccactaagatatctcaggattcgttttactgtttgccagtgagactgtaagggactttccatgaactgacataccttgttgacactaaaggaaatctcaggtcgagtgatgataagatactgtagagctccaactacagatcgatattgctgaggattgtccactggtgtacttccatatgcaaataacttgaggttgctgaccataggtgtgttggcaggtttagcagcatccatatctgccttgtgcagcagatcctttatgtacttggcctgagagagatgcaacccagaggaggatgaagttacctctattccaagaaaataatgaagatcccccaagtctttgagagaaaatttggcatttaaggcagcagtgtagtgtgagataagcttaggatcactgcctgtgatgataatatgatcaacatagacaagaataactgtcatggacaagggtgtatgccttataaagagactatggttagattttgatgaaacaaatcccaatgatagaaggcagtgatgtaacttgtcaaaccaagctcgaggagcttgtttgaggccatagagagctttgtgaagtttgaagaccagttcaggagattcaggactatcaaaaccaggtggttgaagcatgtaaacttcttcctgtaaatccccatttaaaaaagcattcttgacatcgagttgcttgatttcctaacctttcgaaagagctagagtgagaacaaccctgatggtaacaggcttaacaacaggactaaatgtttctgtaaagtcaaaaccaggttgttggtgaaaacctttagcaacaagtctggctttgagctttgagacacttccatcaggattctctttgattctataaacccacttggacccaataacagttcttccaggtggtaacctgacaagagtgtaggttcaatttttcttgagagctagaatctcttcagccattgcattgttccactgtaagttttgtaaagcctgcttcagagtggttggaacttgagtagtcaaatagaccttaggtttcttaatgccacatttagctcttgtttgcatagagtgggcattgacaggagctactgtggcagtaggaacattatcagctgcagcagcagtaggagcagtagctggtgtagactaagtttcatgagtaggagcaatagttgcagatgattgaagttggctctctggtttaggagaagcagcaagcattagtggaaccaaattcctaaagatagttgttgtgctggtgccctgaaaattctaatctccatctctctcaaccacaacattgtcaccagatgcatgtgtagttgaggaagaaggagaatcagtggtagcattagtgggaaataatagatcaacattataatgacactcagaaataggaattttgctaaagatgccagactctgatttgtgagaatgggaagtggtggaatttaaatgccgatgtggaaatgtggactcatcagaaataacatccctagagatgtatagcctaccagatgggtcaagacacttgtaacctttatggttcaagctatagccaatcaaagtgcaaggagaagatcgatactcaagcttgtgtttgttttatggtcgaatattgggaaaacatttacaaccaaaaactttaaaggaagagtaatctggtgtaatgttgaacaagactttaattggggatttcagagatagaacaggtgttgggagcttattgtataggtagacagctgtcctaaaagcctcatcccaatattttaaaggtaggttggcttgagctaagagagttaggccattttccactatatgcttgtgttttctttcaacaattccattttgttcatgggttgtgggacatggttttctgtgaatgataccagcctcttgaagagactgtgtgaatgacctgtattcccctccccaatccgattgaaagaccttaattttggttcctaattgaagttcaacctcagccttaaaaatgtgaaatgccttaatggcatcagatttagttttaagcaagtacagccatgtgaatctcgagtatgcatcaatgaagtgtatatagtacttatagtcattgtgagatgtagtgaatgatggaccccataaatcagaatggacaagtttaaaagaggcagtatagcaagagtcagatgacttaggaaagggaaacttatggattttgcctaaacaacaagatgaacaaactgaatgtggaattttattcacattggaaatattacatttggagagtacatttttgacaatccgttcagagggatgtcctaaacgattaggccatagctcatactcattagtaggagctttacatttgacacaaagactgaaattaacatgctgagattgtgtggtggtggctatgttcgtacagtgcaggggtgtgagattagagctgctacatggtgttggagagtcagaccattgtatttgactcgaatcaaaagtatataggtcattgtgatgtctcccagtcagcagagttgtattactcatctggtccttgacaaaacagaaattgtggtaaaacacaaaatagacattattgtcagcagcaaacttagacacactaaagaggttttgttgggttttatgccctaaataaaactcatttcaatataatcagatttacttattaatattgtaaagaccgcatatgattagtatcttgaattattaaatagttagggtttatgtatgagattaaattaatatttatgaaatgcatattttggaaatatatttaatatcatatatattattatgctattttatgtaaattactcaatttctgcgattgtgttcggaagccgtagaaagcgacgttgggcctttaga

SEQ ID NO: 190853 - DNA, 1803 bp, Cannabis indica
aaaattaatttttagtctatttttcaccaaaatggtttattgttttttatgggttttaattattatcattgtgagacaatcgttatctatgtttccacataagtaaacattatacatagagatcaactaactaacaatatttaatttcaatgatcaatatatttatatagaaattaataaatagacaagtgaaagaaacaagggaaaaaaagtatataattgtaaggaggcaagtttattattagaaagtcaataatttaagttaggggaccatataagaataataataataataatattaatccaatagggagatcataaaaaaatcagtatattatttttttcccaaacaccattgctatgaagatttcaaacatagaaaagaccactcataatttattatcttctagctattatatatcttgtctttcatctatttatatttatttttcaatcaatataaattattttcattgtttattgaataattgatttcatgatcatgtataaatggattaaatttactttggtgttatgatcaaataacattatgagagaatgttcctcctccacctttaaaaattaattaagttgttttgtgctaattagtggaatgtttggttttttttttttttttaaataatatattgatagcgaaaatgctttaaaagtacttagtttctttttcttttctttattcttttatataggaaaaggcttgattgtgattgttaaatagttgtgtctatgcattattaatttgtgtgattgttatttagaatgaattaagatcattgttagttatagattggagattgtcattttgaaatgatttagatttagacttattgtccaagaattttaataatctactatttaatttttctgaaatgtccctaatttttatttattgtacaattaatatgattttttataaatgggttgcgtattcacttaaaatgaatgatgaactagtttggatgaatgattttttatttcttctttacttactttttccttaaaaaaatggatcttaatttgacaaaaatgattacacgattatttgagtattattatttttgatacatatcatgtaattagacaaaaaaaaaattatataatagacaaaaaaaaatatattaacatgaaaaatttttatttttacactttgaatatttttattatatataaaaaatatctatcttttcagtaaaaataataaattaattttttgattattttatagtttatttatttgtattataattgtgatgtgattgtttttttttttttaaattctcgttattttttaaattttttcatattttttattgaacaaagtgtaatttttacttttaaaactttacatatatttttataaataaataaatactttagaccgtaaaattgtaaaaaacttaaaaaagaaaaaaaaaatgtatttttgaaattctccatgtatattaccatacgtacgtagtatataactctaagttaaacttatgttatttggtttttcaattttagtaataatcaatattgtgtcaatatttatattatagatatatatatgtatgttatatataactatatatatatacgtcaatatgtgtgtgttctaattatcgatatatagcagatgatgactacattatgatcaaatgatgatctcattgtaatatatatctataaattctaatattatatgcacacaattaaaaacttttctttgcaaatcttccactgcatggttcaatgttgggctatatattacgtataaatatttaatttatacatatatat

SEQ ID NO: 190854 - DNA, 5976 bp, Cannabis indica
cttccttctttagctgcatattataaaatcatagttaaacataatatatacacattggacatgtataaatgtatttttcctaagcatcttcatctttagttttgttcccattatttcaggatagatgatagagaaattgaaagttaaaaacctgcagcaattccttttcacgagacgctttccattgtcggaattgttctgcctcttgctttatcttatgctgcaattgaacctacaaatcaatgaccaacaagtcaaggcggatttcgttgtataagactcggaacctttcattgtatatgacttgaaatgtaaaaaaacaacgtgtgactttacttttcgttttttacttctgttcatatattatgacctatcaggtttggtttctgataaagcagattactattctcatcaaacagttttacaatttcacgaactaaccttctgagatttaatagattgtatttcggattgcagccgctttgctgcatcgtcacttttctgtttttccttaacaagttggacttggctttcttgcttcttcttaagatccaaaatctgatacaacacaattactcgagtttcaatcaacactgcaattttttcattcataataacatttaaacatagttgatattggttacctgggcttctagagattttagtttttgtgtatgagaatcgtgagctttattatgcgcttgtccatcggaattggcagcaagactctcaacttcagccaacaagtgatctctctctttctgtgattgttaatatgaatattagcagcaatataaagtgttaagatttaatgaaaatttaagagcatcaattatacctgcacaattctcttctcttcttcgagttccacgattttcttcccgaagtgctgtttgagtgtttctgtgtcaatccctccaaaaagcctcatttcagactgtaccgaaaaaagaataaaattatgacattcattataaacatgcataccgaggaaattcaacaggtgttgcatcgaaaacaaagagccctacatttacagccataactattcaagtgtcgagtctatgcataacatacaaagaaacttttaagaaaaatttgaacctctttttgttccaagcgtttgtttaactcgttcaactccttatccaatgtattttgcatatattcatgttctcgctcttttgttgcaacttcaacttctctaggattttcacctgtacagtttattaaaatgcgaaagatgtcaagaactacaggcctgaagaataacaatcttaagtagccaaaacaaaaattaactcttacctgatatgatttcgcccatttcataatcagaggaatcgatactttgaaagcctctcttaagtccatcattctttgtaagaggagcatagtcatcctaaggaaggtaacaaaaaacagataccatgtcagtaatcatagtttgaatttattaaagagatcgaaacaatgtgaggctttgaacaacaacggagaagtagtatgacatatatttgttcaaatatacaaaaaagtttattacacacttaccggaagatctgcttcacactgccccacaacagcacgtctactgcgatatacatgaagttctcgagaaaggtccaaattgcttgcttcaaggaacgcaatccgttccctaagaacctaaggtagaagcaataatatacctgttaggcctcaaatatatgctttcatatccaagtgtatgcaatgcataagttgttcagtttagttcctatagggctcctcattttgttagttagatagaattatgttattgctttttagttaatagccgagtctgtataaaggccagtcgtctcttaaagaaagtaaaatactttctggggagatacgaaattgtctcgaaaagtttggaactttgtaattcttcctatgatatcaataagattcctatattccaattctttcaagaactgaattggatcaatagtgtaatcaacaccatcgaatggacttcgttttcagacgccacttcagaacagaaacaaccaattccaagcaaaagaaggtttcgatataacaaatacctatacttcatcagatggagctgcgcccccacgggaaaatagctctgcctgcaagtattccagctgctgtcgcatcttttgcatttcattggattcgagacctctattaacctacacaaacacacacacacacgagggtaaatttattcaatgttttttcgataaatctaaaatttagaaaatatcatgtttaagcaacagagccatttgataacttacaacaggcttgttctgaatattccgagcacgatttgcatatttaagagtattaagagtttcctctgcattgatgtcagcagggctgatacaagctgtaaagtagaaatttttccatctcataagagaaacataaaaggactataatatggaggaaccgaaaacaaagatgccatgaaagaaaccatcaactttcacccatgaaatgattttggtaagacagtgaaaaatctttaagagttacaagaaagtgtatatcatgtcgaaagcatcaaagttgggggaaaaaaccacgagcccggaaaaaaggattgtctcatgtcttggtcaaaagaaggatgatgagaattcgaaatcttaatcattggctttttggggttaagatccattaaactagcaatgcatataattgattaaacaatcagttaagaggttacctatcataactgtcttgctgtttccacctagtgaatcctgtcagaagccacaagtgaatccatctcagaataagtagattgctatgatcaagatttagccttaggttgagaaaatatagtttaagtacaattatataattccaataaactgacctgcaagagtcgagtgagttttacatctcgataaggaacatgaacaccctctttccgttttttctcatcccccaatgcactgatgacatttccaagtgctagaaggccccggttgatatgtatacctgagcataaaaaatttaagttagaagtttcgttatttcttcacaaatcgaaactaagactaaatgcatcaacagattcatcaaccttctttaagacgaacaccatcagaaccggttctttttgctcgttcggatccagcaagatctaccaaatggagctttgcacaaaaatattcttcactcatatcctcatctggagaatcgttcccgggaaaaactgaatgaactttccgcatctgttctaaggtgattgtgaaaatggcgtgtgatcggctggtagataacatgtaatgaagcttcagttactcttagattcattaacttacattaaaaatattgaaaagctcggttagctcggtagtatgacaagttaccttgattggttgttcatgttagtactgccagttgctctgcttaaagatccttgctccaagcaagcagccatttcctgtaatgttctaacagacatttcagttgttcccgctagtgttatggccccgtttgatgattctcgaatttgtataggctgtctaactggagcagaaactttcccattcccagaatgtccattaacattgtccattttgttcagagatacagaatccaataagtctcttacttcttcttttaagatcttcaaaatcaaaccacccaattaattatttgtaacaataaagtaaacagaagaaatatcgaatcatatgatcttgccattgtcccacaactttcttagaagcttttttcccatgtgttattacttattaaataagaattctgatagaatgaatacaatttgagactcaatattttccaaaatagtatcaatctaacacgaacatatgcaaaaaaaaaaaatgtaaccagtatggtcataacaaattattattaagtttatttagacaaaaaatgagctcaatatattattttgtactattttaaaaaatacagaatctgaattgtcatttaacaaaacaaagagtccaatcggtaacttttacaaaacacagtgttcagactccaaaatagtatttaaccattttcatatgtttctctagttcatcttctttagctcattgtataagctttaatagcataacactataaacaacacaaacaaacaaaccaaacattcttaggtgcatacctcaatgaaggaaacctggagctggaattctgtttgatgttttaaagtttcgatcttgctgaaaagtgcattcatagcttgaggaacaatgccagtttggctacaatctttagagcccgtccccattgtgtatgttttccccgatcccgtctacataaatacatataaattaaccacaacataataaaacaacacaaaaagatcttgttcttgctaaatttacaatttattgtagaacaagaattacctgaccataagcaagaacagtggcattgtatccttggaataaaccatccacaagtggagcaatgcattcttcaaacattgcaggtgatgctgttccaccacttccataaacatggtcaaaagtaaaggaatgtgatccgatttgtacctaaacaccatagttaattcaaattacaaaacattgcctttaaaactatttcgaaactaagatccacaccgcgcctcgcctaaccctacaatatttggtgaccaggaaactatagcacttgctatgtaggtacccgagagggactcgaacctcagaccttgtcagagcaaaccatatgcctaaccaaattccaaagaactattcattcaattttgtgacaaccccattttctaggaactattcattcaattttgtgacaaccccattttctaactcttatcattcattagagtcttcacacattttaataagtgaaactaaacaaatgtcttttgtttctattctatagctttagaagccttatccttctattctaggacacagtaaattccataaaatgaacaaatcaattacaatcattaagagaaaaaaactgaatcatgagaagaaataaccaaaccccacaacaaaattagctaaattaatccttaaaaagctcatgaacaaaacacaaagtaagaaactttactaatcacctgaggttttcctggtgtgacagaaacacattctttacaaccttggattctttcatcaccaataagaggacgaacatgaacagcaaccttaacagaacaattctcagatgactccataactaatcaattaattcacttaacaaaaaatgacccagaagggtatacaagaaaaagcttcaaacttaaatttattttctgggcagttgagatttggatgaagaaaacgatgtagtaacagaccaataaagaaaaagaaagagaaagacaagggtctaggtgggttagatgtgatttgatttgaagaacaagaagaagaaactctaacactaataaggaatagaaatgaaggaacttgttcaaattcttcttcttcttcttcttcttagtctcattatagtatttttttagtacaaagtataaagctttttagagcttagctcatttttccttgttcttcactctcacactattcttcttcttttctttacctcaaaactgaactgaaacccaatgttggtgagagagacttctctaccaaactttcccattttacccctcttggtccaacctcctcttcttacatctagatcactttttcttttttattaaaaatataatttttatttttcttcttctcctatgttttccactggtctattcattcctatactactgtctctaactaattgtacagttattgttaccgtattatcatattttttcaactgtcgtttagtactttttggctcttgtctttttttttttaagaaaataaaatcaaatttctttttttttaactattttattctttgtttgtatttagtgacaaagttttgatttttatgttacatactgtaaacatgataataggaaaatataaagttttgatttttatt

SEQ ID NO: 190855 - DNA, 2088 bp, Cannabis indica
cccacttacactaaaagtaagtgaagctcattccataactcttatagatattgtatctcatttgactgttcaagctaaaatcacataaacgagaccctccgcataatgtagcaccaggtcccaaagaccaccacattatcattggataaatatacagaattagattctagtatatttagtatattcatccttttatttccttcaggttcactttgtttaattcatcatttaatattctcaatattaaatacatgtttattcaaaactgagttttgaaactgactaatctagaaccctccattagtcacatctatttgattctattagttaagacaattaatgaactcccacataaaacttgtaaaacaccaatcaatgccccccaccgtactaataattgaatcaacgtgataacgagtttaatatagaactcttacatacatcaaatcatgccaaagcaacacaataccaccactcttgcctattgaattcacccaaaagcaaccagtaaagccaagacgcacacgcacccactctatttggacaaataagccttcattttagaaggaaaattacactaggagcatgctcgcgaaccaagaaaacaagggaattcattgctgagggttcccaacccttggacatctcaaaaaagggaaaacatggctcctaacggccttgcttggggtgcattgatctttcctcatcttctgggtttgaatccaccacataagaaacatcccttgtccaatcatacccgctacaatctgctcgccagtgtcagtatccattggagccaaataaataagtgttgcttccagtctaatccttttcccatctttctgagccataaaattcttcatcttggaggaccacatgacacattcttggctatactaccaagaaaaaaggagataggaacttccaccaaagattatgcaattatcaaccccatacccccaacttgaaccattgatggagactgatcctcatccttggagcctgagaattctccttgagtaagttctagagagccttccagaataacaatagacttaagatcaccatagatgcatgaattccctatgttgtagcatcgttcactggacttggagcacgcccctaaggggttttgaaggaggtcgaggaagagccctagtaggagtagttagttctccgagaagcaaaaattttggtccataatgcaataacaaaccaagtcccataagctctttgcatattcctagacgcaccttcaaacaattcctccagggcattacaaattttacttttgtgacctaccttcccacaccaaaaacatatatatgggagtcgattataccgaaagggaagccatattttaccacctttctttgggaataaaaaacatggaaaaatcttggaatgagtggagttcatgactttgaaatgaaaatagccattggctgccattttaggaatacccagatcttgaacagagatgacagtatcagctagccccacaagtttcctcatgtttggaataggaagatgaaaaactcgaccttccaggggaaaccagagcaattaagattcccaattaagaggaatatggtccatccgtgcaagaatcaagaacccttgctgcaacacagagttggccagagggtggagcggccagagcctaggccccaaaaaaattaaaattaatattatatatatggaaactaatatgtaatatattaattttattttaatatgttacatgaaatatttatagtacaattggttaggagaattgtatgttagtactgtggtcatgtgttcaatccacaatagtggcacttttaattttttttaattctaagttttgcatttatatatataatgtacatagtgattagtttaaatttgtaaagataattagggttttttttttggggaaaattactccatatactatttttttaatttttttttttaaattttacagtttgggttgctccggcggtgtctctggtagtttttatgtgggttgctatacagatttttgatgtaattttggttgctccgttagttgctttaaggatttctatgtggaatttcgta

SEQ ID NO: 190856 - DNA, 2836 bp, Cannabis indica
ctacatgttaggttatttgtctgactatagaattgttagtttatgcttatctaggttgttgacaccttactgttcttggtgctgagtaagttttctgacactagaaatgattaaagtttgataattctagtctaactgtctacatcaaatagagtttgtaacactcatgaaaccccttatgcccgtatacttgtttgtcaagtaaagttgtacctttatttaatactataagtataaggagtctggatgccacatctggcttacttcttttgagagctttcaatatagagtaagccatgcctacaattttacttgacatacaatttctgttctggtctaattatttgccttattgtccaatatatcatgtatgaacattctagtttttattcgaattttcttaggtatatatctcccttgctgttaagtctcttacccacctgaaaatcataatgtcgtttattccgtagagatttcttaaagttttatttataatttatcaattccttttttgccacagaatgttctcctgtgtgatatgcaatattatccttttttccccaactgggagtcattacacattagtgattgattagatggtggtgacttcactggatcttcctatcatggaggcaaaacacctagtataggattgggaaatttcgaaacctagacgggttgatattttgctttttgctgatggtttcttatcagggatttgatggttttaaagggattgtttaaacattactgtaatttttgcttgagccttgaagattgtagcagtttaaccctgacattgtagttttcctgaattataatcaatgtcaatgttcattgctttatgagaacttgctgatctgtagcttgactttctaattgaatttcttagttatcaaaacctgagctacttagactatgcatattgtgatcagaaattttagggcacatttatagaggggttgtagtgtaactgaagcatgagaaatggtcactttatactagttattagagcataaaagtcacatatctgttcgggactttgcattgccagggccaaacaatcaacactaattagtggccacgtttggaggatataagattgtgtagttagatggtgcattttttgtttgacggtgttttgaaaggaacagctgaactagactgatgtctatagaaaaagttatagaagtttacttgcatagaagactccctttttcttctcatattaagacttagctatactttaaaattgtgctttgttcaagctagaaaccgtaatcgtgatttccgtcattatcataagttgatcaatgctttcttttatcctcaagtctctataaacaccctaaaaaaacttcattattgtgctggagcaaagagaacaaaaatttacaagtgttgacttttaattgaggaagtgtaagtttatgttttatgttagcttgttaacaatggaagacatgttttggatagtggtcaagtgaccttgtttcatgttttcctgctgtagtaaatagggatcagcttaaactggtttgacagttcaaggataccttagtcaagtcctaggagttagatttttctgtagtttccgttacaggtttatagaaaaaaaggatattttgtgtcttgaaaattaacagagaagaggtggtaaaagaaacaataactaatctttggaccaagcttttgcttgccatgtgagttctgacatttgttttttcggttactgcagcatatactctgagttaattagctcagctaaggaagataacccacagccagcagtggagcagtttctgactctccattctagtttgagcaatgcacggtcaatagttgattcattgtctaaaaccatacaagctgctggtgtatccccagatactgaagaaagcccttcagaagaagcccaaaaggtcacatcagaaaaacgaaaactagcagcctattgggtgcaagccgcgttagttacaaatctgtcttcctttgctgtgttctctaaagatcctgcatcattgtctataccatctacaggttctcaaaaccaaaaggctacctttggaaatcaacctatgttagttcttgaaaattcaaccaagaatgccttaacaaaatcccagagtaaagttcgtcccatgctcggatcaaagcttagtgcacctggaacccctcgccgagcaggagatggatcggcgatctctcaaaagctgcaaagccaaccaagccaaccacctgaatgggtaaaaggaaatggctttaacgaggctgttgacatggccgacaagctgcgattgcaatcccaggattggtttttggggtttgtggaaaggttcttggatgctgatgtggattcatcagctttgtcggataatggccaaattgcagggatgttgactcaactgaagagtgtgaatgactggttagacaacatcagtcttaataaggatgaagaagaaaacccccatgtttccgtagaaaccattgacaggctgaggaagaagatatacgagtatcttctcacacatgttgagtctgctgctgctgcacttggtggtggatcccaatcgtccccgaggatccggacgacagaaataaaagtgagaaaataagtcaaatgaagttctgttttggattttgttcaaatgtggtgcgtccgttggacaacaatgctgcacccaaccattgaagctgtgcccctaccaccaagtggaaccaaggagccagatgttaatttatgtatatagaattcacataggtttgaggtatagacagcgcatggagattgattctcaagaaaaatgaatttagtttcaaaattgatctttttttt

SEQ ID NO: 190857 - DNA, 2079 bp, Cannabis indica
cgtagaacccttggcatggtcaggctcggctcgggattcctcagtttcgctcttgggcacgttttccggcgacggcaagcacgcgagtctctgcaactcgcccgagatatcgctgctacaggcagaaaaatcactgaaagcctgagaaagctcgagaaattcctcctcagtcgatgtagacttggccggtttgttagtccgggaagcgagttcgccgagcctcatgtcgataacggattcagttaaattctcggaaacacagcgagagacttcggagcagctatggtcttcttggaagatggtggagcgtatggttcgcatcgaacggccagtatttctgttaattctggtagacgagcttggcgacgccatgtaatagtttcgggtcaggtggaaccgggtcgacccggaatgcgaatcttgaagagacaccattggggttaactagccaagtttcagagcttcgagagtttaaggtttcagatatttaccagtttattttggatatgagattttttgttatttaaacattaaaattttctcaaatgaaatctcaggtttgagagtaaagcgaagctagaggttgaagaagatgatgaggcagtggatttaaagttgcagtttattattattttttaagtgttaatgcggctcttgggttcgtgataaaataacgaggcggttttgattcttgtccatcacagaccacataaataatacacatggtctgcttaggtcttgtcaggtgggggctactcgagttagatcaaagatctgatgctcagaagacacgatgattattcagatatcgacggtcagaaacgtcgactgatttgactgtgatcacagtcctgtttcattttctagtggctattcagtgggaccgtcggccgaaaacccatacgacgtcgtttatttatgtctttagatcaaattacagttaagtccttggcgaaatacccctttaattttatttttttttataatttaagtgaaaaagagtgggagaatgaggtggtaagattctgcgttgggggttacgacaagagtcagttacaactgttaatttctgtatgtttgccacgtggtatttaactcccgtagtttttattttaccgccgtgatggttttttgatcgtcgattatccacatcctacggtgattagggtgtttgagaagtgagcccgagtcaaaccttttacttttaataattcttaaattttatccgtgtgtggtttgcgtctagaatcatttgtactcacacgtcaaccacacgtggcttcacgagaaaatctaccgcacgtgcttggatagcccaaaggcaaagccacctatatggttgtactagttacactagtacgagtactgagtacataaagaacgcgttactgattttatcgaggaattaatgcattaacaataaaaccaaaagaaataataaaaaagttgtaccaaccaaatgaccaatctaaccatatacgacatcatttcaataaatatatatatgaaaaaaaaaacatatacgacatatacaaataggagtggattttcgaagtacaataacagaaccgtatatataccaaaattaacctacacataataaaagctcacctaattaatacctaaataatatgcttaatattttatttaaattgtaattatgtccgcctttggtttgctcttataatatttttctttctaatcaatagtctaatttaatttttgggtgaagtagccacttacttgttcaacttgtctatataacaaacaactcattataatttatttgccataatgtcatctataaattaatattttgggttggcaatgagatatatataaattaattattccgaaaataatatctacttaaatgcatacgcctttaattatctaaagattcacgtacaaacaatgtacatggccatatatgatatataagatccaaaaattgtatattaaatactatctcaatatgaccatatatattaaggatatgatcaatcatatatagtgtatgttcatacatattaattaaacgaaccttttgtggacatgcatttttaaacaaatatatat

SEQ ID NO: 190858 - DNA, 1102 bp, Cannabis indica
tacaaatttaaaattttaaatacctttagggctattttctcatttcctaaatactaaaattttcaaagaaaaccaaactcaacaactcagtcaaagttacttataattaaaaacacagagggtttatattattccatccttttagagaagtagcatagttgaccataattaattataaaaccagaaactactaattctaatttacaaccaatctttataataattaaagagatgtaattgttatatataataatgtgagtaacattacaaatatatagatttatgtatatttacacacccatttgtgctaaagttggaattggagcaggagcagattgtgtattattattgattgtaatgaccacatgttgaggttgagatgatgatgatgatgatgagtgatctatgtttgagttgtttgtttttcgtggtgaaacacaaacattattcataggatgatcattagtagtagtggtagtgaattgtgcaagtgaggcaagttcatggactgagtcagcaattttgtcagtgcaattaacaacatcaagtagtagtgaagcaactgtgacacaagggatagcctctaaaaggtcaatattctccaacaccccagacttgaacaaagatctcagacacttggctgcagcttttgaactcgctatgtgcccaatatcattatcatcatcaccaactgatgatgagggtattttagtcatttccctcaccgacttggctagctccttcagtgctttaccactttccaagcttatttttgtgcatgcttcttggatctgttctctgatttctggtgatgcctgaaaaagtattattatcactagttaattaaaccttatttataatatgcaggataaagtaaaaaataaaaatgtgtttattatgttaaatgctgatctctagaattgattgtatgcgtaatgcgttcacaccattatatatgtgttcaaatataaaagtaaaagatggtatttaaattttatttaattgtctaaaatcgtacatatttacattttgtattctaattatttttcagaaaataaaataataggtgcttctaggatatacccatattagaattttttaa

SEQ ID NO: 190859 - DNA, 926 bp, Cannabis indica
agaagatgtagaactctttcttttttgtggtgtctgacatttctagatcgttagagctcataattcataattattatttttcttcccattattatcccttcaaaaccaaaaaaaaacaaaggcataatgagatgttggaaataacattctgaaaagtcaagcttatccctcacctaatccccatcctgggttagatacataggggtggtatcggcattgaacaaaaaaaaaagattctagagataatattattattattattattatagactttgctttgccgcctgtttaagcgactcaactatagaataagctttcgctgtcactatgagtatgatgaaggtgaccactgaccaatttgacccttaatataatatataagtgacattggtttatttaacaaccaaggttatttaggtaatttagctccttcccgtcgtccataaaaccagatcatcctcgtctcatctaaacacaaaacacaagctataatatagtgcttcaccaaaaataaaatgggtgaggaaaagagcaaggttttgatcattggaggcactggctacattgggaagttcgtggtggaagcgagcgctaaggcagggcaccccacgtttgctctggtgagggagaccacactgaatgaccctgctaagggacaactcgttcaaaaattcaaagacttgggtgtcactttgcttcacgtatgtatatatatatatataatattattggcatattatttggtcatttaggtgtactaattgtattctatctatgtatttaaattaacgtgttctattacatgcagggtgatctttatgagcatgagagtttggtcaaggccatcaagcaagttgatgtggtgatatcaacggtgggtcacatgcaggtggctgatcaggttaaaatcatcgctgccattaaag

SEQ ID NO: 190860 - DNA, 1451 bp, Cannabis indica
attttattacaatatgaatcgtagtatttaatttacacatagcaaacgattcgtattagcctagattataatatttataaaaagtccggggttggggatcccaaccccagacgtggctccggtcccaaatctttgaccccagactcaagactcggacctggccctaacctcaaaccctagagccaaacccaaatcccagagtcgatctggactagaaccctggacgcggaacccgactctatcccaggactggccctggacccggactcggaccttgaccacggacccagaccccgactcaaactcaaacttagacggcccagacccggattcggccccaatcttggactccagacttgaacccccgacctgaacccttaatcccagaccctggccccgaacagggttaggagttggagtcgagtttatggcaaatataatataatttacacaagttattaatacaagttaaagtttgtattaaataatacaatataatccaacacaatacaaatacaacacgacgtaccaaacgagtccataatatttgatataaacataatatttaaaaatatatataattatactaacctttcaacagcactagtgaaaagctctaattcctccaaagttccatatacatcataaatatcatcaattattgttataagcacaaataatcttgcatttattcttctaaaatagctgaattctccctcgaattttagtccaacatcccataagaaagcttccatcaatctatctctagcaaaattcaatttcccaccaagtttacaatccctccaccacctaaaaatatacaaatatattattagaaaaatagagcatatataattattcaataaatatacataatctatctctagcaaacattcattgcatgttactaatacctaatatatacagttataattattacctcgataaatgttgtaaatcttcttggtgtgttgattgcactatattaaaatctaatttcgcaaactcgaacaaagtcgaattcatgtcttgttttttctcatatatttcgtcaatgaaccacctagcttccgatcttgttattctccaatgaagcggaagctcgaaagcgtgattaattaatagcaaattactattaatattattatcatctaataatatatttttttctcttcctcattctccattttctccatgtattttttaagacatttagttgaaaaaattcttgcttcctccaaaatattttcatgtttcatagcatagaatgaagcttcatataaacacaatactcccataatatcatcactcaagcatgttttaaatttccctctcttatccttgaaagcattaaaaatttctgcaataaaattcataagatatatcaatcactatttattgtacatctactaaagaaaccatgcataatgatttatttttttttaaaaaaa

SEQ ID NO: 190861 - DNA, 1507 bp, Cannabis indica
ggtagtataggatgatgaggatgctaccttcttcttcttcacagtggatatatatatatatatatatatatatatatatgtaataaaaatatatacagaccattattcactctacaaaatttttaaccacaaacctatatttacatatattatatttatgatgtttttatataagtatggaaaacgtggatttcgattttatttctctatatttaatgtatatggaaaactggtgaatctgtaacaatttttctaagtatgtgccattaattaatgtgtttgttgcagagatggattttatttaggtatatattaattgatactatgatcactacaataattttctattgtcataattttttctgatgtgttgtcactaaaatttagaattatatatatatatttgaggaaaaaagaattatgttatgactacaatatttacaacaagtttgaagaacaattaactaactaaacaaagctataacatttcaaccaacattaatgaaccataactaacttaatagttgttagttaaaacggtatataatcatacattgtttgcaacatttagtgatagaaatttgattcgcgggatgggtacccacgaccacgagtactcaccctgaatgggaaggaaattacctaccttattgggtaatggggtgggggtagagtgcaattttatatacccaaagcgggttcaaagtgggatcggggtgctactactcacccaccccatattcgatcaagatatataatttctaaactttttatataattcaattattttaatacttacctattaaaattattggttatacttacaaagttaacttttaatctttcctaacttactatataatagactttttaatatacgttatttgtttattttaaaataatattttatttttattttattttaaattacattccattattattattattttaatttttatgagtatccaataggtccccatacctaatggaaattctccaatacccaaacacatcgagggttaagcgaggtaggagcggagatagaggacataaatgagaaacgagaatgaaattgagaggtacattactcgtttattatccacccaatttccatctctagcaacattatcaattttaataataataaaaaaaaaaccataaactcattaattaaagaaattcaataaacaaaacaacgggaataccgtgaaaattttggaaggttcatagtgggatccattttttaatgcatgaagctcataagtttgcctagacttttaacattttgggagactcacaaaaataataaattgtttaaatttacttataattagatgtttgacacttgtaatttcataacccaaatatttatgttttaaataaataaagaaccgtttggaacaaacttttataaatattaaaaataatataaagggatagaaatggattcaatagaatcactattataatacattgtaataatatttttacaatgcaattaatc

SEQ ID NO: 190862 - DNA, 2708 bp, Cannabis indica
gttaatcagcccaaacaataattaatatataaataaataaataatgaaaaggaaaaatgatctcatgcatggtaaaaataatgcatctcaagtagtgttcttggattggcctagacatatgtatgtgtgtgtttagagcacacttagtctagaagtccaaaaaaggcttcattgatattcaaaagttgactacaaatatatacaaaatcagtgagaggtatgaggatggagtttgtggaagtgagattaatgaatccatttcctcattatgttttgtttgaatgaagtgtaacccaaatcatgcttactaacttcattcattcaaattcaattctatacataataataataataataataataataatagtaacaccacattacatactccatcgattgattaattcatcaatgccaaccttcaaacttctttctattatactatttatcccttcttcttccattaattatttgatgattaaacattaagaataaaaatatggccatagaagatcatcattcatcacataataacaatgacatttttaactgtacaaaaccaatcaataagttaaccgaattgacaatcaaatgcccactttgttctgtttgttcatgcatattgatatagtcaaataaaaaattgaatgaaacaaagaaaaagaaaaaagaaacacttgaaattagctcaaattccatttccaaaaaaaaaaaaaataagttccactattagcaaatatttgtttaatataaaaagaggaaaattctacaatacatctttttggataggatgcaccgatgcacttttttctatttcggtatttaaaaaatatgtagtccaaatttcttttataggcctataagttgtagttatttaaaataactaacagaattttgagaaattcaaaaaaaattaacacgtcgaaaacaaagtttaaagagcatgttgcacaattaatttttttatttatatgcatgtgaaatagacggtttgaatattaatttctatatgaccttatttgctttagcttctataagctttattttttttaagtttttagaatttttaagtctttctatggatgtttgagtgaaaaataaaagttctttttcaatttaaaaaattcttttgaaagaagctaagatttgtagcttctcctaaaaagcttttgagaagctatttttaaaattaaaataatttacataattactaatttattcacaatttttttaatgatattcaaacaagttaaaaagcactttttaataaaaaaagatcttcatataataattattcaaacggtaaaaataaatcaaaacttatacttatcttataattataggtgatatttgtggcgaaaccctcttaacatttacaattgttacacatatgaccttaatcaaaaaaatagtagtaaaagtactttatcttacgattttgttgcaatcgtacccttttttgatcttttaagtatcaacttagaaacacgtggtgacatattattggcctatgtattaaataagctaaagaaatatgtagccacgtgtttctgagctggtatttaataggtttaatcggcacttaacagccaaaaaaggtacgactgcaataaaatcgtaagataagatacttttgtcgccacgtttttttattaagatctaatgtgtaacaattacaaatgttataagggttcgccgtaaatatctctatttatagctataagtaaaaatagaagcttagctaataaattatttcaaaattttcaaaattttacaaaatgtttataataactataacgtactagactataaaaaaattattgtaaataccaaaagaatttgaaattgcatctttgcttatattttatagagatgcttttagaagcaccctaaataataaaactaaaaagaaatatttgaaggaacaaacaaatgggatcccaaatccaatgacaaatcatataacataacggctagttggactcggaatagagtaccgttgtgattgtgagcgagtgagagagaaagtaaaagaaaacccttttgtctcagctacctctcaattcaatctcactcagattttctcctactaccaattccagaggaatcgaatcgacgacgccatgaacgccatcaacttcttcaagaagaagacttcacccaaaggtccatttctctcttctcttctctttttactgtttagggttttctttcttatgtctttttctctttttcattggaaatcttcttcggtggaacaaaagtatgtaatgggttttcattttatggttaaaagttttgattttgatcccttctattgaaattaacagaagctcttcggacaagcaagagagaaatgggcgttgccaccagaggtaatgtatcttcatcttatgctgttctttgctctttttgctataaacaattcattttgttaaatgggcaaatccagattcagatttccaagtgtcaatgcttagtgttgcttctttgttatgttatcataaaacttcatattcagctctaattatgaaaacacttaaacatgtttcacacacagaatactactttactcatgttagttttgtcctattaccatattgtgtaatcattagtgttttgttaggatcacacttcagttcagctgtagtaatcttaacacttcttcttatagtactaatgtgctaggccttagggtagtaaataaa

SEQ ID NO: 190863 - DNA, 1967 bp, Cannabis indica
aaaaatccttacactctccttgtaaaataaggatggaaaatccttcaatcccccattttatgttggctagggttctaaatgagtgttactttgttaattgcttattcttggaggcaaaaccaggtgggtatagctcgttcatgtgatgtagtatcctttggtggaggaaattgatcaaaaaaggggttcactgtcgaataaaatctggcaaccaacttaagattaatgaagataaatggtttcctcaccctatgactttcaccctccgctctcttggtacggtggcccccaaaacaactcttattactcttaagaatgcaaatggcaccttgaacaaagcgctaatacgcaataattttcatggtgatgatgtccctcttattatggggttggctctgtgtgtttcaagcattgaaatgatatagtctggcattacactcctcgtggccattatatggttagtagcaactataaagtggcagctcgcaatgagttcgctcctagtagctcctcacctgagatcttagaaaaatagtagagtaccatttggcatctagagcttcctcttaaagtgagtatgtttctatggagagtctataaaagctggcttccaacggggtctgtcttgacttctcgagggatgaaacttgacccattttgtagtggttgcggttatcgtgatgaaattgtccctcatgctctttggtgtttcctaggggtgatcccattttggaagagtttctctttgtggaagtgttttcccctcctcacttgaacctcatggacattttatttgacatctataaaaaaaactagccaaagatgaatttcatactcgtgtgattctctcctggctagtttggaagcgtagaaacaggaaacaatttcatttatcggttcaacgtgatgatcgatggatcggttgggtgcaaatggaaatagttgagctactccacctggttcgatcaggtacttcttcttctcttcttactcctacttccgtttctcggtggctttccccttttcctggtattgcgtgcatcaattgcaatgcttctattcttaccaagggcgaggtctatgggctgggagctacaattcgagaccacctgggccatgttattgcagccgaaatccaaagtcgcaaaggtcatttctttgtggagctagctgagtgcattgctatccaaataggtattcaactagcttcccggttacatcttcaagctacaattcttcagtccgacaaccaacgagctattaactaattgcagcagctcgcttttatagccatttattggagtgcgttgcttgatgaagtgtcttgtctggctggttccttttatttcatttcctttattcatgttaaaaagttatgtaattctgttgctcattgtttgaccaatttagttgtggtcaatggctgtaaccaaatttggtatggggactttcctgattgtgcttcttccttaattagtgtagaattgtcttcccctcttttgttgttttcttgtaataaaattctatttcaataataataagaggttttttatttttacatttcactttttttttttttgtatatttttacagaaatccacataacaacccacatagcaaccaatagagtaagctaaagcgtaacttaaatccacataacaactcacataaccactaaagcaatccaaacagtaaatttaaaaaaaaagttaaaaaatagtatataaaaattcttttaataataataaattgaatggaataataatatttcatatttaaatttttttaaaatggagtgatatagatagaatttaaaaatgttataaattatatactataatataatataattaatcaaaaataatataataagtaatgtgagaaatataaaattactcaaaaaagaaatccttttacacttttagtagttgaaagtggaaagattaaagaaaaagtgaaaaaaaaaa

SEQ ID NO: 190864 - DNA, 3268 bp, Cannabis indica
tgagctcagcatgacacaatcaggcatcgacgcgcgattgtggtggtccggtgtgtgagcctcaatacgatttcgttatgcaccaaatagaatcgctttattacaccccaaaaaattattgttcaaaatcttaagggtttatgaatgaagaattttttctgtgtagagaagatgtattctctaatagtactctatcaaccactgcgttcctaggatgaaacaacctcaatactatatcattatgcaccaaacgaaatagctctattacaccctaaacgttataaaataattaattaatcaataaataaaaatatttattttattaaataatttttctctaaaaaattaaaatgacactattctaacccggcaattgagctcgtcacaacatagttggacggcaacgcgcacatgtaatggtctaatgtgtgagtcttcattcatgcatgtgcactaaactaggtgatccttagagcccaaactcaaatctcatatttgcttcttatatatacacttacgaataagtgtttgtatcccatataacactctttacaatattacacacttcacttatcttattttgtaaaattcactcaaaacttccaacagaaacacatatgagatgctcataaattggaaaccaagtctcttgcccaatataattaccttgatatgaattacattacttcaaaatgttgtaaatactatgcacaataataatttaatgtataggcacacacttgagtagaccaaacttcataatcaacttagtgccgatcctactcgttgttgtggcatctgctgcttctcttgttgttgttgccaaaactccatttggataacactagacttcaaatgcctttctttaagctaatccatatcaataattacaaaaatcaatacatttttcaacttataatataaaaataccaaaaacaaaaatgcagcttattcaaaaacactcacctctaggatcgatatggttctaaaaagttcaagacactcctctaggagcaacctctcttgtgcaactacctctgctaaatctgatattaatggaccaattttcccagcctattcgaaaaaatcagtgtaaatgtcaagtctttcttcatcatagctgtatatagaagataaaactgtatatagtgcagcaatatataccgaaggatgaaaagttgttagcattgatttaatggcagaagtgagatctgaagcgtgtctgaatgtgagtgaagctgattgaacatctacctacaagctttatttcattagcaaaactttgcttaattttatttatagaagagatatatatatatatatatataaatttatatactatacctttcccccttctatcaagggtactttgcaaacaactgaatgtaaacaatctttagttgtggaaactgaagctaagtgctgcctttccatgtctccccaagcctccaatagcttaaactggagacagagacagagagagagagtttagacacatgacattttatgctataaaatctgtatattaaaactaaaaattaattatgaggtttgtggtttagttgaattgaatgattaaattacatcatctactgacctcagattgaagtataaagttgagcttcatttcaagcttttccttctgaagctgtatccttttttgtgccactgagtgttgcaactttgttaaaccatcccaagcactagacaaatttctctgtcagacatatcagacacgccaaacaatgcatataagaacacaaagtctaattatgaagagatgccttgtgttaagggccaacacatatgtcatactgttagtatatttataccaacatctttaggcatttaatgtacctttacatgattagctatattgaaatccacagcctcagctctggcatttgcataacgccactgcattaaccgattatgaagcacccgaagttgatgactggcctcaataaaactataccctcctccagtcagagaattcgaagaagaattagaattaacaatagtagtagtagttaaagaagaagaagaagaggaagaaggtgaagaaagattcttgcttttaaacaagcctaaactcatgttgaaaagcttttcaacccttttatttgtttttgatggactattagtagtagaagtagtaggaggaggtttcaaactggaaaaagattgcaattttcctttactctcaacagacagagaaggtgaactcgatctcccaggcgataaagcccattgagactttccaccagtactaccagacgtaagtgaattagcccttttgatagcgttttttatcgacagttttcccaacctcggagacctatccaatgacactggattcgataagttcgaatcagtagctccttttctagaccttgtcgttgttgtacttgttgatgttgttgttatgtcgttcatgtactttgaagaaacttcaacccctgtttttttaactctcgaagaaaacccatcagtgaaatccaatacttctgaaaaactatccgacattcgacgtgatgggttttgatgtaaagcattttcatccacagaaaatctcccgggaactactatatctgagcttgaattactgatgatgttgttattaaataccttagtactcgaagaaactttccctgaaaatcccgagctactactactacttcctgtataatatctcattgaccctccaagaattggcctgtgattttctttgctgctttgtttatcgttctcgaacctatttgtctctctggaacttctctgtctttcgaaaatgtcagagctttttctctccagaagatcattgagcctgtcatttcccagatgatcagccaaagtgtcaagcttattggctgaagatgatggtgaagaagaagaagtagtagcggtaattgacgaaggccagagtccacgtagataaccggggtcttcgagctgatgatgatgatgagcccggtttttcttcagttcgggaaaagtcgacgtgcctggttttctccgaaccggtgagaggccttgagtcggagatgggattccagtttcgattgaagatagaaaacgagagcttacttctcgggattttggctttcgcggcttaacagagtccgaaaacagtagtgattcgtttccatatttcttcatcttagtaacttggactttttttttcagagaactaatgaaaaatacgaaatgtgggattttgttgtttaggatttttctttgaaaataatatttttaaataaaaaaaaaa

SEQ ID NO: 190865 - DNA, 5221 bp, Cannabis indica
ttttttttcttgtcattttaactaaataatataatgtaaataatatttcttattctcttgcaagctgtttttgagcccaaataagtaaaccaaatcataatgttattaagcatgtaagtagcatttcttaatcaaaactattcttttgagtatgatttggttgtgactaacttaacacacctaaatcatattaactggttatgatattcactaaaactaaattttatttacataaattaaaataaattgataaactcctataaatcagataatactcaaaagaaaaacgcaatcttgtaatagataaaaataaaaattcatacaaaattcaatacaaaactccaaaaatagatacacaaaccactaaattgtctttaaaacatattcgatcaataaagtaacaaaaagctataatctaaaggtgtgaagacaccattattttaaccaaactcatttgtactaacctttttgccaaaaatcacatgaaatatagccctagtgcctacattattttttaaagtaaatcaaatgtgaatttaattagcattatcaagttgattgatttgcctctctttttgtttttatttcttccaattttttgtgactgaattcactacctaatttactattcaaacaaacccatcactatctaagtatatctaccaaacttgaagatataaataaggttggtgttactgttgataaaagttaagaaacctatgactataaattaataattactctcatctgttatacctaattacaattaccattttcatagtatcatctaacttaatgaaaatttcatagttaaaacttattataatgcacttaatatttactcttccaaaatttcaatggagttaagtccaacatatataagattgtggcataaattaaggacaagttttgtactattgaatttaagtttaaaatgtatgtttttagtgtttgagttgaagtaacttgttatctatagttgttattaattggactaacgtgtttctaattcaaaggggtagttgggttattatatatgcataataatttaacttgttttatatagaagtccaagaatgttattttaatgatatgtgtgtaatatttgggcaaagaagatgaaacaagttttaatggtaggtggttgatatttatgttttatcaaagttgttaaattcaatgatttatgaataaaaagaaattctaccgaatccgaaatgattctattttcaaactaaggttctgactataatcaaatgagcataagtaccactacaagatgatatttacgaagagttaacgattttttataataattattaaattaaaatagatagaatctgatatttattatactaataacaatataatattttgtcgtagtgttagacataactagtgttctttaacatttctctttatatatacatcttagtaaagtaatgttgggttttttccagcttcaaacccaccttcaaaattgtagtagttttctcaaaaatgcacctcatacccttatgtcatacataaattttgtctcattaatatacattgtatatatttgtgtgtgtaaattgatgtataatcaattaattagtgaaacaattaataattgttaacaaactaaaaaataaaaacaaagagaacatgtaatatttaacatgggttgcaaaacttacactattttaatgtaaagattacactaatttgaaatcatgggttaagtattccatcaacccaataaatttctaacatggacaaaatgtaacaactattgaaaatctactgaatcatcaaaaaacaactttgacttaactatcatatgttaacacataagtttcacttgtatatatcaaatatatctatctaagtagctatcaagtatcaaggggtaatgatttattgctgccaagagatacctgaaatgaattgagcaagtgttccactactactggactcgttcgggcaactctcgtactcatcaaacacattatagtgaggagcttctctgatttggtttctactttctccaggatattcaagggcatgatgattagaagatgaatgattctcttctggaaaacacttccatcctaaactgagaacaagttcagaagattgaagagtttttctctgtcgaggataatgatgcatttgggatgaaaaaccagtgtcattatagaaatctttatgtggaccgaaatagtttggggtgcatgataaggtcgagggaaggtggtttgaatctagcattgtatgaatatcttcaggaatctctgctctaagatcatggttttgatagtaacttgaaggggacactggcgatgaatattcaggtcctttattaatgtgaacatcgtcttcaacccatgctgccaatggtgagcgatgacgactatttggatcgatatcagagggactgataatagataaggctctttcaaagttctccttgtcataattccaatccaatgcaggcacatttgactggcatccaaccaaatctctacttggttgacagaattcgtccaattcttttaagatttcagcagatgtgtgctttgtgacgggaagaacaaagtttgaatcatgatcaacatgtaattctccttcatgtaatccagcttcccatggtttatagtaatattgatgacgatgatcatcatcaagctgtgctaccaatggtgagtgatgactatttggctctacatcggaacaaatagtcgataaggttctttcaaatttctccttgtcataatgccaatccaatgcaggcacatttgattggtttccaaccaaatttctatttggttgattgaatttgtcgaatccttctaagaattcaacagatatttgttttctgataggaaaaacaaagtttgaatcacgatcaattggcaactctcctaatccagagtcccatggtatatagttataatgatggacatcgttatcatgatgtaatggagcatccaataatagaatgctccctcttgatctgttccacaaaggatttggttgtatatcatcaccaaggtatggatcatattcgagttccggacaatgcctaggtgtccattgaagtctgttggagtaaatatctgactcaaaggatggcactaactgagatttggtatcagtctcttctcttcccaaattctgatcattgactatctgcaagagcaagtaattttgcttagcaacacagacagagacaatgatttttgtccattcaaataacaatctgaggatacattaatgtctttgcactccggggtcagccgcttgaggagcacaggaacaatatcacacctgagaaagtttatacttttattcactaaagattcaaagaaactgaaagtgcaactactaatgattgtgagggttaccccttcgaacagagcacatcaatttcaggaaacgagacatctgtaacccaacgaagtagtttctctcttttcctgttaaaaatatctgcatgtctgtactgagttcctgaagacttgaaacaaatattgagttttacataagcaagtgattctcagtttctatataaaagggtcacatcatcaactagtattattaatgaaaactgcactatgcagtctattggtgctacaatatgaatttcggttgatcaagcaaacgagcttctttgtcttaacgaagttacagaaaaaaagtgatgaatcataaatctctactatgttctcatcatctctttgccaccaaaaaatgaacaaattatgcagagttaccatgtgaaaatattaccgtcagaccttgagttgggaccatattcttccatatctttctgtttccataggatatcctccaaggttgaacaagcgttcttcttatgtacatctatgaaatattaggaaaagaaaataatagaatactttttttcccctctaattgatagtaaactttgtctttccaaacaattcagaactagttctggcatattagaaaatcaacataggaaacttcaatccaaattaagataagtttctatcagttcttttctttctcttgacaatgatccaatctctaacaaaccaagagtaatcagtcgagtactttgagaatgtctctatagagtgctaacctgagtttcttcgtgtcccagtactaccaaagggcgagtgaaatgagacagcctgaagtggtgtaggattttcaacaagcaacgaggtattgactttttccttacaactattattgggaatgttgatgttttctgcacaagacaccaattcatattaatcacatgacaaagccaccaagcaattgaagcaaagaactgaatgcattacatgatatttcatttgtacaataaacttcatcagagaataaccaaacattttagtccacagaaatgatgttctttgataaaacaatgcccaaattaatgacacattctcaatcaaattacctttagaagcattctttgaattgaaattattggtttggttcagcacatttcgtgctaaagaagaagcaaatgttttgcatgcatcttccttcaatttcttaaagaaggcaaattcagaggttttcacttcctcagctgcatcaaaaaattcatttcagactatcaattactgataccagtatcaaaattttcttagctattagaaacaagcaagaaaaggaaaattacaaaagattatggaaatcaaagaagaaaacacagtcatatgcatctccagagaacaagtaaatctaaattgcagagtatactcacatcttggagccttggaatttttaggagaatcagcatcagtatctgaaaacatcactcttttcctgctacagttcatgtctgcaattacaaaatggaaatggaaaccagaaattgattattagctttctaattacagtaatgaaagtatattaaaaatggttgattgagtgattaagtgaaacaaaagaatttgaaattgattaaagaaacaagaaatcgaataaagatcctaaagcactccatgaaaacctggctgagattgagtttgaatccacgacggagccttagtgttaggtttggaattagcttctcttcattgttaatccccaatctgaacttcggagtcagtggattccgtcgtagccaaatcggtggatttcaacgacagtaacggaaacgacaacagttcggagatattcttgaggttgaagacggcttatattgtcgttttcagcaataaatatataaaac

SEQ ID NO: 190866 - DNA, 1397 bp, Cannabis indica
agagttataggatcagatacacctatactatgcataaccctcattctcgctcttagcttctcttagctttgaaatgttttttatctctaaagttctcaatagacttagactaggagctgaatatatatacaatttaatagttagtgagttgttaaagaaaataatcaactaacataactgactcttgtttaagggttctcagtcataagtagacaatactaagaattgagttacacaacaatatatatataagtctcatatcattttaaacaacaaattctcaattaaaaaaataacaaattctctttctccattcaaacgttcaacctataaaataaaaactaattatttgattataaaataaataattaattttaattatttaattataaaaataaataattaatactaattattaacttttttgatgcttgaggacttagggatgattactttttagaaatattttgaatgatattataaataaaaattctaaataattaatattatattagtattacaaattatatttaaaccttgttatccacataacattaatattaaaaatttccatacaaaaaacttggtatgactacaattaaaactggagtcataacttttatttatataaaaactaacttattggtataataaagaaatgtacaacaaagttagatacggtaaactttatttatgaaaatgaaaatttaaatctcatttaacttttctttttggtggtgttccattcaaacttaaatgtacctctagggaaaggaattgcatttaggaaccaagactttcatgggattcggaggaggtgttagattgtgcgtgggagctgacttcgcaaaagtacaattggccatatttattcatcatttggttttaaatctaaggtatatttttttattattatttatacttcatcgatcaataatttgaagtttattttgtattatgtactattatgacataatatttacacattttgacgtgtttttataaaaatggtaggtggtcagtagtcaaaggaggagatattgttcgcaaacctacattgacatttccaaatggcttacatattaaaatctcagaaaaaaattgtgcagttgaataaaaaaaacgatatagcataatatattaagtatatgcatgcatgcatatgtgttgtgcatatagtgtttgtagaatatgtataaagtattatgtactattttctttgggaaaaaatattaatcatgtactatcttttaaacgaataaataataaataaatgaatccttgtcaatctatattaggcaattacttattcatataatattacttaattagagcacttctagcaacttcccaactctattttttaaaatacactagtaaaactctatttttttttt

SEQ ID NO: 190867 - DNA, 2818 bp, Cannabis indica
ttagctgcagtatagtacaacagatattagatttacacaacaactaccaaaaattagaaaatagaaaatatagaaataataaaacggtagagacgtactgttgagtatcaacttgatcagccttgttcagcaccacacgaatcttatcatcatgtccccgtaaagatgatattacacgtttaaattcatcactaacatcaagcttatgaggatcaaacagaagtagtatgaggtcacactttgaagcaaaccatgatgttacaccagtaaagtcatatgctcgttgtgttcgttgcttctcccctgataaaactccaggagtatccacaaatgtaatgtgctccaacagctttagatgcaaaataataatatttagatgcaaagttaattcaattaagttcattgtaatttcaaaatgataacttacaggatgtggcatttgagaacactcaaattttgataagaaagcagttccaaatgttgtaaggccactgaagggcatatcagcttggacagcaacagtgttgccaggaatactcctctcatcaggcccagactgtaaacaaccataagaatacagcagagaatcgataaataaaaatatgcactaaagatggaaaatgagaaaaaaaatattcacatctgattagcctctgtaacaatcatttaaataaacaagaacatcaggaggtggttaaacgttccattaccataacaacaacaaatctgtcagttgtgggttctggtccaatgtgagcacctgttaatatcataaaaaacatagtagaattgtattcagtacatgcagacacaagctcaaccacaactccaaagaagatagtcagagagatagctgttaaggtaacgtgcctgggtaactgcctcttagtaaatgcttgatgaaagttgttttcccagtggagtattgacccaaaagcataaccatgggtttagcatcaaaatcactattagtctggaaaatatgaggtgctattagcacatgaattagaaacaataaagtaaaattgaaaaagaagaataggggcctaaaagtatacaaaagaatcttaacaagtgcacataaatacttactaatgaaggggatacaaagtcattaaaccggtatgcgtcttcaagtggcttcagcttcttgagatatagtcgcttcaagccatcaacaattgaagttacagaggaaagagacacctgataatatatataatatataatagattggcaacaataataagaagaaagataaggagattaaaacaacataaagtacttttgatatgtaaagtaaagagaaaacagttgtacaaatcacatgaataactttacatatggtgtataaaaccagacaaacaaattttgtgaaaatttaacttgagttatgacctataagagcattgaattgaaagtgtaagcatgtaaactgaaattgccaccaaaacaataaggcacccattttaaagaaatcaacaatttccctaacaaagttctagtagaaggcacaaaatgcacttgctcaaaactgtaggacaaaggcccacctttttcgatgattttgaagaaaaccactgcgatgaaggtgaatgttgcactatagaaccacctgcatcacccacagcaattagttaatttacaaataaaacataaagtaatgataaccaagcgaaaagtgtgatcaagttattaccatttaaatcaagctcactgatcttctgtggactctttttcttctgaaatatattaaagtaaaatcaagcttaatagaacacagacaaacaatttgacatatctttcatagaaaaaaaaagtagagggggatccaaagtcaaggaaatgatgaaaaaagtaaagccaaataattaccgaaagtaattcagccaaaccctccataacagggggatccaaagtctcaaagtcaactgcaatacaagaaacccaaatgagttgaaagaacatatatataccgctcaattcacttaaaaagacagtgacaacaaaccacctttaggaaaacttaccgttgctattcaataaatcatgtgttatttcaagtccagtttgcgccaaagaaaccagctacaaacaaaagaatagtaacaactcagagatgtcatttcaaggaaacacattcatgaattcattttcgaaaagaaaatactccacaaacacaaaataaaacacctgcatcgcagcaacaaattctccaaaaccaagatacccttgtctcttcgaatctgcaaccgcccaaacctaatagataaaaaaaaaaagtgtggtcaataatgtaacgagataatactaaaacaccaaataaagactacatgaacaaaccaagctatttctccattattggtttgaaataattatctcaacccaataatacaaataacagaaagccataacaataggacatgaaatttgcttttttttcaattagtaacaccatggtatcaacgatcattccattggaagtttaattacccggaaaaagaaacaaccattctaaaagcagtataatcattatttaatttattatgttaattcggctaaaatgcttaactgaataataaaaatgatatccctttaaaaaaaagtaaatatatatgtaaacaataaaaatgataactaagaataaccaaattcgttaagcaaaaaaaaaaaaaaaaaagaaagaagaagaagaagaagaaccaaattcatattaaatgtcaaaaactttaaaacacgaacaacccaaaaaagtcctctgaaaaagaaaatgaaaaacctgcttgagatcttgccgagacaaattcgacaaagcgaa

SEQ ID NO: 190868 - DNA, 5106 bp, Cannabis indica
ttaaataatggtattatggtaaacaaatagggtaaaatttagtaaaaatcaataaattataataattagttgcattttgataattaaaaaaaaatagcatttattgtggcctaagtttgacacaatgctatatcttgtgtcaaatttggcacaaattttagcatatacaaaatttaacactttttagaacaccattggagcaataatttttcttaagtgtgctaaaatatatcaatacactacctttttggcactctattagagatactcttacattctatctattatcctaaaatctacacgaggtgacatggtgtttatttgggtgacacgtggatcattctttagacctggacgaaggaaaaacttgttagtatgtcgttatctatagctaaattatccatgaaatgttacttatttagagaatatgacaaaggtaacatgcaaggtaaataataccctccaaccagagtcgtttttagggccattccgcatatgctgcccatggtaaatccggcactaaaagcctcaaaaatactttctttttatttatcaattaaatccctatttccacaagatttttacacgcaatttttgtattattaaaagtaattaagtttccttatttatctgttatttgttttaggaagctaaattgatataattatttcctataaatagtggagtcatttcactattcagggatctagaaattattcattcaatagaggacttaaactactaaaaccattgtaagagcttttgagaaagatcaagaacgttttccttctgttctcacaagtcaatacaagtaaaaagggagtaggctattccaagtatcgtttactctgtggacagtgtcctcatcccagtatcgtttaatcttggcaaggtcgagatctttttccaagtggctgattcaatttttgaattggaatcccaatttgtgattcctatcattaagcctattgacacaggtgaattgggtggcaattagacgagtgatggcgcaaggcgaactttgttgggaaacccaagaggattcaaaggtcttatcctaactcggttcactgaaccaaacattttcaaaaaggaaacgtttagttttaatatgagagggcaatgagagtgtactatcagagtcaagcagtaaagctcgatggtctgagccaaagaaatctttgtgttgaaggctaacgtgggggaaattgctgaaccaaggtgcattagcaatgcaccaatataagcgctcttggatgttattgtttttcacattgtgattattccaggtgaaaatggggccaagtggatccaatggggacatgttaaaaaaatctttcaaactgttagagggtcccctgttgggattaccacctatcttatcatccatggtaaggatggcattaaaatcacctatgataatccacgggtcaataggattgttattgcctattctatgcaagattttccatgcgtggattcgttggttctcattgggagagccgtaacaacaagtaagatggaaagaaatgaaaacattagcagtggacgaaacataacagtcaaaatggttcatggattgagataataaagataaaaccacatcattgttccaaagtaagaagagtccccctcctcttcctaagctagggaaagaataatttccataagaaataaaatattaggattacaaacattggtgagacgggagagattacggaatgcatgatcactcccgatgccacatgcattccaactcagcagcttcatggctataagcaggcctgtgtgctcacaagtcctggctctaagaaggtgatctcagtttcagcttggttctctaatctagtatgcttgatcaataccgagtttctccattaatcacttctgcctatctttcgaaactctctttgcctttggaagagggtgtccttttggtgcttttggagctttttggggtgacaattcctagttggaaggagaggggtagaacttttgggttgctgcttgtgtctaggagaggtatattagttggtagggggacatggtagaatttagagcttgtggattttgaactggtggagctttgggaagtgttggatatgctcaagttggtggttttgacagtttgttggtcatggagtaaggtcgtgaaggttggtggggggttcattggtgtttgatggttagtttcttggctctgaaggtttttgttcatccaaagggtggtgtctggtggttgttcttggttatcagacctgtacaggccatcttgttgggaaaggttgaaagctgtctgttggtcatttggttgttggagtggaagtgtaagggtggtttcagggagtgagacagaaacattactagcagggttggatgtcataaaggtggtgacagagggacatgaaaaatgaatctactcaggacaagataggagaggattagtagaaactttaactttaccctttatagtttatctatcatacctgagatacggtggaagaggggcctcatcacaggctttcatatagtccatgcagccattgttgtagctatgccccatgcatccatagaagaagaaaatatcaagtaagttttcatatttgagttcaagccagaccactttgttaataccggtaaagttgataaggatgcccctaggcagagggagggcaacatcaaccatgactctaactcgaaagtagggtccccaagtttctcttagggaaggtctacatatttgtaggaggggccctaagtttttacaaaaccagctcagctaacttctcatattgtttgagaaaaggagtgttaaaaaacttgaacccagagtgggagcttgattaagctatctccatttagagcatccacagagttcgggatgtccatgagaatagtgttgctcagataggtccatggttgttgtaaaagaaccctacgccgctctcctacgcatccaaattctaccagaaaaagtcccttagttcgttcagtgatggtgacagggaatcgggaaatgttgttctaatcctctgtcattttttccataaaaacttttttgttaaaggacttgacagtatgaagtttggcatccagaaagatatttgtggcaagggcatctgggtcagggacaactaagggtgtagggtcgtggagggtgtggactgtactctctgtatctgtaagattaagggccacagataaagaagaagctaagtcatccattgaaagagactggaatttgcacgatggtgaaagggaaaaggttagtgctactttaggtttgataccagaaaacttgaggtcaagtggtagaaccgaaaatggtaaatttccttttatataaaaaaaacattagtcgtagcaattaattggggagggattagctgcacatcccatcctaaaattgtagtgacaagatcactaacagtcttattcgcaattaatgggaaactaaaaaccatttgaaaattatagatgtaatgattaaaaaaattaaggggaggagtgtctaaattacctagcaggagatagttatacaatcggataaggggaaattaatgcaaaaacacccattaaactataatctcatgatgagataccaggcatgggttttggatttgacatggagagtagagattgtagtatggggatgtgtacctgcaagaacaccattaatgcattggagcattggcgagagaactcagtcgagttgagcttaggttgatgtgacagttgtggttggaaccgaaccgatgatcggagttggaagaggaggaggagtcaccagagcctcgggatctggaactcggagagggtttcaccatgggaaaatggtttgggtttgagtgtgaaaaggaaaataaagaagttgccttgtacagttgcatgttgagagataaagaagagtccagaaaagtaatatgtggtctttcttttgtaaatttcccacacattagcacttagcaaataaactctatttcaattcataatctgatcgaaggtgaatattattcttagttaatttgatttttaatcattttaattacgtataagtaaacgtacattatacataggaggatatttaatgatatatttagatgagtttctccctgaatgtgaataagtaattataatattttgtatgaatggagatggacacttcattcaacccaagcaaatattttttgcttaaaataaacattcattaaaaaagacaaaggctacccaaaaagataaagtttaagtgaaaacaagagattcaacctcctcaggataaaaaaccgtaaaaagaatgaagcagagcatgaaaatttgcctatcgatatataaaatcatttgctataattcataacaagtcattttaactacttttatttgatatgtaaagtccatcctagttagtagttagtttcattaccaaataccaaaaagcaatttttctaaaaaaaaaaaaaaaataccaaaaagcaagaattttatatgcttttaacgccgtgaagttaccgttaacgaagaacatgcctagaggaaagggtcgctagagccgtcaactcaagtggcgtcagcgccgctagctcgtcctgcctctcaaagccgcgtattagcgggtccccactgctggttggtcccagcacatcaaccaaacagttctaaaagcattaaatatttttaattatttgaaaacaaaatataaaatcaattttataaggccagtttgggagtgttgaggtagcagaactctcatggcgtttttccgttattagtttattcgtacgtatccctcgttaagattctgggtatccatcaaactaatatctttatgaaaacagctgttttcttcggttgggttgggtttatgggattggtacagagttagagtatatagaggtttgaagtttcatacctttttcttcttaaagtgggtcctccatcttttctgcctctgtaaatgacagcctaatcaacagcctggaaagggtggccatagccgcaccaaatgagaaaaatctcagctttgtgggattcttcatttcatgttgtctcaactgggttttactattttttattcaaggataacccaattctctctctctccctctctct

SEQ ID NO: 190869 - DNA, 5219 bp, Cannabis indica
ccccgtcagtacgagggtattatctccatctccatccgtttaatattgtagatataaaattattttcattcacacctcatttcccatttaagcgggaaattcttaatgggagcgagtacccgcggaactcaatacccaaagtacatttttcatccctatttaaaactaaattaagcgttttaaaaaatataggatttttttttccttaagattaaaaccacacccaccatatttgagctgattgattacaattgtaggatacaactagtatgccaccttgtatatcatcaaatgttttatagttaattttcatttatatcacttaagtcaattccaactcaagtttcatgataaataaaccctatttttaatgatttccagtattatgcattaattgaaaacaaattccatatgttattcttacaatggcatttgatttacattattatgttttgaatgtaaacctgacatgacagtaacagcacttaatcgctattacacccttccttctttcttaattaccaattgatcaacattaacaaatattgggatatttacattttaatattgtataataatcatcattatatacatatatctcatgattagaaaaagagagtcaaaagatgtgggacttttatatgggtatatgaaggagcgaacccatatagtagcgaggggtcgaaaattagaaaaaaaatatatatgtattttaagtaattacaacatatatttgtattaaaatatgatatttatagacaaaatagtaagcttggtgtaatgattaagatagatgacaaatagattagagggtaaaggttcaaatcccactaactacactttatgaaaaagcaatccagaaatagattttatgaattatgaacttctttattagtttcttcttttgatatggttataaaacctggagtgagggaaataatttgaataaaacaaagttaatatctgcagtacatcctgataagacctcgtaaactgtttaaacaacaaccagatcattttacttttcttaatcaaatttttattttgagaattaaaaagaaacaaaaacaaattatcccatgtaacaaaatcactatataaaccaagaaacagccttttacttttacatccaagattcaattttcaatgtctgtttggagtgagaagtagggaacataaaaatgtacattgatagagctactaaatcaacataaggaagaaaaataagtgaacactacaaagaaaagctcacattggtaagtagttagtcaaaagggtcaatccggggatcatgctcacttgccattaccattccagtgcacagacaggtagggcacataacctataaacaagatgatcaatcacttaatgaagcaaaggtcaattagtgaggataaagaaaggaccatgatttttgtacctttcctgcaccggagcaatttaaacacctttgtgttgccggcacttgcagagggcggtcagatatgttagatgttaatatgggctcaactttcacacacacaccacttgctgaacatctagcacaggccaagtatcctgtacatgcatgattatgcaaaatctcaataagaataaaagatttctaaagctttacaaaattgtatgatgtatatcattcatgaacccttcaaacaatgttgaaatcaccataacaatgattattgacaaaagcacaaaccagttccattgcaatatttgcatcttttcttctcttgctgttcgacattgttggcttcgattaacatcagcgctgaaatgacacccacagccccaccagaaaaggatgctacaatcggatcaacctgactgaatccagtgagtacgaagaaaagtttaggatgctagccaaaagttctgatttccattttggaaaaagtgaaaggaaaaaagaaagagtagaataccttaattgcataggtaagtgcatactgcgaatgaaatcttcatatgaggtgcctcctaagcctagttttagttctaactgccaagaaaaaatcccagttgaggaaacactacaccatcctaaagactgaaaaaccttttacttatggttactagattaagaacttacagttggtgcaataagtcctccaaacacaattataccagaaacaaacgataaactggtcaagtaaagctgcttcaatgtctttggtgtctacaaaatcatatacaagcctagtcaaaaatcagagacctccattactacactctttctattccttttctttttccaaaacaaataaacaagataattaatgcatatgcaactccatagtcaagcaccaaatacacataagatttcttctttcagaaaataaaagaaatataaagaaagatttgcagcataactaccaaattttttgggtttataaccagtagggacctattggtttcttttctccccaatagtattaaaagtgtaattctgtctaattttctcctaacaggttttgtttatgagtttgtctacacacgtataagaacacgattaatacatattttttattaggctaattaagatttttactcccgaactttgacatgtaccatatcatgctctttgaattttttttttttttcttgttaaaaattttctctgaactattgatattgttgaatttaaggatatttgtccaaatttattcaattttactaattttgtgattatctatgaactaaatcatgctccctagacattaatatctaccaaatcatgtccctcaaactttaacatgtattaaatcaagtcccctacactttcatcaatgttaaacttttcatactaaagttagaaaaaaattcttaaatttaacaatctcaatagttcttaaagatctttaacgaccttgaaagttcagggacatgatttaatacattcagggacaaaaatcctaattacctttttttattaatacactattaaaaagagcttaagttagttttgcacctaaaaaattaacgggttccttccaattataaacttaaaacttttcgtagttatgctgcaaatatcccaaaaatataaattaattcaagcttattattaagcagaataagccaattccactaaactcaccacatcagggagaaagggaatggaggaaggaatatcaggcatctcatatgcctcttcaatgtcttcctcatcaatttcattgatgctcttaatccgctgttgtactcttaatctcctcacctaataaatcatcacacaaaattaccaaaattaagtaaacaatactaatacattgatgtatttcgaagaaaaaaatcaaatgaaatgaaagtgttagatttaatattgacctcttccataagaagaaaaatcttgttccgccggctcttaatattttcctgaatttcctgtaattgcatttgaacaaaatcctgaactgtctctggtccttctatgatgcaaaaattactgaaaaataaaacattacaattaagcccaaaacaaaattcttcaaaataaggcttagggagacaagttttaaccaaactaaacctggagaagttatcgccaccaagagtatcgtccttggaattgattgaggaacatataactcgagaacgtggtaaggttagggacagaggtcttgttgggtggccatgttggtgggttctgaatttattgcagtttggagagaaagaaggagattggagagagaaagcagccatttttagcttcttccttatcttctctcctatcttttactactcatcatcaaagagccgagagaagagaggggttttggtattagatcgtggaatcttaggaagacattctaggagcatcttatgaatttttccttagctaaagacagagaaggatgagatgagactagtgggtaactgccacgtgtcacggtttgtatatgccaactgttttgttgttcggttaacgttgaattctatgttcagtgttcggtgtactatattagtagagtaatttgtttttgttaagtttgataaaagaaatgtttgttgagattaactgtgtgtaggttttgagtgacatgtgtcatgtgtcttggtagtgatatgggtagaaagagatataataataaaaataataagaatgacaatgagaacgataatggaaatcaaggaagatcacattattttcggtccaaacaaacccttggtctaaatataaaataatgagattcttatttatgttaatattttaaaccaatcacatttgtgggtgctactatcattactcctagaaatgagttcaaatgaatagagtagtacaatgagtataagacaaatgaaaaatcaaataaagtaggtttactagaattctaatgctttatggtacaatttatttagagcataactccaatagcatattgacgtgatattgaattgcacattgatttctcttctatttgtcatataaacaaaagaaaagtaaattttttaacatttgtccatttggtcccaaactacataagttttgtaatttgacattaaaatttagagtattagtggtgtatagcacttatagacataccgtcttgtgattaggtagcgatactctctaaaagatattatatgagcattgctattagacatcaatagtgcctagcacttcctctagacatgtcgtcttgcgattggctgacgatattccttaaaagttattatattaattatatgagacccgatacttaattagatcaataacaatattaacacataagaggatgctaggcactattggtaccctttaacattatattatgttatatgagactcaatatttagttagatcaatagtaataccaacacatagaaaagtactaagcagtaagcaccactgccccttagtattaattcctctaaaatttaaaatccgtaaaagaaattgataaaaaaatttatttaattttttatcattatgtattagaatagttttttcttctatttcaaatataatagtcattcattctactaaaatagtaaagaaatcattctattaaaataataatatgcaatcaaataaaaatattgaatatagattttttttttttctattctattctatttcatcctattaaatggtgcaacataatcagatcaaaagtttgcaccttttgtaatatagaatagtaggtagactatagtagtagcattggttagtaatttaagctgaatagctgataatatatatatatagggcaaga

SEQ ID NO: 190870 - DNA, 1332 bp, Cannabis indica
tttaataactagttgatatatatagtactaattgtttacaggttaaaaaggagaaatatgttatcttccatggtggtatggacaaggagtggacagaggagattgatgagaaaataagcttcataagtaaggatttgaatatcaagatcaaaaggtttaacattgaagaaagagttgaggtcaaaaacaagttttggggtggcatagacagccttatgctcaccaagttccacaaggaagagtactactttgccaaacaacaagtgaaaagactttcttcttataaacacacacaaggatggtttgcacttaacaaagggcctaccacggtggttgtcggttcccgagcgactttctcaaaggcagtggctgagtttcacatgtggaaagtgagtgttcgccagaggacctttgaagttgctttcaaagagtatcatgaaaaactttgtaagtctctcaactctactcatgagttgtcgagtattgcatgttgtagttcgatgagagccactactatccaaaaaagtttcggcaactgctgcacgattgagagtgtcctaaccgcgactggtgagtatccggagaagataagttgcccagtgtgtgaccaggtcatggaaattactgtcacatacaaatgttatcatacgtctaaagatgatttccattgctaataatggatatgtattctccattggatccagcttgttcgcactacgtagtacgacgtattttctcttatgatctaataaacacatacatttatatgcatgatgtgctttgaatgtatgtatgttaagttttcttaattaatttatgagtgtgttgtgtattttagccttgaaaaaaataaattgttttaggttttaaagttatgaatggtttctaatacttaatttatgtaatttcctaatgtattccttgattgctttatatatattttgaaaaaatgaccataaatatattgtttatctaattatcaaaattttatcataaaattgtcgatatttgcaacacaactcctcaactcctcttctttgttttttctttttacacttaaaaccttaatttaaaaatattattgcccttaagaatacttttatttgttgtagtctctataattattttgttgtagttgaggcctttcaatgtcacgaaacttgctaagtgcaaactttggtatatatcttgtgttgacatgttttaagttttcaagttttttttaagaaaaaaagtttatacgcaatatatacgttaatttggtactatactattttttgatctagattttattatttattacttatgtgtacccaccttctctctctctct

SEQ ID NO: 190871 - DNA, 1782 bp, Cannabis indica
gtgtaaacatacaatacacacacataacattatttaacaatattcaagttttccacttaataatgtggctctttgtgctgcctgcaggtttgaggagatgcctacaaacaatttcgttgagagcaggtgatgatcttgcctttcatttcgagggactatgctttgattcttttaatgataaattggcagtttcttaaagtagattgacaacttatagctatagtggatattggtctcttttaagagttggaaatatttaatgcaatttaaggcttacatttttttttctttttttttttgcagcttctggaatttcgatgcccttttccaaccacaacaacaccctgcacgagattcgcatgatacattcttcctacaaggttattttacttcattgtttaatttttaattaaccctgttgatctggcttcgtactcatagtgtcatttaacttccatcatttagctccttcgactacaaatgaacttccagaagattatgttgagcgagtgaaatgtgttcatgagtctggcggttatggttctagggggtatgatatcgtatgcaatgctcctcatttaagacatatgtattcaaatataaagctagagaggtaatttttcatctttctacaccttaggtatggatatgattggaaaagagcggaagcagacaaaaaccttttgcggacacatactactgctgtttcctcaaggatgctgtatgcgttagcacaggtattgccttcagtttgctaaagaagaaaactatgtgaaagtttttatgattttataatttttaaaattattgttttattattataatgcttatattctctgtcaaggaggctgcaaatgtacttcaacgttctgtgtttctctatttcttgactttaaaagtgaaaattccaaatttagtttatcgagaatctttttcatagttcttagtgttgtataacaatttttttttctttttcagcagttgttattcccttacctgtgagttcctttgagtattttcaactgttatttcataattctgagtagtaatcaattttgttgcaacaattgtttggtttttcagtaattttattcctttcctgttatagaaactgttctattgtacattggtcattttaattagctttcttttctcaacattgtcaacagaaaccatttgtccccaaaaagtacttctctatagatcgtgttttcaggaatgaagcagtagatcgaactcaccttgccgagttccaccagatagaaggtaaaataagattatgaattcatggtcagggatgtcatgggcatttgttttataattatgctctattattttgaaaactatcacttagagatattaagctctaaaatgacaagtgaaagctttatcttctttatgtaaacgtttggtggtaaacctctcgctgcttcttgcggtggtttttgtggactggtgatttcacaactcatatgttagacgttagttggattcgagtttagtctttaaaagaagacctttcagttctatttttttgtttttgttttgttttgtaagtcacttttcattctcaattcatttatttgtctcaggcttggtgtgtgatcgggggcttacacttggtgatttgttgggagtattgcacgattttttctcccgcctcggtatgcatataggcgctgtttgattattttgtatttatattcccctattgggcgtattttgaaagaattcttttttctgttatctttatgtttgatgtcaggcatgtcaaagctaaaa

SEQ ID NO: 190872 - DNA, 2604 bp, Cannabis indica
agaaaaattaaagaaaataatattaaaatatgtttagctcaataaatatttatctttacatttagttaatcactattcattaagctaaaaaaatatgtaaaacagttaaagtttacctcacttgttgaaagcttaattttataattttttctcataataaattattttagcttatttattatgagtgctcttatgagagaaatgttaaaagtagcaccttctaaaatattatatcgtataaaattttatataatttaatgtaataatttttataaaatattattaactaattataaaatattactattataatttactagtgtgtaataacaatattataactataatattctattaatttttaaaaaatttaaaataatttacaattgaaaacaaatactatttatttaatttattttttatatttttaaaaaatcctcaatagtttttaattttatttttggcataggaaaactagtagagaatgcataataaataattatgatatacattggttttaaaaaaatttatgatatacatttttaggaatatgattttgtctcgttattgtactttcacggattgtaatctgtgatgtacgacagccgtcagatgaataaattatttgatctgacggctgagattgatctaagggtagttaaggttaaaaagtaaaaatgtaccctaacactcatttaatgtaccctgagacctatctaatgcacaaccgaatacattatatctaaaaaatctaaaaaattatatccctacattttttatataaaaaactataataataatttatcctacatcacaaacaaatttttcttagagacaaaaataatactcacccttctaatatttctctatattattgacttaataatttaactcatccaaaatcatactacgctacgcgcccccatcccatcctctctctctaaacagttgggtcaaccaaacagctttaattaatttactgggtcccacccttgtctttgtactttctctctcttcttcaccaatctttataagccatcttaatcttcgaatagtaaaaaaaaaaaagacaaaagagaaaacttctctcattgaatttacattatattcaaacatatatacatgcaatgcagtcacccgcatcagctgccatggacgaagaatcagctctgttttttcccatcagaatcagatctagacttcagtttcaccagctttaccactgccacgtcatcctcaaccacagctcgcaccagcttggctcgcagcagcctcaccctcagcttcaacgatcgcctttccaccactcaagagagcacaaatacgacgccgctttgttcccgtccccaccgtgccagggacccacactggtccgccattaagaccgctctcaacctctcctccgatggcgctcttcacctccgccaactcaagctccttcgtcatctcggcacaggaaatcttggaagagtctttctctgccgtctcagggattccgatcaagttaataacagctgttacgcactcaaggtcgttgataaggattctctgagtcccaagaaactctctcacgtgcaaaccgaggctgacatcctctccttgctcgaccacccttttctacctacgctttacgcccacattgaggtttcccactacacgtgtcttctaattgactactgctccggcggtgacctccactcgctcctgagaaaacagcctggtaatcgtttatcggttaaagcggtcaagttcttcgcagccgaagtcttggtggctctagagtacttgcacgcgctgggaatcgtgtaccgggatctgaaaccggagaacattctgttaagagacgacggccatatcatgctgtccgacttcgatttgtgcttcaaggctgacgtggtccccactctaatcgaaacgcgcaccacccgacgcgtgacttccacgtccgggactgagtgcagttgcttcggctgggaaaatcttagcagcagtagtaatagtgatggggtagaatcggagggtgaggagacggtgacggagtttgttgctgagccaacggcggcgttttctaaatcatgcgttgggacccacgagtacctcgctccagaattagtatcgggaatgggacacggaaacggagtggattggtgggccttcggggtgttgttgtatgagcttatgtacggaacgacaccgtttaaaggagggagtaaggagagcacactgcgcaatatagcgtccagtaggcaggtgaggtttccggattttgaggaagaaggaatgaatgaggtcgagggaattgattcagaagctgttggtgaaggacccgcgtaggaggctagggtgcgccaggggggccacggacattaaacgacacccgtttttcgatggcgtaaagtgggctttgattagaaactacaaaccccccgcggaggtgagagggttggagaagaagacgaaatcgaagacgcacgtgagtcacgtgacgaggggatcactgtcacactctcatccccataggagacgccgattctctaggtggtggaagggactcggtttcaacaagaagaagaaaatcggtggtttgttatagctgtaaattta

SEQ ID NO: 190873 - DNA, 2570 bp, Cannabis indica
ctctctgcaggtatgaagtataaaccgatttactgcaatgtgaatattgctgaagctcaagcagtggcagctgctcttcaagataaaccgaagagtgttcaccaaccttttgagatcagaacggactggtggatgcaatcgttcacaatggcaactcccttgatgacatgaagccggtggtgaaccaaatcaagagacacccagaattttctcattgtacaaagtttaatcatgtaaaaagagtccataacttaggtgctcatagcttagctaagagaagccttgacaaaaaattaacccattctttttacaattcttttccggattggttaaccattgtttgtaaggctaacctttcccattctttgtaagtttgttggtgttgattaatatttgttctgttcaaagaaaaaaaaaaaaaaaagaaaatcataaccgtatttcaattaattaaagaggtgaaactaattttacaaatattttaataatgcggtaaaatcaaaataaaaaaaaaaaaaaaaaaaaccataaattcataaagaaaaatatacagcagtttatcctacttaataattaatattgtttgatcatatttaataaacttatgttataaattctctttcctatgtggagatttgaataatttaatattaaggttttattatcatagttaaaataataatataaaatgaatgttcaaaaaaaaaaattaaaaataataacggtaaaaatgtagctctctaatctatgctcacaatgatcttctctttgtataaacaagtcatattagaaaaactatcattattcttgtcattaaatagaaggattattttatgataattaacaagaacaccaatgatatgttcgtaatttgctatagaaaggccgaaaagagcattctctttttttttatatagttataaaagttataaattattattattattattattattattattattattattattattattcaacttcctttggctagcactcgtacgaagtttagttagaacttagaaacgtagcaaactcggttatacatttatcagagcttccgccttccccaatggcctccaaagccttacttttccatatgagtgaattcatcctgatcttttggcttctctttccctccattaccaccttcaaacactttatgagctcttcttttctcacaactcctttctcatcctcattgggtcggaccccaacttcccaaatgtcagccacaaacttggcatcggtcaactggtcggcccactgtggtatgccaaccatggggaccccaaggctgagcccttccaaagtcgagttccaaccgcagtgggtaacgaagcaggcaatggcttcatgagcaagcatttccaattggttgcaccaagttatgactagaccctcatcttttgacaactctatgaacccttttggcaattttatccgatcatgctctttcaccacccaaagaaagtaaaatccactttcctttaacccccacgcaatctcccccatttgctcttccgtcaacgacaccatgctcccaaacgacacatagattactgagttgggtgtctttgtttcgagccatttcatacattgttcactcagtggattccatagatcagctccgtatcctttgtctccttcaatccgaccgtccaagtatgttgaaggcaccatcggaccgatcaactttccaggccaatggttgcatatttctttggccacctaatttatttttagcaaaacgacatgtattagaaaaaattcatttgtttatggacatgttagttattaattagagaccagaaacatcgagaatatgaataatagtgaacactttttacagtaataaagatcgagaatatgaataatagttaaccctcctcctcctaaactttttgaactctgctctcctagtataagatacgctaacactacttgatagcctaaaaagttgtgccaaaattaattgtatgtggtaggaattttcttagaaaaaggccgcacatatggtgtttttctttatcgaattcagttacgccacgtcacttaaaaataggttgttagtgtagtgtgcaacgtacttttttaataacaagtacccaaaatacttatttgactatttttaattatttttcaccttctccgtaaaagcaacgatatttcttttcttgaataactcagatctagcagtgggagaggttccagaaaaatcattccggcaacggcaacccacttgtggtcatcatccacgatagcccttactaccagaaactgacggattttcgttaagctatttactacaggaatcatcattatcaccattatttcaccaagacccacactaagctctcgcttccatttattttccgaccaattctcaacattatctcctttccagccgtattcccaacttgtaaatggctaaggatcacatctcagctctcgataaccccttattctctaagccgtaattacataatgaaattaagaggagtaagttcgagggctagttgcttttctcgtcctctactactcaaaatacatatatatatatatat

SEQ ID NO: 190874 - DNA, 2995 bp, Cannabis indica
tttttttttcttctcattttttttgtggtaccaaaactctttgtgaattgcgaaatttatgatatgctgaggttgttgacaatatttatttattttcttggtccctggttattactggctgttgtgatcttttagatttttatatctttcagactggggtctctggtgttcattgaagattttctctcctggttagccaatctttccctaactgataaataattcttatattatgctatttaacaaggagcttccatatttttatgcagtgaatgttttgttttgagtaatttgatctattagaaaagtaaataaactaattgttttatcctctttggtttcaaaatattcacttttcatgccagctacttctgaagttaacccagcaatttgtttagtacatcagaaagaaactcaacttcatgcgcgagtaaactttggctcaaaaagctctaggattttgaccccttagacacattgaaggtagactttatggctccatgttttacaccagatatatggttttgtgttattatgttctctacggtaaaagggtcatctaatgcctttttacctattacttcatttgagacgaataatgatatgtgcacgagacgaataatgatatgtgcacgcactttttgcaccaaaacattatactcgctcatgtgacaagtttcttcaaccagtaatattaattcaagtgtaatgttttggtacaaatagtgtgcacatatcgttactcaaattttctttattcttcttatatttgtttctacctcgtaaaacaatactttttccttccttaaatgtgattagtatattgctaccatatggtatgggcttttgttagcataagaatgtcaatattttcttaatcccatgtataggaagcatggcttagtacattttctacccttggaatgtgattccacatgtttcatttttctgcttattagggtaatctgaaacttaatactgagagcgttcactcttggaactgcttgctgcttagccatatctcatttatcagaggccagcattccttgtccaaagtccgaccaagctgatcactattcaatcttttttggggccagtgattcagactggcgaagaaaggcttcttgtcaacagccacatgattgcttgagttttggattacatggttattctttaggtaaaggtttgattatttgtaagccatgtctttccttgttttttggttttggcttctttttgttttgtttataaaaaattcctgaagtcatatcttttcatgttcagtgaaaatgtattgtacaaagtagtgttgcataaatttatccatacccatacaccaaatcgaaagaaaatagaaaaacaaaaactttcaaaacccatcagattcaaaggaaaatggataaggcacaaaaagcttaaattcgcattcttgtcacgtttggaagctgttgtattctcaaagttaacactttcatctttttagccgtgtcaccatttttttttttactaatttgaacaatttcttgtttcagctattcaggtaccatttcacctcctgtaagttggtcaaattttatattaatttatggaatgtcttactagttgatggtttacattgttttgcagaacaaaattacagagcttagttacatcttttgtggcctttctccttcgcccatcaccattcttatatttgaatttggattttatatatttattttcttctgttgcacttcttccatttagtatattttcctcttgctgcatggcctcgtgaattttatcatttggcaaaatgattcaactatttcttattgtccttaggacattaaaattagtttaattaacaactctaaattgtaactatttttttcctgtcctaaggcccttaaatttagtttaattgacaattaactcaaaattgtaaaagtttgacagttcattgttttcttaaagaagatatgatgataagttcaaaaattaagttgaactggtaacaaattcaagatatcaaagctggttacaaatttaaattgtggagttgattgttattatttaaattcaatttgattgcgaaaaaaaaaaaactgaaagccattgtgcttatctaatcgattaacttctaaagttaactgtgctataaacccttttattttgtgttcccttcctctttaaggcttttaaacattttccaatttttctctgctatcaatcaatctgtttattagaattaacttcttgttcaattttaattgtatttaatgttttcagcatttgatgatttgatgctgatctcattcaagacaatgtggatatcaacccttgctaagaagacaacaagtgctggacctcttatgtatgttttcttccataattgagatatttcagtgtacttgttctttctttagcaaaagctgtggagttgtttcaaagctggccaagggaattgtactcatgttggacataggatccatgttacatggggccagagttgtttatcataaaagaatgatttgggtaattggtaattcactttcccagattggtccgcaagagaaaattacgtaccactcaatcgtcgacgagttgaaaagtacagttatctcattggttggttgggggggccagattcaagctaaaactcttatgtcccacctttatttttatgacatcacaattagatgttgaattcttctagacaagtttattttgtggatattgtttgctcaatgtacaagattatataaaactcgttttcttctgattggattacgaaaattgattttgtggtatgtttactcatctttatcggggaaggtaatgaaccaatcaatggggaagagttttcacttttctattcatgttgagatggaatgacaacttgtggtgataattaatgtattcatttcaaattaaagagggaataagaggactgaatgatctgtacttttgcccttctttttacagcaagtagtttagaattaaacttttttta

SEQ ID NO: 190875 - DNA, 2952 bp, Cannabis indica
aactttaagtttcgatttcaggttaagaagttcgattaattttgggactatagttatcaggtacctcccttggttgctggaaagactggaattgtagtgagtcctcttatatctttgatgcaagatcaagtaagtttgcagcgaatttattcgtgttcaatgttcagacatcattgggttacaaatttgagattagagcattttttcatttcgcattattaggtgatggctttgaaagaacggggcattaaagctgagttccttggaagtgctcagactgatcaatctgtccagaagaaagccgagaatggtcatttcaatatcttatatatgactcctgaaaaggcatgcttgattcctagcaggtataattggtttttgcattaaatgacgtgccactatcttggagatcagtgttttgaactgttatatgtacatcatttgcaggatacatcttaaacttgaatgaacatatgcaatgcatttaggtttggtagtgtaatacttttttgtgtgtttagcccttcaaatctacctaatgaaaataagttgcaaatacattttaaaaggtatcttagccttgttggaaattatgttttaaaattcttagaatgagagaaggaaatagtgattttttcactggtaattgaggtggtttatatagtaacaaatcattgtggatagttataaacaagagtagacatttttgtgacattatataatgttggatgacttctttaacacgaattagtgtcatgattttggtttcattttcagcttctggtcaaatttgcttaatgtgggaatttgtttgtttgctgttgatgaggctcattgtatatcagagtgggggcatgatttcaggtattcacgtttgcctattactttccaacttggacttctcagaaatttggcctctgcctttggaatctactaatgcattagataaatttgcttctgtaatctgtactatcgaaattgggactataagttggaattggtagagagtctgtcgtcattatggtccctagatgattgaaaagattcggcaatcttaaacatgtatattggttattcaaattaatttgattaaatttctgtttgcaaaaggctattttttgtgatcaattcaaccgattttcaattggaaatatatgttatcaacttatgatctttaaatgttttatgtaatttgaatttttaaatttcaattaccattcagagtactttcttcagttttttgatttgttattaaggttttctattactttattttattgtctttggtttttgatcatgaaggtttttccatttcttgtctacatcactgtggactaatacaccgttttccatatttttcacaccatcattacttgaggagtttgtcctttttgatttacagggtggaatacaagcagttagacaagttacggggtattcttgtgaacgttccatttgttgccctgactgcaactgctactgaaaagtatctctctctctccctctctctcaattagacctattttgtttcttttgaaattatcttttaaacatgtacctaatcatcatgtttggtcaaatcttaatttaagagtagcctacttctagttgtgattggaggatgagggtttatatatttatttgattatttttaatgcattatttcagggttcgaaatgatatcattaactctctaaagatgaaagaccctgttgtctctataggctcatttgacaggcacaatctcttctatggtgtcaagttatttaatcgcggtcaatcatctgtagatgagcttgttaaagaaattgcaaaatatgtagctagtgctggttcaaccattatttattgcacgacagttaaggatgttgagcaggttcgtttttttacatgcctacatttttgtgaaatgggatttttcatctgttacatgttgtagttcacctatgttatttcttttactagacaatagagataagtatatatgtttttttacaagcacagccactataggtttaacatgacttgtcttcagatttttgtaggctgtttgtaagatttatcttgttcccgattgtattttcaaatcacttactttgttttgttaactctattcacctttttttttccttagatattcaagtcacttcaggatgtgggtatcaaggctggaatttatcatggacaaatgaataataaagctcgtgctgagtcccacaggttccaactttcattttttatgtatatttgcgtagcagatttcatcattcttatgtcatgaatacatgctgtggagtggatgcttcggttctttcattgccatagggttgctatgatgtttatcagacataataataccattttttcattttctcaactctttccagattatttataagagacgaattgcatgtcatggttgctactattgcttttggtatgggaatagataagccggacattagacaagtaattcattatggttgtcccaaaagtctagaatgctactaccaggaaagtggtcgttgtgggagagatggtgtgccatctatctgctggctttattacacaagaagtgattttgcaaaaggagacttctatacagctgaatcgcacacagtacacatccttttctctcagttgatttgctttatagcttcttaataagttgattgccttatatacagattgtataaattgaattgttagttcacttagcattttaagtaagcaagttctattaacaattgcttttgtgggtttatcactgtcatatgagagtacttatgggtgctgttcaccaggcaactcagcgaaaagctgtcatggagtcattgatggctgcacaacgctattgtttgttgacaacatgcagaagaacgttcttgcttaaacattttggggagaattatccggccgataactgtggttggattttgcttcctttcacct

SEQ ID NO: 190876 - DNA, 2364 bp, Cannabis indica
gagtggtggtggtatgagattgtgactgtattggctggttatttggataatccaacattggctgttgctgctactgggattcttattcagactacaagtatgatgtatactcttcctttggctctttctggttgtgtctccactcgggtatgtatatgtttatgtttatgctctttttttactactattaatactctagtactctattcttcctaacattaatgttaggactgtcgaacactatttatttctctatttatgtttcattctactggagatattgtttatctgaaaatacgtaagattgtttttatttctctatttctggttgtgtctctacttgaatatgtttatgtttatgcttttctttcgatacatgttacgtttgctgtgattttattaaaaaaaaaaaaaaaaaatttaattatgattcttgtcatccgaacttctacctatatcaaatctcaacaaatttttttgaattattgagaggttgaattaaagaatttttatctaaagagaagtttaacttagatgaaaatttaatggcatgttatggcatacatcgaagtgtaaggagtagatatcattcgataaaaaattttaaatctaataatctcaataaatcaaaaaaaaattttaactaacaaaaaaattaagaggcaaacaaaaattctttacaaattcaaattataaaatattaattaattaattaaatacaaaagagaatataattaaaacaataacaataaaaatagagtattattggagaaattgttatagcaatgctcttataggtatagtaaccttcttttgtaaaataaattgttaaaaggtattatcagttagatagtgtctaaaaaagccacactaccttatatggaatagcacacatcaatttttcttttttgttaccttcattatttttatcgaaattaggtagttattatggggtgattagtaggcaaaaatatataaatatatatatagttagttaatctcataatggtattttttattataagatttttggtaaagggcattggtggtaaacattgatatcttcttttcttttgattgaaaattattggattaataggcaaaactttttttaaaaaattcttctgtagttaatctcataataggcaagatataatttacaattttttttgtttaattatgatttttattttttaatattttttgggtgggtttgggtatattgaagaaaatccttaactaaggctttctaatttggatatatagataaattataattttaagagaaaaaaataaatgaaaatcacagtatatgttaaccaattatgaatttgacatatttttatttaaaatgacttttatttatacatcttaatttaagtacatgaaataaatgtgctcttttttttagcaaaatgtagacaaaatataaagtaatttgttttcttgtcttgtcttttttttttttcattcttttaaactttactaaaatttaaaaaaaacaaaaatgatttgatcttttttaaattatgatgttgatatttaaaaaaaaaatccccaatttttataagtacttctatctgtcctcttgattattaggcttttttttagagaaattagttttaatattttattatttaaatttctaagattatgatgaacatttacctattcaaaatttcaaattttttgaatttggtagctcctaataaagctaatagtttgttaaaaatatttgaccatttctaaaataattttcattttgtagaattgaaaaatagttcttctaccgttagcaattgactctatttttgaattttgagcaattaataaaatttaaaatatttaacattttttttgtaaagaatttaacatttatacttagtgatttaaagtcaattgaagaaaagctataatctgttaagatattaaagctgaacttagtgatttcatttctttttatagaaaattggtgatggggcatgattgtttatttgttttttgtttttttatgtataaaaatatataaatgtatttatttttgttttaaaaagacaaggagaatcaattcttttgttttattaaataggaacaaatgtaaagaaaaaaacttttagcattcgaataattttccatcccacacacattggatctaaatatattttcatggtataatattttttagtatatataatataataattcacataatgagtaactatttaaatgataatgttaaaaatcagttgtctatttactattattaggggtattttgtatttttttttttaaataattattcttctacaaaagttttttttttgctaaaaatgtaattctaaaaactaacatagatattctaat

SEQ ID NO: 190877 - DNA, 2361 bp, Cannabis indica
aaaattaatttaaatttaaaataatatggtgagttaatatataatattgtttaaatattttatcaatttaataggtgataattgttattcttagacttttttattttaaaatttattattttgatttgtccaataattagttagctatttctgtacatatttttttttattatacagtatgtatataaattaattctatttaataagatttcattcaaacttatgtgtactgtaactattttgttactttaaatgtttttcaaattttaatttagaaaattaattattaatataatatttaaaaaactaaactaattatttatttcaactatcacgtttcaacttctcctctgcccacctctctcgaaaccccccctctcactcactccgcccatagttacttgccattgcgtttatgctcctccactctattctggcatcagtgatgagattagagtatttcacttcttctttactcgacgagatcagatgcaatggtgactgattccatcaccgttaatgcgcttaggtgaccaacatagtggacctgctacattaacttgctcagtcgatctcaaaccagcactgccattatttctagtaagaatgtgtttttctgttctgtttatttattctgtgattctaaaaattgaaagtaaaaatactttaaaattgaggtgtttgctttcagcaagaaagaaagtattcggaatagaaatcaatttcgacaaagacaatctcattggtgaactgaaatgaacgttgttgatttcagtgaagtcaagcctccaggtgtttcgttcttgatttaagaatagaagtccacaataattttattttattttgttttagtctactcctttcttgattcaacaactgacttcatatgttccatgtttcaaaaagttataatgtggttgtttattgctttggatttaaagtttgtgatattggcccttgtaaaacattatacataaatatatacaggaagaacttaaggcaaaactgataatagtgtttgaactttttataaaatttttgaagtgatgagttatggtagagagatatttgttgaattgctctgtttcataaaagatatttttgggttggtccctcatgttctaggctggtttgtgacttaaatcatgtagtcattgcaaaactaaagatggtttggactttggaccaccacctagagattggtcttggaagtttggaactattattattgtgctatcttatgatatgtatcattccatatttaattcttcaggctttcaacaatttttgggagaaagcttgttcatttcctatgagaacaaccactgtagtccctactagaaatacttaatttatcctatttatcatggcagaccttgtcgttcaaaggtcactacaaatgcatgagccaatttcaaaaagtcatcttcgttcttaatatactttctttttaacatttgtattactctttatcatatatttgtttctattagtagatatctagaactatcaagctagctaaagatccaaaatcttggtctagtttgaatccacataaataggcacaattgaaggtaggcacaatcaataagtattataatcttatatctcattcatgtttcctccacatatttttttttttttatgtcttgttctaagagattaatttatttctttcttttcctagccatgtcaacatgcgttgaggtcaaacaaaacatattgatcaaaacagataagtcagcttaggccttgttaggatatgttcattgttgtgtcttgtatagttccattttgtatgatatcgctctatgattttgtacagtaattttctttttcttgatttgtaacagtgatgatttataggtgacaaagcaaaggaaatctcttattatttcttctccaggtaaaaaattatttgatgtcctttaaatataattgctatacatgacggtcatagccattcttaattatttttgctaaatatgaaatttagctgttgttgtatgtatttgaataaaaagatctaactaagatggatagtctcatatttctcattttccaaagattgaataactaaataactttagcatttttcattttcggaagatgattaattactaaatgactttagctttgtgtggttctgttttgtatggaattaattccacataagatcttattcttggagagcactattggactacttgaacatcaataaggtgaatacttatcattttttatttagatcggtgagattttttatgagaaatctctgccatattttggttgcggcattggatggtttcggttagtaagattacaattataacatgttctagcattatagtataatgctaa

SEQ ID NO: 190878 - DNA, 1414 bp, Cannabis indica
cgaaatacatatctcattccaattaatctacagacttacaagatcagttattaaatagtgaatctaaaattaacacatttgaagaaaacaagaaatagcgaaatacatatctcattccaacttttttgcttcgatcgccttgtgcgcaatcatttccacccgattgcatcatcgtttgccgttgttgtttgacgccactgctgctgctacccaaatatatttataactctttgatgttaaagtaagatgaagaaaaaatcaaatctttataaaaatttggaacaggtaacaaaatgcgttgtacatttatcattaatgaatagaattcattataagagtaaattggagtaactatatgtcctaaccaataagagaatctctagtaaataagtggaaaaaaaattaaaatatagcttaattaacaaaaagtatactttactagtgtgccaaaaggtgatataaatttggcacaatgtaaatcttatactaaatttggtacatagtaaattttgtgctaaatttggcacaacatttgttattatgtaaaatttacattacaataaatacactatttttttaatttacatttaagttatttgtattattttattagtatatttaactatagcattgaattatgaagtatttatattattttctattgtcatacatattaaaataataataaaattaataataaagttattagtttttattttttaataaaaatattaattagatattaaattttatatcaaaattttacaattgtgcattggagtataatgctaaaatttgatgtaaatctaccgcaaagctactttttgtgccaaacataacacaatttttacatctcccattaaaaatagtttagctatcttcatccagtgaaagagcaaatttagctatatcataagcgactttattggcatctcgttttacatgaaatatgccttacttgtgattttactcatgtatgcatgtgtgaagaaacttgggtttattcttgatattcatggcatgattgtgttgatgggttatgaattgtattcttggtaaatttagaatgagatttttaggttattttgtatttgaaatctatttgtaggttctgattttagttgtgttcaagcatgaggttatgggatttgatattcttggttgttcacgtttatggagttgaaattgtggcactttgtgatttttgatttggttttagtttctgtcaattgggttatggtctattgaagatttagacctgattgagctgttgttattgtttaattgtgttgttgagcaagtttgagttcaagaactcaaagttttctcaacaatggcactttttgattcttggtgcaattattgtgtttgagctgcaaaatatgtttataatgttatatgatgatgctctgga

SEQ ID NO: 190879 - DNA, 6276 bp, Cannabis indica
ttcagttttttgataaatagtgtaaattcaggtaggagatagttggcacagactgtatattattccaaattgaaacgaccctttgacaacagaaactaagtatcctaaacagcagggggagggatgtgttccgagtaaatttcagataaatatagaatattacattgtacggtctctttaattttcgattaatggtaatatgaaaaaagaacataggaagggaaaggaaaggaaaggaacttacccagcaggctaaacgttttgcagccgaatcgcagtatttgcttccaaaaatattaaataacttcctagcaccacctggaaataaacgatggtaatttggcatgacaacaacttcttctaattgctgcagtatactgggttcactgggagcacagtgctggccagaactatcactctccagcacatttttgcaaactgaaagactagaaagaagtgtagaactattctggcatgagtaaccggcatagtcagagcagcggaattcacagactccattgtcacagacacctccatgaaggctgcattgctcatcacacacagctgcatgacaaggcaaacaccaatgtaaataacaataatgttatatattgtgctctatcaatggtctactaagcataatgttatatatattgtgctctatcaagggtctactgaatataatgctttattgtttacggaaatgaaagtaaattacccaaactaaggtagaagtgtttatatctgttgaaacggaaaaattatctgaattacctgttgagcagtcaacaccggtgtaaccattttgacattcacacatcccatttgaaaggcaattgccatgtccactacaactattaggacaagatcctgcaagaaatattgtcaatcagaaattattcaaaatcacaaaaatttgtagttgctctttatagctggtaggaaatgagctcacgttcactacaatcagagccatgaaatcctagaaaacagtgacaccttccgtcaacacagtctccattgaaattgcatgatttaggacattgtccagacacaggaagtaagtttctgctacagagttcatgatacgcagggcatactaattcacctacagaaaacatatttaacatatcattaaatttaaatcaacctacatttcaaatcaatgtagatataatacatagaaacaaagatttaccgttaaatccaggaaattgaataggtccaccagcttcagggcatactttccatacaccatcaacagcaacctgaaggaaaaattggattaataaagtaaaacaggattgcagtggaaaaatggtagcaaccaaacagttcttctacattcccgaatgtatcaggtaaataaccattatggtaactatagcaccaataaatgcacaccacatgtattaaaacctccaaaatatacctctaacgaattattaacgcatttgtgctgataacatccatttccttgagtcactgaaccccgtacaaagccagttcttactaacgatgacgccatacacctgtgaggtggagaaagagaataagaattatctaacatattaaggttctcaacataaaaaacactacttgttcaagtgcactagatgttaacctagagttacttccacggacttcacccaacatcctatcaggtgctcgcgcactgttagcatctgtacatgatccatcagagtaagctacaaagtaggtgcagtaatcagctaatgaggactgtccacctgaaaaatataaatatgataagttaacaaaacagcaaaatttagcatcaaggaataaatcacttgattagcagatagcttatataacatctaaattacaagcattcatacaattaatagccacatgttttatatgttacaaggattttgtcacacagtctgaaagaatgttaaaatacaacttatcagggacaaataacttgcagcaaagtataatcacaattgttaacaaataaatataatcaatttatatataatcagatcattgacagaatcgccatcatacatccacggagtatttacctttgttagcctgtgggaagtaacgtgcccactgaggaaggtctccactgtaacttacaatcggacaataaccctcagcctccctattatatgtacaaccagacgcctgagttgtgttgcaatggtaagctcccttccagagattgcaaggaaaggtaacaaagtcagttccttgattgcggccccaatcaaggtggtctgccatactataattggcctggtaccatccactatcttccaacaaagctaatgtcatttttgagaccacagatctagtatccactgaacctgtcatgatctcattcatcattaaccttttttcccaatgtgaacctacaatcaatgaatagtgtgtcaaaatttattactatataataaaaataagtgacggcacaaggatatcaccaagaccattggatgattctttctcgtactttgaaattaaataaaaataataacatcaaatacttgcattcatacacttatgctatacccagcctagaccaaacaagatcaattttacattattacacgtcaattaatatacatgcataactatcttctctaccataacataagcacactggtcctgggtattataatttcacattatttctatgaatgtcttaaatatctcctcggcataatttacacgatgaaagccccatcataaaacttatgattaaactcccaaatataaataaaaacatgaaaacaactaagtggtttgaaaaataatgtaaaagaaacaaacagtcatacctgatgtacctcgtcctcctccatcttctagctctaaaccagtgaaattcacagaaaatgcctgccagaaaataataagaaataaaaacatgaacatcaatatcaatcatttattgttctccttgtagattacaaataaacgggcaaagtaattttggcaactacgcattcagcaacggggaaaaaattcaataccgcataatgatgtcgtgagtgcatgaccacacgtggaagcaccacacgtgtcacagtacgcccaagcttctcatccatgacatgttctgtaacctgcaaacagaaatagacaatagtttagttttcaccatgaaagaagttcctgtaaatgggtaatgttgaaaaagtaaacactttgtaagagcaacctgactacgccttcttttcctctcatccctaaaatgtgcaaaggcatgggggtcaaagcctagaacatgcataacctggacaagatcacaattctcacttagaaatgaatcattttttttcatattcataattgtaactaaagaagaaaaaaaaaaagtcgttaacagacctcatgtatgagtgttgccgaaagtaaagtctctgcttcagcagtcaaatgacgaggagcaacatttacatggcctgtgggaaagcataaaataaaataaaaggttatgtgctacaagttctaattgggaggcgtaaacaatcaggtcagctaatagaatacaaaattacaaagtaaaattaccagcaattgcacggccccattgatcacgctcacaagccactgcccaagcaagggtattaccagttgtaggccttgttgtcaccaaaagaaccaaatctgcctcagcaacaccctctgacaaatcaacatatgtaataattaatctgtcagcatatgttaatgtaatctctgaggggggaaagtagagagtaccagaaaacaaagatcataggtcatggtcaggtgttcataatattaccttcaacatatttacgaggcagttgtacacctccatcttgaccacatgctgaataaccacttaacctcaggttcccttttaccggttcaacagctaaggctctcctgaaccagtctgctgtctgtcctaaagcctggaacagaaggatgaaattataattccacaagtgatcattacgagtttcataagtcataatctatatacacacaaatacactaaaaagcctgtacaacagacttgataaaaatgacttaagaaaacgtcaaaagagcaaatgtatgaaaaaactgaagaaaactataataaccatcccactgttaatttaagttgtgaaaagcttgagaataaataataaacattgaaaagaaccaactagaaataaaccttgcgaagtcgatgccttttgtcgtcccccgctatatcatccaaagtgcaattataccagcagtcaccagagatcggaggatctccatgaggattgcaagagggagatccaggaagagaagacacagggggctctcctagctggttaaaaacaaaatcaaacaaaattaatataaaatgaaataaaaggaaccaaaatcagttatacaggtttacatttaatagccacatatacactcacagatttttattgtaataaagatcataaaaactcactttgacaatgtcaccaatattacggcaatctctatcaggtgaatggccgactgcatcataatttagatatatcctgatgggctgtttagcatccttctgttgttctaatgactcagaaataccaagcagtgccctaccattacggtgaactggtttcagtatgcctgactgatcataaacttgtggggtaacagtgtatactttccgaccaggttgcctcctttgttcgactatttggtcatgaatgcacgaatgcgacacaatactttcagttcccttttccggggcttgccaatttagtagtgggtgttccgaagtttttgcatcagtagacttcaagcatgaaaatatcaatacaatctgaagcaaaaacaaacacgaacccagcatctatgtcatttcaattttcagtgaagggaccaaacaagaacgatgttaaattatagcgaaagagaaaaaccagatctaacaacagtagactgaaaatagttaataatcagagagaagtttaagaagtcttgtttaggaaccaataaaagatgacccaattgtccgatttctaaatgttaaaactcaattattagccaagaccaaaccatagatccagctatatttttaaaaaaaaaaaaaatacaaaagacgtgttaagcctagaagggaaaattataatgttggaagaaaagtaaacaaaaaatatataaccaatttctcaacataatctgatcaaaaattagatttcataagatttaacagaaagaaacggaaaactgttcagaagaaaaaaacttgggaaagtaaatttctgtccaaaaaagggtttaactttcccaatcaaaagttgttccaactagcaaaacccttgtccgccgtttggcccagaaaatgttacaaatgggtctcataaccattgaaagtttttaagtgtcagtaccaaatcctcagcctctacctcacaaaaccccatacagctagaaccccaaatctccttctcaaagagcgaaaccactttaacccaagacaaaaatttatcagcggagcaaacgaaactataaaaaggaagctgacctcgagaataaccacggtaaatcgagaactggcaccaaatcgaagtacggtacagggactgcaccgaaccattgcctccatgaaatgttgaagaatccttaactaacagcatcgattccattaagccgccggcgattttccgatcggtttcaagacccagaaaactctcttgttttcccgcattttgtagaactataatttctacacaatgtttaacaaaaacccacaggaagataataataaaataaaaaacagagaaacgccttggtctaatccgattcgaaaaactcaaaagataaatggtaagagcgagtttggagaagctgcttcttgtgaccgattcaataacaaggagctaggaaagttccgtacggtcacttcaataaactacaaaaaaaaaaagaaaaaaaaaactaaagaagaaagagagagtgtcaaacaaacccagtgacagtgaataggttgaagatgatgaaagagaagagaagagaagagcagagcagagctgatacaaaaatcaaaaatggattgggtggagtgggtagcctctcttattaattttttaactttttatttttttttggtacatcccaaattaatgtaattaaaataaataaaagttaataattaatataggaaagaaaagatcaagcgttattacaaaacgacctccaaattctttaaaattacaaaaataaccatctgggctcttcatctttttttattgtttcattattcttttaataaatggttttattttc

SEQ ID NO: 190880 - DNA, 1461 bp, Cannabis indica
gtttttacaaacatcacatttctatggatactgaccagaacagccttatgagccgggacggccggggcaggagcaccggaagtaccttccaatgcaaccaaaatgacgtcggagaagcgagtagaatagggcgtaggggcagtggagtaatggttgggataatccatcgaatcacagagcttaagaaaagcgaccttggctctgaggtcttcgatctcgcgcttgagatcctcctccgtatcgttggcctcgtcgtagcactccttgcaggtgccaccatcatgtgcgtcgtagtcctcctgacacgatatgcacctcatcgtctccgcatctgaatctgactctgactccatatccatctcgtaatctcctgacacgatatgcaccgaatcgctgaagaaattaaatattaaaaaaaaacaaaagaaaaatcatattaaattttttccatcaaatttgatatagaagacaataaagccatattggtttattgagaaaagcagggaagtgagttaattagctctgagattataaattaggatattaggggaagtttgaatttaccttctccggtaacggtaggaagttgggtggtcggaccgaatgccatagcgttcaggatggggaagattggtgaccggcgggtgagaccatcttagcaccaggcgagtgagggtttcagaaaaacagcttcacagaaattccaactcttatttatttatttattattattattgctgaatagcttctcttcgaccttgaataactagcatctactgcaagtgtgcaaccccgagaattagaggagccctctccctcttgtatcgacctaatcatgagatgacacgtgtccaccagtggccggacaaatgatgtcgtaaaacaagagacgacacctgagaagaacataacacaagaaacgacagtcgaggttgcacaatacaaaaagacaataaaaatagtttaaaaaaataataaacaacattttttcccttcaactatgagggtagtagatttttacccaaccaattaatttttttttttgcaaaaattctttctctctagttatatttggttcatttttttaaattaatttacttattataactatgagttacatgtagaaatataatactcatagttattatatcacgtaaagaaacatcaattaaaatataatgaaagggaagtgagaagtagatttggcttaagtttcacattaataaaagaaacagaaattatagagatacataaaaaaaattgattaacaattaattaattataaaacaaaatatgtagtgaatcaataaatgtgaactcagactaaataaatgtgaaaacacaatttaaggtattgttatatttagtttttgttttaggtaatgtatttctgttttaggtaatgtatttcttcaaaaaaaaaaaggtaatgtatttttgtagaaccaatacaatttaaag

SEQ ID NO: 190881 - DNA, 2241 bp, Cannabis indica
aaaaaaaaaaaaattagtgcaaaaatgagaagagatcactctttcctaataaactaactaatcgtgagacaccatggaaggtactggcccaaatagtttaaacttaatatccacaatctgtaaccgagttgtcaagttcctcgactcagatcgtacggcttccttcttcgacaatgagctggaaacggcaacaactttatgaagagctgcactcctgattaaaatctcaccatctttaatcaatcgatagagcacagagtcgaggttgctctgggttccaagctttcgctcagccaagtcgaggtacagactttttttttccttaggcttgcggtccagcgaagaacaccgattgagcagctgcaatgttttttttttttccatgtttaattatataggttgaatatggatttatggtggagaagagaatgattatgtatgggtttatggttttttgtttgtgatatttgggaaagatacacagggaggcggaaggaggatggtgaaattaagagattggtatttaggtttagggttctatatgctcacacttccctaacctaagataatacactgtggtgttggatagaaatctataaattctgcaaaacaattgctatgtctttcatgactataaaaatttttaactaatcattagcttgcttgctctgctactgctacattaaaattgtaccagctcattagtcattacactttcaacaaagcatgttacttattactctcatgatccattgactgatcaggtttgtccatctgatcattatttaacaattcttcttagcattgtaatgattttatttatttatatgatgtaaatataataattgagtatcctagtgatgattttatactagttagaagtttgtcttataggtttcaaataccatttgaaattcggaacaatgttaaggcttcagagatcaaaatggagaaaaggctaatgactctcataaagtgcaattagaaatttacaaaaatacaattatcgaatcacaaaccaattatcaaaaagttcaattccatatttttcacataataaatcattattaatataaaaaacacataaataattatgttataaaatattttcccccctctttatcatgttctcctctttctactccccagccgaagaaagctttgtgcggcatttgctagtctaccatctccaatcggtactctagacccacagccacattgttataggtactcacctctctcatactcacacatcagtaatcactcacaatccctttcccaaccccccctcattcttcctcttgatgagggtgttatataattttatagatgacattagtagaatcagtggaatgtaatatttacagtttacttatgggattgttgaattttgttcgcttggtctattgaaattatatatgataatttttgaactctgaattgaatatgcctttgatgtttcttaatatgagaagtatgtttcaggttcaacctttagtaatatgatattgttgtagacttgtagttgcatgtacaatgtttgataaaatgactctgaatacttggtttatatattgaataattgcttgatagttaattcttgcacttaatttcttgattctgatacatgcatgaaggcacttgttaacagaaaatgtgtaattttcattgattgagctattaaaatgaaatgagggaatgaagtctaaaagtttaatttgtgtcttcttcctctattggaaattcatcgagtctttggtctaagaattgatgtagcttggcatctatgaaacttttgattagaaagaatgaaaagaaaagtagactttgaaacacatacacagagtggtttggactatggatatctgctaatttttgtgattttgatatttttgtttagaacatattagttttatgcttactagtagagaggtgatctctcttgtgcattcaatgtttaatttaagggagcttctatgtattggaaaggaatgatggggtccctctagaggtgtattttgctctttttgtagatatattttcatgatgtaatcttgtttcgcttaatataagttcgtttctttaaaaaaaaaaagaaaagaaaacagattgcttgtgctttttgactgtaaacaaaaatataattgaaaagttgctttacaaagtataatgttggccacttccatatcttatgaatatatacagggaaagggttgctcgaactggttttggtggatcttc

SEQ ID NO: 190882 - DNA, 1017 bp, Cannabis indica
tgatgaaagaatcgcattaaaggcggagaaactgtcctctatatgtgtgtgtgtgtcgtggaatggaaacccttcttctcataatctttaataaatacttattttgtcttcttcttgcttgtttctttgactcacactcatttctacttggttaacttcaaactggtggtagcaggtaacagggtctgttggaccaccgtcaccaccacctcagttccgctattttctctctctctctgctacaaaatattatatatatataaaacacagtccacagatatactactcacacccccggaaatcgaacacattaattcaagatactcaacgttttaaactatttattaattactcttattattttaagattcttctttagtaactgatcatttagattattaagaaaaatatatactgatacaattagcttttaattactttgtcagtgaccaaatcaatatatccaatccttttcaaacaaaaaaaaaatatcaatataatcaatagggcttgtatattcttaaaatgataaagggctactccttgttatcaccaccacatcaattaatcgtctttaaaataataattttaataatatatccagtggggacttgtatgtattcatattatttttctttgaattaattctatttaatttttttatgagatttttttcagttttatattattttattagtgtagtgtgttagctaggtgcttcgggtttcgttttttccttgtttgttatttatttaaatggaataccgttttgtacaaacctaattttttaatatgtaaataatctcgacttaaaaaacaccactacgattgacattaatgcctatattctctctcctaaattaaaagcctctctctctctttctctctttcttccgctataaatttgaaaaatataagctgcggctttagctagggttttttcagagtggggaaaacaatggtgttgaggggaatgttggctggctcgaggctttttgcataggcagcaagagtttt

SEQ ID NO: 190883 - DNA, 1958 bp, Cannabis indica
tattaagcattgtcttcaagttggttgtattaaaaaaagttgtcaaaaattaagctcagggtcctatttttactattttagaaaatacaaggtctattttgtcatttaacaaaacacagagtccaatctataacttttacaaaacaaagagtccaaaatagtatttacccatgaatttaaaagaaaaatatatatttagaaaattttatggtaagaaaaaattttaatctaatttttttgtggtgtacattgtaattatttcacttatttcataaaattttaaataaaagaaaaatagtaaagttcaaacaatctacctatgttttgagtattattttataaaaaatgataaccacaatctcttaatcaacttttaagttcatgacaaaataatttttttataatggtatttattataggaggtttagtaaaaaattataaaaaaattagcgataatactcctcttattttctatattataaattatatcgtattttttaaaatttgtagaacatttttatttttttcacaattgtagaagcatgtggtttgacactttaatttaaatagtgttatttttgtcaatttgtaatgttttttattaataaaagttatctaattaatgatgttgctgaaactattttcgtcaattaagtcaacacctcagtatgttgagttttttcacaattggaagaaaatagttgagaaacttcaaaacccaaattgagaaattataatgcattcaatacgaaacttacttagaaaaataaaatccaaactcaacttctaagaagtgcccacttcaattttcacacctcaaaactaaacccagatacatatataagaacaaacaaacactttatttttcttcacttcttcactaaacaatctcaaatttaataaaatgaagttgctctctttgttatttctttctataatgttcttttcactccttcttaccaccatggctaccgagttctctcaattcaaatcaggtttgtttcttaaaattatataatatatatagggatgttatgtgtcgttttgagtactaaaacgttgtcgtttttacagctcggaagctaatgagagtagcactaagtccaccccctcctccactttcagctagacaaatcatattcatgacatttgttatagctacaactcttatggttccccaatgtcgtattatccaaacgacatgtcaataaacagtatataaaatcacagtgtagcagagatgtggctgcaattgcagcaactcaatgggattttccatataatccattgtcgtatgttaatgattagactaacaaaggtatgttatattatatgcatgtaaaataaataactctgaattataagtaaaatgattaatgataattaatctttttttttttcattttttcccttttatgcagagctcgatttctcgaagaaacaagaattttgggaatttataatcagaagtgctaaaagcatacatgtatgtaaagtgatgttgtaacttgtaatttttactcataatatatgtacataatgcatttcttttattttttataattttctgggctatttttatggatactattgtgctctttttccttcttcttcttatttttattttgcctctttttgcataaaagagataaaattatgtaaccctatatccccctagcaacatgaattagaccctagcaataatattaaaagcttataaaagataattctaataattagaagataattactctccaacatattataattaaattaaacttatcgtaaagttgttaaatcataacactctacaaaccaacttacaaaactaataataaataaataattgtaaggatatgaaaaaataaaattagattacttgtatgagtaaaaaagaaaagaaaacttaataaagtacatgtcaaaagagaaattagcatataaaataagtagaatat

SEQ ID NO: 190884 - DNA, 2569 bp, Cannabis indica
ataacataattgtgaacagctgctccttcaggctgcagagtcataaatgaaacatcagtaaattttgaaagtaataataaattacaaaccattaaaaaatagataataaatctatacggcaatcaggtataaaatgattatccaagggttccaaatgttttacccggcaaccaataagacgatagagcagctgctgcaacgctggcaattgctccaacagttcttcactgtccaactctctggtcctgccatatccctgctaatgaaatgaaagagaaataagattaaatcctcagttcagttcagttactcagacctattttgaaatataacacacaccaactctagaagtcacgataaattttaaaatgcattgttcaccactctatctgatacctacctgataatgaaaactaaatagtattgtaaattacaataaaaagcaggctccatataatacaaaactagtagctatcaatcattttctcataaaagctcccaatgtctacaggaactcttccataatcctaaagataatgctttaggttcaagctacatggaggaaaaaaaaatctctacatgtgaacctaaagacaattcttgtaactctcaaacaaaataaaaatacacgtcaaattcacctttttgtaaggtaaaatgcaaaatctcacagcagtaacccatccaaattatggttaaataatcttttctatctttatgtgacacaatcttgggcctgctttccaataaatcatagcctagttcttccttttatcattgcatcacttcaccacccataaacctcacacataagaacaatttgctcccaattcttgatagcatgcaatgcaccacaaactaccacaactgatgccactaaaaccatcaaatcgctagagtttatttgcaaaaccattcacttgacatccacacccaatgtaactttagtgcatgtgcaaaaaaaaaaaaatataggatgtttaaatcgattttatacaaacactaatttatttccaaaagctaacgagtataactgtacaaccacatcatattgcctcgcaggctccatgtggagagaccaaccccaagtaaatcttattcatgtattaaagtgtcctttcaacatacatcttaaaatgaaattcatgaattgcttgtccatactcaaagaagttaagtacaacaagggattaaataatgtaccttctcctgtccctgagcaggccttggtaaacgttcagcttcaatgtcatacttcaaaaccctgaaacattcaagccgctcctccaaaaataatgcgtaagtacgcacccaagcagagcaatcccaggctgaaaaggtaaattaaataaataccacaattagaaactctgtatcaatcacctaaacagatcaaccttaccttaccatctacatatgcatatatacacaattggtgtagggacagaatatgatcaagtcaagtttatttataacttttaattaatagttacaatggcaaaggagaatagttatagaggaattgatatcaggattcaatattaacctatcgggcttgaatcatccttgaaattagaaagttgaagaattcgtgctctttgggagaaatttacaagttcctctctgaaagtagggtcaccctctctcaatgtcctatggatgactattaaagttttcaatgccacctgtcaaacaaaaccactaaaaatatgaacagacttatatgttatacagcttattcccagttataataagttcacacacttctgtaatttattaatctaaatgaaaatggtgaacaagatctggataaaagattaagcggaattgcttaagaaatttgtaagcttcggttttcttggtgggaagacaaaaaacaactataataaacaagtgaacggataatgatacagtctaaattgtatagcattcataatcaacaagtgaataagccagaaaaatcagtatgaataaataaagggaactaaccaacaactacacaataaaaaccagttaaaaattcccacccacaacaattcaaaacattttaagtttaaatccaactactttccatttaagttgactgcactacagtaaaagcataaagcatcaacaatccacctctactatattcaaggatagaaaatctccacaaaaactaaagcagaacgaaccacgaaaaaacatatagcttacaattcaatcttcacatgacaattgcagttttcacatatagttgcaacttgcaatgcagtagaaaacaataccaaaagatgagcatgattcatgaactttaattctgcaaagtaaaagagcccacaaattcaccccacttccaaacagtaagtgactccatcactcatttgcaaaaagtgacacatatagacaaaggcaaaataactgttaaaccccaaaaattcattagaaaagttccaaacaccatattcaacagaagatccaaaacaagagaaaagacaattacactcattttaacataaatgactagcttttatatacaacataatgatcaaaggaagaaaagatccaaacatactgtccaattgtgagt

SEQ ID NO: 190885 - DNA, 2456 bp, Cannabis indica
gagtaaacatgttaagatactaagataccttggtgtctttggccctttttttgctctctttgaagccaatcaatatgacgtaagcaaaaatctatgttatgagatctttttatgtatgttgaactttggatactattaaactctataataactcaacaagttcgactttgatgccgagtgtggttggtggttttccttcctaaacttagtggtgtcatgtgtataatgataaatagtaaacctattataatgctctaggcacacactcaaaatacccacaatgattcataaacctataggatacatttcctggattttaggcattttaaaccgagaactcagctgaatattacgacacaagtaacaagagtttgaggttgactaaaaacaattggtctccgctaaatgcggctgagtcaccggtcacattcataatttttttaataataaatatataaaatacttaattagtacctacgcttgctatgtctttgtttccttgggatttaattaactttttccaactttttctcgtaactttctaatcccattagctaaaaagttaatttgtttgaactctgaaatgatcaatataaaaatcctggcttaagagaaagagatcttattttctttccttatggtcaccactggcttgcagcttgacctgtgctttttgaaagttgataccaaaagtcaaggcaaagtgtggggttcgcctgttttgtggggttgattaatgacgtgggtaatttctttctaaaattaattaattcaattaatttagccttacattattcttttggtcttttaagtgttcagccttcctgcagtgatcatcaatattaaatatcatgatttagggggtgaacttgtcttttccatttcctcctcttataatagaagttggggtcatctgtctaaatattttctttccttaatgttgtgcaacagatctggtgaaattaaaatatgattattacatggtttggtggtgtcatctgtgtttccttattctaatgatcattgattatatgaagaaagcttaacattgccaaaatgttctgtctctgacttggttttccattgagatagttggtcattccttttctgatgcttaaatacacattaatggcattaaaaacacaatcacaatagcagaatgagagggatttgactgatcagttaagtaacttgatcaaaacatatcccacataatattttcttctgattctttttctaagcctattaaagcattgtgtttttatgctaatatttgtacttcaggcaaaactatgaaaaaatctccagtgtacccgaaaaatgagccaaatgattacaatggtgatgaatatgatcctcatgcggagttttctcaggtaatgataacacatgaatgatttacattgctaattctcttctatttctttagtcttttttctcaactgtgaaaaaaaaaatcagtatagtgaatttctcatgtcatttggttttgacaatggtggtcagtttctccaagaagcaaaactcaataaaaagttgaactttgagatctcttctgccaataaagaagaagctggaaagagaggaccggaacaagagaagaatgagaagaaaaagaagaagaaagcatggaaagctttactttttccatggttgaaaggtgagaaaaagagcaagtctcacattgaacaagtgaccaattcgagagttccaaagacaaaaggaggctatgcatctggaccagtttatagctgtggaatggctgcaccagttaacaagcctcggcgtcccatgtccggacctattgctactctattcaaccctacaagaagatcagacactgagttaccctatttgtgtcttggccaacttggctgcagcacttcttcttctaccaacggctacggacctgtttataaggcatgatagtatagcagcaccagatgatggtgcttttggccatctcaacgagtgttccttttgatggaacagtagaaaaatttgaaattcagaaatatgttagattttactataatgtttagcattgaattctaaattttgaaccttagctgggattgtaatgcatttgaacatttttatttggaatactaaggcactaataagttcagttcgcttgtttatacgagtcattagagtttttgatgaaaccttaatgtgtttttcctggtttcttgtgttcttgttgcctatatacaatacacttgaaattcaatcgtgaaaatttgaaacacgattgattacttttcatttcaaaccaaatgaaaaagacttcccatcaaatcaaaatcgaccatcttaaaattttctattaatgtcaatatggaaagtaatcaatcgtgatttaattttcaccatgaggaagaaaaacaaagtaaatctcacccacttggcgactttttttgagtatgttttgggaaagatatatatatatatat

SEQ ID NO: 190886 - DNA, 1993 bp, Cannabis indica
ataacaattaataactttcatatttttaataatacatattcaaaatcaataacaaatataacaattattaactttccaatttttttaacaacaagtattctagatcatcacccgataacaattagcaatttttctaaaccattcaataatatatattcaagagcaataatcaataatgatcaataatttttaaatttttgtaattttttctttttttaagattctactctgatcaattgatacatatacaatacatttagaactgcaaagaaggaataataaagcgaccttgtctctctgagaaaatagaattgcatgatagaggatgggatgaagtacaaatgtgtcgagtgcggtaaaaaaaattatctttaattttataattattattagatttttttttttttgtaaaaaaaaacaaattattagaatcaatcatggattgatacacttatttggcacataaagtattgataataggattggtgtagaattatattttatcagaggtcaatcttgctattttttattaattaagattaagagtgtaataattttaaattataaggagtttattacaatttttcaataatttaagtgtaaaataattaatttctaaaagatttagtaacaaattacacaaaattaattattaattattagtaatttaatatttaaatataattaaattttaattaaaatttaataaaaaaaactaaaacaagcctgttacaagttattaattaatttatttatttttttattcatacaaaaaaggcgtgtggtgcttctctctctccccattggtaggaagaaaaaagaagtgctgaagccggtggtgacggtggttgttgttgatgaaatttaatttgatagtgaactcccttcgatccaggaagagattatgactgagaatcagtctgaggtttttctttacccgtgcgatgaattagatttttatttagctactcagtctatcctttcttcttagtcgagatctgccaagaattctcgttgggcggaggaggctgagattgatgaaccaattttctagtcttctgccaaagagatttggagaaaattcaaagctaatcaagttcgtactccatatactcgtcttgattatatagagcctatgaaagtgggggatcgtcttgcttgatattgaagagattgaagttaaggcttcaatttagaaggcttctatagtttgcgtagtgttgggtgctattcccccttttcgtgtgtttgaaggttttgttaaaagaatttgggggcaatttgggcattaggaaaatagtgagaatgcactcgggtttcactcttgtgagctttccagatgaatctaccaaggatttagttctggaaacgggggttgtgcattttgacaagaagccggtgattctacatccctagttgtcgaacatggattcagttcaaatggtgaaatcagttcccttttggattagattaaatggtctcgttcttcaaaagtggggtcgcaacagccgtagtgctatggtgagcgaaattggtaagcctgttatgattgataaggttaccaagaaagatctatggttaaatttactagaattattattgatatggaaatttcagataatactctgaagaatcttttgttcattaatgagagaaatcaattggtcgatcaatttattgaatatatatggttgccatctaagtgttctgcgtgtgacttattgggacatactgttgccaattgctcaaaagatcatggcctggtttgggtcaggataagaaggttgtgcagaataaaccatagtttgtagttgataccactgttaaggataaaccagagaaaagtgagtctgatataacaacttctgttactaatgagttgtttctaatgcttctgttgtccaggttaaagattcgctggctgggaaagtttcctcatcaagtgatgtagttacttatattaagggtgattggatcactcctagaaggaaag

SEQ ID NO: 190887 - DNA, 1377 bp, Cannabis indica
aaaagtaaaaaaaattgtgattaattataaataataaatcttatattgtgactaaatgtattagtcacaaaaatcacaatttgttgtgactaaatgtgcttttagtttggtcgcaatacttattgtgactaaaactaaattagtgacaacttgtatataaatactatattttagtcacaagtaattatatatttttcgttgtgactaaacgttaaatataataataaaaaaaattatgttgtgaataaaagattgttattaaaaatattgtagtatatatagacagagaatcctagctcttatatattatgataaccatgtatatcatgaccttcaactactcacaatacatctaacggatctgatcttaaagtaaaaataaaaaggaagtttaggtggtgggtattatggatatcggaagctctagtcatcctttatgtgaaaaagtttcaagtaagaattttgtgaagaacttgttccatatcataatcttcttcctcctcctatctcttcctacttatcgaatcgtctcttaccaaaatcatgataccttttggcacctggctttactatgcgagctgtggtttaccttctattgggtcctcatcatcagcaccaaatggaatcctgtacactacaaaacctatcctgaacgactcttacaatggtaaaaccacattaatttactacctcattctttttgatcttgttctataattatgttgttaattaataaaaaagtagaatttataaattaatgttatgttatgttatgtcattaggaggggtgagctaccttcggtggacatgtttgtgacaacggcggatgcagtgttagaaccggctattatgaccataaacacagtcctatctttgttagcagtggattatccaactcacaagctagcttgctacgtgtctgatgatggatgctctcctattatcctttactctctcattgaagcatccaagtttgctaagctttgggttccattttgtaaaaagcacaatgttcaagttagagcaccttttagatacttctacagcagtgatgatgatgatacttcctcctcatctgatcatcacactactaaaaagtactcaaaggattttcaacaagaatggatacgtatgaaggtaaaatagaccacatctttgattttattatgtgcaaatagaatttgtgcacttattttgattcaaacaaaagatttatttttctctcacatatatcttttaaaattcttcaattctgaacaaagcaaaagaacaaaattatttctaatgtttacgatattagaaatgttaaagggcattagtggtgtctagcaccctactatgtgtcaatatggctattggtccaattaaatatcgagt

SEQ ID NO: 190888 - DNA, 1659 bp, Cannabis indica
atgtgaataggaatgaaaatgaataaaatttaatactgtaaagaagacaaatattttttatattattatgcttcagaaggacattcctttcgtattttcgagaggaatagtcattctcattctaccaaaatggcgggaaaatcgttcgagtagattcttttgccatttcattccatttatttcccgtaaatgctagtgctagatatcatatccttgtgtaagcagtttgaagttgcacatggacctaggattttgtcatgaactttgttgttggcttcatattaaagttatatgatctcatttgtggttggcttttaatcaacagtttctccaactgcacttggatccagcaagtggcaatacactgcctgcaaatggtaatggttccatgacacaaaatttaaaagttaccaacaatcaacatggaaaggtatttgaacttctcaacttattttatttactttttaatctatccctttttgaccttagagacgacgtgaataattgattgaaataattggcaaaatgatatcgttttagttatcttgtttaaatattcaaccagttcaaccacctgtctaagactatcgaataccattttgcaaagaaaatcgaaattagcctaaagagcaaaatgactggaaaaaaagaggccattttgccaaagaaccctaatttaatttagttcaactcatccgttttcagaaatctcttgtgatgcgcttaaggatcgcttacaagatgaacaacaaagatatattggaggaaggacaagtgaataacttccctcgcggtttataaggtttggagttggagatcttcaaaagacactaaattaaatccggtgttttctcctaacagtcgtctatataggggacgtggttgggtggtggatttcgagcctgattttgctcgactcgagagtatggcttcttttctttttctctttcttttttcttttactcttttctcatttaggtggttgatgatgtacattagtacaaattttattcccgtgtggaattgtgggaactgaattttgccattttgtgcacacaaacaaaagaaaaaaaagaagagagctcatgaatcatatcgaaaacttgagatgctattttttcttttcttagtttggatttgatcattagggtttattgccttgtttggaagctgattttaattggagtcgtatggtatagtattatattcaattttcatgtaccattttcctttactgttaatgaaatgtaaggttatattatttgtttgttgatttttatatttacacacattgcttccattatatatattgattcaaaaataacagtaacatgttttccaaaatttaaacaaagaataaaatttgatctgacattaaattttgctggatccgttgcatacttgtataattttaaattattttcttaagatctgtctttattaatttaagaaaacaagatctagagagtagtagcttagctcatgtatttaataggtggttccttttctaagtctttttccttttcttaaatattaaaccttgactttcataattacaaactcagtcaaagaaatgtgatctggcacagcaaatcaatcttcaaaattaattttcattattgatgcttgtttattgatgagaaatgttaaaagatatta

SEQ ID NO: 190889 - DNA, 2075 bp, Cannabis indica
tggagagtgacacaacttgatgtaagcaatgcatttctaatgggacattgaatgaagtgatgtatatgaaacaacctcaaggctttaaagatgatgagttcccagatcatgtgtgcttattgcacagagatatatatggtttaaaataggctcctcgagcctggaataaaaagttaaaacagagtctgatttagtggggttttcaagcctcaagagctgatacatctctatttgtttatggttcaggagctacccaaattgtgctactggtttatgttgatgacatattagtcactggtccaaatcaatgcctcatttccaagcttataacatatttgaactaattcttttcattgaaagatctgggggaggttcactattttctaggtgttaagattgtaagaaatgagtcttatatgtatttgtctcagtcaaaatacataacagatttattagttaagctcaatatggagggaactaaaccttgtcctaatctcattagttcaactctcaaactcagtctaacagagggggatcctattgaagatccaacattgtagagaagcaccataggagctctatagtatctgagcttaacaagacctaatgttgcgtatatagtgaacaagctcaaccagtttctcaaaactcccaccaccctgcactgggaagcatgcaagaaactgctcagatacttgaaaggcacaattagtgagggattactgcttaaaccagtaaaagatgtgtcgattgaatgctactctgatgtagactaggccagctgaattgatgatagaagaagcacaggaggctatgtagtgttcttaagtggaaatttagtttcctggtctgctatgaaacagcaagtagtggcaaggtcaagcatagaaagtgagtttcgtgctttagaaattgttgcagcagagataaaatggattggctctctcttgaatgagttgcatatgacacaatctcattctccaattatttggatggacaatcaaagtgttacagctcttgctgcaaatctaatttttcatgcaaggtccaaacatatcgagcttgatcttcattttgtcagagatcaaatcttggacaaacaacttcaaatttgatatgtgcctgcctttgatcaagttgcagatgctctcactaaaccttatccactgacagatttcttcacctcaagtccaaacttcaaatggctaaaagcccttttcacttgagggggatgttgacactaaagttagttaagagttagttacatgtctgtacaagttagttagtcttaacaattttacttttcacttgtttttctgttacttgtaacaaactcattttgtgcctataaataaagcttctagcaatatgagagggtgcaagtttttactgcattgctactctcacttttttttttcttctgcaccagtattgttgttcatacaagtcttcatgatgatctcaaaatacatctgctgatgacataacaaaggaaggaagaagtataagtaccctacttacaacatgtggtccctaaaattatctaacatcaaaaggtaggaaagggatcgacagtgtttgattctcaataaattctttgataatacttttggaaatgagactattaggaacatctatgctctctgaacacactccttagctacaataaagagtgagacttgaaaaaataaactctaatcatacaagaaatggctctctatagtggcaaaagaatcgaaatctctctacttttatgctaaactcttttaatagtattttaatgaaaactattattactttttttattattttataaaagtatttatatttaacaaattcaaattataaaatattattaaaataatcaaatactaactaaaatagggagcatgattggaacaataacaataaaagtggctctctattttaattttctaactattttagctaagaaaatagagaaaccaagatgctctaatataccacttatgttttcaacactataattttaataaattgtgaacaatttattttactgaaaagatgatatataggggttttttttcatttttaca

SEQ ID NO: 190890 - DNA, 1992 bp, Cannabis indica
agagagagagagaatcaggaggagtctgacaccagagggtcatgtgcttaggacctgcttgaatttatatatataatttttattttttgtggggggctttagggtaatacaagttcaaatttcacaaaaataaaagatgattcttcttgttactgttgttggtacttttctttatttattttttcttcttcctctttacttttcttttttggggtcactagaatcattaccagctataaaacctatgtagatactctttaataatcttcttaatttcaatatttgcttctgttacatataaccattgtaattctatgtgccatacattatattacattaattccttttttttgttatatagttatagaaatgcatggtacagaaaaaatcccacctccaaaaatggataattaaaatgatttatatatttacatataacaaatatgtaacatataaatgcacatacacatacatgcttttaaacattaaagggtgaaaattattggtagcccacaaaagggtcaaaaagagagctggattctatggttgtgattaaacgcaagtgtgtaaaatgcaaaaacctccatatcaccggcataggtcctagatgttggacacgtttacagccaattaagtgtagttattaatgtcttcatgtattaacaaagtactctatagatatctatattattgatactaattaattaatataatatgtaatattaatgattctaccatgattatattgaattacatgttaatatattattaaatacacacaccaaaaaaactttattaattgagagagagaagcatataccataatccaaaattatttatttatttttaccaggaaataggagagagaaagaggacatattcaaatggggtttagtatcaatccaccatgcaactttcttttcggtttcaaaagttacataattgctctcaaatttagtgcattcagagagaagaggggaatatctaatcttaaaatatgaaacattcatcttaataaagaatataatatttgcccctaaggaaggaatatcttagttccaattctacgactctaaattaagggagcacaactcacaaagcttaaagggccaaaaaataaataaacaagaactatatatatatatcttccctttaattaaaagaataataaaggagcctaagaatagggaatcttcttctgctactaactttaatgaagtgggtaggaaggtaagaagattctttataaattttagaggaatttttatggggttctgaacctccatcacaattcggatccgggtcagacaaataataataatattatcattgtatagtactactagggttcaattcagcttcaacaatatcagatcaaacgtaataatatctgcttttctagtactcctgagtcctgaccctctctgcaacagtccttgctcttgttggtgtaccaacacctttttttttttcctcacgacaatatataatctataattaattaaagataattccttttattaatgtttaaaagaacatgctttacttctaatgttacttaaaaaatgttcctaactttctcttcaatagagaatatcaaccatatatcaagtggtcttattagttctttataaaatgtactcaaaggagagaattaataatcgcgcatattcatatatgtgataatactgatatgttaataatgttcatttaatttgttgataactgcgccagctgaccaaaaaaaaatgttgaaagtgcaaggtttattaattcttccttaaatttatatgcagtacttttaagtaaactgtagggtatatcttatatatgtgcttaatttgttttatatatacatatatatctttaacgacctgatgagctcttatattttgaattgtaaaggctagctaaccataacgagtttccacagtaaaaataagtaggaactatatgagaggacccttaagtaatttcacattccatgccaga

SEQ ID NO: 190891 - DNA, 6642 bp, Cannabis indica
aaaagcctggtcactaggtccatcatctaacatgtttaggtgaggcttccgctggctgaaggtgtagcccgctttggtgcgtcttagaatgccttaaaccttctaagaaaatccatactcttctcttgagcaaatagttttagctcctggaatggagggagactttgactcacgaatacccttcgtgtagctagcagtcaggggactcttcttcatagaggctcttcctgcgaagttggtgtcgttacgttcctggaacatcaattgaggaagtagggaagctaatgacatcttagccctccttggttaaacatccatgtgtcatcacgatgaaaatgggaataacatttacccccaagctttcaagatgtaacaaagtctaggagcttgcagcatcttctcttgggttgcttcgagcacgtgggatttatgatgagctctttattatactacatcatcagccgccaactgaagtgtcactatttagaaggcattatttcttctattttcttgtcagagttttaaatggtggattttgagtttcacgcgtatataaggtgtgtgttttgtgagatgcccaaaaatggcggtgattagatttgagaaaactttcaatttgctgaacacttttcacaatgtatgcaatgatggaagccaattgttggcaagcaatttaccttctcaacttcccacttatccaaccatctgatatctcttaggtgagcgagttgaactgttcgcttctcatggaaggtgcctcttcttggtacccaataaatacctttatcaaccatcctactattttcatttttctgtcctttataccagagttcaattaattctattccttcctctgcctttcaagatcgtcttcacacctccatccccaagcatacatcccgtcagcaaggctgcatcgttaggaccaccagcttcattttgtcttaataacggggtgctgccctcgccttgatcattgtgatgttgccatcaatcttccctagaatgttgtctaagagcccaatctggaaagtctttaggtattttgcaaaatagaaagcacaaaggaaagttaaaaacataaacaaaagaaaactcactgaaaattagtcaaaattaatagcaagactcagtttcgaagaaaaacattgactctgctatattttggtttttcccgagcaaatgaagctatatcttccctatccaaaagctaccatactcctcaaaacaaagattgaacatgacgaggaatggatcaatcccttaagattaggatcgtggttcaaagtgctctggggtccatatgattttgcctatcctactgaaatatttttctattagatatctataagtatatacacttagaaagttatcttcaaagcttccctgttcgatgtgagccatttcatcaagacgcgaagcataagtgagacaaaatgatgttttacctcttccaaaagtgctgacacccgaagtgcccttgttttgagccactgtaatgaaacaattgaccaaattagcttactcactaattggatctgcatgggctcactcctaattagcaaaccattttttgtctagcttaaaaaaatttcacatctccgcttaaaccatcacttttatctcttctttgatcactaatggatcacgatagatgtcatgaattttgtagggctcgatgcttcagtaattggcaatcaacccatacttgtggagattctctgtagtgaccaagtccaccaattgtagtacgtcagtgagaatcttctggtactacacttcttcaatcaccaatgacatggtttgaggtgttagttcgatgttggttgcaaggatggaacctcttccatcacaaaatggatacaacatacggaagaaaataaaaggaaagaaaaaaactaaagtacttaccctgagtggaaaaataaagggataaggtcaaaagccttttagtaggaatatcattatgaagaaccaatagttcgggacatatttggtgaagctagtgggacaagtcgacttgttggagggcttctccaacttagaaaacccaatttttgttttgttattttgcatgggctatgacttgactgcataaaaataaagtatttcctctagctttggaacctccatctcccaaatcttgcaaagaatttaccatctcgccaggagcttataagactacgagatgaggaggaagggtgcaatccctatagcagtgtagaagttcataaaataactgcacacgagaaaatgggctctgcagatgataagtgcccatctccatgctctgaagccatcaacgtatttgactagagactcccccaagagtgaagcctatgcctgaaaagtcttggaacattattgacttctcagtgttcatcatatctttggagcatgtcgtagctctggaacttatttgagattcggtccatctcccatatagatgaactataaactattggggctactttctttgggaattttctctgtggagaagtctccaggatgacttcctcagttggatcttttcctagttcccctatttcagcttcctccttcacgaggtccaccatctcaagatcaatctcttggtcagacatggtgtttatggctggaaagaaaacaagaaaacctaagcaattaataccctaaacctaaaagactagcaagggtatgggagagtcctcccttaaaaatgcatggacaggtcccctcaggacccatgactccgaagccaagtcattgtagagctattcatgcagacaaccagatcgagaactcaagggtaaatagaaaaaacctagaaatctaattgaaaaccataataactttagatgaaggaatttgtgtctgtctcgaacttaacctacatagataaatgagctaagatctaaaatcctcagatttctacctagatttgtgcctcaataattataaaacttctaacaacctagatactatacatttaaacctcacattcacatgaaaaagttctccatatttaaaacttgagaatgcatttctatgaatacaaaagattatatagtctgaaaagtagggaaaaatttacttggagaaggagagaatggagtgcaacaatgactagcctaaaaatcaagtgcccacttgaatgtctagcgactgaagtggattgacgatagcttactatcctcagtggaggtgctactgggtactctctggctcagatgcgcataagacaatggataatggcatagaagggactagacaacaattgggttgaagaatggggctttctagtttactctctctcaaatttgaattcaaatgtttgaaggtgtaaaagtggcaaatggttcttctttagatgtatttatacagtgaaggtggtgatctaagtgctcaccaatctggggcttaaatttcatctcaaaaaacacaatattggtccaatggttgaggagttggaaggacaacatttactacaactcatttggatagaggctttttcatcataaatattcaccttgatacgcacatgacatcaatcaaccctcatcgcgatatcaggccctcccaagacgcatagagttcacagacctagaggacgaggacacacttgcgattatagttgtagtccaaaggtcccaactctccacattctgaagcacaaaagatgaaatgtcctcttcctttctaaagttttccacatatccaaggcaatctgagagaaagacagtaagctaccgccactctcaagtcccaaaatatttggggtaaatgttatctatgtttttggaaggatggcacgtggtatctctcaagtatgcttaagctggaatggcctgggtcaaagcccttcaacgtagcaaggccaaatctagatggaagatgagcccaagaccatctaaagctcagaaacctcacctataaacatgaggctcctctagatcttgaaggcttccagctttctagagcgcctaataagcaagacctccgattcagcactgtatgcacccgaaggggaatcttagaggcttctctaaaagccctttgaggggtgacatagctgctctatgatgcctggtacaaccaaattagattttatctcctatgttataacattgaagagggcgcaccaaaaaaaggaatacatccttttgatccaatgatgcctatctgacatctttgtctactgtagtagtgcccgtgcatgacaccatcccagactgaggggaccccatccgtacaaaacctccaccacaagctagattcttacaatgggccttaaagtcaagtattttatgtatttaccccaatagtgagcctagttttcatagtaaccctagttggtcaagcgtatgtccaaatttagatcttagcctataaatttcaaattataccttcatgcaaggggacaattcacttcacaaattttagggttcttcttctctaactgagaaaatctcaagtgaggaaagatagcaaaaaattagggttcttgaactcttaagacccacttgaaatacatcaagtcgattggctaatacattgactcatggactaggtttcactaacacctgaaccatgtaaaaatctccatctctattacttaattacttatttcatttcttaagatcttctctaatttagttaccgaaaatcatggtaaatatttttgtgcattcattgagagtcgaggaaagatttaaagttgcattacatataaacaaattgtggctaccaaaagaccatcgtcaagaatcaccctcctccaagctaggatgtcgtcatggatgacgctaatttgctccctccagggcatgcccagtcgagcactgggagggatgaagaagtgtccaaagctagcggctgagatggccgaacatccagaacaatttgttgagaaaaacccaaaatacaaggaagatgaggatgaagatgacggtgaaattatagatgggtattacaaaaagttgatactactatgagcaagatcccaaggtggtttgagtatcttgcgagctacctaaagctcaataaaagctagcagagcaggaagttttctctcattgaatggagaaaatgatgcatgactttgagccaaactcggcgatatagatgaacacttcgagtaagataccttggaagaccatattaacttggaaaaaagagcaaaccctactaatgttggaacctcaacctatgaaggacaaggggaaggcaaaggtaggcgagcctcaacctgaaactatcccattgtctcataaaaacaacgtgaacacaaccaaccagtccttacagacaaagaataagaccaccaatgcctctaggcttggatgcccttctaccccacgaggctaagttgtgcataacgatacacttggtactcatatgacaaggcctacagctaagagaaggagaaatttctccagtgattctattaaccaagatgatgggatagaaaaaactttttgtgaagagagttggtgtacaattgacctccggagacgccttgatgccaagcgtaaaaaacccaaaggcaagaaagcaagaaaataacttagctgaatttagctagttgtacaactttcatagttggatgatgttgattatgtctatcatgatgttgacctaagctgtacacctttcacagttggatgatgttgactatgatcctcatgatgttgacccaagtaaagtaccaaacatgcatcacgtgaatcctgacactcaaggtttagataaattcattgtcgatggcgtagataagggttcaaatgtccaagaaaaaataatgagcgctaagaattaaaaagtgatagtgatgataatgttgtaacaataactgatgatgatgatgacgatgaattgtaattgtaacaatgatgtaatatcaaataataattcccgaatatttttcaaatattttttctatgtatagtatgtctgcagaaggtgaaagttcttcaaaaaagaaaggagtaagagagaaatataaaagtggaaatgttgaggaagcaatttccaaaggaaaggagcccaaacaacacattacacttcatgaggagacgtgcacttcatgaggagacgggcactccatgtgggaaaaatagaaaatacttcaacaaaatatgtacatattatgtctgcaacaccatccccatgaataagttcacatgggaaacaatttctaaagctaaaattaatttagtttcggacatacttgaggtattttgtatattattcttaaatttataatttagtatattattcttaagtttataattaatgtaaaagttttaatgtgtaacttttgtagacaaactttgtgtgcccacgaggtaatcaagtttttgtggagtatactttgtacggaatgtcaaaatgtttgcatgaccggtgagtcgattgtaagaacaattggattggaaatattaagggactagcacaagaggtgtgaagttattgtattgcttattggagcacattaaatgaacatgtatgtaataaaaccattaatctcaataatactttactttagagtcaacaataaataattaattgtaacacaaatatgttaattttaggcaagatcagcaagaaaaaaataaggcctattgtagcacatgttctcaatggggtaactttttatattta

SEQ ID NO: 190892 - DNA, 3445 bp, Cannabis indica
ttcgttagctgagatggccgaaaaaaacaagacgagaaagaacattagactaacgcatttcaaaaaatattacaaaacaccagaagattttgaaaatgcagtcaagaaccaccccgatgaactcaatgaagaacaatggcgactaatatgtcaattgttcacatctcctaagtttattgctcgttctaagcgaaacgctcttaatcggcaaaaaatgaaatacccttcaacacaagggtcgataactatggctgagatcctttataaaaatgtaagttagcatatataatatttattttatgaagtttaatttagttatgattttcttacaatgtatatttatcagcaaaataaaagttacgttgagaataggaaagtttgtcatacaaaaaaagacatggacacctttgtcaacgagcatgccaaaaatgaatgggtaagattatattaattaattacttttaaatatattcaaataattgtaagtttgtttggtttctaatttattcttaaaataggagcatgtgaagaataattatgacagtcggtctagtacttctgattctacacaagtttctaagattgatatacttcatgagactcttggagagaggcgtgaccatgagagaggagtgggtcgcaaattgaaaggacaatcatcaagtcaacacacacaacctacaattactgaccaacccgacttaaagcaaacgatagctcagttgcaaagacaaattcaggtaatgtctcaagttttgttacctaaagaacgtacacaaatggatgttgagatgactgatgcagctccaacacaaccaacgcgtccacaaccatctcgttctcatatgtctggagatagatttggtccatcttttcagccaatggattttcaccatcatcagccgcaacagacccctctttcgtttcaacaattgccacaacaacctcatgtcccttcatttgcacctttgacccatgaacaaatggttcaatatcagatgttccagtcattcatccagatgatgtcacagtcgccaaacaatttacaagtaatgatgcagatgatgatgcagtggcctcagacgtctcaggtctcacagtcatggatgccacaaatgatgccgacacaacaaatgccacaaacgccgcagaattttcagatgatgccgacaccacaagggcaacaatatgtgcagcagaaatcgcaaatgatgccgacgctacatgggcagcagacatctcaaatgatgccgacatcacatgaccagcagaaatctcagatgatgacgagttcgcagatgccaccgtactttcaacagatgcctaatgttcctcaacagcaaattccgagagatggtagtgatgatgatgatgatgttggtagtggtagtgatggtggtggtggtggtggtggtgatggtgatggtgatgatgatgatgatgatgatgatgatgatgatgttggtagtggtagtgatggtggtggtggtgatggtgatgatgatgatgatgatgatgatgattacgatgatgatgattacgatgatgatgatgatgatgataacgacgacgctactacaaattagttttagtattttttatttacatcactatctagtttatatatatctttgttttatgaacactcttttttaataagtactcttaacttaacgagttatgtttgactcttaatacttgatatgaaaatatttagtttgttatcatattttacttttaattaaattattttgtatattaattagttagaaaaataaatgtttaatacaaattaatatttataaaaaaaaataaaatagatttataattattattattttagaaaaaaaaattgagggcctttcattgtgagttatcaccaatgacttttcactgacgatagatcgccattaataatgatcactgtcgaaaaaaagtctcttcaatgtattatgtagtattattattagtaaggtaatttactataaattttattttaatttaataattattgtaaaaaactaataaatacttgtaatgaacagagggatcgtaataacagaaattcatcaaagacttcaaaaattaaagcaagccctcctaagaacattatgagttgatcaatatcaagcagctgcttcaagcttgccacaacacgaagggattgtcagcagctaggaagagtatggtgaagactgtacttgcaagcttggtgtattatgtttggaaagcaaggaatgaggtgttatggaatcaacaacaatggcttatcaacaccacggtcaagaaaacacagcaaatgagtaagattagaatcaaggggctgcttcctaagaaagctaaggatgaagataaagcatgaatattaatgacttaacttgtatagaatcaaatgtaaatgtattgatagcaaaatgtaaagattagtgatgtaaaagtttggttggagtaataaaattcttattcatcaaaaaaaaaaaaaaacctctctctaattatatatctagaggctcgtttggtataccctgttgtattgtaatatacattattgtatattatgttagattgtattatgctgtattgtattatttaatacaatactatgtttggtattaatttgtattaatagattgtgtaaagttatactatttttaccgtaagttcgacctggccccgaccccggccctggacctggatcccatcttcggcccgaactcgcacccgcaccctgaccctagttcgagactaggttatttgggcctaggaccgggtctgggtctagggacaggggtgcaacatccaagtctggttctagggtttggggtccaagtcaaagtttgggttcgggcctgaggttcgaggtctaagtcaagatctgggtctagaggtttgaggtaggagccaagttcgaggtcaagggtcttgatgtttgagtccctttcccaggatttgagcccgggtcttgggtcaagtttgggtctgggattcgggtccgatccagggttgagtttgagtaaaggtttggccgaagtttaagtctaggtccagggtcgggtccacatccatggctagggtccaagcccaagcccagagccaactctggagcaggggtcgggatctagctacgatccgggtctccaaccccaaccctctaatacatgctaatacgattcataatttattaaaatttatagttataataattaatacaatataaaatttcattcaaaatataatactacttgttatttaatataataagaatcctatatggtctacccaatgaatcctagacgtgaaagaattgtataaatcatggttggaaggtttcatgcaaaccgccaatgttgtattattgatcttttcatgattaattttattatatttatatttatatctgtatttgcatttgaaaggcatagaataataggataagttgtggaat

SEQ ID NO: 190893 - DNA, 635 bp, Cannabis indica
gatgcatgctaaagacatagacttagccaattttgagtgtaaatccatctggatagaatattgggggaaaataaactgttcaggtcttggaatgatctctatgtgtcaccttatcgagtgctatgttattctgtagaaaaattaggataacacaaataaaagttattagaaaaaacttaataaatatttaaacaaactaagatttttgtcaagaaaaaagagcttatttatatttacaaatttgtatctttaaaaataaataaaattattaaaaatccatataaattattttttgaaaaatagaaaattaaaattaaaaaatataatgtttatttaaacaaacctaaaattttggagaaaaattagatttaaacttattttcacgaaattaatttttttttttacaaagattggatttttaatgtacttttttcacgtctaaatatgtttttaaataaaaataattaatctcttaaatcatttaatgactttcaaaattttgcttttaattttcttattaatcattcaaaatatttttttccttagatttgaattaatttttaagaattataaatatatatatatatatattgatttttttattatgtttagatggggtacaaatttcctaaaaa

SEQ ID NO: 190894 - DNA, 2922 bp, Cannabis indica
tttttttttttttgaagagaatgataggatagagtttgtttgtaataaaaggaagaagtaactttttgatgtatggtgttggtgcgaattcattcctttaactgaaagttagaggcttctgtttttttaaccacttatggcatcacaatgaccagaaatttgtgttcattttggtcttcctgagtctgctattttcctgcaggctttctcctggcatagatgagttggtcaaaaaactgaaggctaatgataaggatgtgttcctgatatctggaggttttcgtcaaatgatcaatgtatgttgttaaatgattaatcagtatcgcgataaacttaactcaacatcttatgggcttcatctttttgaactattatgtttttgaaaaaacacatagattactaaggaactatattatggtacacttatttagtcatcttgatggcagaataagacctgaggcttctaataagagagccaaaagactttaataactggaagttctatatacttacagactcccataattgatggatcgccgtgtgcttaaatctgaaaaatcacatttttctaaagcataaaccaaagatatcatggttataggaactttttgtgtaaaaaattatgtacccaatgtccaacttttaacgaagaatagactgaatatttatgtacttttaattttaaatacttgttgattgagcaattttctgtgaagcctgttgcatcaatgctttctatacctcctgtaaacatttttgccaatcaactattgtttggaagctctggggagtttcttgggtttgataacagtgagcctacttcaagaagtggaggcaaggctaaagcagtgcaacaaataagggaggtcagtttttgaagctgattaacttaatttttgtgtttttgaagtattttgctcaataaactgattgagctcatctgctaggctcataattacaagtcactagtcatgattggagatggtgcaactgatctcgaggtaactataaaaacctcaaatctataactgtctcttttcatgctaccaccacatgtaatatggcattgcatgctggttattatgatttgaagtgaacttagtttgtaagattatcaagtgcaaacaatttatcattgaactagtttcatagataagtaatgattgacataataatatgttattttattttccatgacgaatttcagaatatttgaaccctttactgtattttcttacacaaacaaacctatccaatccaaggacaccctattatggtattacttgtgccctaatatttttcttttcctacacataggcgcgtaaacctggaggtgctgacttgtttgtttgctatgctggtgttcaacatcgagctgctgttgcagcaaatgctgattggcttgttttcgatttcaaagacctaataagttgcttggactaactatataaggtgggttcattgctagccctactccattctttgctttttttttttgtggttgcttgtaaaaactcgtatctgaatgaataaaaagagtttgttctttccagccagtaaatgcaaatgatacttccttctttgcttgcatactataatatgtaaccaatttatgattaaggggattgcattttagttaatggacttctgctatttgattaagtatatttaagttacaaggctaaataaatgttagtaaagttagtttggcaactgtgctgtggagaaaagcagaattgtgaaaaaaaaaaggtgagctgaatatttggtaaattataaattttaaagtactgtgaattattaagattctattataataataatgttataatcttgtttattattatcacaaacatataaaaaaaattatgttatacaaaaattttattttctatatatttttagttctttgattttcatagtataaatttatatgcatttgataaaaataatttatatatttttttaaattatatttttatcacttgtaaaaaaattataatttataattcttgataaattattaaatgtggtttgttaataataaaaatataaatataaaatatttttaaaataaaataaaaaataagaaaattaaatatttttttcattcaaaaaaatatatatttttttgtaatatataataaacaattaaatatattttcagtataaaataatttattacagagtttattaatcaaaaatgatttttttatactttggcagtactaattttagtttttagctgtttttttaactgcttactaaataccttttatcataatttttttaaaaatagtttttagtttttccaaaaattgtgtcaaatgggtcctaaattgctcagaggcccccctaaagtagcaattttatgcagaccaagctctttacactcgagcagggctcgccctaaattgaaatgcgccataagaaaaaaaaaaatttaggcccttactataaaaataaatagtattttttaaaattattaaaaaatatgtatattttttaaaatttatttttgtatttgggtccctaaaatgagtgggccctaagtgcgggcctagcccgcctatatctaggaccggccctgcactcgagaagagagcgcttggtaatagctgtaataataagtaaattaaaccatatatatatattttgataaatcacaccaaatatagcatttatctaattatcaaataaaatattacaaattttgtcatcttagatagtgcaccaactccatactttaatctttgaatacataattccatactttaatctatgaatacataaaataataatcaatataattttttgatagttttgatgctttttactgtttttgtgcttttttatggtttttgtatcatttattatgacttgtctctatttgtttagagtattttatggtatggtcaatga

SEQ ID NO: 190895 - DNA, 1069 bp, Cannabis indica
tgcatcacttcaaactataattaattggtttacgttaaagtgataaagtgtatgatcaattacaaattataatttatcaccacacttaacatgaaattattattatttggtgttctcatttaaattaattaacatttctccttttcaactaaaacaaaaaccaattaaagacataaagatttgagaacaaaaacatttctttacaaaatatcgatcggttagggaaagtgaagctatagtttttttttcaacttttcttttatatataattcagtcataatagcttatacaacttttgagtttggcttaattcgttttgctctcgagtataagaagactccagcaagagccacagcagttcctacaattatgatcacaaaaacactcttagatatgaatatataaaagtcaatatattagtatacacgtatgtgagtcatataccaagagagttaacaggtgaaataggtgtttgaaagaagatgactgaggatactatgagcaccacacgctttacacagtttcctactgcatgagttacaggcgataccatttgtagaatcatatatgacacctgtcacatatatataatcatacatttcaaaaaaaaattaaacaaacaaatgatatatatatataaaaacagtaagagaaatgcaaaaatggattttaaggtccaaaacacgcaacaagtggtatactgttattgatgcatattaatatcaaatctcaaacattttaatttaataaataatatgcgaaaccactaatcagttataagatattacatcggtgtggtgtttgacaccttgaattaccataagcaaaagtgaaatatatatattttatgtatagtaagtgtcaacaatagagaaaagggtctcgctgaattctaagatttatcaggtttttggtttgcgaatgggggttcgcgattcatgtggggtcaagcttcgattcattttctttctttaatttccaccagccatgggtacaaagacaatggtggctccggaagtgagtgaaatttgggtcttggttccgtcaggaacgtgagaagacgagagag

SEQ ID NO: 190896 - DNA, 1374 bp, Cannabis indica
gatatttttttgaggcctaaatagttgagagatacgaatctcaacctgcacagagtgatcaacctggttagggtgatgtagatcccacaaagtttcctccaaatatgtttgtatgacacagatacttggtgagttatcacgccatgtgaaaggcattgagcctttacctagacattggaaagtggtcaaaaggaaaactcctaaggcaggtcctacctccgaccaaccttttgttagcattgagaaatatcaagcgttatagaaaaatatagaagagtaggaagtacataataattaatgaggcatatgcaacattagtacctatctacatcctacgagaaatttaggtatttgtccgacgtcattactagcgtatctaactacaccgacataaattttccccgaataatattaattttgtggaaaagttttatcaacgaaatatgtcaccgacaaaacatttcagacaagactcaacaggagaataataaatgccagggattacatttcaacaacgactttatatgctggtaaaaaccgtctatgtcagtgtaggtcatcgtaattttgttggagaaactaccttccccgactaaaaaatgttggcaacttttattggaggatttacttgctgataaatgtttaccaacgaatccaattgacttttacaacgcaaaaattcgatggcaaaagtctcttttcttatagtgtgtgtgatcacacataatattttcaagtatatttgttcaatcattgatgatgttctcaactcataagatcaactgtgaattgggacagaaaataataatttgggatttaggtttaatccaaaaattgccgtaataatcagattatgatttttttttttttttattttgagggaaagatcaaaattttcttttagtagagaatcaaaggacaaatttaagtccattacaaagctcaaccataaataaaagaaaatcaatcccgacaagggagagcaaacgacaataaggctaatagaccgacaaattgaggcacacatgtccatcgtactcatagtcattgtaaagtaccgtaccatcatagatgaaaggtaaagaaacaagataaggatacaaacccccaaatctctaacaatagaaagttcataagaaaccaacgacaagagacaaaataaaacaacaaagctaaaaacattgatagatctaaacaacaaataaaagcacaaccatagagcccaaatcaacgactgaagaagagccaaccgcccacacaagcaagctttcaacgacggcgggagagtgagaccgaaccaaaaatccaccataaacaaaatgctaggggccaaaaaccagcaaaaacgatcaagcatggtatacaaatatcacc

SEQ ID NO: 190897 - DNA, 1190 bp, Cannabis indica
atggaactgaaattaccattacaagtttttgacgtgtacgcaaattttagtttcattaacttaggaagaaatgtaagtataaataaaaagcattactaaaaacactaatggcatcttttagcaattatcatgagtagagaaaataaaagtttactaacaaattaacaaaaatatgagtaacaaagttaacccgacataatcgtattttgttttttgttcacctcaaaaaaacaaaaaagaaacaaagaaaagagaggggaaaaattcagccctcttcaacttctttttctttttctttttctcttttctcccatcaaagaaattacagcatagtcttcatcttctgaccttaaccaaccaacctacaaaatctaagtctatgtcctcaaatttctctgcattataaaatttttcctttactttcaatatttaaaaaacccgaaatcaaaaacactgtttaatcagtctagagctcatcatgtgattcttcatcatcatcaccacctgaggcaccagcaccaccaggagcaccaccagccttctgataaacggctgtgatgatcgggttacagacggcctcgacttccttgagcttctcctcgtagtcttccttctcggccgattggttgtcatcgagccattccaaagcttccttaacagcggtttcgatcttctccttgtcatcagcctcgagcttgtctgcaagcttgtccttgtcgttcacttggttcttcatgttgtacacgtatgtttctaggctgttacgagcgtcgattctttccttaactttcttgtcttcctcggcgaattcctctgcttccttaaccatacgatcgatctcttcttggcttagacgacccttgtcgttggtgatggtgatcttttctgatttaccggttcctttgtcttctgcctttacgtttaagataccattggcgtcgacttcgaatgtcacttcgatttgaggagttcccctgttgaataagtgtttagtttcatgctctgagataagtagcaaagtaatgacaatatggataagaagaaaaccaaccttggagctggtggaatgccagtgagatcgaatttcccgaggtttctacagtcctttgtgagactcctttcaccttcgaacacctgaatattgataaaagagatttaatttagtcaaaattaattgtttactatggaaa

SEQ ID NO: 190898 - DNA, 1894 bp, Cannabis indica
caagacaccaaaaagggcaaaccaaagacaccaatctaccaatcaacttcaatcttttaaggatccctccacacccccaagccgccacacaccatattcgaacaatccacaaagagacccatggtttgaaacgaagcccaaacctgaccgcgttgtcctcccacaccctacaaaccaaacatgatctcctttcctactagaatccataaccaacccaacctagaaccaccaaacctctaccaggccctgccggatctggactgatcaccactgccccatagcacactaggtttggaaaacgcataacaaccctaggagaaatagagagaaactatgagagacaagattgaggtgaaccatccacttatcccaacgtgccaaataagggacccaatcagagccacacccaagcttggaaatggttagcgggcctggtcagaagacgaactaagactggtggctaggttttttgagataactctagcagaccgagagaaacaattttgtctttattaaattagggtcaatcttgttttcccttttaaagacattattttccttataaataagataatgaatgttacataaggtcaattttttttttaatgaatgtaaaaaaaatgtattaatggtcctgttacataaggtcaatttgtttttttttaatgaatgtaaaagaaaatgtattaatgttacataaggtcaatttgttgtgttagacctttatactctcaggccatcatcagttggataaattcacccaatccgatgaattcattaagcaagatgtgattgaaaaagagaataacaatattcaaagtaagcaagataagttaagcaaagtctataagtttctcacacatactaaataatatcacagaactaaacatcatgtcccactattcatgatacatcaaaatttactggtctagactaagagtctagagctatatcaccgccattagtagtaagtagctcatcatcatcaaaagcttgataagggaaacgtaggatattcaggtatggtgactcattgaactcattataatatgcaaacacaccacaaaagtctaccttaaaggtatagttttccatgtatatttgacgattacaatctctccctttgcttcatcacgcattacaggctctttctccctcgaatattctaactcatgtgctgagagcaaatccacccgaaatcaagcttgatcagagataaatgaggtttagattcttgacaatttcttgctactatttggactcaaaggtaaaaaattctaaatgaatgagttattgttctgttacgtatcacgaaagtagttctataatttttatttacgtattaaatactctatattcatgattagttggtttttattttacgttgtatggatgttaaaaaaacatgcatctagattttagttttctaatcgtactactttcccgaattttcgggaatgtattttattttaatttttttaattatgtaggatctcaacccttggctggaggacttattctataaagagaagactctcagagtgtgtaaagatgcaccttttgcaatacttaccttgtaatatttgtaatcaaaagtgtgattttcttgagtgtttatgtatgtgaggtttagtttagtctacatttgcagtgtgtacaattagcttttagtggtcatgagaagaagaatagaagatctcaccattgctagttgctacactctagtatagggcctccacttgtatttaacttatgtatcatctatctcttaataacaatgtttattctttgggctaggcccatgcactaccatgtcatttatgtattattctttatttaaaaaaaaattatattttttaattgatttttttttttttttacattttttatcctg

SEQ ID NO: 190899 - DNA, 2138 bp, Cannabis indica
cataataaaaagtacagtggggggtttgctctttgactagaaaacgaagtttgcggatagcactcgggttccccaatccatgagcgttccaactaatgatttaaatgtctgcttgaaggactggaaaccagcctccgcagtattgtcttgagaaccagcagaatccatggtatcatcagatggttggcggtgaagttcatcttcaattgacaaggaagaagtggtaacatttggtgtgtttcctctgcatcttttcatcgtttgccttagagaaatgccatcatttgtcttttaatttgcatatttgggtgaacattctcctgctcctttgacaaaccaacaacagtagtggcgagtgatgtggaatcaaccatagaaaaaggagtttggatatgcttcaactgtttattcttggaagcaacaacaactggttgggtcaatgggggataagtggcatatgtattgttgaggataggcagagatggcataggtgtgtaaatagcaaatagatgagtatagttgtttaaatggtcatctgtagaattttccacgggcttgatttgtgttacattcctcactgtttgaggaataatgatcgaggattggtttagccgtgagggagcaaaggtaacagatgggtgtagatgatgcacgttggggttagtaaccaaattttcactagttagagacctattcccaatggttcatagcctgcattcttttcaatgcaaggatcaacaacattggattgggaagattcaccaccaaacaattgacgaggttgtggcattcctcttattccaattgaggtatggctgaagtgaaactttttttttgcaagacaggtcaacaaaggccaagtattaccttttgaaaaatttgttttataacgatcataacttgaagttggaagtgcagatcctttaatgaaaggtttgtactcgagttcgggttcttcaccattgtcaatcttttcaagataaacaaggcatttattaaaaggacggcctattctcccacactccatacaatattcaggcaatctttcatagaaaaaataaatttaaaatatgtctcgcatatgagataaagagatcattcttcccctctttagaggctttgaaacatcaatgttaactcttattcgtaaaaaaggcccccaacattcatttaaagaatccttgaaaacatctataaattcaccaattatgttaccaagagaagtagctaatgtcttggtcttgccgaataagggtaggcgataaacttgtatccaaaaaggaatgaatttgaggtcttccaaagtgaagtttttcccaaccttcggagtatgcagcacaatgtggtggttttgaaagtggtaaggctctcggttcaaaactctgattttgtcaccttcgcgtccgaaagtaagtaagaacatgtctgaggattctgaaactttaataggaaatctcccgtcccagtgttcagccatttgcttctacaatgtggatagccaaacctttttcttagtaagaatttttgcatacaaaacaaattcgactattgctagtggagaaacaacttcaacatcatggaattgaaagacggattcttcatcttcagtgagtgttatttttgatttcatcttacgagtgagtggatccattagaagaagagaaggggagagaaggggtataggagtaaattgactaaaacaaacaggaggcaagatcattggaggaaaaccagcagaaggaagaaaataactgctataaaattgctaaaaacagggcattttgaagaaaaaaaactgcaaaaaccatgaaggacattaactgccacagagcactaaaagggcagacgctctttgtaatactacattcattgtattgattttttcttttctccaaaatagaaactaaatattcaaagtaaatacccaaaaaaatcttaattcaagctatattaatataaactttaaaaggattaaatatatatttacgtaatttttattatccatatatttataatattttctatctttataaatttttggttgcattgttcttttctaatgctgttaatttttattatttatcttctaattttttttattattagtttttcaaaaaaaaaaaaaaactaaaacaatc

SEQ ID NO: 190900 - DNA, 1800 bp, Cannabis indica
ggttgtgtttgtaaggtttagttttactattgtgatttaattaatatttcattttgatggtcaagtgattcaatttttttctagttggtcgatcaccaagcttggttatctttgaagaagtattatatgaagatggttcttacttgaaaaaggcctcgtttattttcatttcgactgtcttcaaatgtcattacagattatacttggatggttaaaaacttatttgaggaaaatcgacaaagctggaatatatcactattgaaagaaactttttttatgtgactgatttggattgtattatatctatacttttaagtgaattcctagaaactaattcttggttttgacattattcaaatgatggagtcaagagtggctattcgcaggcgggccttgaattatagtaggtcaaaaaaaaaaaattaagttcttgtttaaaaaaatgtgttatttttaaaaacagtataaaaaaaatataattttaaaaagattttttttaatccctcgaagtgagttttaaacacaggcctgaccatgcctagggcgaagtctgactcccatcctctcttcaaaagatgtgttttagttgtggagttgttgaattttttttagaaattacatcttccaaagaaagttttttcttacatttggagatttcatgatatccttccaacttgaacaggactatatagaaggaaagttctgacatctttgtcatgtcctctttgtgcctatggctgattctaataggcatgtgttggtgcaagagatttcagaagatttagaagattttgataaaataagggtagagatttcttttcaacagataatttttaaagcttctgaagttttattacaatcaaattttgagttactcattctttcagctgattcatttaaggaaagacgagatataaccctgttggaaggaatttgcacgaaattgtatggcatattcgtcatttatatgaagaatgtatggatgtcaaaaagtcaactattaggaatttctcacacagttatcaattgacattggtgcaatgatttgtagttcatacctgtcaatgtgtttgcttgtcttttgaggcctttatatggtattgatttttaatcttaactaatttattttagatgatattacaagtttgctttctaattttcctaagactattcatgatccaataagtttgtgcatactcataagatcataagcaacttacatattcttttttatttattaaaaatgtattattctctattattttcaataaataattcattacttaggccgaagcgagcaaaggccgtaaatataatacaaaaacaagagaataagaacaaaacataaatacaaatataatgtgggtctcgacagcttccaaaaatgtggcaatgagttcctattactgagaaaagcaaatagaaaatgtttgtttcgactcagaaaatgataaaaagataatatcttatttgggaaagtggatgtggccataaagtatgtggatcgcacgcctaaccaactcatgattgtatttttttttttttttttgtacaaaactcatgatgattttgaaataacttcaaatgtcaattttctcttgaaattctttgtctccacataactgcatgggaccctttctccacctaacctccaactgtctcccttattattttataagagattattctaaaagcaaaaacatattcactatagattgtgctatgtttgacaaataaataaataaataaacaacatcaattttacatatatttataattcaatggtgtaaatagatatat

SEQ ID NO: 190901 - DNA, 3253 bp, Cannabis indica
aaaacccaaatttgtgataaaccttaatttaaaatttcgaattcctaatctcacaatcagctctcataccatgtaaaatatggtgattgaattatatattgtattccatataatagtatatatttatataaaaagcaactaggagactaaataagaaactactaagtacaaatagaaaactattaaatacaatttctttaatttttacaactaatataaagctaatattctgattaataaatatagagagagccattgataaattatatatatatttatatatatatatatataatatttttgtttcaggaagagtataaggtacatgaatatatttcccataatagtctttagtaggatatgattttcttcctaccaattgttgtctatattttgttaatatgattacacgtaagatattcttcttttgacatgcttagaatatatgatttgattgatagaattcatatcaagatagttgaaaatattatggctaaaattgtcaattgctatttttctgtcctgtgacccttaatatacctactttgggcttccgttaatactttattttttgtaatgatgtatgttgtctccattaaatgaatttctaagcatgtatacgaagttctacctgcattgatcatttggaattttctaaagggatcatgaagcagttttccagcatttgatttttttttccttcttcctgaccattgaaaaataattaggtactgaccgtagtcttagagtcaatgccatgcgtgcagcaatatctgatgcattcccagagccgaaccgtcgcttgttacaaaggtatttgtgacttcactagtttctatcatttgtacgtgacagtattatttgtcttctcacctcaatgaaaattgttttgttttttattgactattagttgatttctcgtaaaattttcccatccgtttcagaatacttataatgatgcggaatgtggcttctcacaaggctgtaaatcgaatgagctgctcagccgtggcagcttgcatggcacccttgcttctacgcccccttctagctggtgattgtgagatagaaaatgattttgatgtgggcggggatgggtctgttcaacttttgcaagcagctgctgcagccaatcatgcacaagctattgttataactttgttggacgagtatgataaaatatttggggtaacaataagatataccttgttcataaagtgttttggagttctgttatgcttttctattattctaccactaatctacatgctcatttgttagtgtatcatccctttatgctagtttttcactcaaaattttctttatatgctgaacacaaaatatgttttcttttttccgcaaatcctgtcatctcatttgaatacatgtcaagctcaatatgtagcaagcaataaaagtggttgcaaactaaatttacagtaagaatcacttatcaaaatcagaaaagacaatttgagctccacaggctccatttattttgcaggaagattctatgacacctgaaccgaatactgaatcagaagagagtggaagcgagtccggggaggcgactgacgatgacgagtcttatgaagatgatgatgcaacacaggaatctgatgcagagactgatgatgatcctgaaaatgcttcaagtgaaatgtgcagtgagagtggtgattctggagacattgttatacataataataaggttgttcttaattttctctccctccccacacacacacacatactacatagaataaatgtctggagatgtggaatgtaatgtacatttagatgctacttggtccttccactggcatcctatgtacttatgctctgtctctgcccttattcctatatacttggtccattgttacctttgtgacaacatttgcagaatgatgtatacttttcacatttcatgtttgtataaaagtttcatctagaaagtttatttactgcatgcaggtttttttttgtattttttaattattttgtttcactctccctttttgtaccatatataagcctgtaaaaatatgcatgcatgttcttatcttttattctaatgatttatatttgtcagtaaaacatctatcaatattttttaacaacagtaagtatacaggaatgtcctgactataactccggtccagactcccctgaagtaggtgatgacaaccaatctaaacaaaacgtggggacaagttttcatgaatcgttctcatctcagtctgatgttcaatgcaacactaataatattcctgaaaatagtgacagttcagtggtgctggctaatgattctgccgaagttataagtgatatcccttcaaggatgagtttcactcaaacttcaattgctacctcatggagtcagacatccacaacaatacccagtgtaccagagtgtggtgcacggaatagaacttattgggggcgtacctctgtgagtataagtaacatttttcacattaggcattttgttttgctgttctataatttggaatggtaataagtattgcatgacaacaagaatagtcatcttctgcataaattaagctagtttgatcctaagacagttcctgttttctttttgggcaatacagggaagaaagaatctttccatggaatccattaattacggtactgaagatgagtaagtgatgcatctgcatatgtcttcagtccttttgtttttttgctttcttaaaaaagataaatccatcttattgtgttatattagttcacatgatagattgatagttgatccttgatcctagatacagatacttattctattttttgtgatctgtaaagttagatttcaattcaagcagtctttttaatattaaaattattattatgatgaagggttgagatccagagacttgaggaaactaaatctgagttagaacaaagaattacagaagaggtaagcatatatcttctttcttacaaacttctgtatcaagtttgggtagttttcataatcaggttctcttcttattataggttaatcagaatgcagttctaaaaataaatctggaaagaaggaagaccaatttgactcaacgtcgtctagctcttgagcaagatgtaatggcgaatatatttttctattcctttcctactttttaagaatattttgttgtcttatggttctcttgttaaatgaaataagcttgaatagaaatttcggattgcatgtgaatctacagttgccatgaactaaattacaatgccaaaa

SEQ ID NO: 190902 - DNA, 2996 bp, Cannabis indica
aaaaaaaaacttaatgaaggagaattgttctataaacgatatgtcgttttattgtcattgttctagaacattttttgaacttaaaatttgtgtttaagaattgaaatagattcaaaatatttaaataaactcgtgctatgttacaaaccattactaataaaaataaggtgcaaatgtttgcttaatatgtttagaaagttagttgtatctgacatgattagagagagagagaatcttcatttatatatttttttgttctttattatctcaatttacaagtgtggttattgggtttaaacttatgaatcatccaataagaaaaagccattttataatcatcattaagaaaggtatagttccacgaaagagtccttcatgtttaagtcaattccataccttttgttttttggtgtaaaaattggaccccattcaaaaacagaaatgatcatatgatacatacatatacaagtctctctccatatattttactttatttattagatgtcatgtcattgattcatgaccaaattaatcaccaattgtcaattctcaatgtaatttttctaaatcaacataataattatttcatggagaagtgagatgttcagacctcaatatcttgcataaaaaagacctcaatatcctttgaattatttctaattattataatactaagaatcatatattatactaaacttactgacttcacaaccccatgagttataccactgagaagaaataaaatttatattgtttaggtgatgggtttcaatccccaacaaacgttatagtgataccaatcaccaaactcatcaaagctttcactaccattttcctttgacttaaagggacaacaaagctcaaaaccatacaaacaaaaacacacactaatctaaattgagtttccaagtaccaatcacataccctcctctccttactttatataaattttcaaataaagttgtcacctttttatgtctctctctgtctctttctctctctatttatataccatgatacccagattctgatttaccaagttttcatatcaaaaacttcaattttgaggagaaagaaaagtaaggtaaggtatgggatcagttgaaagatcaaaaaggagggtccatgtatggaaaagagccatagttcatttctgtttatgttttgttatggggttcttcactggctttttcccaaccagtaagtcttcaattttctcctacgacaatttcaactatgtcgtttcttcatcattaagtaataagcaacagttctcacctcagcctattgaaacaatctctaatcaaccagaaacgacaagtcgtttcaacacaactactagttctactactagtaatggtaatgtttcagaagaagcaattgttcctatgcctcaaaatcatccccaaagaatgaaattatcagaacaaaaagaacaaggacgagaagaagtagaagttgaagaagaaaaacgacaaataccaccaccaaaaaagctagtgataatagtgacaccaacaagcacaaacgacaacaagtttcaaggggtgcttttgagaaggatggctaacactctgcgcttggctaaaccaccgttgctttggattgtcgttgagggacaaagtgagtcaaacgacatgtcgcagatactaaggaagacaggtattatgtatagacatttggtgttcaaagagaatttcactgatattgaagctgagctcgatcatcaaaggaatgttgctctcaaacacattgaacatcataagcttagtgggattgttcactttgcttccctttccaatgtttatgatctcgacttcttcaatgagcttcgaaaaattgagtaagcaaatctttaatctgcctttgttcttctttattaccaagtttaataattgaaaaaaaataaataaaacaaatacacaaaatcatttttgtatgttgcttgaaatagtgttttaactttaatatttgttgtgcctactttctttgattccaaaaggttgtttaatttgtataagtagacaagaagaattacttcattgattcaagcctcttaaccactttagattcttttaatttaattatataaataaaaacacagatcatgataggtgtggttttattatatattgttgtgatgtgatattatcattgctaaaaatttacttatagactcatgatggtatgttatgttatgtttcatatatgtcataattgtatcatgatgatcattatatatggtactaatttagttgtctttaatgtgttccacgtaggctttagatgaatcgaccctatatataaacaaataaataaattctatgaatattattatttgtataattattataaagaggtgttttgggatattaatattaaaatgtatgcaggggttttgggacatggccaatagcagtagtgggagcaaacaggcagagagtgatcatagaaggacctgtatgtgattcttcacaagtcataggttggcatctaagaaaaatgaacaatgaaactgatgatattgactccaaacctccaattcccacttcaagttttggcttcaatagctctatcctttgggaccccgaaagatggggtcggacttcccctattcaaaccacctctcaggtataattttaatttatcgattttgatataagacttctatattttttaatttaaattattaagttaataaatgtaatttataggatgcatgtcacattaaatattattattatttatttattttaattggggaaggaggtttctagctattggaccatcacattaaatattgttagcaccaaatgttgtctctaaacaataaaattaatatatttatatatttattattttttcaaaaaaaatattagtatttacataattatgaaaattttatatggatttaaggtctattaaatttaatatattgaaacagcaatttttgttaaggcaacatgtgaaatattttcatcaagtattatttatgt

SEQ ID NO: 190903 - DNA, 1193 bp, Cannabis indica
aggttgtaattaacactcctctttgactaaacaacactctaccagaggaacattataagaaattagaggaaaaataccattggtgctacattttggttcatagtgaagaaagtaaatggataagtgattttctttaattgttgttgttattattatttttttaaggaattgttgttgttattggttgttttgataatttaaaatactatttagatattcaatttgtggtttcttattattctttgttattttttttttttttttggtaaaaactgagttttgatgaaatctatattttttgagttctctgtgatttttttaaaaatgatcgatagggttcgataggagtacaataggtgcctagtattagtagtatctaaaagttacggataaagtttttatactggtcgacacagctatcgaactacctatcatacatatttcgtaccctatcatatagtcatcttcaatctcaagacatagttaataaagggtaatattagatccctatcgatacgttgttatatccctaccgatatctctctttctaaccatataattatcaatacacctatagtaatttcaatacaagagtaaaggtaagaataaagtataccttttaatatcgaacccttatagtacccctatcgtatagtcatctccaaccttaatatatagttatttaaaggatgatatcaaacttacatcgaacaatatcgagcaaagcacaaaaaacctagaaaattgtaggtttaatgattgttcttaaatttttacaaaatttgatttttcaacataaaattacctatactaaacaaaacatacactccacaataggaaaaaaaaaaatcgtaactttagatggataaaatccaaacttaacacaaaatgtataatatatataactcactgggtgtcgctatttggggttgggttccaacgcaggggttcgcgtctgagggtgtgatcaggggctgcaattgggggctaattatgatgaactagtaggtggggctcaatttgtggcgagcagagttaatgatgtcaataaacggttcaaagggttcgaaagagaaagagagagtctaagataaggaaagagaaagagagaatagatgagaatttcaaaagggagcagtacttttggaaacagaagaaagataagcatcaatttgataggggtccaattttag

SEQ ID NO: 190904 - DNA, 4006 bp, Cannabis indica
ggacgcctcatacgctctcgaccaattttcttttttactttaatataccaaccaaatgtactaccaccacactaagattatatcgtttttttttttttttcagagcaatatctcacacatatcttcccaaagcagctatattacattgctgaatatttctagaaccaaggcctccataagccttggatttacatagaggaaccggagcccaagcaatattacccgagttcattgtttctgctttgcctttccacgaaaaagcaggtcaaatgctttctatctttgaaagaatatattttggatgcagaatgagaataggtgcccaataaatatgtgttgacttcccttttagccaaggagattgagtctataaaaatatagtaattgtaaagaagttaatgatgaaaaaaaattacaaacaacacacaatatttatagaggtttatccccttataactgtaatagcttactcctcttttagttgtattgattataacgaactatcaagatcataaggtccgaccagatgagtctcttaataattctcaaaaagtatacaattatttatgcaaagtgtctgcccttttacaatgcaaaaagaaggccccctaaatagtgagatgacttcactatttataggaaaatacaaatgcattatttgctaaatcatcggtaacgataaatgtgaatctcgatataaaagaaataaagtggcatgggaattcaaatataaaatcccatgaatttctctactacataatcaaatcccacaaaaatagggatttagttgagttataattggggaagcagttaaaaaaatatcttagaatatcttcgcttagcgtgtaattctggtcggcaaatggcactgcttgacctacatgtctattcggcatgccatgagctatggggacctattcgaacgatagtcactaaaggaccaggctttcatcaattcgacttagaatcgatctggacggtacaataaaatcgatctggaccaggctttcattatgggcgacgtatctttattgtaccgtccagatctacatcttaattatgtagatactcatttataaaatcgatcttgacaacccataatattatgggcgaagtatctaccatgcacaaatccctcatgattttgagcaataatagttgtaaggatattcttcaatctcccacaaatcacaattgtcattgttttatacacaacattgctacgcgcaatcaactgtagtcactaacttgacttggacacttgctcttaggaatgagagtgagtgtggttgcattaattttcttaagaagcttccctgaattaagcaccaaaatgatagatttggtgaaatcctctccaataatgtcccaaggatgcataaataatttttgaaaccatcaggggcctggggctttggattcagaaataaaaaataatgcctctttaacctcctctttagtatatgctgaatttcttcagtaatacaaggatcatttttaactatttttctcaacacatgccttctattttccattttggaacccagtagttgttgtaaaaataagaaataaaagcatcctttacctcaactagattatccacccaaattccttatgcattagtaataatggcactacattttggtttcttctagttcttaagctaatgtggaatagcttagaattagaatcacatcctttatccaatcattcttagttttttttttgtctaaggaatgatagataagtcttgtgcaccctcaaataatttcttcttgtctgactttcagcatcaattaactctaagtttgtggggttcttgttagcagccccttgagcttcatacaaagcaattaaagcctttttctcttgtactttaacatcctcgaaactttccttattaagaatccttaaaacaaatgtaactgtgcaaagtttagaacaaactttatacattctagtaccttgaatcttattcacgaaatatcttgacaataaaagaagttggaagagtcagatatttttctttatccttgcttttcatttttcttagagccttgggctgtttcaaggaacattctgcatttgcagcaacttgcttccttccctttttcactggaagagtgaaaatgttaagtgcttctttaaaatccatctcgaggtccacatctgcaaaggaaaaaggcccaagtaagacaaaatttgataagcaaaacgaggatataattatgaagataaactcccacctaaactacacttaggaaacttatatgaggaagaaaccactaattttctaaagatctaaggtgttaagtggagatagatcccaagttgcagccgtagggatgtttgagctatactggtcaacgatgtcataataatatgagctactacttattaattaattagacatggaatttggggtactaactgtcaaatctatgagcgataagatcaacacaattccaaacataaaagttattttggttatccttaaacttgacgagacaagttggttctgcactaaggacggtaggtgactatccgtaaaaatgattgactttaacttggggagtcccttcggggattttagcggcttcccagattattgtattgtgaatatatatagctcgagcaacatagtcttgctcctcttcctcggggggaatgggcaccgtgaactcatccatagtagattggtctttctcgagcagaccacaatttctcaagtgtacagctcgatcgtgcaaaaggaagtctgtagctctcaacccatagggtaaatttaccagttgctgatgatgcctctcaatataggatatgtcaatgacaagcgaggtaaggaatatgtgaataacataaagcataaaggtctttagaaattacgatttttttttttgaaggaagtgcgattgatagggtggaagccagtcgtccagaaaaactttctcttaaattctttcttgacactaagaacatgtttgctgagtatccatatcaatgaatagatgatcaaataggcacaccaccaccacacttccacaattcagctttgttaactgtaattaaggataataaataatgagatctttctctctttatatgtataaccatatatactatgagctcatttttctatatatttttgagtaatttgcgatataaatacttaagtttaatttccagttgcaaataaatatgtaagtttaatttttggcggttataatacctaagttataattctgaaacttttgtacgtgttaagtgttaagtaaattgtcacgtaataattcttgattgggtccaagtcatcaaatttaatttttttttaaaaaaaaattaatttaattataccaataaaaaaagtggataatgacttaatatttaacggttaggtacctatagagttccaaaaatacaacttaggtattattaccgccaaaaattaaatttaggtatttatttacaactgggagttaaacttaggtatttatgtcgtaaattacttaacatttttttaatataattaacttacgaacaaatgcagaaatatacctagttttgtcataacaactttcgatcggattattattaaattttattttgacaaaaaattagttttggatactctattttgtatcattttagaaataaatacagagtctaatgtgttattttacaaaacagaagcccaataatcagtaactcttgcaaaacataaaatctaatatatttctatttaatattattagctataatctctcaattagaatatactttacttagttactaagtgtattcttaaatagaaattttactgtacatgtacagctaaaactagtgagaaattttgtttctaaccatagccgaaataaatataacacacaaacacaatacttacttgcactacaagaaaaaacatttatgataacactgaaaaagtgtattaaatgtattttataacaatttgacagcccatgtaattaaaaattgacatttaattata

SEQ ID NO: 190905 - DNA, 2694 bp, Cannabis indica
tagaacagcataaagtcccccaattatcaaaactgaccctattgccctgcaatattcatacagatatacattattatatatatatatatatatgtatatatatgatagagattaataaaaaaatataattttgtgagttaaaaaatatacgtacgttccaacataaattttctctgatagaagagcccaactgaaaatagccaccacaatcagtaacatgggactaaacactgacacgtagagtggaccttttctttgtatactccaagatgttaggaaaaatgccactgctgaacccataactccctgcaattaatttttattatatgttattggctcttttttattgcaactaacagagtaaattcttaaagtaattttctaatattgttatcaatttttttttcctattgtaataagtataagtgaaaattacgacattaaaatgaaaattaccgcgtagagagaagcaacaagccaaatgttattggtcaaagaccaagccgacatgttgtgttcgacaatcatgccaatggccccacactccacgctcgccatcgagcacattaacgtcgtcgttgtgtatggagctgggaacttctcactcaatccagccttttttaatttttcaaaaagaaaaaaaaattaattatacatataatgactctataattagtaattaattatgggataattacctggatgatgaaccatgcagcccaaccaacggtgcttagtataatgaaaatagggcctaagagtgggtttgtgggagtagaagtagtggtagtagggactctggcttcgtcaagataagaccagtgaatatttgatttacccaaattgatattttcaccgtggtaaaacgacagtaacatggctccccctacacataacattgttcctaccactttagctattccttctttcttccttaacccagctgattcttgtctgtacgtacatgtattaatacccaattaaacacaaattattataattaattaatttaaccacattaataatatatatttatatacctgaaaatgacagcaaggaggaatgtgactgctgggagaatattagataatgcactagttattattgctgatgagtattttaagccaatgaagtaaaacacttgattagctactgccctgcattaattaattataaaccaattatttaatcatatatcaatgtttaattaagtaagttatgcttaaagaataatcaacttttgttgaataaggatggatttttaagagtccttacccagtcaaagagcataagaaaatctggaacaaaataggcaatgtgatcttcggtcttgttttcctataatataataataaccaaaattaaagggaaataaagttagcttgtgatgagatatattttttacgcaaattaattaattataataatataaagtatatataaattcagttttgattattattattattattgttatgctttttgtggagtcacgaaccatagatggtatatatcatgaaaagtttcatcttaacacaattatggccaatatgaagtaaaacgacaaaaatgtgtatatatatgtaaatattattaccaaataataacgagtgcatgtttttagacaaagggaatatagtatacgttacgttagagccaaattaaacgacaataaaatgttcacatgcaaagcgtgtcaatattattggaattgcaaataataataataataataattcaatttattaattttctttttattaaaactaaaattttatcacgcttctctctctatatatagtgtttggatcttatttcagtgtgtacttttggttaattacgttctagaattcttaactgttttcaacattggagtgtgtacatgtacaaaacgagggaaattaattaattgaatttttaattattttattaatatataattttggtagttctccacaaaaataatatatgtcttatttaaggattatgagaaagtacaatatttcttgtccttctcagtttttagggaggtttaaaggtgaaaacaccattagtaatacactactcttctgcttcttttcttgctttatttaaggatttcaccaaccaatttgttaatcagccaaaacttgcttattctacaatatggattaattatttaattttttactaatatatatatatatatataacaaacaccttatatatatataaatatttaaccctatttatatataagttcccattttaaggatatatattataaaaattaattagttatcacaacaacaacaaaaattaatatgtatacacagtgtatacgctgttttcaacatacacattaatatatatacatatatacgagcatcaaattataattacaaacccatatcagtctttagatatagcagctatataattatttttgttattgatcaagtaattttttttcttttgaagaaaaaagatgtattcaagatttgcattattattatatagactagcaataataattaaaatcaccaaatgaaaacatacttgcacacacactattgtactcagatgaagaaaatttgatcaaactatatatgaatagataggataagtaactctctctctctctataaatatatatatatatatatatatgacatagatagtatatagatatacgtaccattcgagaaaactgaa

SEQ ID NO: 190906 - DNA, 1287 bp, Cannabis indica
ataaaaaaattattaaaaattttcaaatcttgttttagaattagaatggtctttccttccattttaaaatggaatagtcactccatcaaaaagctgaaaggtcattccattagaatgatattctaataattttaaatgtaaccaaacaaataaataaaataaaaattattttctttccattctattctattttattacttccaactaaatgccatcttaatgtttagacattcaaaaattctaatatagagatgtttgtgaaagattgagaatcggtcatcggtcagaatgcacatttgtgcatgctgcatgcttgttttatgtcaacatctctacttataattcaaatatatttttcaattttattataaaaaaaatatatttttaattttcatctcaaaactccatattccctacttaaatgacaaaccaaacatgaacttatggcttgcattctagtaatgtgatttgtttttttgtcattagccataaataaataatattttaattagagatttgagatgaatggacaaaacatcaccaaaagtttggaataaaggaggggccacctaaagaccaaactaactcaattgacattgtttggttcaactaattattgctatcactactaagtaagtagtggatggaatctttgacaatcaaaccactttatcttatttattactcatttcttcaaatttaatctttctttttattttgttctcctcctatttaatttaaatttagagtgtgtctagaaattattatggaattattaggtattgtcttattttttttttaaaatatattgtattttttttgtcgaaaaaatataaagtgtatttagatgtatgtgtttggtaaaataattaataattatattgaaaataatatttattaataattaatattttaaatgaaaattttgtatttatacaatataattacaccacaatttaattgagattccttaattccttaattatttgtaattaatagttagcctagccatatatcaaataagtaattacttcaaactaaatcaaatttattaaagaatacttttccaaaaggctttttttttgggtaaggttttcaaagacatccttaataaaaagaatttgcagcaaatttttttaaaagttcatactatgatgtatattaatccccaacttcaaaaataggagtaatagtcctcaaagtcatattttttgtgagcccgtaagtcttaaatttgacgaatctgttaagttattcataattaccacgtgttgagctattattggt

SEQ ID NO: 190907 - DNA, 574 bp, Cannabis indica
atttaattatataaatagagagacaaaagagttgttgtctggagaggagattacagtggaatcagcattaaaagtggcgatggctcttcgtacatggacagaagaatcaataaggtggatgttcaaagttggtgcccagagtgatttgttaacttttgcttcaactctttttggactatggttactatcccaagtgggaaactactttgacttcttaaccattcaatatataggtaataataatcaaacactcaatcactgatctcagattataagactaatatgtttttgaagtaatgttgtctgttgagatgtataatttttttcttttggtttttttcttatgtaggcattgttatgggcatgacattaccggtaatatattccaaatatgaagataacataaagaggcttagtgaaggagtgaagaaacaattgcataggtattatgacatgtttgatgagaaagtgatcaagaaggtgactagcatgatgggaacaactactactagtagtaccactaccactacccccacccccacccccaccccacccccacccctaccaaacggaa

SEQ ID NO: 190908 - DNA, 2074 bp, Cannabis indica
cctgcatatgtgacccaatgccccattcaaacaggacagagctatgtgtataacttcactgttgtaggtcagagaggcacacttttttggcatgctcacatatcatggttgagagccactatttatggtccattagtcattcttcccaagcatggcattccttatccatttactaagccttataaagaagttcccatcatcttcggtaacaatatatattttttaatctcatttttatagtttgtttatacctttcaatgatctaacttcatacattgaataatatatgcaggagagtggtggaatgctgatcctgaagcagttattaaccaggccttgcaaacaggtggtggcccaaatgtatctgatgcttataccattaatgggctcccaggcccattatataattgctcagccgaaggtacaaaaatataatgatcaaacaaatcatatggtgttattaactttaaaagtggttgatctaatattgattaaaaatggacaaattttgcagacacattcaagttgaaagtgaaaccaggaaagacttatcttcttcggttaatcaacgcagctctaaatgatgaactctttttcagcatagcaaatcacactgtcaaagtagttgaagcagatgctgtatatgttaaaccatttgacacaaacaccattctcatagcccctggacaaaccactaaccttcttttaaagaccaaaccccaattcccaaatgccacatttttaatgtctgctagaccatatgtgacaggtcttggcacctttgacaactcttctgttgcaggaatcttagaatatgaatctagcaattccaaaactcacctctcagttaagaaacttcaactgttgaaaccaatcttacctgctcttaatgatacttcatttgcaactaagtttgcaaacaaacttagaagcttggccaacactcgatttccagcgaatgtacctcaaaaggtcgacaaacatttcttcttcacaataggactaggaaccaacccatgccaacataacaatacttgccaaggacctacgaacgggacaatgtttgcagcctcaataaataacatttcttttgcccttcctaatactgccctccttcaagcccatttcactggccaatcaaatagagtttacactactgactttccaactaaaccaatagttccattcaactatacaggtactccaccaaacaatacaatggtcagcaatggaacaaagcttgtggttcttccattcaacacaagcgtggaacttgtcatgcaagacactagcattcttggtgctgaaagtcaccctgtgcatctacatggatttaatttcttcgtcgttgggcaagggttcggcaattttaatcccaataaagatcctgcaaactacaatttggtagaccctgttgaaaggaacaccgtgggtgtgccttcgggcgggtgggttgctattcgattcctcgcagataacccaggtgagttattggtcaaaatggaattttgtagaattaaacagaactagtaataagtaaatctacacgtgattcaactacattattaatttttcttctatagatttttgatggttgagatttttcaacaggtatatggttcatgcattgtcatctagagattcacacaagttggggcttgaagatggcttggaaggtcctagatgggaaattgcccaatcaaaagttgcttcccccaccagccgatcttcctaaatgttgaaatgcttcctatgcttaaatattgttcttttgaagaaaaccacaaacacaagcaattttgtgctattttaacttatactttgcagtttgcattatattttttttagaggaattgggtgttgaaagagttcaataaatgtattgttgatataagtcggcgtgaagaaaaatagtgagaagaaagtttgactattactttttgattttgcaataaaacaaccgaaacatttcaacttatttcgcttgtacattatacttgcatttcgtggtaactttctcaaacataaattcctaattggggttgaaaatgaagacaccaaagcaaggattgta

SEQ ID NO: 190909 - DNA, 2930 bp, Cannabis indica
ttttttaatatattttaatgcatatgccagggtgccaactctgtaaatgatgatcatcagcctacgggttgcaaatattgtactgtaagtttgttcggtcttttattctaatttcccttttttttatgcagtattgtaatttgaaatacctttgtactaaataaacagagaagttccgaagggaggtatcatccaatgaaattcaaagtttcttcaactgatctttttagaagaagtgcgattatagtagaggttgtaaatgaaaacaatgcaaaattccaaaagaaactaagagagatgccagatgattattggaattttttgatacctgatgaacaagtagatgaaagtagcaataaatcacaccgaagagttttgtcacatgcacaggttagtagtatttgggtactcttactctgttttaaactgcattctaagagaagtgcagttttgtttagtcggttttaataaaaatattagccttttcttatcttttttttaatttactatgcttgtaggtctatcatttgctgaaggatgtcgatcctacattcataaaaaagtttgttccaaggctagattcactctttttgaacagtttccttgtaacaccaaattgtcatcgcgtgactgaatttacacatgcattttccaatgggcagcgattgacttttgtaagaattatttccccatttgtgttttggttgatttggttagtagatcacctactcatttttgttctttctctcttatgtccttgcatgtaccttggttgtaggatgaacggaccagaacataccgtaaattggttgatttcagaggagtggcaaatgagttggctgctcgtgttttggattgcatgaaaattgctaaggcaagttagctagctttatttccttagttgtgcaagtcgtcgtgaaataatgcttctttttaagttctaaggcatgcctttatgaaaatttctaaagtgattatgcattttacttgcagttaaactctgacaactctttgagtaaagatgtggttcttgctcagcaaaagattaaagattctccttacaaaaacgatcgggtttgagtatgggtcaaagatgttgttttgggaaacgcagtgatcattgttttcgcataggttgttgttggtgatccaaatatcaaacttaatgaaatcggtcataccttacgtaagtgttgctgacaaaatgtacatttctgagaatttgaatagatggaacttagaaagatcagatgcgtgttggaatgtatgttttatagagaaaggagggattcgcgttcgtaggaatggccatcttgtgaaggtacgccctatggatgaattacggataggagacactatatacaggcctctacgtgatggagatattgtgttgattaacaggcctccatccattcatcaacactccctcatagctttatcaaccaaggtccttccaacaaactcagttttatcgctaaatccactttgttgttctccctttcgtggtgattttgatggtgattgccttcatggctatgttccacagtccgttgagactaaagttgagcttaaagagcttgttggtttagatagacaactgatcaatggacaaagtggtaaaaacttgctttccctcaatcaagacagcttagttgctgctcatttggtgatggaagatggtgtcttattgactcgttatcaaatacaacaattggaaatgttttgtttgaatcaccaattgtttcctgcgatactcaaagctcctttacttaattgtcctgtttggacgggaaaacaattatttagtgcaatcttgccttcaggttttgattatttttgtgattcaaatggtgtgaatatagcaaatggggagattatagcttcggaaggatcttcatggttgcgcgatacaaatagcaaccttttccaaaacttgataaaatatgctccaagtaaggtactcgatactctatttgctgcccaggaagttctgtgtgagtggttgtcgatgaggggtctgagtgtttcactcttggatttgaacctcacttctgatttgtactcaagaagaaacttgatgcacgaaatattttatggcttacaagaagcagagcagacctgtatgtttaaacaggtgctgaactcctttcataaagcgcttacagattctgatgaggagattcctagatccacgtctgttcaagtagaacgtttgtgttatgagaagcaaacgtctgctgcactcagtcaagtttcaatagatgctttcaagcaagtatttcgtgacattcagagtcttgcctttaaatatgcaaataaggacaattccttgctggctatgtttaaagctggaagcaaagggaatttgccgaagttagttcagcagagcatgtgtcttggggtacaacactcacttgtgccattatcatttagtattcctcacaccctctcttgtaatggttggaataatcataaggagtctggtttaagcaagaatgctgttgatgatggtcccaagtattctgggtcttacatcccgtatgctgtggtggaaaactctttccttactggcttgaatccattagaatgttttgttcattcaatcacaaatcgtgatagtacgtttagtgataacgctgaacttcctgggactttgacccgaaggcttatgtttttcatgcgtgatatgcacactgcatatgatggaacggtaagaactggtagtggcaatcagattgtgcagttctcgtacaatactgatgaaggtcacacttcttcaactgtttgtgatggcataggtggtaaacctgttggttccttatctgcttgtgccatttctgaagctgcatacagtgctttggatcaacctattagtctccttgaaacttctcctctgctaaatttaaaggtgttgtcttctctctctctct

SEQ ID NO: 190910 - DNA, 1083 bp, Cannabis indica
gctaccaatcgtggctaccatggcaaaggaaatatctcttccaatttttttggaactagacctaatttttcaagcagtgactacaattcatctcttgatcatggcacttgaaaatcctatgttgttactcctcgtggaggttttgctcaaactaatcatcctctgttggtaatgttcgtgccacacttagccttcattctctcatgttggttcttcttttagtggtcgaccaacttattgattgtgctctaaatctagatacattgcctctcattgctatcaaaagttcaatatggaatttttaggagttattgctactaatattgacaaataatctacaaatactgtcgaagcaaatagcgtagttgatgttgcttggaattctgattctggagctacatcccactgcacttcggatgtgaacaatttcactcataagcaggcctactttggtattggataagtgcacatgactgatgctattgggatccctatatacaatgttggtaaatctcttttcactaagccttattcctctaaaaaaaattcatcttaatggtttacttcatgctttcaaaataagtaaaaatctcttaagtgtctctaagtttgcttacaaataatcatgttttgttgagttccatcataaccataactttgttaaagatgaggcttccaaggaagtccttctataggcccattttagctcgacttaactagttttagtgatgctgattgggtatctgatttggacgataagagatcaactttaattttttgtgtttcttttggtcagtgtcatattttggtcttataagaagaaaatgaatatttctcgttccagcattgaagctgagtactgcaatcttgctcatgctacaacaaaaatcatgtggttctagttttttttttctacaagcttggtctcaagcaacaacattcccccacaatttggtgcgataatcaaagttcaattctcatggaagtcactccgtttcttcactccaaaactaaacacatcgaattggacttatacctgttcgagaaagaatttttgacaataacttatttgacaagcacact

SEQ ID NO: 190911 - DNA, 1880 bp, Cannabis indica
ttacaggtcatacatctctgtcctggattatgagagttcagattgcacttgatgctgctagaggtcttgagtacatacatgaacacactaaaacacattatgttcaccgggatatcaaaacaagcaacattttgcttgatggcacctttagagcaaaggttctaactttctggaactcattgatagcgtttttaggatattgaagttgtgtggatcgcgctgaacatttcttctctctgtatttagatttcagattttgggttggcaaaacttgtagggataacaaatgaaggggaagccacaacaacaaaagttgttggtacatttggttatctagctccagagtaagttaatttgctcatagttctcgcgatttttgtaattaacaagttcttcagaagtagttcaaattgcttaatttatcattttacgtgcagatatttaagtgatggtcgtgctacggctaaaagtgatgtttatgcttttggagttgttctttttgagattatatctggaaaagaggccactattcgaacagaaggcatgagcaataaaaatcctgaaaggcgttctctggtatccattgtaagtactgcgaacattttcgactatcttcctgaaattaagtatttattttcattaccaccctcaattttatttagttaatctttctaatatttgttgaaatttcagatgttaggagctctaaagaatgcacccgactcggtgagtatggcaaacatgaaagactacattgatcctaacatgatggatttgtatccgcatgattgtttattcaaggtatttcttttttttttttcactttaattatctcattctacagggtaatcattatgatttgaaacttttcattattgaggcatgaaaatgaacagaaaaagggaatcatgaagtgctcttgcataaacataataatgatatctatgtatcaaatacaaaaaaggccttccctttatttattatgtgacacattgaaaagtggaccacacaacctttacagataaactgaacttttaatctactatttgctgagttgagttaaaaagaaattttttcgtacaatctctaaactttcgaacatttgtacaccaataatttcctttctgggattctttttctctgcgctgattgttgtgtttcgttttgtagatggcaatgctggcaaaacaatgtgttgacgacgatccaatgtacaggccggacatgaaacaagtggtgatttctctgtcgcagatactcctctcgtctgtggagtgggaagcaactcttgccgggacaagccaagtatttagtggccttgtccaaggaagatagtgtgctttcaaacactttcttttcaaaccaattgcttttcttcacaggttcttccccccctttttgaccacattttgtaattttttctgttttaatctgttctatcttatctgcatgagtatgtgtgtgtatagttgttgcacaggtatagtagtaaggtggttgtaaacgtgtaatatgtaatagattttcgattctttcatggttattttagaatttattatagtattttttgatgtctgtctcatggtgccgagtaagtaaagtttatttaccaccaaataaatacattcataccatatggaaagatttttataacaagttataattgtaccaacttactttaagcagtgtaataataacaattaacatgttaactgctgtacttggtaagtgaggttagcacacgcaccgcagaggtgatgtaaaagatcttcgagggtctatctagtacaccgtattgtataattattatattaaattttattaaaaaaatttatagtacactccctttaatacactcctatttgttttagtatttgaaa

SEQ ID NO: 190912 - DNA, 1022 bp, Cannabis indica
tgattccttctcctcttctaatctggagcttggggaggatctcttttctctggtttccccgtgtataactcgggaggagaatgcctcccttggatctataccgacagctgaggagatcaaggttgtggtgtgagagataccagcgctgaagtcgcctggccccgatgggttccctgccaagttttacaaaactcgttagactacggtgggccatcaaaccatagattttgttctggagttcttcgcgactggtaagtttaccaaagcagtcagtataacttttatcgtgctgattcctaagaagcaggatgcttgtaaatttgatgattacagacctataagtatgtgcaatgtctgctgtaagattatagctaagatcctggcgaatagactgcgaggtgtgatggacaaaatcatatcgcctaacaattctacttttgtcaaaaatcgttggattgcggagaactctattattgctcatgagattgttcaggatatgggcagaaagtatggaaaagatgccttcgtaggtatcaagtgcgacatgtccaaggcctacgacaagatggaatgggtgtttatggagtgtgttcttaaggccttcgggtttgataactggttttgtgggttaatcatggaatgcatcacttcggttagcttccaggttctagtgaatggaggacttaccaaatgttccaaccggggagggggcttagacaaggtgaccctctgtcgccatatttgttcattatatgctcagaaattctctctcggttaattctcgataaggagcggcaaggtttgataacgggatatcaagtgtcctctaatggcccatctgtcactcaccttatgtatgctgatgatacgatggtgtttactaaggcggatatcgaggaagttaaccatctccaagaagcggtaaatgtttactgtagttggtcgggacagaaaatcaatgtgaactagtcaaagattctcttgtccaaaaactgtgagctcaatgtgggactagctgttgg

SEQ ID NO: 190913 - DNA, 3237 bp, Cannabis indica
gaaacagagaagtacttttgagaaggtacatacagccttacagtggagtggagcccagagcatcaatcactgtcctgattagtccatatggatggatttagatgaggcccattatcatgatgatcatcatgtgacgaatcccatgtgaaatgtgggtctttttttttttcatgaaaaatttatctgatacccttttggttgataagactagaccctaccagaaactagtgtcaaagtgtcaacgccgttagatttttcgaaatttaagtagttagctagtcattgtcaacacgctctacggtttttgtttgatttttcttattacttactacacagcagagagtatagagattgtgaaaatatatttaaacgatttggcctctatcaatgtctaaatctgactcagtgagtacttttcttttctttcttttccatgacttcaaaaccaaaatgttagtaatagtaataggagtactcacttaactatttcaccctatccatggtcttggataaataaaccattttttatcatagaactacacaattcacaaaaccaaacaaacagtttgtgaacaatggtggggtgggcccaccacttgccctactcattgttagtgagccccaccacacaaacatctatgatttcgaagtaaacataatgtgcattgaagaaaaccactaaaacagggaagtgggtgaaaatgcaaatttaataagaacaaaaatcagtgcacattatgcataggaattaaaaattatacatataaaatatcaagacttttgggaaagaaataggcagtagagatgggcttccttctctctcttttttttcatatcttattttttttttctgcttttgcaaacatatgaacacatataaacatctttcataaaacagagaaaaagcccagagcactgtctctctttgccccccaccacttacatctcattcttccctaaaaagctttaatatattattatactaatatataaagtacttcccctctatagataattaaactcctaattatacttaggattaaagaaaagagagatttaaggagaaaatgtaaataaaaaaactaagaaaagaaaatgagaagaaaaaacccatttccatgtataatattatggcatcatcagacttttttttttcttttacccttcctcttttttctagtacttgtaactatgactgaagaagtagagaacccagagaccaggaacaccatatcacaaaccaatcaaattaacccacgtcagcagcagatcaaagtgcttttggtcaaactttgttcttcctctttataataataaaaaaaaaccttaattactttcacatgacattgcaacttgaagtgttctcatcactgaagaagtgagcataattgggatcttgatattgtggcggcggtgggtaagggtacggtgccggcatgtaattaaccgccggcggtggcctggcgtacatcatgggctgaaacctgtcgtttccggccatggcccgttgctgattcataacagccgctaagtactgctgctgttggtgctgttgctgttgttgttgttggtggtggtaaggattaccgggcatgacctctggcccagctccttggaaatacccagctccggcaccgttcatggctgccgccggtagtccttgaacggcagggattggacccatttggccgactgggatgttgcccatttgacccatttggctcatggccatgttcatattcatgttaccaccaccaccaccaccaccaccacctccggccatggcttggggatgaggaacagggcctccaggacccatgtgttgaaaccctttgttcatagcttgaacttgagccccatcaagaccaccaccaccctttttaccaccgtttaaattgttaccgccgccaccgccacctccgccgttaacgtttttgtttcctccacctccgcccccatttttgccatcttgaggcttacctccatttttacctccggcagcaggattttggccaccgccacccttcttgcctccatttttaccgtccatgggtccaccaccaccgccggggacattgatctgaacaggtatagggccacctccaccaccaccacctccttttttgccattcccacctgcatttccacccttctgagcattttggttcatcatttgctgggcatggggattatttccattcatcatactactcaacataccaggaggcataccgggaggcatcttcatgttcatgttcttggcaagaggatgaggtggcatatcatccatttcatcatcaaaatcttcatcctcgtaatcatcatcatcatagtcatagtcatcatcactgaattcgtcttcctctagcggctcactgaacttgacagccttctgatttgggttctgtcctttgttgttattattaggttgaggcattggcatgcctttcaattggggaagctttagatctaaccctttcatgttctgaagctgctgaaggtgttgctggagctgttgttgctgctggagctgctgttgaagcatttgctgctgctgcagctgttgctgttgatgttgctgctggggttgttgattaccattctgccctcccttttgaggctggttattgttgttatttccacccttttgaggcttgtttccacccttgccattatcaatttgcatgttcttgagctgattagccagttggttctggttctgattgttttggttatttggttttggggcaccccacagctcagcatgtttaccagattttgcaagctttttaatgagaacggcagggtcaacattgcctgagaccgtcacctttccctggtctgcgtctatgtcggtggtaaaaacaccttaaaaaaaaagaaagaaagaaagatgttttaaaaaccatacaaaacaacaaaagaaaaaaaaaagtacaataatataaatgttaaatggaagtgagtgtaccatcaattttctgtaagattttcttgaccttatgcttacaaccatcacagtgtatattcactttgaggacacatttctgcgtgaataagtaatccaaggtgcaaaaaacaagagtgaagagatattattattcagaaagagaaacaaaaaaaaatatttagctaagctaagattaaaagtgcattgatatgtctgtcataggaaacttaaaaggaaaaaataataatgggaaattaatggcaacactttttcagttcaagatgagc

SEQ ID NO: 190914 - DNA, 867 bp, Cannabis indica
aaaaaaaaagtatttttggatgcattagagccttataaggaatccatgaagaaattttggaacttggacaattcccacatgacaaatccaatcaagaagtgaaaaatgtaaattatggtagaaaaaaacaaaacattattaagtaaatatatacaatgaattattattgtaatatttgtattttataggggatatataacttaaattatagtacaatgtaccttgcggaaaatgtcatgtatgcttaaaaattggaataaaatttgtcatatatataatacgtatgaagtacatgcatataatcactggttaagaataattagttaagtcttaactatatatatatattctaaaaaggaataattatgaataagaaaaacttaggtagtcttttaattaatgagatattcctttctatttccttctactttaggaggttatccgataagatgttttcacatggacatgataccttttttcagtcatttccatccttatgattctttcttatcttattctctttaatatttcctttattacccaaatccataagaaggagaatttttatttatgttctattgtttccctccttaagatgcaatcaaagatcttaagataatgattatttgttcctgttgtcccaatgctataaggaagtaataattggaaattagttctacagcagactatatattaatatgtagttataaattaaatcatttgagaagggaaatttaaggtattatggatcctaattatatttattcccttatgaaaatataaggaaacaataataataaaagaaaaaactcacctacatacaataaatgccccatcaccactacccaaacaatttttttttttttt

SEQ ID NO: 190915 - DNA, 4411 bp, Cannabis indica
ctagttctcaagaaacagaatctgaagattgtttttcaaggttaaggtggagaagaagttgcttgctagaacctaatagaaggaaacttacatagtgagttttagattctcagacatactgcatttctcccaaactatataaaccacaattcggtacagcttattggatctttactatagtcacaaatatatttttagtttttttttttttttggaagttaagcataatgcacaagtcacagcccttagtagaataaataaaaacaaggaaaaaatggcaatcaaaattcacaagaagaaacatttgattgcatcataaagatgtataagcaagaagctaatctgggactgaaattcagggcatgcaaaaaatggatctcacatgaacttttgtaaaagaaaatcattaattaatctaggagaaattctacttaccctttagtgttattcttatgaggtagaatctctacgtaagaatttgtgccgttttcttgttgtgaaaagtcagccttccctctttttgcaacctttaatatttgagcaaaaaggagagggtgtcaaaagcacaggaaaacaccataaacacattataatgatgtagcagcacattagtccatgaatgtatctgaatttgtaaataatccaaaagcatatcaaattaaaacttacagtcatttcattcacatgcttcatctttactttgacatctttcctggtcttgccttctccaaaaaatttatcctcctgcatatatcaagcaactgaaattttaaccaagaactaccattatcacattcctttcaccaagaacaaagaaaagaaaaagacctgtgccatcatggtggatatccctctttcctccatgtcaggtgcctcacaatagtttcgtgctgaaactgcgggcttaaagtattcactcctctgcacaatctcagggcttacatcatcatcatgtacacgagaaaatgcttgtttgcttggaaccttcccactatggtgactaagacggttgtgaaaggagtcagatgacgttccttcaacaccatgtttagagctctttttacgatgatgattgttattgtaactagaatcatcataattatccaaggaggaatttcggccagagagagaaccagcatggtcaatataagttgatttttgtctcattagattgctaggttttgcctcctgatggccaataccatgtatgatgccaggaccttcttgctgcatatatgggtccttggaactcagcttggaattatttatttcgtatctctacatgatcataaaattgagaaatattacgcacatgaaagcaaaaggtgaaagagtacattgtagttacaataaaaataaacaaatttgataagtttacaatattttcctaaacgtaaatacaaaggcatgcaaactatattattttcattccattttctatattcatttaacaacaatttaaatgtgaaagttacaatgctgatgttctgctaagaaaagcttttaaacgccataatgttcttgataaaacagaaataattaacatcacatcaacacacaatttgaaaccatgaaaagtctaaataaagcaggcatgcactttcatacagatgtattaagcatggaaatctatcgaaagactcgagcatgggaatcaaagtaatagagcagatccgagcatggtgtcaggattagtctcactcaatatgtcaaaaggaaattgaatctcagaatatccacttacactgccaggagagggctgctttttcaatccagaaatattcaaggggtgagaaagaactggatttccaacatagtagggttctgcaacagaattaaaagatattaactacaacctagatctcaaatagtaatttgaaaagaaaatcgacactgagcaaagacaaatgtacatgcaatctaaattgagcaaagtagcaaagacaaataagacagctaatttcttacaaagctcagaacttcagtctatagctggaacagagagttataagttgacactcttatagcaatttgatagcttgtataaatatatccaatatcatatgttcgttatatttttatatttttctttcttgcactcttcactaaaacaaatattctcaaaatcatgtactttcaacttacaagatggttaatgtctaaatcaactaataacaaacaaaagaattaataacaataaagggaaaacggaaaaaagagaaaaagacattgccaaaggagaattgaaatttgcagcataaagtatcaatgaatcaacatgtaccatctctattagtctccctttcttaattcaccatccactgaagttctctaatttattttactttgctaaacacaattttgctgggaaattgtttctttcaaagggcggggggtagactccctgtaccaactatcacacacatttaacaaagaatcaattctctatctaaaaggttgccctctctcaacatacttttcccttgcgtgcaatccattaccagccgttgtactagatgtgacttatgagtgatgtaaaacggtaactaaaataacaaggaaaaaacagttacagaaagaaatcctcatacaaaaaacaagataatcaattccttatcagattttccaacctatactaagatggcagaaatccctaattgagtagaattccttcaaagaaccccacattttaatttctttcaataactatagtacaccttatattaacaacttaaatatcatataaaaatataaataagaagatgaagactacagctctaagcaatgcataatcgggattgacttaagcagaacaaccacaggaaactctttttcaatggaaaagtagaatagaaaataaatgtaccacttaccatggacaggatctctgattggtgattcaaatgcaccaggaggaagtgcttcaaattctacacccagtggtggaccatcttcttgatattgcttccccaattgcctcttaacagctgtaattgcagcattttctatttcattcttaactttcaaataccctgagggcttataacccatggttcttgtgcccttggaacttaagggtgcaattggtccatcctgtgtgaggtacctaaaagtttccacactgtgaggatcctcaattggagttaataacctatcctgtaaggatgaggaactttctgaagatgtatcatccatgcctctttcagtgtaaagactctttttatcactggtgagatctgctgctggaaaatcattcccatagagtctttgactttcaacttctcttgggtcaacatatctataatctacatgtttagtgctaccacatgaatcttgcccaagtccactaccaaggtcctgaatgaccccacttaaacgatcttgccgcccattagcacagggttcatcttttgatactcttttgtcttttaaccttctgtggcagaaccacccagaaatctgcttttctgtcaatcccaactgtactgcaagttctgatttcatttcctctgtaggatatttgtgttctggtggagaaaccattatgtttccatttcaacacatcaatgaaacaatataaccaagtcgttaagatataaatatatagatatataaatgtatacaagtaccgaagacttccattttttttaactagattcctaatcatacaatatttggagaaaatgacactatagatgctatgtaggtacccaagacagacttagactaagatcttgtgggaacaagccacatgcctcaccatttaaactacccctctggggttaaacttctatattttaagaaaacaatgacattcttaccgttataaaatttctccaaagccataacttgtgaaggtgtcttgagtcgccttttcttattatcttgggatactttcttctcctctgagtgtgcttcacttgattctagacatagtttagtagcaagaatgtattaacattaaaatttgaatgtataactatgttactcaaacaggtactgagcatggcccaaaaaaatggtactcatgtcacagcattgcaccagtaataccatttttaggacaaataaagcttcaaaataaaagaagcacaaaatagagaatgagcccagaaactaatctaccaaacttaaagacccataattggagatcaaatcgcatcttaccatataaaaacaagtatcactttaacataagcaagtgatgaaatatttctatgtatccaaacaaacatgatgatctataaagtcacatccattaaaatcgagtcaacagattgctatgaaatacgatcacatattcatgtatatgaaccttacactatataaattaatttcccctacacccatcttatgattccaattcatctaaaatactttattctatcttaacaagtttatttaaaaaaaa

SEQ ID NO: 190916 - DNA, 2048 bp, Cannabis indica
ttttttcttttcttaattgggtttctgttatgaggcattcttgtaatattgtactgctgtttatctctgacttaaagttcatgttttgacttagagggtcccctcttttcttagtcgtaagtagctgaatattccacaagataagtgaatgctattaagcatctcattgagattttcttcagagatggtcatagtcatagagcttttttcttttgtagtttaggtatgctcttttgcttctgcaaggtagtcttgtatgtttcgctgaagactgaaacatattgctctaccttttttttcttttttgaatgattatttctctaagaaaattgcttacagcttgttgaactacattaaaccttttgtttattattattattattattattattattattattattattaattggcattgatattcaatgaatgtttgataaattacagaattcatataaattgcaattaatacaacaaatccataagctggacgaaatacatgtacataaaaaatgactcgtacataaatatacactttcctcagttttctgtcttttactgtatatgtgttcagttgcattactttgtctagaaaggaactatcttccttctcgtctgtcctttctccaatcccatggcttctcagggtttgaggaagcccacaaacccactctctttgcacgagcttcattttcccactgtcatcatagattcagaatcataattatcattatccattaatattatagactttagaaaagagtttaagaacatgggaagttaaaaaatgagaaacattgatgatttattaattattattactcacttttgcaagttcttggcgttggtcgtaggcagagtaatgccaagcaaaccctttcttgagcaacgtttcctggttaatatgtacgttgagtcaaatgttaaacggtcatatttctatctatacagagtgtaaagtattgaacagtcattgttttaatacctgtacaaatactccattggaataaatatcaccaacacaacggccataacgatcttgatcatagacaaggactcttagacactttccttggacaagcttagctagctcttccttggcttctttaccatatggcattttactttctggtgcatctattcccctattttgttacgcaacgtatttcattcaaatccaattacttaatataaatattaggccaaatttatgcaaaaagaagataaaaaattacctcagtcgaattctatactttttggctagaacttcctcattattctgaagactgatcaccctgcaattgatgaaaccatgaaaaaactcaatcattttgtaaaagcctagtacaattaacaaatctactgatctgttaacaaaattctactttttcagatctcttattacctgtatccagcatcaactatttgcttgtgaagtgcatctgccttcgtatagttcttaacggcacgcgctttggatctttcatcagcagccttttgtacgtctcttggaagacatgatgattctctggggtctgctgtgctaacataaaccgtcactgtatctccatccgcaattgacttcgcatcgatctggttttcatcaaaacattccaaatcatcaacaaaattagagcacaaatttctaatctcgttcccaattagttttgagatagaaataatttctaatctcattcccaatttctaatttaacatacattaaccgataaccttttcatactctgaatatccccaaattttaaacatagagcacaatttagtagtggtaatattttgagagaataccatttgaaagtgataataattgggtgagcaaaaattctatttatcttattgtctaaaattccgtttcactgcttataaattaagcttttattattattatttttctttttatttttttttctactaaaagagaattgtgtccttccggtagtgattgcaattcgaactttactccagcaggtgttgaagttgggatcccagcaggaacttcaacaagagtatgaggaagaggcaaaccatag

SEQ ID NO: 190917 - DNA, 1967 bp, Cannabis indica
ggttttttttttcgctttttcttttttctttgtttctttagttgagttgttgggctgctatatatctttattatctattattattatttattattattattattattattatctacacatactttttatgtatgtaatgatctcatctttgagctacatttagactggtagagtccattttaattacttgtgctgaaatgcctagttcttgtaaatataaccagttatcatattcaagtgctctgttatcctctctgtgctgggatttttttttttttaaaggaaattgctgaagagaatattctcatggtagtgaatttcttcagctatagattttcatgagattctgatcaatatactatgttattcgttatatttcgacactttagtatttattctctacaagggataaagtgaattttgaagaataatgtccaaggaatgaaaatactaggatctgaatgtgataataaagttttaccccataggagttttatttacactctaaaataatgtgacaatttatttttaaaaaaataaaactaattttttaaattatcttaaggttgtgcctacatgtgtagttgtgaatgtgaatatgtttcttggattaaaccaaaaccaaaataaataaaggtaaggtaaataaccaagacaggcttttacttgtaacgaatctaaagttggttaaaaatttggccaactttgaaagtaagaaacaagaattactttctctctctacgtaatcaaaatatgaatataacattgttgtttctgaaagaattgtcagtatttttttataaatggtgttttacgattagttagtaatatttttttaaacttatataaaatttaatatttaattatactaatatattagatactaataatatctttaacaattttctttttgaaataggcaataaatgaacttaaattgttttgtttatttgaggttaatacaaaattgacagtctatgaagaaagctagcttataaaagttcctaatatttaatatttgttttaaaagcttcttacgcctagagagagagaaagtcgtgctgtgattattatcatttgctgtgattggttggttacctaataaatagccttccttttatttttcttcatttaatatgttattttattcggcaattgtatgacaatttgaacacttggtgacccctcattaataacacaaacttttatacgtataaacaaatttatatttaggttgctttatatcattagaaaatttattttaatcaattcttattagtgggcattttgtgagagagattgtttggtaaaatagttcgtaaaaataactaaataaattatttttttttccataatcttatttgatttgatgtgcttcccacaaaatcttgtaagagtgatttgtagacaaaaaaaaaataaaaaataaaaaatataaaataaaaaagtgaaagaagtggtttttattggaaattaattaataatgggtagcattatccaagtatgggaaggagaaaaggataagggagagagagaaaaaaatttaaaaaagaaaagaaaagaaaaggagaaatctacctgactgactgattgactgactgggttgtatttgtttggaagtgacgtgtcgtcgtcctattgtacaattttgggaaagcaatacgtgacagctgtacacgcggcaaagctaccataatacgacaaaactctaatctttctagttctattgtggcggctctcatcatactaaaaagacatgtgaatattatttatttcactttcacacatgtattttttttgcttttaattttttttttcccactttattattattattactacacacgtttttttttgtacatttacttatttattacactagcaaagtaaaaattatgtttggtatcccactaaattataattatattctaacaaaatatagttacagatataactttttattaaaa

SEQ ID NO: 190918 - DNA, 3330 bp, Cannabis indica
agtatttgctggatgtgctgtttttcttcaatggctggtttgtacctttattattttcattttccttttccaaaattagctattgtttcctctcttatgcatgataagaaaaattgaaaatattcatatgttataactaataataatgggtgaaatatggtgaaaattttatatttttctttattttgttaaactctctgaaagacagccataattagtgtttcctgaatccttggccatttttgggtaataaaaactctccactgtaattcttcaaaagtatggtagagtggcaaaaagtcactataatattactgacagcggacaaataagaacaaggaagatgatggagaaagagagaggaggggaaggaaaagaggtgagagagaaataggaagattatttagtatatttattaaacaccacacacttgtaagtttcaccgatatgtctatgcaaaactttgtaactagttagctgggcagcatacctaagaggcttcctagttcctactggattcaaacaaaaactgcatagatatagtgtaccatggtatttctcgtccaatttatgtgttgtgttatttttttttgccatatatatttacattacattctttatgatgttcattatgttatttgaacttatcatttcttatcgatcttaatacattcgctcccttttgtttcttcattcatgcaaagctagtcgtaaagaatgtgcttcattcatggctggtttgcccgtgcccttcagatacgagtatattatggcagagactattttctctcaggtatagatttcatgaggcctcaattccttatataaggttaaatgtgataagaacataaacttgtattattaagaaaaatatacaccgcccaagagggatagctcaaacattcaggcctatggttttgatctcagaaggtcttgaggttcgaggcagagagccgtagtttaaaacctgggtatgtaaagcgagtatgcaggatttttgggtaataaaaataaaatccaccctaaaatcacaaccataaataatactccaatacataaatagcttaatagtcatgcattgtaaatcaatttaaacaaagagtaatggtagacacactctcaatttacacacgtttcttttttgcactctatggtgtcattatttataaccacaacaattaaaatgtgattgcttggttaaaaataatggtacatcatagtgtgtactacctgtgacaatttaaatggtcccactatgctaggaattttagggacctttggtgttgtctttttttcggttactagagcaagttcttgccaattttgtgactagtcactggctactctcacacacacacacacacacactcacccaaccacttgaggtgctcaagtggcatgttttgaaaccttgtaatcagagaaagaaaacttgattctcacactgagtttaaggaggttatagattcctgcttgtgtttctgtttttgtgtgtgctcgtacataattttgggtactgtacctcgttgtagccttaaattttttcttttctttacaatatcttgttcttgctttaggatggtattattgttttagtattatgggcatttgaagttcaattatgtgtagagaagatttgaaagagcagcttagagttgctcaacagatttttctgattttggtgaggcaagttttatagatgtttcattgttggaatagttctatcataaattatagtacagggtaaacgtgtagttgcattgtactctgggttggctctatgtgtgtgtcaatataatactcatagtgattcacaaaataagggtgtcctagagagatatataattatatattttctagttggacccaagaaaaattaaagataagtttttgctttgaaccactattgaagtatgttgaactgaggatgctggaatttcacctaacttatactacagtaaagtctagttttgtccagtaaagttttactatgaaagattccaattgttctttagaatagctgtagtgcttgacttattttggctgttggatttgttaggtttttttttttctttccgttcacaatgatatatttacatctttctttcagttgcttatgctaccagaacctccattcaagccaacatactacacactggttatcattgacctttgtaaggtaacatcaaaaaatatttgtagagaatgtgtagatatctgtttatgttcctctaggagtaatatacagctttaattacacgtccaatcccgttgtaagtttaaggattctgatcagatggttatactttcaggctctccctggggcctttcctgcagtaatagctggtgctgttcgtgctctttttgaaaaaatagctgatttagatatggaatgtcggacccgactaattctctggttttcccaccacttgtaagtaccagtagcatatagttaccttttcatgctcataactttaagtggagttgtttggatagaaaattcttttaggctaagagacgatataaagtttacaagtataaaggataaatgaatattcagagtgcactttacatattctcaagaaaaagtttatgcataactttagtcagaaatagggtaattttctgatattttattcctctacactaaacatgttttttatacatacaaaagttacccaaacgcaatgaagagaaccactggttttaatgcagaaaaaataatactattaactactttccctgaataagatagcagtaattattctagctatttttctgctttacaataaacattcttaaacaggaaacttactaaactaagttagtttgatttctccaacaagtttcagtgtaagtatgaaatgtgtttcaggagaactaaaaagtcagttttttattttttattgcagagtatcagaattttgtatttttattttaggcattttatcatttcatatgtactcattgtgttcaatgttttttttttttttattttttaaagttggaatagctggctattattttgaaatgtctctggtgggcagatgcgtgtcaattgttttcttgcttgagagaggtaaattatttttacttttcttgcacacagtagtcatctatttaatttttgattattttcatataattactggataatatgaggtgtcaattgtacaaaaattttacagaagtaaatattctaatcttgctatctgcttggtcgatttttctggtaaagaaagttggtatgttcggttaactgcatctataatggacttcctgaccatgcagatcaaactttcagttcatttggcacgtgggaagagtggg

SEQ ID NO: 190919 - DNA, 826 bp, Cannabis indica
tgttgtaaaaaaagccaatgaaaccactcttgtcagcagtgccctgcgccaaatgccatctgtattcatcaacaacatcctctatacgatcagcttgttctctgagctgtttcaaccagactttcacagcattactggttagttccctttcatctgtgtctttgaaaagagattgaatgatctctagttctttctttaagctttctacttctttatggacactctttaaggacttaacttcgtctttaagtagctgaatcaagctctcgataactggagtcaagaacgtctcagccattttcttctttgatttataacataactcccctttgaaagagcagcagaaaaataattcctttaattattaacgaattatttcagcacaaaattatgaaaattaaataaatgaaagaactatttgaagaaaaagaaaatagttacctgtagaataagcagagtgaatagtcctttatcagtgaatattgaagaaataactcaaacttggcaaagaaaagaaaaataagatagtaaagaagattatggatatccagaaggagaaaaggaaatgaaggcttggatttttctcttttttcttttctaaagttgatcccacagtcaacgttttttaagagttggtgggcaaagaaacaactagctgagtgtgtaacagctagatgacataaacaactagctagctataataattgtagtgtacaattttcgttattgtagggtaaacatttgaataatatggagaattgctaacctatatctatgtcctctagtctggtctcattttgtcgaactcatcaatacatacaacaac

SEQ ID NO: 190920 - DNA, 2688 bp, Cannabis indica
caattaaattcttaattctatttattgacaataaaaataagaaagatgtttaatttctctactaaaaaaaagaaaataaataattaaggtgaaatcaacaatgattaaagtttagggtgattcttttcaattacatctacttgatatggttttatataatttaattctcaaattttaatttttatgtgatagctgttatgctatttttagtctaagtttcaggttgatatttatagttgtttttagtcgttgataatacttttaggatggaattatgattgttttctgtgtttttaggttcccgtggttgttacaagtcaagtgtgtcaagatttaaaaaagaatcgaggcgagacaaatgagaaatacaaattcaggatgtaattgcattctcgctgcagcgagatcaagacagaatggggctatatcaaggttgctcaaaggccgcgacgaggaagcgtagggccgcagccaagacttctcgatgcgacgaccacgacttatggttgcgacaagacgattggcagaaaccctattttttgaatttgtgaagtcgtcacggcgaggccattagtggttgcagcgacgaagtccgtacggactcgaggggtaatttttttatttttgatctatattttgagtttaaattggttctattaaaggagattttgaattttaaaagctgctgacttagaaatagaaccctataagcaaaaaggaatacagctagagcgagcgtggcaacctagatccattccaccaccaatttattttttctccttttatttcttctatgttaatttccgtttttagtttaattgtgaatttgaacatggagatattgaacttatttcacaatttaacaatatgatgaatgttgaatggtgtctttccaattttgttaatgtgattgttagttttttgttttgaattattgtgatttgtacttatttattttgatacatgttttagactgaccatcttaattatgatttatgattctaatataaactttgagaagtgaatattagaaaagctctaataaaataaacataggttttgatgtaaaatgagagtatttacatagcatgtgtgatatttagattattaggttttgtgtgaactatgccttacagaatttctcaaatttgatcataaggcatgattgtctattttttatgatgtgcttttaggcttgctataggtgtttggtgagactgacttattttttgcttataatttaatagctcatttatgtaaccgtcaattgatgtatggatcattgtgaaatcagaaaattatgagtttaaattcttaagcatgtctttttagagtaatgtgctggatgatcttctgcatgccacattaaatgcgcatgcaatggactttagttttgtgcaatgtgctatgctctacttgtccttctacaccttcttcgagtcgaatttacttacggagaagaagggacaagaacctcttatcctccaagtagattctcgagatgaccagtccaaagaaattcttgcgaaacagtaacctccgaaagtgattagagtggcaagtttggtagtatagatcctattgtcatttaacttgctgttgaactgctgagtgtgagtattttgagataaattctaagtaacaatgtgcatgatattcacaatttattttattgttcgagatagatgcaaaacctttttaccctttgaatgacattatttagtcaaattgctttctcctccaaaaaaaaagttttttttttttttggtagaaaagttggtaatttaatggtgtaataatgtaatgtgtgtagagccgaaagaagtccaaactcgaagttggacctggggaagtgggacccggttttctctccgccactgagattcgccgatccccgaaaccccaacccaatccagtaccatcaccatggacctcctctgctccgcctcccatttctcaaccctccgattcaccaatatccattctcccctctcacccatacgcagacatcacttcactgtcaggttcctctttagtcttctcccatttgtacattcttgcattctttttctgtttctcattctctctcaatttcaggtccactcttccttttccggcccagaacgccaagtaccatcgagagctcgaagcggcagtgggggtggtcgagagagcttgtcgtctttgtctcgacgtattctttcactctcatatctttatttgtttggttatcgacaaagtgttttacttttattcaaaatttcccatgcattatttgatttaatagtgaatatagctttgttctttcagttatggttgtttttattactctcacagtgtcaagggggatgatgcttgtaaatttgtgcattatcaatattaggtgaaatcgtccttgttttcaagtgatgggcgtgtagttgagaagaatgatcaaactccggtcacaattgcggattttggagtgcaggctctggtcagtttgggtaattaatcaaattcttatggcttgttctgtttgttccattcagtctattaataccttgtgaatgcagattttgctaattctaattcgtttataaatgttagtactttttatggtttttgccaagtattaactttatcatgctctgtaaattattactagagatattaacgaattccaacatttcatgtcattcatgatat

SEQ ID NO: 190921 - DNA, 3399 bp, Cannabis indica
tttgaggttaaattgtttccattcaatgtgagttgctactatttttttaatttcacatagatatatatgaggtcaaatgcaagttgtttccatttcgagcttaaattatttctatttcgagcttatattgtttcattttcaatttgtgttgtttccatttttaatgtgagttgtttctattttttatgacagttttttcatttcaaactatagttttcatatcgaggttaaattgtttgtatttctaatgctatatgtttccatttcacacacatatatacttgtttctatttcgaggtcatgttgttttttttttaggttaaattatttctattttcaacgtgagttgtttttatttttttgagattatattgttttcattttcaacgtgagttgtttttattttgtatgatatttgtttacatttcacatagatgtatatgaggtcaaatgcaagttgtttctatttctagcatttttaatttacattttcaatgtgagttgtttctattttcaatgtttgttgtttctattttcaatgtaagttgtttccattttcaatgggctcttttaattggagaaaagcctcgaggacctagactagaacaagctgacttgttagacataaattgacagatctttgcagagcaggtttgcatcatgatgttaactattagtccactttcatacacaataagttttcacttatgtatttattcaatcttcaacatcatagggaaaagctctcaatgtcattgcatcacgtaatgtcaaagttatagcggttgacaacccctgtaataccaagtaaggaattcgtttgtgaggaggtaatcaacaaagtaaagaaacttaacttttaagttcattgtagcgcttgtgactgatattactgttttttgcttttcatgtagtactctaatttgtttgaaaaacgctccaaacatacctgcaaaggatgaaccaaagtggtaaagtgttgacctctgcaacacgcatcaactgcaacaaaataataagcaagtaaaaaaattaatctcttttaaagaatgatttgattcatataataagataaaattaaagataaaattaaagataaaattaatatcaggtgacccattccaccagcagctatcttctcaacttcacaatactaataactttaaaaagtttgatgatgattcaaactccactaagagaattgtaacacaagctaaaatcaaagctttatgaacaaaaagagattgctttacatgttgaatagacctgaacaatcttctacctcatcattcagtagaattgcaaggttaatagacaattcgatcccatatgcataaaacgagcaagtcaatcctctctattgtgcagaaacaagataaatgtatagtttcttttctgaaagctttatatacaacacagctcacctagttgttttactacacaatatttaattttaaggttctacttctttattttttttcacatgttaattttagtcaagttttttcctttttgaaggctaatgtcttaatgtaatctaatgatccaccactattgtgatcttggtattcttcaaacacaacttaatcaatatggatacattcccttcatgaataggcatctttcagtcttatccataactatatttcaagtgcaaacattatcaacgacccaaaaacacaccactcaccatttattcttgaccacaagaaagtgctcaaaaggtaggaagagacctaaaaacaataaaaaggtaataaaaaaggtgtaaagtttagagcagaaggaagagtgctagacttggtgaggaagcattttgccccactgaaaatgctaacactttttccatcttaaatgaggacaataggcactagttcctagtaagaaaggctgcagtgcgttaagaatattaacaattaagaacacaaaccaaaaggatagatcctgacacagtaaaaaatgtgcaactaaaaaaatgttcccttcaatttgtgcctgtggataatttaacaattaggtccttcagatccatctttgcacagcaggtttccatcatgatgttaacaattaaggcacaattttctattgcatggtctcttactttgattctacttctactctaaaatattggcttctgcgtgtgtgtgtgtcaaattctacttcaatttgtcttcaacagagcataaatagcgacttgggaagctgcttgccccaagcccaaataatttcacatgtttcattcaccattataactttcgaaagaacctcaaagaaaaagaagagagagagagaggaaaagaataccttctgccatggcaagaagtgagggagcttaacactcgataattaattttactgtcgttactcctaaccagagggaactctgattcttgtcacaatcgtgattaaataatagaagattccttcatcttctcaaataagtgttatggtttgcaatgtctgtagtggaagattgtatctcctagactcgtggtttggatactgactcggcttctggggcgattctcttgcaagtgatcttacagaagcacacgaagagaaagaagaggaaagaaagcagcacttgtggcggtggcggctaccaggggcggaagtagaggaataggagtataattgcaaaagaagtgtatttgtgaattaaatttcacatgaacgtataaatgaatagaaagtcagttcaaaaagtataaataaaaaaaacataaacaaaatatttaatattacattaattttgtaacattctaaatttggtatcttaataataataataataataaagatatgcttattcgctaattttttccttattagattttgtgttttctgtttttaatgctccttattattgcaagctataaagatgatgaaactctttaattttttttttattttagattatttattttgtggttgatttagtttgaagtattttttttaaaaaaatattaatcttttacatattttaacaaataattatacgtgtaatttatataacaaatttacgataataacaataataattcaattaaataatgtgatttaatattttaacatattaagattataatttttagtattttttttatagtgcattaatatattaattaactaacaatttttttaatatattaaatataaattttatttttacaacatacataaaaagtttgtaaacaaccgcgtaaagcgcggtatcgttacctagtattaaataagaagaaaatataacaagtattatttggtgtttggtaaaaaggttttactttaagctaaaaggtcaagggatcaatccctaatctctacttttttatttttttttaaaaaaaatatttattgtgtagctatggaggattgaacgttaaagctcttaagagtttt

SEQ ID NO: 190922 - DNA, 1509 bp, Cannabis indica
ttagatcggatgaacaaccctaaacacgattccatttccagcattgttgaataacacggcaaatgaccattgataataataagtttaaaaaaaattaagagtttatttttttagatttaattacaaatgaataaatgtagtatttatccaacacaaatcactcacacaaaaagtaagagtattttgatgtgggcaatgccaacactcgagagagatcgaatgttttgcaggtggatggtggttgatgaatggtaggttcaatgaagccttcacttagttgttgattttcattttttttttttttttttttatttttgtgttattttgtttgattgtttagattttaatttgtatgttatgcctatcttagacggtacttggatggatcacctttagatttggatttaaacattgtttaggtataggtggatattcattcttaattagtatgtggattgttgtttcattttcaacagtagtgttagtttccccctttatttttcgaacgattattattgttctttagccatttgtaggattgataatttttttaagtttttgaacaatattataaacggctctaaattattcatttaaaatttcttttaagtgattacatcatttcctttttctcaatttcacatcccctttttcctcacgactttctattttctcaatcattttcccaatattttctatttctaaatagatttattgattatacatttggaagtggaaaaataaactaatcaagttcttattgtcttcattaatcatatgtatgtgtgttaattatatttcatctataatttaactcctcattcctttcactggtttggtttgagcattatttcacttgctgaaaataaaactatgcaatcctcaataacaataaaaaaaaagaatagagttggtcattattactacgactgctatataccacgaataattactgtttagtcatagtaacaataagaaagataggagaaaaaatccatgtccttagagagaaataataaacataaacatgggctaataattagttaattatttaggtgcagcaggagacatatcatcaagtactccatcatcatcatcattaacgtactttttccaaaaccaatggttctgaaacagaagatatatctcttcaattgggacttgctttgtttctggcaagaggaaatagatgaagctactcatgatgaatatcaacccagcaaagaggagaaatatcccatattttagatggcaaagagaaacaaggaaacattgtgcaataagagctgtgaagagtaagttcacacacaccaccacactttgtccagctgatcttgtttccaatgggaaaagctcacttggcacaagccaccctaaaggcccccatgaccttccataacacaaaacgaatataaatatcagaatcactaggaaaatcccaatccccttgggaagaacctctccttgtccgaatttcagagccagagttatagccaaagcaatctgaaa

SEQ ID NO: 190923 - DNA, 2603 bp, Cannabis indica
atcatttttcacaacaacctaacttcaaacattgataactcccttaattcccaaccaaactctcctaaacttgatagaacacctaatcataacataaccaacatatttcatcaatgaacagtggctaaatctccatggaatgtaatttactatggttgaaccaagtttgagttcttgaaactcagatttatccaacacttgctgcaatcattcaaatccattcaaactaatctcaaacagtcataattaaccctaggaatcaattcctaaacttcctataatcatacaacaactacacactaaaaacaaccaccaaacctagcttgaaatctaagaaaactaaagaactaggttagggttttaccttggattcttggaggatgaaggagctagcttcaacttgatttttcctagctgaaatgagctacaacaatggtgaacacttggctttcctttgtgcacaagaagggtcgagagagtgaaagagaatgggtgaaggagatgtaaaatttgacttttctaaaggttttgacgaacctttccctcacctaggggttttgattcaaaagccacctcactctaaatgcatgagtcacgagacaccaaggaaagtccaaaatgactaagttttctaaaccaaaagaccaaaatcccttacttgttaactaagtaagcttgtaatcttaggggtaaagtggtctaattccattaccctgctaaggctcgatattttaaaaagttcaataatattgtcccatcaaatccttaatactaaaccgtatccatgtaactctaatagtcgtctgatatatttctactattatcgagcattaaatatgaaaatatgaaattttacacatagcatgcatatcacacctagaatttaataaaatctttggaattgaaaaataatgaaccaaatgcctttttcaagagaatatgactcatataacataaaataaaaatttaatcacatattacaattaatcagtgctaagtgccttactaatctcatgtctaagtatgtcgatcattacaaatgtcttctctaagattgatctttgatttggttacaactagttgaggatttgagaagaggatatttccaagtctgcttttcatacttaatatgggcactatgagtttctggtgatgtcctatgggttgactaatgctctagtgacatttatggacctgataaattgggtgtttaagattttcttggcaactttgtgaatgttttaattgatgacattttgatttactctgaatcaggcgaagcacatgagacacatcttcgaatggtgctacaacgtcttcgagagcgtaaactttatgctacctttaagaagtgtgagttcttgctgacccaagtgagcttcttgggacatgcagtgagtaaggatgtaatcctggtagcttcggtaaagattgaagcagtttgggattggccacgacctaagtcagctactaaggtcagaagtttcttagggttagttgggtactacaaaaggtttgtagaaaggtttgctaagatttcttcacccttgacatagttaacctaaaagaattataagtttgtctagataaatgtgaaagtagttttcaagagttgaagcaaagactgattacaaaagcaatgttgagtttgccaaccagcgatgagaagtttgtcatttattgtgacgttttcaaaacaagggttaggctatatttcttttattgtgaacaggttgagtcaattcctttttgccccacaacaacctcatttacatgttgcccaatgcatcctccaataccttaagagcacacccagtcaaaggcttttcttccacagcagctcctcacctcaactcaaagcatatgtaaaagcccatcttgctgccaatcatgtccaacttaaggtcttttttcagatgtcaattgaggtacatgtcctgatacccaaagatctgtctagaatattgctttgtttgggaaatcattgattacttggaaatccaaaaaacagattattgtttcttgatcttcagctgaagcagaataccacccacgactaatactacttatgagctaatatggctgctggctcttcttaaagacttcaggatcaaccacactactccagccctcatgtattgtgaaacaaagcagctattcacatctctgagaactcgattttttatgaacatacgaaacatattgacattgattatcacataattcataaacatattcaaaatgcgcagctgaagattctccacataaaataatcttgctaaccttttaaccaagtctctctttttttctcaattcaaggatttacttttcaagatgagtgttacaaatttgtacactccatcttaaggggaggtattagaaatacttttattcattattttttttttgaaaacattattcatcatttcttttcttgcctttttctatgtttagttataaggatatagcttatcctatatttaggtgttaggggctttttattttcctttttgactttttcctcatgtatcatataaaaggattttcgttgattgtaaaaatcaattcaactcagaatagtacacaaaattcagaaaaaaaaa

SEQ ID NO: 190924 - DNA, 4165 bp, Cannabis indica
caaaaatttggttttgcaagaacatctacaactaaaacaaacacatgctttcaaaaaaaaacacatgatatatagggcttactttgggttcacgaactcctttattccacctttggtttttgtgagctcctcaatataaggaccaagttccaaaatcaactgcagaaataaaaggttataaatcaatttcaacttcccagcaaagattatgcttcacaagataataaatgaccaaaagctcgacaagagtgaattgtagaaagcaaaatatacctgttataatgagacattttatgtgtcatattaataatctagtgatttcttaaagaatctattggtaagaacattacttggtttatatttcccgggtaaggagaatagccagtctcgcagttcacatctccatcaggatgtccagtagctctaagtagaggatcaagttggttgtattccacatttatgaccattgtcctccctaggtaaggtgcaagatcgatgattattatacttcaaggtatacctctgactattacacgtgcagcatcatcaaatttaagcacttaaacctaaggtggcgtttggttggaggtaatgaaatgaaatggaatggaaaggaaacaaatttcattccattcctttgtttggttgcattttaaagtattggaatatcactctaatggaatgctctttccatcattttggtagaatgactattccattttgaaatggaaggaaagaccattccaatgtagcatgagaaaaaatttaatgatttttttatcaatattttttatgcattttaaattttatttcattctattcctattccaattcgcattcctatgttttcattcctcccaaccaaacgccttgttgtgttttattattattattattgttattattttcctttatgttcagtcttgactataaaggcatgctaacagttaaacaaccatttagtctagccaacaaaagcatattgtcaaataagagcgagggaaatgacgaggaaaaacaaaaataatgggccatacatactatcagaagcaatttccattatttttattgtcatacttgacaataaaaagcatgcccctaaattatgacagaagtaatttgcaggcaacagacagtcaacaatagagaaaattcttctgttgtgtttctcgtctacaaggaaaagagtcagaattatataccgtcaacatgagtaagccgggtaatcccgcctatggcttcttttgctttgcgaggaacagtgagggagttaacatgatattgtctggtagcactgacacctattgctgctggaattgcctaaatgacgacaaatataaagtatagttaacaattgtattagccaaccataaaactttaaacagattaagcttttataaattacaaccgaaaaatacaagtcatactgacattgaaaagaagcccatttgtatcttgaaaaaatagaacccatctcaaaccagcagcacgcctgtataaaataagacaattaatatcatggtgtgcaaattctccaatcgcaagtatttctgatcatataccaaaatttaggcaagtaataccgacgtaccaaacgttaagtaggccactagaaaacaaaagggaatgcacatcaccatgaccatggggtttagtctgccacagaagatagaggtttaagaaaattcacataaacaatgatgttattcttgttcgtgaggactgctatccctcattttgcactgccactagttagtgaatagtcacacacacaaaagcttgtatatatgggaaaaatgacttgcacaaacagtacctgaatcctgtacttgttatgtggatccacagcaagcctggcttcattatcatctaagcatgcaactttttcctgcagttaaaaaacactcaattataacatcccagactcatattacatcaattatgagctttcatcgattacaataaaacatcagtagctcaatcaatggatgtttatacctgcttcagaagcattacttgtgtaggctccatgccaaaataagaatttgattctaaaagttgcagagtgcgagaatgtgtgtcatctgatgtcattattacaaaaggaatcttttttttaccttctcctacagattacaaacatacattagtactcaaaatgaaatgaaaacctggtgtattaaaaataaattaacaataattaagtttaatgtggacttttctgagacagacagacaaggatagttttatttgaatataattacacatgtgaactgaactgttaaactgacagcactactgcaaagttgaaatggaaaatctaattctccacagtacaatcttgaagaagttattgactgaggttgcatggaaaaatatatatatatataactatatgttgttcttattcttcttcttctatttccccaatatttacgtaactagtccctgcctgcgcgagacttgttccgtctgaggggagaatatcaagttgatgtatcgatgttcttctattcctaatctaaccactatatatgtaaggtgtgaaacatgcttgacagaccttgtgtgaggccatagctagcttcttcgagagccaaaacagattcaatgtaatgttgtaaaaagcaagttcctgtcgaagtctctcttggaagagccacctgaaacatgtaaatgataaagttacctgatgtactggtaccaattatgcatttcataaagagatatatgtacatataaatatatttaaagatcatatatatagagtacctaaaagatttgaacaatagacatccaaatatagttgccaaagaaaactatactttggagtaaagaaatatatttaggggtgctaaaggagttgttacattattttttataaaatacatttcaaatgacaaaatcaagagcagaagacgaaatcaaagaaaatgtttccccttgagcatagaaacttttagatgtactatatgatgtgagatgaagaccagaaatagcccaagcaatgagatagagaaatgctaaaagcacctgtagtgtctagcacctttatgaagtgtaatatcgctattgatgcaattcaatatcaggtcccacttattttaatttaattaaaattatagaaaaccgctaactaattataagacgccatgccatagaggtgctaagaggtgatatgcaaatgatgcaaagaaagcaagcttagctatatttaaaacatgaaaaaaagtttgtcaaaaaaaaaacatgaaaaaaagaacgaataaactgagacttcttttgaaatgccaaaatatttatactttaaaattattgtcaataacttaatgtcacttataccttaattccattgtagcctaaacgttccccgagaccaccagcaacaagaacaaaggccgcattctgaacttccctaacacctgtttcctcaaatctaatgaagttatcatcaccaaatgttaagatatcaccttccggaacctgtaaacattattcaatagtcagccaactccaatatttattctcaacattgtactgaaaagctcaaaaagaagaacttgaactagcatcacttcttgacaaatgtagtagtctacaaataacttaatatctacttgcttataaataattctcagctaaatataaacttaggcaagagataattccatatgacaccagaatgtaaaatgagaaaagaatcacaattcaaaagtctattcaaatgtaatccagctagcaatatgttaaatatatgagtatatgaacttatgtggcagtattcacctgccagtgagggattaagtttaaagatgcaatgcgtgatttctggtaaatgacaaggctataatatttgacagacaattgtaacagcaaataacaaggtcaaattgtacatttgaagttcagaagtacaagtatgaaattcagaaaaccaaatacactcttggcgttaagttaggattgtcaacaaatcactaaggaattcaagtatgagatatcactcactgaaggtgtgaagccatcaaatgggttcttcccagcttttgaatctgctaatagttctctagctgttttaatatatgaatccaagccaccagggtagttttcattaagcagagtcacctgcaatgaaacgagaatcgtaagcaaccaaactcaaaaa

SEQ ID NO: 190925 - DNA, 2163 bp, Cannabis indica
aaagccaatatctaaactccttttcgaaatatcaattgtacgtatctttctattgaaaatgctgtaagttaccaactactttgaaactatttctattgttttgcttctcaatatacatagttctacgcaaatgcctgagaatagctcaagtttttatgtatctaaagcagataagtgtgtttgtttaatagcatatatttatctactttcttccatcttattttcttgcagagaagcatactcttagactgtgaaactcaaattgagagtttaatagcaaatgtttttgagaactataaatcattagatgaagattctcccacaggaataagggacttgcatggaccgatccaagaatctgcagcaccagctatagctcctgccgtacaagtgtacagcctccttcatgacatacttagtcacgaagcacagaacatgcttcgaaactattttcaggtaattatataataattgaacagactacaagtcaaacacatgcttattttagataaaatttgtggttatcgcaacgtagagcatatcgatcacttttagtgttgatgcaaaattagctgtaggatagaattacaaaccaaggaagttacatgcattcagaaaaaaaatgacttgtttactttgctttctttcctgatttttccattgcattcacattctcaaccaattataaaatacaaaaaataagaatgttagaaaaatgagttgaacgatgacaaataaggatacgagcataaagatatctgaaccataaatttctagatataaagacatgtcgagtaacattgttatgcttcattcaggcagcatatatagaaagactaaactaaatgatttttcttacagacagcagcaaaaaagaggtgtcgtactcacatggtagagaccgatgaatttatgtcaaccaactttgaaggttttgttatggattccattaccatctcaacagcatatctaaagatgaagactctctgtacgaatattggtaatgaaattcaggctgacatcaagatccataaccagcatgtacttcccaggtactgaaaatttttgtatccaagtaacaaacttacaaaatatgttatctagctggtatcttttttaagtgaataatctcattagacttctgtcatgttgcacttttcagctcaattgacctgaccaacataacagctgctgtttacagcaccgagttgtctaaccgacttcgagcttttctagcttcatggcctccatccagtccacagccacatgtaaatgagcttctggtggctactgctgattttgaaaggaatcttgaattgtggaatatcaggtttgtgaaattttcagtatttgaaaagacgtaaccagaattgtggaatagagtgcttctgcgtagtagtatacaagtaaatgcgttttgagattattttgttgtttgcttcagtccagtgcagggaggtatagactcaagaaatcttttccacaattatataatggtgtgggtacaggatatggaacttcacctccttgatctttgcaaagcagaaaaggtatccatctacaaattaatacctagttatgccctttacagtatagcatttttattgacataagaattcatactgtctcagccaaagagcatagtaaaagagaggtagtataaaaatgatgtaaatggtaattactgtaggttccatggtctggagtgtcaaccaaccattccacctccccatttgctgagaaaatgtatgagaagatgagagaacttgtcattcaatatgaagttgtaatcaaccggtggcctcagtactccttggttttagaaaatgtaagttttgtttttgcctacggataatataataaaaatattattcaattttgttcaaaaaaagaatattttaattttttttttctgtattggctagacggtggcaaatgtagaacgagcaatcataaaagcattggagaagcaatacaatgatattttgactccactgaaagatagtattccaaagaggcttaatatgcaggtccagaagctgacaaggaggcaatcagtggccatatattcagttccaaatcaagtgagtgtgtgtgtgtagtaaccagtattcatataaagttgaacactgaagaatagtattcatataaagatatgcaatt

SEQ ID NO: 190926 - DNA, 865 bp, Cannabis indica
tttctcatttgtatgaagtttgaattttgtgttgtgtttattttaatagtagcatagttgtagaatgacaagaaacttgaggaactatattaagatgttgccttaaagcagagtaatattttgacatactatgtaacaatatgatataattagaaaaaaaaatatatttatatattgatgaaatatgcttcatctaaacaaaattattacagttctattataaggaagaatttaacatatacttgtttggatattacatctatttgtaaagaattaaatacatgcatttacataatattttttcttaatattgtatgataaccttagccttgctgtggtgtaactttgttacaataatcctcacaagctttttcacatgcagaaatagttacttgctctctaaggcacacaggcatgcactctttagcacattgagaaagagattcacttatttggaaagataccccaatgagtagcaccatcatgatcaaaaaggctagagtgttgatccttttgctagtcatatttataaaatacttattttatttcttcttaaattctatggtcttgatgttgtagttggtattggaaagattgatttagtttatacatgaagaagagagatttttatatatgatattagagttatttttagattattagttttgaaatataagatatatggatcacaactaattatttcttatggtgatcctcaatttttggaatattgatggatctaatatgttaattattgagattgtgcaaaaatagaatgaagagcaaatgttatatatttttattttaagaaaaaaagtttatttctcatctttaattttctttgatatatgtatgtattttcaag

SEQ ID NO: 190927 - DNA, 1475 bp, Cannabis indica
actagagagcaaatgattgagacttatctcacactctcgcaactgttctcgggtaggtacttagtttttccttgaattattgtgtgtgtgtgtgtgtgtgtgtgtgtgtgagttttgtctcaaattaatggaaatggatgaatttaactattacataatttacttacgcgtagatggtgtactatgagtacaagaaatgaaataaaactgtcattgtttggcagtggagttatgcttagatataactgagatctgaatctggttgtataacgagaactgtagttcttttatgaaattactcttaattttctaatttggttagagatagttttttcattatgtttagctggtcagtcgtttgcacaatgcgtactttattttatttgctctgaaagtttgcgactttctagagaatctgattttgggaaatagctagctagcaatagattttagtttacagcttgcttcatttatacagtaataccaacgatattgagttaagaatactactgttatcaccctcaggaatgaattaaagagaaggaattggtagtggccaagagttgaactaaacttagtttaagttgatagtggggaaaactggaaacatctatcaatccatataagctaagttgaattttcaggccacttccgtcccctccgctatgcttttcaaatggggtagcacgtcatcaaatattcagatgtattcaaggtgctcccccagaaatgcacctctaattatcgctggggtaggacctccaaggacatctctagtcttatggcaggtagaaatctctacactcctgtaacagaaaccatattcctaccaaatttttggtaacatccaattccattagcaaccgctgtgccattttttctgaagctttggggggatagttagagggtcaataaacttttttttaattgctacaaatggggttggaatcccagccccaacacacaccctgccagttgagctagccctcaagttgggtgaaaggccaatgatttgaaaacatggcgttgaaaggtttggagtatgaatacgctacagttgactcctgtattattagccttgagcacactccttgccacctgagctagcctcaagtggtgtgaagggccaatgttttcaaaacatggtattgaaagatttggagtaccaatactgtacagttgactccttatgtattattaatcttgaatgccatgttcaactatatgatgtactggttcttttgttgaagttttttattattgcttctttttttttttttatttttttggcgttggttgccttttaaagtgagcctttcatttcgtgcatatagaattatgtagttgttacttgttttgcattgcttaactgtttttcttgcgcttcttctttgtgcagcatggagaagcaaagaagaacatgtatgcttttagcaccacgacctacactggattccaatgtactgtatctgaag

SEQ ID NO: 190928 - DNA, 1050 bp, Cannabis indica
gatgagagatatcttatatccttgttcttgttatgccaaacaaaccaagtagcacaaagaaagaattcgacttcttctttgctaagattagtgaaaatagtgtagataatatcatgaaaagacaaataatttgaagaaaatataaaagggtaaaaaattgtacatttccaaactcttcgaactctcttgcaaaaaaacagggcatggcaaacagatttagtgtcttgaccacaacgggaaggaacacaaggaagattgaatgatcttcatataggccagattcttgttcgtcggtaaagttgaattggaagctctataggcaaaatgcttaatctttgaggggaggttaaagtgccaaaggcatttccactagggggaagggcaagaggaggaaggaatgtcaggagagaaagtagatgagaaagttaaatggtatcccgatttaatcgagtaagttccagattttgtgagtctctaaataaggttgtcttcggtgggaatgggaggaaggagaatgactaaaatgtcatggacaatgtaaggggggtaatactggttaagacactttgtatcctaagtcatgttatcagagatgaaagaggccaccaggttggagataggattattaagaatgacttggctatggccaaggatctaattattataattcatttttactaaattttatttatcatattactattatttaaataataaaagaatgtataatataatttttatatattatcaataaaatattaaatgattattataatcaattattttctttcttattttacattttgttgattgaaacacaaatattaataaaagatcaaatataacacaaacttatttttgtgccaaatttattacaaattttaaatttggaagatggtcttacaaactcatttttacaacttttactctaatttaaaattttacctcaccaattacaatttcgaaaagtaacctctcacctcatgattgtaagtacaacaaagagcatacgtacaatgaactattgtattgaaaggacaacatcactaa

SEQ ID NO: 190929 - DNA, 3849 bp, Cannabis indica
cacaagtgaggtttttcaatatataaccgggagggaggggtcagtctaagacaaatggcctctttttttttcaaaagaaaaaaaaagtgttcacagtatccgttaagtaatttttgtatgtatcaggggttatggagcctgaattgctagaaattcctctcttgtactctgttcctcactagcattgctcttgtgctttgtgttggtctagttcgttttaatgtggagacatggccagagaaggtatcacattctttctcccaccttttttctcagtataaaatatattgttcttgaagtggttatttttgtacaagttgcactcattaaacactgcatatgcagaaaacttcttgagattcattatgcaattttgttggaacaaaacaaagtcctgtctatttgtggaagtctgatgtaaaaatcattgcagctttgggtaggccctggaagtagggcagcagaagagaaacagttccttgacagccatcttgctcccttctaccgaattgaacaggtttcaatattgctttttgtaaagtcttacttttttatggcttccatggttttatttgtttattgcccttcttatttttcatgggaaaacattgtcatcatccatgtgtgtttgctctttaaaaaaaaaaaatccagatgcctcataatggattttgtgatttgtaatgatctatatatttttttttacatcacttttctgatattatcccactatatttatttcatttgttgtgattttagttcataatagcaaccattcctgatccgcatctgggaaagcaaccaagtaatattaccgaggataatattcagatactctttgaaatacagaaggtagtattaacatcgtctcttagataaagcaccaatttgtatcaaattcgtgcccgctccacacacatatatatgatttgaattaccaataccatatagttaagtagctagacagacttgtagttggtactgctaacatggctgctgctgctgctgctttcaaaaggacttggttcaattttctgattagacgaagcttgttgaaggcacaatctcattttccagttttgagattgactgtgaatttcaaagcactcttggagatcagcattgcaggtcaacaaaatccagtctctgtcatcatccaagtacttgatatcaatcatagtaatgtcatcaagactaaatctcctcataatctcgagctgcagctctttgtaagaacagttgggtatcaaactgaaccggatcttcttgtcaccataatttgctttaactctaaatgcaaacttatctcttgaggtgatccccacatttttttcaggcagcagaggcaaagtttgatgcaaaatctgattctcggttcggctggaggcaagtaattctccatgaccactacaagatctgttgagaaccagagaagagtcctctgttatcaaagagtctccattaaacccatcaaaagtggtggtggagtgtagctgaagtgcagatacttcactggacatggatgatagaggtttcatggctaacccatgattatatttatatatgccactctcgagttgagagtttgattggctatttaattgctgatggtttcggtgttcacatggattgattgatgaagaagaatcatcattgttttctggaatcattggagagttaagctgtgggatgcttgagtaaaaggatccaatttgaatagctctgtcagcaccttcaacagaattgatcatgagttgaagtttcatcaatgagtggccaacctttttgatctttcgagatggccatctagttattccatgttgcctgcatatccttttcagagtggtggggcaaactacagttgaaaaagttcaataattagtatattttattgcttaaatctaaataaatgaatgtaaactcaaccaatataaatatatttatataattgttagtttttataaggatttagtttagaatcttgaacagatatcattctagtctcagctccaatcattaaaggcttttaagattcctttgttttcgagtaaaaatgatatttttaatcattttaatgtattatccataataagcattaacatatagctaatgatgattagtgaatatgaattgcatgtgatattttatttctcctacctcctatacacttagcagcatctttaaggctcccagcaaagtactgcctaagaacagacaagcttatattctctgtacttctagtcctcttctcctgtgcttttctggccccagaagagctatgcccacgaaaatagttagaatctgcaccttcattactggactctttagacacagaacactgctgaagttgcccaaaatctatagacactttccctttgggcaaatctccatgattcaagttgaacccatgaggtgtcaccctgaactcttcaccgggctcttctgtcagagaatctagtgaggctgagacctctctcccatgctgctgtgcctccaccacaacatgatcaaaacaagaagactttttccctgaggattgatctccaacagggtaagtagtagtattagcactccatagtttcagaccctcttctggagtagaaaccgttgtttgatcccgagtctgtaacattacttgatcttctttaagctctttctctacaacaacacgtaaactcttacactcacaagcttgctgtataagaaatgataaagagttggacatttgcttttgctcttcttggtcttggcaatccttaggcaagaaaagctccaatacgaaatcgaaggaggagaccccagtgtagacgcttcttagagggatggccaaggctgcacgtaggccaaacatcctggcatggtgagaaagaaggtattctttttggtccaaggcagttatgtcagtggcaaaacaaggcttgttgccggtaaaggctgcaccaactatgccttgattgcgaaacaagtgatgctgctgagaacaagcctggtggaagccaaggagttcgagatctgagactaagctggctgaagagacgcaacgagcatagttctcgcctgagtggccttgttggtggcacgaagcccatgtttgagctaacggtattctatgaatttcgcaaactgataccaaaacctctactatctcattcaacactacttgatatagctcatcacatacctgaaacaaaaagaaaaaggagaattactatctcaataagttttatcaacacctttgaccaaaaacaaataagttttcttttcattttttaatattgatgtttcttaacaaggttttacattgggaggactgaagttgggcatgcttggagcataaacaaatattaatttgagggaagaagtcctctcgtacgtatgtaatgttagtggaatttatattatataattatatatgtcctttatatataagtatgtgtatgtacgagtctatgaagacagagagatatttatatgaaaatgcttttaggtatttatgttttcttattagggaaaaagtaaaagaaaggaaaaacagattgaatcaactactagtggtaggaaatagcaagaataatgctacaaaagttgggcaaggaaaatgattacaaaaatatgtacgtgtgaagtcaaaaattacatcaagagggttacaattttcataaagctttcaaaatgagacctttggggatgtaaagggacgcagacgattatagattctcccctttgatatgacacgagacaaccctacgatatgctataggtcaataaaagctaaagagcatttataagccttgcattgctaacagcaccatataatggctaacacaattttgatattaatagttgtaa

SEQ ID NO: 190930 - DNA, 2862 bp, Cannabis indica
gaaaactgaaattaactaattagctggtaatgaaatgttgttttcttccatagggggaaaagtgctagccgagcttagatacatgacagatattgctaaagaaatgtttgatgcgatggatgaagatgataaaagcaacaatgaggacagagttaagagctccaccattggagatgtattgattgaatgttattcagacaaaaaactcttgagttgcccttcaccaaataccccaacttcaccatctcccgagcttagttcttttggtatggagctcagccaattgggtagtcatcatgatcatgatgcttctaataactctgctaggtcacttctcttgccttttagactcaaggcactggaaatgttgaagcctgtgggaatgaagcacctcttctcattggacatttctcctccttcactcactcaagattccaatgattactcaaaagaaaatacaataaacaacaaacaagaagctcaacatgaagagatgagaaatagcacctcaaattcaatacctgatcagccaatagtgttgacaccatcaactcttaccccaccgtcgccgcctcctcctcctccaccaccacaagaacttccaccaattccactttcatgtggcccacctttaggcgtggttgcaggaaggcctagtccgccacctgttccgccgcctataggatcaataaatgcgccaccattaccgccccctccaatggctccaacaaaattaggaggcatgccgccacctcctcctcctttgggtgcttctaaagcccttcgtccaaagaaagcagctaccaagttgaagagatcttcccacatgggaagcttgtatagaactctcaaagggaaagtggaaggctcaagcttaagtgctaataaacagcaaggcagaaaatctaagataggaggaggagggtctactggtggaaagcagggcatggctgatgctctagcagagatgacaaaaaggtcagcttttcccttctctcttgttcatttccttaagtttagtagtcaatgtattgcttccatgtgctatttaaaagtaaattgtaatatatgattgattttttttggtggcctatatatgtatagatcagcttatttccaacagattgaagaagatgttcaaaagcattcgaaatcaatcatggaggttaaagctgctatcaactccttccaatcaaaggacatgtctgaacttatcaagttccataagcaagttgaacaacatctggagaaactgactgatgagactcaggtcagaacatatatatattattacaattagtgttcaatttttgcttatagctatatagtttgttactatatattatctctatttggttttgaatattgatgtgaatattacatgcatgcaggtgctggcaagatttgaaggttttccatcgaagaagctggagtcattaagaagtgcagcagccctgtatttgaaactagaagatattgtcaataagctggaaaaatggaaagtggctcctcctttaggccagctacttgataaggttgagtcattcttcactaaggtaaaatcgatacatataaatgaaaaatcgtgaacatgaaaatatccccttgagcacttttcatcaatgaatttctgaaaccagatcaaaggggaaatagatgcattggaaaggagtaaagatgaagaagctaagaagttccaaagtcataatatcacatttgatttcaatattttgatacgaattaaagaatgcatggtagacgtttcttcaagctgcatggaattagcacttgaggtaatcattacttatggtattaaatgtcatattcatttactatatatattcctggctaataaagtaactaattaggaaaagcaataagaaagtgttgagaatgattgtgaatttgatacaggaaaaaagaaagggaaaagccaaagaaagtattgagaatggaaggtgtagtagtaagagtgagcaagaacaaggaaaagcacatacaaaaatgctttggaaggcttttcaatttgcatttcgtgtgtatagctttgcaggaggacaagatgatcgagctgatatgcttaccaaacaacttgcccatgaaatacaagttgatcctcttcaagagtagtactaaatataattaaatatataaatataagctaattatctaaaatatttccaaacacatgatatatttaattatatttatattatatataaatgtaatattattttatgttcgtacgcatgacacaacacattaatactaataaggcacaaaataatcattagatatagtatttgcatatattttaacgagataatatatacaatactagatgcagtaaaaacaatcaaattaacagcagagatatgaagaaataaggccatagatttatattggttcaggtcaaaatagactctgtaacttaaataccagtgtagcaagctcaagcaatctcccttaagaatcaagttttaatagatattgaaaatgccatgcaatacaattgaaatgaaaatgtaaaatctcttctcccttcctcactactttgaaccagtttggtgaagttaagaaagaaaagttgtaggaaaaaatgttgagtgtatgataaattataaatttacatatattgtaagctgaaaaagtagtatataattataattcggtaaattaactaaaattctcatgaagaaatattatagagaggaatataaataaggtaaatactattttagatctcgtgttttacaaaaaattattaattggatcttttattttgttaaatgacaaaatggattccatatttttcaaaataggaaaaataagatcctattgttaacactgattaactaactc

SEQ ID NO: 190931 - DNA, 5547 bp, Cannabis indica
acagtttcattttgcttctgagaaatctttcttgtgagctttgctaactcttcaatcttatgctctaaacgttgagttgtagtgtctggcgattctcttctgtgaatacaatcgttgatgtggtttcttcagtcgtctctgtgaggtctagcttttcagttttagccttttctcctttcagattcggccttgctcgtagatcattcattgaaagactcaaacttttgtcatgtggtgagggatgcacttcttcaacatcatcacttagattaacaaaattattgcaattctgcgcaattctgcttctagaattagtttggttacctatccctgaagcatgggttcctttcttttgctttttaggttggctgacagattcggattccctttgttctttagtttgggcagccttctttgaagttttgcctacttttcctttccctttgtccttatgaggatcgtaggttttaggatttttgagattaactttccctatagtgttatcttttgaagcagcatgataagctttgcttgcagtagttattgcttttattatagactcgattctttccattttgtcatgcatggacaaagagaatttctcttgcaatggcaatttatcttcagtttctttcaactttctggccataatgaccacaaaatatgactcatctagatcgtcttccttttcagcgtcatcatcaacatgcatattttgatgtttatcttcatgatcagtagaaacaatttcctttgattcactttcttcattcattggatcttgaggaatagtatccttgtcaatttgatccttcttgtggtgactggtcgcctcagttggatcttctgcatctctcgtcttagcattgggatcaacatcaccctttttatggtcattgtagtgaagaccagactgggttcgggtgaagttgacaaagttaataagcctaagtctaactaagggattacagtaagtataattattagataggctataaatgcctaagggattacaataagtatgagcactatgttctcttcttgagcatgtaagtcaagaatttctaacccttagcatgaaggattcaatatatattaatagactaatcgaggtcgtacttatttactattttcctctaatggggagtttacagataatacacagatttgggcttatctggtgaagcccaacccatgagatgatacgtgtctgctgatgtggagatttaatcatggtgatagttgttccaccgtgtctttgattaatgtgatattaattatttgatcttaaattattttactttccctttttagacaagatattattctctgcccacgatcttaggagaagagctcgtattttttgtagaaaagtaaaagggaaactgaagattgacttccgggtacacactatgaacctctatcagacacacagggttcacattcttctgtatgttaattaggcttgacagaagctcatctagcatggcctacggctgttctcccagaatgctagataacaaatagacttggcccaattcatgttattttgggctcactgacgagctttaaacttttatttggaatccacgtgttccttgccggaaccaccaataacaatttctattctaatacaatttatattttttctccactaaagtaataaatatttttatcaatgcccacttttatcaagaaaataaatttctcaaaatgtttaatctaaagtaacttaaatgagtaacgccttttaaaaactgctatatatatttaattaaatttaaattagagaacaagatagtcttactgaaacccaaatgaagaaagcgagctcgaatgcattctaaaatatgaacaaaaaaaaaggttgatcagtttagaacaatattattttgtggagatatatagaaattcaaaattaaatatatattgtttttttaacaaatatatcatataatgattaattaccacgaaaagagtataatgcagaagtgttaagacgaattttggcttcccgaaccaaaatagattatcatttggtttaactagaggggctccaattataacattattgttttgctctttcatttgaagagccattcttgctacaattacttcaagtttggttcctagaacgagcacaatctgacatatatattaaaacctattaaaaattaatttatgaaaataataacaaaagaaattataaaagtgtaaattaaatttattgagtttaaacaataatttaactgttaaattattaatttacttaccaatattggaacataggacaaccagctatatacatgccatcctatacaaaacaaaattgatacattttagtttccttagtatattttacgtattaatacatgtaataaggataatggttaatgcatggagttatgatcttttgaagagagaaaaagcttgtggtataaatttgttaatcttagatttgatcaaccaacacagaattcatatttattattgatgctaccacatgtacaccatcaaaacaaaaaagtatgagaggcacaatattttatagaggttcaacccctttagttagcgggtaatgacctacttcccttttggttatattaatactagagataataccactcaaagcataagagttgttgattctaacgtggctctcttaagattataacatgagaatcagtaggcaaatcccaggtataaaagagagagatcctgggatagaatttgtacaactttcccccaaaggctaggctttcttgatcaaacatgccattttttggttttgacagtcaccctttggcaagctagcttgtgctcaaagcttagccgaccatacaagcatctcctggttggccgatgtagtccctctttttccagccacacatggttgtgcatcttcctgaaggcttgcttaactccttttgcttgttgcttgatggttttaccatgccttgtcaggagactttgtcctactattgaaaaggttgtattccacacgtccttagtcttggcttacatagacatgccacgacaggaggaaaaaatttagggtgacatttcctttaagtccttgttcaaacatttggccagatagggactttttagctttcatcttgcccgttgtaacctctatcaagcagccttgtctagccaagtattagcttttcgcatggcatgcttttagatcttttgtctccaccctccatatatgcctcatcttcttttcttcgacatcccttttttgagtctgccattgataagtttcaagctttttaagcttttagaagcttactgattttcacattagattgtagtcttttttgtattttgattcgcatgataatattagaatgcataatgcgtgattttctaatgaaaaagattcaattattgcctttgttctgattcttaactcttagagtgatgaagacacgtttgagttttgaaaaacacgcattttgatttgagactaaccctggccagtcctaggggtcttgtttgagacttggccaggcctagggtttttccatgggggctggccagttttagggtttcaccaaagaaagctagtcggttcatgcctgggtctggggaccctggctggatcttggcttggtcatgggaccatgggcaaccctctcaaagcttaggaaacttggtcgacctaggccttggttcaaagcgggtagctagttttttgtcctactttgacattgacaaaaatcttgtcatggccttgcaggcatatacatccttagtctctaacgtggttcccttagaaactctgtatgaaccttaatgatgagtctattatagtcgaatgctcaacttaagactcaatatttgttgaagttgttatacctaaaattgtacttcattgatacccagccttgtacaatgacaatatctggcaagtacccttgagtacggttgaccagagtcttgtgtatggcttggaacctgcaaggaactatgccttttggcttggaaccagctaggaactctatcttgccttacagatttagcccggtacgtggttcctataggaactctgtctggttcttttttagatgtacggttctcacaaggcattaaccttatgcatttgaactaattttttattcatattcggccttaaggctttcatattctttcttttttcctataggcaccctatttttgaacattataattgtttagccttaaagccttgtactatagacatatgaccgtcctggctatcttcttattaccttgacatgtaagtatcaagatttacttttctttatgccaagcagaagtatgtatgcacatgagttagaggcacgtttactagtttatactaagaattaaaatttctttgcataagttctctgtgctagttcgatgcattgtatagtgtgggtgcccctaagtgagcacatagatttaagatctcttggtcaccaagtttcataaaccttgcctaggaattttcatgggggtgctactgggtgtacgcatgtggaaccgaaaaagaataactttaagaagttagtctttttagcatgtgctttagacataattggtcttatgtgtaacaaaagcttatatcttaatgttttcttttaaaatcacattttggctacccctgcttgacatgttaggcaaaggccatcgctgtagagcgatgggaggccatgctaaaaagtgatgggtactatctcttttatatttggctacctttacagggcttaccgtgcaaaggtcatcactgtagagtgatggtaggccatcattgaagagcgatgggtactagctcttttctaaattcctgcacggtgaattgttagaggaaccactattgaagagtacaaatttgctgtgagagtacttaccgagatgttttccattccaatatttttgtagaggagccaaccccaagttctgattgtactccctaggcttgtatgcaccttttcttataatctagaaacttggtgcaaaccttttcagttttgtccaaatatgcttgctgcaggatctttgttatcaaaatgattctttagagcaataagtatcttatgaagaatttcctcttcttgacatgtttgttgaagtactagcaactttttgctcccagacatgctcctttaagttggcttggtctcttcctttttacctttcaccaagggattctactggcaagatgtggtttacttcttggacatagtagaccaaaagagcatgagagtagattgttggcagataaggctagctagagtatctaggtagccagccacattgagggagcatcgcctagccagtttcatgaggctatggttggtcaacctatggaggtagtggctggccagggtgttaagccaatggttagctagcttattaaggccatggtcgactagccttttggaggttaggttgatgttgcagttggatcctatctatactcagttggctttgccctcggcataatagtcgatagcctttatgcattcctatcaatagcagttaagcttcttacttcgtaacacatcttatacc

SEQ ID NO: 190932 - DNA, 1644 bp, Cannabis indica
actttttcagcggtaagtggtagaggattcatagcaagagacataacatttgagaacacggccggaccagagaagcaccaagccgtggctctgcgctcggactctgacctctcagtcttctaccggtgccgcttcaggggctaccaagacaccctctacacccacaccatgcgccaattcttcagggaatgccacatcagtggcactgttgactttatctttggtgacgcagcagccgtgttccaaaattgccagatattagccaaaaggggcctccaaaccaaaaaataccatcacggcccaaggtgaaaagacccaaatgagcccacgggcttctcaatccagtttagtaacataagtgctgattctgaccttgtgggctttgaaaactccacgtacacatatttgggtaggccttggaagctattctcgagaacagtgattttacagagctacattagtgatgctgtgaagccccaaggttggctcgagtggaacggagatttcgctttggacaccttgttctatggtgagtttatgaactttgggccgggtgcgggcctgggtagtcgggtcaagtggcccggttaccgtacctttaatgattcgaatcaggttcataattataccgttgcgcagttcattgaagggaacctttggttgccttctacaggtgtcaaatatagtgcaggattgcaatcttaaaatcattacataataattatattgatggtcgatttttctgggttctgttttgagatttagtttatggatgttactttttcctcttatataaatggaattataagccactaggaatgatagtaagtttatgtgatgttacaaaatgaaaatgatgtatacaatttgtttgtcttccactaattttcggaaaagtcccaattaatatattaataataataattcttggtagtactgttcttaattctatgtacgtagtttggttttagaaaagttaatgttgattagtctaatttttccacttataacttttaacatacaaaagaacaagaagagagtggttggtaatggtaaggagtaaagctgtaaagcacttcattgatagaacagcactactaaaacttattaacttccaaaatcctcggttggtgcaaataaaaatcactttagtgaggataacagacaacttctctaaacttatgtaataatactcttgacactttttaaagtacccttcctatgttttttgttatttactatcgttagatgtttagatgatgatgactggtgagacgagtaaggctcacaaaagtcaggcaagtgggataacaggacaaagtcaatggataaaaaagagctcaaataaggcacaaaggaatcctagacatgtgagataatattaggtggtagatgctgctggggacaaaactattaatgaatgccatatatttaagattcaaactcccgtgggctctctcacacaattcacaactttaaatacctcaacttgctctgcacgctatttaacctttgaacagttccaaacagaaatttcagaatcttcttaaatttcttatcaaccataaatttcttgaatttctcgttcaaatatgcaactaagtctcttttttttctttttttatttttttgttttttagtttt

SEQ ID NO: 190933 - DNA, 5308 bp, Cannabis indica
cagcatgttattttcagacgacggaggtcgactgagagattgtaatagaaggttgacgatagtactcttatcatcatctctatagctattttattgacgaaagatgttacattaattgtgcacatacatatataatttaaaaaaaaaaatgtgtgtatatttatcccaataggttttggttgatttatgccccaatgtaaaaattgagttataaaaataagtgtaacccgtcttattaagaaaaaaaaattagtaatccatccaataaaattggtcggtttgatcgggttaacctgtccaaaccgacaactaatatttttttatattcaattattatattttaattaattgtgataataagacaaatatatattaaatttaaattcaaactaactattataaaacaaacaatcatagtagtttgaactttatattgttgaatatgtatgtaaattatatgatatgtaaatatatacataataaaccatatatacacatatatataactctcttaatcaggttggtcggattagtttaggttgattaggcgatttggtattatttttaacttgcccaatataaagattggacggattatattttgtcgagtcattcgatttatattattcgtgaggttattcggtttgagcaatttacaaaaagtttatgtacatccttagtcataacttcataataaaactttggtcattgaataaatattatgtttgtttgtttgttgtgattttataaaaataataataataataataacaacaaggtaacaatttaagtgtagttagggatatttcatctaagttaataatacaaatctatagaaagcataaaacattaacatctaggaaatttttatattctcttttaagatattggctgtttgtatcttcttttccattatggtgttcgaagacttttgtaataactaataattatcttcaaatttgaccaaattataactatttaatattttcctatatccattattgtaattgcggtactatatgtgtagtctctccttctattgcttatagatttggaaaataaagttttgattgcttaataaattacgttttttttatatagataatctattaatgtttagtcccaaaagtttggaccgggccttctacccaaaccaacaatctccagtagttcctatcctatggtcaatttttactagattttaattattgaagttcctttacattttttactaattgaaagaaagagaaacacaggacaaaggtgatgaaagagggattgctttgatggcaatttggactattttcgcgggtcgagtcggcccctggcccgatgaggcgactttggcccgattattttgggcttttatcgggctctaaacccggcccgatttcaaatattaaaaaaaaaatacagataaggctcgacctaactcgattatctcgggtcggatctgacccgataagttgaagaaagtagtctggccgggtccggccctattaacattcctagagctaaacacagccattatgtaccaaagcaagaaaagcatttgatgcaatcactaacaacaactagaaacaaaattacagtaactaattaatacaacgactgaaatcctaactaactctaaaagaaaaggtaaccaacttcgaactttttgtgctttaacattaattaagtagttgtgtaattattcaatttaaaaaaaatatataatactaaaacaataatctgatgatttgttaagacattagtattaagatgaaaatattataacaattatcacaaatccattgtcgtccaacggttaggatatctggctttcacccagtaaactcgagtttgatccccgacaacggaatttttgttgtttttaactaatatattttttatatgataatattattacactatttttactcccgctatatttaattcttgagtgaagcgaagtagttgatttgagtttttcaccattaatgaaccaattattattagatgaagattgcaaagcatcttaggtttggagtagagcaggaatgtggaatcaaccaagtgtgtgtaatttgtttaaattgacaagatcaatgttgaagtctaccacttcttgattaaaaacaaagcatgtgacatatttgaccaaatatgctttgtgtagaaaacaaaaacatgattatcaagtcggagttaaaactaagttaacatcacctacactgagttcaaattgtgagcaaaaaaggaaaatacttgtgtatagtagtagtgtactagtattaagagtataacttgataatttgttagtctagaatcatgggatcatggtaatcttcttgacttgaacatggcaaacctgtacctgcagggactctatggaagaaattataacgtcttgattcatctccaatattggagaagtcattccaaccccccataagcgtagtttcaacatcaagacttgatgatgactcgggccaatctggacacagcaaaagttcattgctcggtgaagatttaaaattggtacagcgccagaggctaacataatctagagaacgtatgttatggatgctgtttgggacagactcaaggttactgcacatttctaggtgcaatgattgaagcccgactagattctcaatcgacgagtggagctctctaatcgctgttctatctaactcgagttccactaggcattccataggctctaagatttctgggaagtttttgaatctcatgcatccagagaggtaaagtccttgtaatttttttaacttacaaatgcttgtgggaagattctccagctttgaacaatcagtaagatcaaatatctcaagacaagatacatactcgattgatgaaggcacttctttaatggatgttgtactcaagtttaagcttcttatgtttctaggaaggttttgaaacttgttcagagaataacaaccgtgaagactaagagttgttagactcaaagcatgagagatatcaggaacttctttaatggatgttttactcaagtttaagcttgttacattcataggaaggttcggaaacttgtttagagaacgacaaccttggagactaagagttgttagattcgaagcatgagaaagatcaggaactttagcaaggtctctgcaataactaagatccatctttttcaagctacctagaggctgtaaaacaagtcaattagcttaatattagaatgtacataacaagctagacatattgaataatacaatgaactatttatagtggatagacagacataggcatacctggcttacattccacagcctatcaacccgactattgggcatgataagttctacgagattatctggaataaaattttctggcaaaaatctagagcaatatccatcccattgtagatatacaagcttatcagagaaatacactagatcttcataagggcacacattgctctccctgttaccatttggtgaattataaattttcaagtatcttagattatacatcttttggaagacctcagggttgaaattgatatctctagtcttagacatgtctaaacatattccttcaactgcttcagtcccctaacaattaagaaacaataatttttatgcgtacataaactatgaactacacagctgaaaattcatggtttttgttttcatgcaacctgtgaatagttttaaagtatttttacttactgtgttattcttcagcacgtgatatatatcctctgcaatccacaacctactacgctgtccaggctctttgatggattcttttcgaacaatctcttgacccatttcttgtatcaaatcatgcatccagagtttgttgtcaagagatacaactataagtgacttatcaacaagattatctacttctatgtcacagtttagtattctttcaacaaaatttctttcattgcctataaagaaacatgcaatgtcaagaaagagactctgctcactatcatcaagttcatcataacttgttttcaatatagtttgaagtttgttgctcgatcttttctttattttatccaacgcagtctcccatttttccttcttttggcaacggaggaaggaacccaaaactttcagagctagtggaacacctccagcatagtttactgctatatctaccaactttgtatagcttttcttcggagaggacacttcttggaaagcagccaaatgaaagagttgtacagcttcatcatcatttaattcttcaaccttgtaaatttcattagctttgatgttcctaagcacttgctcatctctagttgttataataattctacttccagagccaaaataattcccatctccaactaaaacttctaattgttcaggatcattcacatcatcgagtacaacaagaaccattttaaagtggagccttttcttagtatatgaagtacttcgtctatcttcttccagtagttcagaataaagtatattttgtacatgaggcaacccgtgtttctttgattcttccctaacattcaatagaaagcagcaaccttcgaatcgagaagcaaaacggttgaatacaactctagcaagagttgttttaccaattccacccataccaaaaatccccacaatacgagtacttctcgatccaacttccagcattctttctatcttctcaatgcgtttctccattccaacaaaacccttaaagtcttcaatcggtacacgactgagttttttcaaaatgtcttcgacaatctctttcactaactttgaatcagggctataatacaagtagaacaaacaaatgctagccaatgagaaggaactataacaatgaaacacatagaaatgagttctgttttagagtagtagacattattgtagggagggactacctgacgtgcattgaagcccatccagatagattggctgcagtgatcaaagccttcctccactcatgtactttatctattttccccagataacattcctcgagctcagccaacgcatctgcataggttcccaactgtccccggacatgagatggtttcacattgtagaaaataggaatgactatcttccccagttcttctttgcaccaaattatatgcacgagttcatccaagcaccatgtggaagaagcatagttttctgaaaaaactatgactgacacctttgactcttctatagctttctttaatgctggtgagatctcatctcctctgttaagcatgttatctatgtaggtttcaattttcttctgaagcaatgcttcgtgaagatggcttgtaaaatgatcacgagtatcctcccctctaaaa

SEQ ID NO: 190934 - DNA, 3106 bp, Cannabis indica
  modified_base (3090)..(3090): a, c, t, g, unknown or other
aagatcaagtccaattgagccaaagactggtactccagaacaggataagtctttttctcattctgatatggcccctaaggagaattctcctccaagctgctctgctgccttaagtcataaaggaactcagattgcacaatctatagtgaatttgacaaatgatagtgtgaaatcaaacgagttaaatatttcttcactggaccttacgccttctgtaaattgtggcaaggttggaacttcatcattgaagggtcccaaacctctagcaagtgataagaagtctgagaattcagagccctcatctgtctctggtgcttttgatatatgcccgcctaaagccaccagttcttctaagttaaaaccttctctatttgcaatgaatcgagagaggcggagtcaagtgaaacagacggatagtaaaagtggatttgtgagaaggcctggaatggttttgctcaagaacttcatttcacttagcgaacaggtgttgctttatttactctatttcttacaagatagcttctggagggacctctatcccttgatttatttgattactaacataaagtctacctcgtaataatgtgtgacatcttttttatgaccacggatttttcttaccttcgtttattacttctatggtgttactgtttcttatgtgtttaggtgaaaatagtgaagcgatgccgtgacttgggattaggccctggaggtttctaccaacctggttaccgtgatggagcaaaactgcatttaaatatgatgtgtcttggcaaaaattgggacccggagtctagccaatatggtgatatccggccaacagatggtgcaaaaccacctttaattcctgatgagttttatcaattagttgagaaagcaatcaaggattctcacgcccttatatgcgaagaaggaaaagttgtgcttgcgaatgctcaaggcattcttcccaatatgaaaccagacatttgtctggtaaacttttattcagcaaatgggcgacttggtcttcatcaggttcctctaatcacactttttactaatatttatattattttctcttgaaattgattatcacaggctttttataaactctaaaatatactgtatatgcatctcgcgacgatgccttctgtgcaggatcgtgatgaatctcctcaaagtatcaaaaagggattgcctgttgtctccttttccattggagattcagcagaattcgcgtacagtgatgaaagggatggcaaggtagacactgtcactctggaatcaggagatgttttgatatttggtggagaatctagaaatgtttttcatggcgtggcttctattaagaaagaccgccccccaaactctattggaggaaactaatctcaggcagggccggctaaatcttactttcagacagtattgaaatatctagctagttgtcattgaagtcatgttagctgatggtggaacaattttgtactctttgtacagtttaatagttttagttcaatgaaattgtgttttgatataatgatattagatgcagttgttaagataggacttgttttgtaatccgtaccttgtccaaggaaattcatttttgttttccacattattttaaggttacttttcatttttgttttcaacactatactaagaagtatttaataaatctaaaaaatcttaaatgtgaacctttggtttgatgttagtctactccccaaaccctctacttcagtaaagatatcattgtttttatcatttgtctaaatatgtagatatggattagtagtatcatgctaaatctgcgggcacgtacattttatattccttaaatttaatacttcattattactctaccaacaagaaaattaatgaataataaatgctcttcattaaattaccaattattatcattattttgtttggaagggatcaattaaaataaaaattatttgttggagtgaaaattcaattcaaatggttcaaaatttgttgtaaaataaataataataaaaaacgcgagagagagaaaaggaaaactcgtttttcagtgacgacagaagagaaaagagaagagagacgaagtgagaggcataaccttctctcctctccaatgccagctctcactgttcacattgccatctcttcacacacccacacctgaggatagcttttccgtccctttcgccgggaaaagagaaccagaaaccaatcaagtctgccaatgggccggaattcgtctcctcctcctccagatggttacgacggtaatgtcaacaccgtttccgtctccggtgctggtaatgatcttggttctcactcgattggttctagctttcttttcaagcggaaccctaatcctatccaccagcgagatcgaggcaagacattgccggatcgcccttcgtcgttgttgttgcggggtgtccgatcgcatcccagtcgtttcaatcgtaaaggttttatgtcgttgtttcctttcaaagggaagtcgacgttttatttggtgataatcttcgctgtgttcctgtttgcaatggcgtccatggtgttgcagagctcgatcacgtcggtgtttaggcaaggaagtgatagggggagattgttgagagatggtttgaagctcggaagtacgctgaggttcgtgcctgggaaaatagtacgtggactcgctgaggggaatggtctcgatcatttgcggaatgagccgaggattgctgttcgggcgcctagacttgctcttgtgagtgttaaactgttacttgactttgctttagtttctgaatgaagatctaaattcgattcttaatatgtggtcatgttagtgtttataaatttgaattttggtttatggaagtgtttgatacttgttttgttgataattgatcgtcattctagtgatgggagtgaattgggacttgttgtataaactaaaggcttggcaactgtactgaatgcttatgtgcaattgaaatgactcttctgtctctttttctcttggtagagggggaaagatatggcttctctgtatcttatttgaagttttcttaagcgttaggggcattccattgcttccggtgggtgagttttttttttttnttttttctcttttctt

SEQ ID NO: 190935 - DNA, 2196 bp, Cannabis indica
aataataatcacacatgcatgcagatgcagatgaagtagtatagtacaaggcagtacacagtttttttctcttcgatcgctaacatatatataaatatatcacaattctaaaaattaatatgtatgtagtggttaggtggtaaaatgggtaaaatgggtaaaatgggtaaataaatggtaaatggtatgatgattctgagggaatccaacaaagagagacaaacaaggaacaacaggtgtcagcacttattactactaatcatcaatcatccaatgccaacatatatatatatatttatatataattcaacacatgtacagtacatatagtactacactactctactctctcctatatactctactactgatgagaaagaagatccagtgagtgagtgagtgaatatatatttaaggctttgcgtgtattttttgttataacttctaccacatccctcactttttcttttttcttttttatttcatataaaataatatatatatatatgccaatgcaataatacatttttataaaatatataaaaatagctttctctttctatctctactttaatagctagaattgaaattcaataccatacattcatttattgttacagtactcctggccgacttcctaagtttgatgtcctttattgtaattttttagtgaacttctgtattcaaaaatacatacttcaattttttttttcatatttgtatacttacaagttacaacatcatattttaaaattttcgaataatttatagtatctaaaatacgtttgatattttttaaacgcgtgtggtaaattaatttagaattttatttttgacattataaactatttaaaattttttaaaaatttataaaaataatactgtaactataacaaataccgcactttaaaaaaaaattgaaaaaaaaatattatgcatgtaatttcgagggtaaaaattaattaaaaggatatataataaaactaacacccatctatcaatatctctatctcaactagttatataaatgatcatgatattcatatttttctatatcttattaataaaatatccatgccctcgtaataatataagatatatatataattaagttcatatgtagaagtgattaatattatatacaaaagtatatataattaaagttttcaagtacattttagatttgtacggtataataaaggatcagccataaatacgattgaagacatttatttccattttttaaatatgcatgtgaaattcatagtacacccctcaaaaattcattttgtacacttttagggtgtcaaatttacggaattagaattgagtataattcgagctaattacacattttacatgtttaatttgtccaattacataattatactataattgtatcattaaatgtaattaactttctaattctcatactcttataaaaattgagtataattaattacactttgtaatgtaattgttaaaaaaatttattttaaatatttattaaaatttattattttcctctgtaaatataagctatatattttaccaaacaaattccaaaatacattatattttaaatatagtgctaattactatgttataattatacagttattttctaaaagctatcattaattttttgtgtatctacattcataatgatttacattgtactatgtaccctaataaattgtgtagcctaattaattaatatatataatgtgtgtacttgctatttaattctgaattatgtttaattattaataattaaataatattgtgttgtgtttatttattttaaaaaataagatatactgtatttaggtttgaaataattatatcatcacagaataagaaggtgatgttgctggcatggaatctgattaattacctgaaataagtactacatatgtatatatgtacacgcacacagaacaacagacagaaattaattaattaattaatagataatataacaaactgatgatatatatggaataataatatggatgatgaggcattacagatccaattttatataaatatataaaaatatttgatcctcttacatggatataataaaaatacgcattaattcagttattcaatacaatgccattgcttctccaaagattcctcatatatataaggatatgattttataccgtgaagtactttcacggaatgtat

SEQ ID NO: 190936 - DNA, 6621 bp, Cannabis indica
ttctttttttttttttgaaattcagattcttggagcagaggcttattccagtacccgatttcaattcttgatttgttgaaaaaggtaaattttatgaagattttgtttaactactaaattttctttgatgttttgtaatatttaagcttcttgtttaaacatatttgcagggtttgtttttgtgaaatcttgcaaagatgaatgatttgatgacaaaatcgttcttaagttatgtggaactgaagaaacaagcccagaaagaccttgaggggaatctggatatcgaaataggccaaattcttaacccaatagatgaagaaaacctttttaagttttaccaagaagttggtgaagtcaagtctgaaatggaagagattaccaatctcttgtctgatcttcaaaccttgaatgaagaagcaaaatccactcacagtacaaagattcttcgtgggcttagagatcgtatggattcagacatagtttccatacttcgtaaagtgaagatagtcaagacaagacttgagaatcttgatcaggccaacattaacaatcgaaatgttttagatgcttatagagaaggaagccatgttgatcgaaccagaatttcggtaaccaatggtttgagagtcaagttgagagaaatgatgaacaatttccagactttgagagacaaaattgttgaagatcacaaggaagatctgaggagaaagtactattgtgctactggcgagttaccgagtgaggaagtgatcgaaaagatggtttcgggggctatgaaagttcaaatgtttgaagggaaaacagaagttgatatggagaataaagttaggcatgagacagtgttggatattcaaagaagtttgaataaacttcatcaggtgtttcttgacatggctgttcttgttgaaattcaaggcgaaaagattgatgatattgaagagaatgttgccaatgctggtgattttatcagtggtggcactaacagtctttactatgctaaccagatgaagaagaagaacaaatggttttattgggtttgggctgtggtggtgatgatacttctggtctgtcttatatcaaccttagcctcttgaaagttcaactatatctgaaatcttggtatattgggattttgttttgttttgagtttttctattcatgtcttactgagctttctgagctcaagagggttttatgttcatctctaatggctgctagtgttcagttttagtatatcttaatgtaattcttgctttgatacattttgacttaatgctcattaaataaatagaagatgattgagaatgtagatttggttgttctttttgtttttactttgcattttatatattaaaagacaaaacaatagggaccacacaaaagattttgtactttttcaattgaaaaaatatataattggaaaagagcatatcaaataaccttatctgaattgctttaataataagaaccatagaaaataagtctcctaagttctcctttgcaatgttgtctttgcttgagacatgttcaaacatggtggaactaaagcaaatccatggccaaatgttgaaaacaggccttgtttcagataccatcttagccaacaagctcctaaccttttgtgttttaccaaattctggaaatttagcctatgcccagatgtttttcgatagatttcgcaaaccaaacactttcatgtggaacaccatgatcaaaggatactcaaacaataatcaagctgaagaagctttacttctttaccatcaaatgatttgtcaatcagttccacacaacaaccacacctttccttccttgctcaaagcctgttcttgtttatcagctttggaagaaacaaaacaagtccacacacgcatcataaagatgggttttagctcagaagtctatgccatgaattccttactccatgtttatgccataacaggctgcatcgaagcagcaagtcttgtgtttgatagaatcccacaaaaggacattgtgtctttcaactcgatgatcaatgggtatgcaaaatgtggggaaatgagcagagccaacgagtttttccgaaatatgccagagaagaatgttgtctcgtggacaacaatgatttatggatatgtcaatgctggttttgacaaggaagcactgaacgtattttcagaaatgcagattgctggcgttgaaccagacggtgtaactctagcaaccgctctctcagcttgcgctcgccttggtgcgttggatcaaggtaggtggattcattcctacatcaacaagaagagaatccacattgatctaattttgggttgtgctcttatagacatgtatgtcaagtgtggcaacatggaacaagctcttgaaatattcagagctatggagaggaaagatgtctcttcttggacagcaattattgaaggttttgcaattcatggacagggaaaagaagctctaaactggtttatacagatgcagagtgaaggcattaaaccaaaccatatcacttttacttcaattcttactgcttgtagctatgcaggactagttgatgaaggaaaatcattatttcaaagcatgaaagatgttcacaagttgattccttcattagagcattatggttgcatggttgatcttctaggccgagctggtcttctgaaagaagcacaagagttcattgagacaatgcctataaaaccaaatgcagccatatggggtgcgctgcttaatgcctgtcgaattcatagacaccttgaattagggaaagagatagggaaaatccttgtcaaacttgacccttcacacggcggaaggtacattcacttgtcaagcattcatgctgcagctggagaatggaaccaagcagtaagagtgagaaaacagatgacagatttaggagtttcgaaagttccaggctgcagtttgattagcatgaacggtgttgttcacgagtttttggccgggggaggctcttatccacacatggaagaaatttaccaagtgtgggaatcgatagtagagagactgagacaagaagggcatgaatttgcaacaagagatttgttacttgatcttatggatgaggagaaagaaactgcaatacagcaacacagtgagaaactagcaatagctttcggattaatgagaagtaaaccaggggtaactattcgagttttcaataatcttcgagtttgtgaagactgtcataaggtggcaaaactcatttcgaagatttatcgcagagatattgttctacgtgatcgagttcgatttcacatttttaaggaggggaactgctcttgtggagattactggtgaacagattagtaacaagaactgcattagtttatttatgatccaggctttaaattaatgatttcaatctaataagccattggatgaaaataatatatggaaaacaattgtgaccaaataactaccaaataagcaatgttgctcaaaaaatgacattaacaaaatgactgaagattatactattttctttctgaataaacctctgattttgtatttccaaactgacttttattgtttagcaagtgcttctaatctgttaattaagcttaaacaaactagcccttaaagaggatttacgaattgttatcacttaaatccatcacttttggaagattaagttgagaagaagtggtagttatgatcttggccaaccccaattattttattttatagctgaaacgctcgaaggcaatatatatgttgtttaaaaaaaatgaacaacaaaagacatatctacaaaaattggcacacttcactcgacgctgagaagctgtgtagcggtccaagattgtcccggctccaactgttgggttccaatctaaaagtatccataaaagggaagtaagaacagaaaaattagcaacaaatccatgctcaaaaactattaattgagaaaaacaactcaatacaaactcggtttttgtttgttcaagttttggttggtaggtactaatatgaaggctggaaatttgtataccttagcattttctacgcaaacgaaatctttgtagcacgcttccatctgcagatgtgggttccacaacacagcatcggtccaactacaaggatgaaaaaatacaggcgagcggagaatgtgaaacgtgtccatagtgatattgattaaaataattttttagccaaaaccagagttaaccaaggttcaaagttcaattaaactcactttgtattcttgatggatattgtatcccccaagccattatcaagatgtaactcattaggggcatcaagatatatgcaatcaacaaatcccggaaaagtgaccacgtccctgtgtatttacgataagaattagaaagaaagaaccatggctagaatattcaaaaggagattgttgttatttaagcaatggtaatgtggaataaatagagataatcaaactaccagaatagaaatagtgaggctagttctttacaaaacagttatatttttggtatgttaactcttatttcttcctcagtaaaaaatgtatagattaaagatatgttcttgtcctagaatggaaatggatgtgcatatcagtactaaatttataagttcacatgcattgatgagtctagctgtgtaagaatcgaagtgtagctcaaaccccaaccaatcaactagtcttttttcctttttcggtttttgctattattgtatggtaataaaatcatgtctacgcatgaaaatgatgagatttgacacaaacctttcttctttgccctccaatggattctctggatcaggttctttatttagagttttgcaaccctttaaacctctaactgatgcacctgtgactgaagcctgcatgataagtattactgtgcaattagagatgcagaatacagtgcacaatgaaacttcttttctaaacgttttacaatttattcctaaattcttggtccctttgttactaaacaatttaacatcaaatcaaatcataagaatattctgaatttagagccaaacacatgaaattggaatcacgaagcacagagaaaggctacttacgcggaagtatgagtgcagagctgtactaaatgaaaatggcttgttgtctgtatttgtaattacgagttctgtggaaaggctgtttgttttcagaatcacctggatgaacaaatagaatgattgtaagaaaaatttcagtaaaaatcatacacattgcatattactgtcgagttgtcccaaacactatagctactagctactgttagcagagttgtctaaacatcgatcactcaccaccgtctgggtggggcaaataagatgcctagtgagttatcggtatctctttacaatagcattattttcacaactaaccttgtataaagcctgaaagctgaaatcccacatggaacgactgtaaggctcatcctttagctctaaagttacaatgggatttccttcaacattttcggaatcaatgatagaccaatccatatttcttgcaaatccatgctgtaagcagcataaatgactccaaggttaagtacacactcacacctgttaaggctcaatacacgatcataaaatgaagaagaacacaagacattgataaagtactatttgaacgtgcaagtaattagtaatatcaatgtctctaatgaaaaatctttgtgctattacagataaccatacctgttgtatctgaccaggtccaaactgcggaaaacaatggggaagacctccactatcccaaaaaaggatacattgttagtatctgagataaattatgctcttcagcacaaacaaatccataactgcaggaattaagaaacctttgtcctaacaatttttcaaaaagaaaaaaaccaacctgattggtttcttcttattgaatacagcatctggcctaacaaaaaggaggtccttgccatttggaactctccaagatgtaatgcaaccaccatataagtatatatcagcttcactgcaaccacaaacaaaaaagtattatctttatctatccactagtgaaagtctaactaggaatccaatctcaaagctcatattatcatattattggctacactttaacaagttctaaaatttatcatcttgaaatgaaaagaagaaacaatgcacccaaaagaaagcacaaatgaacaaattgagggaaaatggattcacatacctaccctgagaagaagtcaggacaaccttgggcaatttcccttctccttctgtgaccttaactccaacagaagtagcctcactgcttaagcttgcaaaagtcatacctttatacctatcacaaacacaattcagttgtccccaaatgtcaattcaataattttcataataagaatatcgatagaattgaatctaaaatccaaaatgaagaaataaaacaaaatcaaaatttgggtcttcctgaaaaatgaaatgtaaaagtgaatagtgagtaaaaggagaagctttaccggttaactcggcggaaggaggaaggggtcggagttgggagtgaaatgggcatagaaagcatcgccatctctgtctctacgaatggatcagtcacttcgttagaattcagccaatgattcacccaatattctctctctaactactcgttcagttttttttttt

SEQ ID NO: 190937 - DNA, 2209 bp, Cannabis indica
gattattatagcttcaagtcataatttaggaataatattactgattttgttgtacattgtaacattactctataacagaatggtattgtgttggagtggaactacattcctgtttacaacctgatcccatgtctatacgttgtaaccagagtgtttgcttggggaggagattttataaaagggcaattttctgttatagcccaagggcaattttgatgaggagtgatgttggggttgcttgtcagatgtggggtttaggagtgatgttgatcgcgctttagcaacagtgaaacaattctggcgacccaaattcatcattaattctatcaaattgacctgagaaagatgatatctcaaagcagtcgacttgaaacgtgaaatccaaaatgtgaaaattaattcaaaatttgaaaaactaaattgtaaactaaatttacaaattattaagatgtagacttgtaataagtgatctcgagttttttgatcaatctaaatcaggtatcatctaaaatacttataaaaacaatctctcaattttgattgttgcattaatgttgattttttttgaaaaaacaacgttagaattattcaatttaaatttttaatattgcgacaaaaaataaatataaaataacatgtaacaaacaaaagtgtatgtgagagaatgctaattttaagattcacgtccaacattacgagaactcttccatcttaaaattcttggagacaattgttaacccaataatttcaaccaaatggagtaatctcaaacttgacattactctatgagggttttaaaaggcccatcatgtgtttgtaatcatttgaggtattttaaatggaggtcgatgggcacgagtaaatttaataaggccaacttaccaagcaaaaattgttggtgaatttagataatgatacgtttagaattgaatttggtcataaatgtgaaagttgtagatctctttcttatctttgtaaagcatcttgaatcgtctgattccgagtcatactgaaaaagttatagccaaaatactaagtccactgagggcgcatcaacctcctacgaggtgacctgcaagttggatctctttcttatctttccaaaaaattttgaatcattcgattccaagccttattaagagagttatggccaaaatacaaaatccaccgagagtgcgtcaacccagtgcgaagaccccctgttggaaggtgacctgtgaagactccttgtttgggaggtgacctgcgtagacccctacgaggacctctttggtagcgactcgttgttggctcttcgagggtttggccacctgaagacttctcattgtctcatttgtctcgacaatgctcaaacgattcaactactagagatatagttagctttggatctaaacacttagtctatgacaattgaatacatgcgacaatgtattaaacttgaataagagtggcgttataatgatcactataatcattaatcataaaagtctatctacaaaacagcagtaatacaatcaaagtaactagacgtaatcattcaaattactcttacttaaaatatcttatttgggtgtaatttcttcaattttgattagtaatagttaattatcaaaaaaaaaaaaataagtaatagttatcggagggcttttttttttcaatgtagaagggtatttttgtcagagattttgaaataaatcttgtaggctaactcttagcccgatgattctcgagtctcgatctctgaaaactgaaatcgcgaagcaaccatgtcagggaaaggtgccaaaggtttgataacgggtaaaaccccagccaacaaggacaaggacaaggacaagaagaagcccgtttctcgttcctctcgtgctggtcttcaggttttttattctctttaattatctacattttaagcttcaacttgtggattctttttcagttttggttctgagcagggttcatgtgtttgtttttctttcatagcttcattctttcaactgtgtctgaatttgagccatgttatttgataaaaaccacttctgatctgtgtttgagtatgggttttttttttttatttatgaatatctttccttaatttttataaatatataaatctaggagatttagatttcggaaggatagtttagggtgagttaatacaataaaagagaagagagagaggatggtaatgatcaatagtgaagagtgtgag

SEQ ID NO: 190938 - DNA, 1134 bp, Cannabis indica
aaggatctctcaccattaatgaatacttatttagataagaatctgttgatcgtctaggatctattggtcacaaaatttctataaaagaacatgtttctgcatttttttaaaggattaccatcagtttatgacacttttgttatcttggtcaactcgagaaatgatcaatacactgttgcagaaattgagaccttactgttatctcaaggacatcgatggaaaaatcacaacaaagagccagattatgttaatcttgctcctaattgtggtctttgtgcaaaaccacaagctttttctatctttcaaaactctgtagataacagatcttactcagatcgcgcgtggatctaactccaacacctatggtcgtagagcatggagtccctatgttgttaatcgtcgatcgaacaatgctagtcccaactcaaccaatcactcaactggtcgaggcaccacaagctcctccataaatctcggagtcaatataccttagcatgctggatccaaacaagtctgtcaattgtgctcaaggactagtcgtactgcatctcgatgctacccaagattcaatatggatttccctagagctggtgcagctaatgtcacttagtattcgtctcaaattgctacacctgacactgtttatgatgaggccttgtaccctgacttaggtgccactactcactgcaccacaaattcgacaaattttacacacaagcaaccctatcttggatcagatcaagtgcacatgggtgacattccttctttgatggaaaatatatgatacaattgtatgtttattgttgacttcctcttcctcttcttttttctttttaaacaagattcattaattaaatcaacaattacaaggaaatggcaggccaccctcaatagcttaatgagtataaggggagaatcccaatctatatgacactaactttattcaccaaagtataaatgactaataaatcagctaccaaagcataaacactaactttgttattaacttattcaaatatatatataactaactgtaagtcttattataatatcttttaaaataaaaatttaatgtataattgtgtattctaattttattcactttatttgaattaactattatatcacctaaaa

SEQ ID NO: 190939 - DNA, 2981 bp, Cannabis indica
atcagcagttagggtaagttcctgttacctttttaagtaaagttgggttccaacaaacgccacatcatcatacgaattgaacaggacaagtaagccattgcaagacgacccaaaactgcggtagtaccgccctcataatcgattgggtgattgagttcgacggcggagttaagattatccaggtccgacccagtagatgtcgctccagctgagaaccagaccggcgttggagtagttgaggtgacttttgatgaaatcagggccgtcgatcaaggagcaccatggcttggatacgcacctgtagcggatgaggtccttgacggaaagccgaacaagtatgtcggtgatgatctccgatgggagggtcgtcgtcattggcggtcgttgctggttacttgggtaagaggttactacgatattttaggtagagtcaatgggtcatagcaggagtcacattgaaactatggtaggggcctagctagggatggattgtacaacaagtctcgtctcatggctagtgggattaatgtgcaaacgggtacaccttaagttggtgcacctacctacactaacactagcttccaatcaaatgataaaaatcaacccaaaatacaccctaagctagaaaaagattaaaagaaactcagtctacaaaaaaaaaaaaaaataactttacatttattggacagtactaccttttagaggtaaattgattagttatattctttaaaagtaaataaattaaataatatgagacgccaatagctatatgacaatgaagatgatacaagtattgttaatcgtgtaattagttagctttattttttaaaatttattatattaaatcttttacggtctaaaatatgatttactgttttgataaatttttaatgacttaatttaggggtcattagaaataagtatgcatccaaaaataagtatatgggctatttaatttaatataagggtgtttaagctatttattttttatttttttcgaaaaataagtattgattaggatataatttattctgttaatccaaaaatatatttatttatgcttattaatttgatttatgcttctagatatattacagaccgaacgagctcaatgtataaattgttatcgatatagctttttattgatgttgccccgcaacaatttttttggagttcttattttgctaaacatatcctttggctagacaacaatgacttatctttcaccaagtaataatgtcttcattataaatcataaacttttaaagtgacttttgttcaaataataataataataataaggtgattaatcatttcaaaaataaataaaaaaaaaaagagtagaaaaagcaaggatgagtactatagtttaatctaacaaagataatttgactgttaagaatggatggactaaagtatattcacctcaaaaaggattatgtagcttcattgtacgctttagtctagatttaattccaccattttgttcttagctttgtttatagctgctgagaaagactcaaaatgatatttacaaaaaattttaagccatgttttcatggacattatcaaatcatatggaaaacctacacaataattattagcagttattagaatgcttttctaccctttgtagtcctttgtttatatatttactgttacatagatcaggcaaaatttatgtgttcgttgatttttcatttactatgatacgtgtttactttcacatgttgtgtgcgctttgtgaatttaaagcaaaggtaattctatgtgatataattatatggagaatgaaattcgaaacatatgaaatgcactttagtttcaaagtattttaacactgagcttccaaaacatgacatgaaaagctggtcaatgttccatcccagagtacacacaactgtatcaatgaaccctacttttgttttttgaaacggagactgaatcctactttaaaactactaacatggccaccttgtcaaaaaagagtttaccaaaatatgacatgcaaagttgaacacgattcctccatgcgagactcaaacatcgaactaatcctgatcagtcccctgaaattaaaaaagaaaataaagaaaaagaaccatgtctaacaaagtaagaaaataatataaacaaacatatatatacctgtgcttccatccatttacagcaccagtttgaatccctttgacaggaaatcatccctactcaatttcaaagcatggaataatgtatgtaattgcaataagattagcaggcaaaattcacacatatctagcttcacgcatttagtattttaagttaaatttgatagtattgagaaatgaacagatgtacaataaccttctttcaatataatatatatggaggtttgtatgataaacacaaaagtgtagttagtttccagagcaaaaatgagagctataatatatagaggaaatttatcaaagttttttaaatatgaacatgattcacatcaactaaaccctgaatagttccctgaaactgaaaagaaatgctgaagataagattagaaaagcaaaatgaaagcatgaaataaaagctccaagaatcattaataaatagctctaaaaggagcatgtgatatattataactattagaaaaattctatctctaacaaattaataataataataataataataataataataataataaacaatataaacaatacctgtagcgctagcgtcattcacaacactaatttgaatcccttcgacaagaaatcatccctacataaaagcagaaaaaaatgtcagtattagtgcattaagattagcttgcaatattgatatgtcaaagtttcaaacatttactattgggaagtactaattagctactaaactaaggaactaatttttgagcatctaccatgttgagttgacaattggaaacctaccaagtcttgaacaatatagcagctacatctctacctagcttctttcaattgttctct

SEQ ID NO: 190940 - DNA, 2684 bp, Cannabis indica
tattagtgtgggcatgcattttgttattcagactcaagaacttgatctctatcttatagttataggtaggttactacaatgatcgagtataggtactgtaaatatatagtaagtagccttggtcctggaagcaatcccatcttactcattaggcttcatcaccatcaccaaaattagtggggcttttggttgttttaaactattctactctaccaaatgtatcaatgacaagacaatataccataatgtttaactatgtatttgatatcatcctaaataataagttactattcacaagtcttagaagcaatttttcagataatgcatgcaaatttctttcctggctttacatattgttttgagttgatctacaagggcgctgttgcttattaaacaaaaagaagcagaaaacaaagaagagacaaagatctatatgatttgattgtaactatgaacctgatatcaaaacatcccaatggaaacaccaccgagcttgactcggcatacttatgcagttaaatacaaaatctgattgatgaaatttgaaatgaagataaagacataaatagtgagaaaccaagactctaaactagaaaaggaaatatgtaaaactgttcaacaattgagactcttgactaacaaagttccgcaagtgaaatgttcagctgtgataccttctacatccagctaccacaaagcaattatgatttaacaggttccgctcgaggcctccacagtcctagtcgatacttgtgggtgtatttcagtatcagcttcctctggaacaatacaatcagacgtgattgtaagtaagaaacgaataatccaaataaagccaatcatgcaatagggcacaacacttcatactcaaacctaagttcttcgttcactccacgcttcaataaaaatttactagtattaacaagcctaaaaaggagaggaaatgtaacgctagctcatacaatttccgattgtaaaaacgaaatcaatcaggcaatgacacatgaactctttgagctactagctctaaactgaagagttactcccattgaaaatggaatcaagcttccaatccatctaacaacatcatatccaaccagtcacataactataatatagctcctcaaagaagtaacaggctgaatttccaatatgttcaatgcactaaaactcagcaaactcattcaaattaaacaatgccatattctttattaaagcctatgactttgatctgatcagacatttttctgaatcacgaactaatgtaagcacaaactcatccatattaaacaatactaaattttagaaaaaaggatagatttttacttagtttctgaaagtatatatgtatatatgtagagtgagcagtattaggataacattacatgtttgcaagggaccccaagtttcttgagtttaagagtacgagtaacaagaagcttctggaagtcaccaatctcggattcaagcttacccacatgggtttcaacccctttaccaatcccattcaaaaattctggtattccaactttcactgcagccaaacaattactacttcagttttttttttcccttaattattagcaatttgttcacataatttcgaaacaggaaaaaaaaattcatatactagggaagcaaaaaacggaagtaagaagatggggaaatggttatgaaatcctgagacttaccctcataaggaaaggattttgagaagaatctagcaaaagctggggttgtgtaaggtgtagacattgtggttttggcgaagagtaattgcttccacgccatcttcaaagattgtctctcccgctaatgctctttggattatagtattgacactacacaacaacctcgcaacctcgccgccgtttatggttaccgtcgtcgttgggaactggaatttgggggggggggttgggggttgatgtgtttaggatttattgcgatgatttggagacgggtaaaaaagtgggtttcaccgggtcgagacacgaaataatataacattttagacctgtattttgcaaaaattatttattggatcatctgttttattaaatgacaaaataactcttgtatttttcaaaattataaaaataagactctgagcttaatttttgacaactttttttttgaataatttgtggcataacctccttagtagtcaggtttttgcaactaaccctcaattctaaaatatttatttttaaatatttatatttaattttttttattttttttaaatatttatttttttggaccaatagttaactgtcaaaaataaatggaaatggctaagtgctaacagaacttgggtttaagaggttttaccaccaaaattttagaactgggagttagttgcaaaaatctggccacctaaagaggttatgccgtaaattactttttttttttttttaattataaccatttttaattataaccaacttgaagacaattcctaacacgaaaagataaagaaaatataaacagttttgtcataacacctttagatcgaataattattaaattttattttgataaaaaatcagttcaagatcttatttatactattttagaaaatacacttgtatctatacataaatattttttagatatgtgcatttcataatttacgcacaacttctttctccacaacttctcttatgaaatgaagctttata

SEQ ID NO: 190941 - DNA, 1969 bp, Cannabis indica
aaaaaaaaaaaaaattattaagcactccaattgctatgaaatttaattcaacttccaagtcaaattcatttaatataatgtacactaaatttttttaaggaacatatttgttaatattacagttcttattacctaacacagttcgtacctgttttaaaattctcattctgttgaactcagtgttacaagcaaatcagattacaataactgaaacatggctaaacaaatttattggactataaagcacccttaagaaatagtgctccaagataagtttataaaataaccttcttggtttaggcaaatatttaccgagaattatatcaaccaataatattttacacaacaacaaaaagggtctgtaagtctattattcgctcattagtatgggagaaatgaatgaaataatatgttttaattaattggaatcaagatttagcttcgcttgcaagagtcaatctcacgccatcttcaaatgaaactggagaaataccaagtgtctgaaccagttttgtaatgtccattgatatgtcagcaggggatttcactccacgatcaatcttaaaatttcaacataaaagaaataagccacataaatgacaaaagatcatcaaaatctttgttaactccctcccagttgaactactttgttatactgtccaatattgggaatttgggagtgctgatcttgattcatcaaacagattggaaacttgaaagaatgtaatgctaaacttactgaagatgcagacacggatttaatcaatgatttatcgtaccctctgacgtctgcaactatctcggccatttgaacacgggataccctgtctggtcccccaacatttagtaggaactgtatttgcttgccttctgaggaaagaatcatgaataccacatcaacaaactaaagtgaaaattcaacaatggtaatggacataggtagaatgaacggacatctgatacgttcagctgtagataagaacacagtaagggagggaaaatttgtccagcctatccttttcttttatacaatgttttgcccccagaaaaagcataatgatatacaatatttgcccccacaaattaccagaaaaagcagttgaaacaaaaatatatgtagaagggaaaggggggtaatacatcaattttcagtatttcctttaaccccttattagcccactatgttattttccttcttctatttctctagataaccaaagaggaaaagatttccctattctatggtttccccttttatttgcttttatgttttcccttcctagagttttccttgagaaccaaagtggacctttaaagatggatgaagatggcgttcaaaatgtacaaaagagcacaaaaatttgtagcagaaacaacatacatgctaacaaaaacaacatacctgatatccatttttctgatagagcaagtatgatggaaacaacatccttgacatacactgggcagcgaaactcatcatgaaagaagtcaactgcatttcctttggaaaggacactatcaatccactacatgaagtaaacagaaaccgatcataacttaggcatagagtaattaattgggctaaatactcagacaaagatcacttagattaagttcttcacacatgtaagcttaactcttttaagcaatcagaatggttctagataataacattgacgcagaaaccaaaaacaaggaagctgaaactcataaagcttattgcattgattgaaattacagcagagtagataagagtcaattaaaaccaaatataaagacaaagaaatgaaacaaaaggaaaaaagtatatatcattagagcagttacacttatcaactattactactcacatgaagccggtagcatagagtgagacttgacattaatctctatttcattttactacgtaatcacctggcaaagaagcataaaaaacgaaaataaaattatattattttaaatctttctc

SEQ ID NO: 190942 - DNA, 2404 bp, Cannabis indica
ttttttttttttttttttagatagacattatgtatccacctcacccaaaggttctctttttttgaagctatagcccaaatatacttcccaatggctgctttattctaaaggcaagtatttttgaagccaagccctccttctgccttctgtttacatagatgatcccatgccacatagccagggccagttgtttcaaccatacctttccacaaaaaagcacgaaaaatcgaattaaccttcttcaaaacagtttttggaagcaccataatctgtgcccaaaatatatgtaaggttaataatactgaattgaataaagtagctcggccagcaaaggagatatttcttgttccccaaacccgaattctctacactattttctcaactagtatgtcacattcagccactgaaagtcttcgagaacatattggaatcccaagatattttaaaggaagcatgcatcttgagaagccagatgcatccacaaccctctgagcttagaatcttccataccacaacagtaaaaggctgatttctcttcacttggtttcaatccagatgactctgaaaacagtttcaatccctgtagtagataataaattgatttaaagtccccatgacagaacaatatcacaccatctataaaacataaatgattcagcttcaaatccgaacatctatcatggaacttaaaatcctccatatcccaactcgagttagtactctagaaaagtattccatagctagcacaaagattagaggagacattgggtctccctgacgaatcccccttttagcctcaaagtaaccatgcatcgagccattgaataacaggctgaatctagatgttcttatacaaattattactaactgaataaatttttgtggaaagttaagtgcctggagcatttcttctatgaagtcccattctagagtatcatacgccttccttaagtcaagtttaatcatgcagtttggtctagttgctttccttccataatgctttaccaaatcctggcaaatcattatattatatgctatatatcttccatgtacaaaactactttgattctgggatataatgtgaggcaggatcgatcttaatctaccacaaatcatcttagttgtaaccttatacatgacattacaacaagcaattggccagaaatcacttacattgctcgggcattttactttcggcgtaagtgtgataacagttgagttcgattccttaagtagcttccccaaatgtagaaaggataaaattgcttggcatacatcctcttttactagatcctaattgtcttgaaaaaagtaactgctgaacccatctggccatgacgattaatttgcttcctggaatgctaaacaaggcctctttaacatcatcaatattaaaaggatagtttaagaatttttgctgctgctctgttagaataggcccctggtttaccaccttttcgttcacagacttccgttcaatcattttagatcccaacaaattcatatagaatagcaagaaagcatcattcacctggtttggctcatccacccagtcacctgccatgttttcaataaagcatattcggttgacacttcttctagctctcaagctagcatgaaatagagtcctgttatcatcctcttcttttagccaatgtatcttcgctttctggtgcaagaaagataaataagagacacgaatctctttatatctcatttgagcctctaattcttgctggcatcggacttcatttagtggctatttttggagctcagtttgacatttgcataattcttgaaatgcttgaatctctgctgcatttatatctcccatgtcctctctattcatcttcttaaagatacttttcagcttttttaatctcccaactagcttgtagataggagttccctcaattttttcaagccaacatattttcactttctcttcataccctttaacattcttccacattcggaaatacctaagtagttttttccccaactgcacctccggatacacagataatattgctagcgtatgatcaaattgaccttccgttaagaagactacttccgcattgtcaaatctacccaaccattcttgattagccatcactctatcaatcttcgagtgaatccttatttcccatccttgcttgttcgaccatgtataaaaggagccaataaatgtgatatcttcaaatctacaagcttctacacattctctaaaggtcgttgacttactcggtctaactatattccccactctctctttcgaattcaaaatatcattaaagtctcccatgaccatccacgggttggacatgtcctttgctatcttagtcaagttcttccataaatcctttctcccttcctaatccattaaatgcatagacaaaatgtg

SEQ ID NO: 190943 - DNA, 1347 bp, Cannabis indica
tctctctctctctctctctctctctctctctctctcttgaaaacttctaaagaaaacttgggccagaaatgttgtcacggccctcttgcatggatatattggatcaatcaatacaaccaggcccttttgtccagcctgctgtgctattcttttgaaaaaattaaagaaaagaaaaagttacaaacaaagtatatgaataatgctagtgtaaaaatacacatagaaagagcataatatgcatgcagaagaatacatgatgaaattgattcattcacacgttctagtgtgtgagaactgagaagggaatcttccaagttgatggatgcaacataaaagaatttgcacccaccgaaagccacctatctcgttggctatgcttctgcagaaggattcaaaagaaggtgattgtgagaatctggtataaattgaccacagcccttcaagaattttagcacacttttgctatgtagacagtgagtgtgtgattattattgccataaaatcttcaatataaggctttacacgtatgtagcataattgcattgatctcaccacatgatcatgttgtccatccaatatctagggaaagatccacatatcatatggttataaatctaagtaagtctatttatatttgaaagttaatttttgccaacttgttcagcctaataaaatactagtctttatcttagaaagtagcctttttatgttctctttttatagtttgattatctaaataaagctacaacctcttttgaatgttcttcttcaaagaaagcagtccaacttattctgtccctataaatagtctaccaccatagctcaactacaaacaacttaaagctatagctagtttcacaacaaactctttcccctcttgtttagcttccatttttgaagtttaaacctcagttttcaaaccataggatcgaactcaattcgggattcgatcctattggttttaacaagtttttttactaaacaaacatccaacaactaagatggacaaggtaatgagattggcctcagagaaaggagtagtgatctttagcaagagctcatgttgtctgtgctatgcagtcaacattttgttccaagaactgagagtccatccaattgttcatgagattgatcaagatcctgaaggccgcgaaatggagaaggccctttcgaggctcgggtgcaacgcgccagtgcctgctgtattcattgatgggaagcttgttggctcaaccaatgaagtcatgtctcttcacctaagtggctccctgattcctctgctcaagccttaccaggctctatcttaaattaacacttatctccaataatatgttggaaaaacaaaaa

SEQ ID NO: 190944 - DNA, 3199 bp, Cannabis indica
tggccacagtttcgagaattcattctgtcaccgatgatgtgatccaagaaaagagaagcttttcttgtgccattgttgaaaagaaggatttggatcatcattgacgagagaccgaggtggagacagatctgtgagcaagattttatccaattcatgaccaataatcgtgggtagaacttgagatttccaagctaataagttagtttgatcaagcttcatcgtaagagaagaggtaagggagtgagataaaggattccaggagggagtcgccatagtagccggagttgcatcaggatcagacacacttgtaggggtcgaattgtcgccagaagatgccattgacaaaggtcagtggctctgaaactatgaaaggaaagaaacaagggagaatagagagaacaaaaattagaaaactatggcaaaagtttgacctcattaaaggtgtttcatagcacatgtgtgcaaaatcgttacaaaacaaaattagttagtgagtattacaattaattacactaactgaaaaccaataccaacttaactaaatcaactaactaaactagacctttgttatcattacacattatccatgtgagatattctaacatggagaatgcaatataatgttagggaagtacttaaaagtatgagcattgctattggacaccaatcatgtttagcaccttctggttagcaatattccttaagagttattttcttaagttatatgagacccaatatttaattataccaatagcagtatgacaccgagaaaggtgctaggcatcaatagtactttttaataattctctaaaagcacaagtgtggtcaccaataaactagtctcatgtcatataaaaaaaatattctcttgcacaaggtctcacgttgtacatattttcatgctctagtgtacatcctttttacatgggtcaatatcataatactatttttatctttacttggtttctaaatacttgaccaaggttattggtttgaattttcttgcccctttgtattgacttatttattgtttgaataaaagatgacttctctttttctttttcctcggttattggtagatcttaatatgttacataaaattttcaaattttaatggaattcttgtaaagttgagtgtgacgagttacaaatattgaattttcttttttagtttgctttttctgtgatcgttataaaaagatggtgaggtcatttcccacaaatcatacatttattatgaatacttgctaagaacaaagcaataataataatccatggcattgaagaactccatcctcattcttttccaaattttcctttgttttgaactaccattactactacattctaccaaagcacaatcatggattagagcagggtattggaggtatgattctgatctccccagttcagaaatagattcaactctctttactcacctcatttatgcttttgctgatctaaactcttcttcatttgagctctccattgcttcttcaactgaagaaaaaatttccactttcacagaaactgtcaagaaaaagaaccctttgataacaacacttctctccattggaggagggaataccaacttctcaaaaatggtgagcagttcatctcacagaaaatctttcattgactcttctataaaagttgccaggctttatggttttcaaggccttgatttttcttggcatttggccagaacaagcttagacatgagaaacatgggaactttcttccaagagtggcgaaatgctgcaagttctgagccgaaaaactgtagtgatcagagggaattgatactaacttcttcttgtgattacgcacctggtgatgaaaagaattcttgtccagtggattcaatcaacagatatttagattggatataccttttggcctatgactaccatacacctcaagaggaaaacattactggcgctcatgctgctctatatgatcgttcgagcaataaggacacggcttatggtatattggtttggagaaccagatgcctttcttcttccaaaatggttatggcattaccatattatggctatgcttggacactgttaaatcctgcagataacggtgttggagcaccggcaacaggtcctgctgtaacgcaagatggattaatgagttacaaacagattaaaagtgtcattaaaaacaattcagctcaagtgaaatacaactctacttatgtggtaaattactgctcatatggatcgacttggatcggttttgatgatgttaaagctgttaaacagaaaatttctcatgccaagaaaacacaattacgcggctatgttgcatggcatgtggctaatgatgacaattggatgctttcttctgctggtaataaagcaaagcttagtagcatagttctttaactttctctccattacaacaagctaagatgattcttaatatgaaatattagccaatatatatgattcttatcatgattattctttaatatctttcatagctaaagaagaagggagcaagaaaaaacacaaggcaagaatgttgttaacaattttgttaccaatagctacagttattttgctaataggtgccttgatgtattattgcttactacgcagaaagcacattttaaatggtatgttctcaagttactgtttgtagctataaaatgtagatactttcaccttttttcactgactattttttattttcttttgcatatgggaatgacatacagctaaagtaccaaactctagagaaacatttgcagcaacttctggagattttcaaagaaatgatcataatctgaaggtctatagccttgaaaagttagaggctgcaacaaaaggattttcaatcgaaaataagctcggtgaaggtggatatggtcctgtttacaaggtgacctttcattgaacttgaaagaaagaaaagtacattctagccaatgcatgtgaagaagcttaggattcagtttgtttaagatttgtgtactaaatataagtttctacttttttagggtgtattatcacatggacaagaaatagctgtgaaaaaactgtcaactacatcaacacaaggatatgaggagttcaggaatgaagttgaacttacagcgaaacttcaacatgttaatcttgttcgggttttgggattctgcattgaacatgaagaacaaatgctgatctacgagtacatgcgaaat

SEQ ID NO: 190945 - DNA, 1897 bp, Cannabis indica
gacctttattattattttaatctattttacctaacccatgaattataatagataaaaagtagaagaagaatatgcaaatagaataagaaatactaagatttatattccttgctatgtagtctatgtaggaattgaagttttagctaacaattactatgttatgaattgatctattctcccattttggactttccaattaaatgttatccccacaatcccatcattatgtcagatctaccaattattcaactctctctctctctccaacaacaacaaaattaagtccaaattaatttgaagacattgaatttcatcatgaatctacattccatgctaattaaacatgtgttgattatcatcaattcatcatcatttaggatcataataataaagagctaatcaataaaaggctatttattcttttttggatgataataacatggaaacaaaacaacaaaaagctctatcctattattcttcctccactaaaaaattcatgtgaaccaacgtatgttaaaagtgaatatttttacttgggatttgattgagtaaaaagatccaaatagtaagacacctcataaagatggttactggttgaggacataatataaagcgttagttgaagagtcactgtttcttaaaagtgactataaatgtgacaagtcccacttttctaagcagacaaaatttcacataacaaaaatccaaatatatatctacactttcgattcttttgtgttatatttatgaacacatttaattagtttggatattggaaggctcataattatttattgtaatatataacagcttctccttctagatataatagataagggtaatactaatatagtttttcacaatggaattcatttcaattttttttttcattttatatatatatatgatagatatatatgttgagaatgatgaagttacattttaaaattaattggtaatgagtagagtagctcatgtttttatatagctcaaaatttttatatttgatccatgtgagacaatatccaataaaatagttcattgagtattattctgaaaaatagagtttggaccagaaacaaaagagatggaaattaaaatatgtaacaaatacatttcattttgaataatagagtttggatttgatatggaataaatggaaataaaatggatgaccaaatattaaaaacttgaatataaataaattggtatgtactgtttaatggcccacatagagggaaaaaaaataaaaaaagtacaaactgtttttttctgtgctagtgagcagagaaggctagaaggtgcttagggtaatgcatgtgtttcccttcacacgtttatgtactgccttcattgcttctcttatcttttcaaaacttattatagagatgtgtcaccttcctgctcatataaaattatattattttttatcttctcaatatgatctaataatctaatacattcattaattaatcccttcaactccacccaagtggtacatacacaaccctatattactgatctgtcgtgaacataatagctagacacaatttgcttttcttttggccattaatagtcaatggtcattgttttcgagttttcttgtcattttccttctaattccaattttgacttagaggggtcaagaatatttctagtaatggggacgtaaatatattgttatggttaagaatcatgaataatatcaaatcatgtcactgtttgggatgaatcaaaatgttaaaatagaaatgagaatataatcaatttaaaatgcgtaaaatacattgtaaaaaaaaaaaacttaaatactttttctttatcttgtattgtaatgatcaattttctatattttacttaaataataaaaactaactcttcattagtaatgacattt

SEQ ID NO: 190946 - DNA, 4203 bp, Cannabis indica
caacaacaacgcgtcccctccaaaattaaataaataataaaacatgttactcaaatacagctttcaggcaatgaatgaatgcatgcatgtgatttagtgagtttaagcttaattaattaattaattaattagtacatgttgattctccaataggaattggccatatatacaagatgggcagtaatcaaatctacaacaaacttaattaaatatattattctttttcttttaagagagggaattattattagtattcttcttaccttccaaaatccatcatataacaaaaaaagaaaagaaaattgaaaagctcatcatatcaaactttatttccagtaaatggaagatgaaaattcaacactacaatacatcaaaaagaatgcctgaacagaatagaatacatattatgcaataattaataagagaaaaaaaataataatgataataatatatggtatatgaaactaaaattttaatctatgttttgggttttaacaaagatctcaggtcataacaaaagacagtaaaactaagaagaaagatttctcattacttctaaaactgttgtttgcatatactaagagcattactttataaactgttactgttgctacttctgttgtgtatatagtttacctcagtttcatgcttgattcctctgctcattcttccatgattttttcgcaacctcagcggatttatcagtggattcactgttttcaccctttggtttggagaagaaaggatcccattcatggggtcccacttcacgttgtccttcttccaacaaagcatacttccaactgttctcttcaatgaagttttcatctgtatgaccctcaatgatgtctctcctcaagttagtaactttgtctataattgcttgtacagaaacatcaaaggcatctttgagggtctccaattttgagcgaggatctgcatatacaagtgttgggataaggcttataacattctccctcatgatcttgacctgttctggtgggatttgaagaagcctttcctctatgctgatattcctctttcgaatatcgtcttctgggatgaaaaccgaatactttgtatagtttttagggagatgccatgtgtattgtgtgtatgctgaacccggatgaaagaagacgggaatgcaaccggctaacattgaatcgaaagcagatcttcgagtgtaggaatcgccttgcggttgtaagcagaaaagagagctctgaaacatctgcattatactgcttggtaaatgacacttgctctccccaaaatcacattccaacagtttcccaactttggaccttttgcattgatcaataatctggcctctgatggatttgggattgtcaggacgtggagcaccagcaaaagagaagagccactttcgctctagctttctcattcggtcctgccagacgaatacatcttcgtcttttgctggatggaagtatgtgggatatggaatgccaaagtcattagcattccatggacttgattcaacaacaagcatagacatattctttgcagctggtaagaaaagaagcttgttaccccaatccgattcttcctcagacaatcttctaaaatcccaagttattctaccagcaacaagaaaatgatccttgccacccatgacatcccactccggcctcttcataagccaatcaaccaaatcaagtgaagctgcatcccttgtcgaaatattgtatccccacaaataccgagcaatatcgaaaccagcataaaagggtacaaaaacagcagcagcaatagatgaatctcttgtcaagcattcatattgcttcatcctgttattgaatatgacatcaacagcaaattggtttgttgcataccaacctgtatccgaaaaaacaccctcaacattctctaatggaggaccaagtccagcattagtagtgaacttacacatattagtccaaagacttaaactcctacactccttcaacatatcctcattaaacctcgaaggaagttcatgaacatatatgtacctcccaccacaaggatcactcttgttatcaatggttctcattgctttcatgaaaggaaaagcctccttttcatgaacttgggtaaccacttttggaggagggttagccatttttcgaggactagctacacttctagtaggttttggaggaatgggaaatttaagattactgccactagttacatgagtaacaacaacagatgaatcaatgttatcaacagaaacaggctgtaatttgactgattcatctacaccattacgaccaagaacagcaaaatgaaaatacaacaacaaaatccagaaaaaagcagataaagctaccaaacaacaaagccgattatgctgattcttccccgtccctttctccatttgctcggacggaacactcgtcgccgaacgacgtctcattagatcaccaaatcctccccatttcgcggatcacattaaaagtttcaatttttcttgttcttttgcatcaattaacaacaacccaaaaaattcacatccaaaatttacatcaacaactgattccaagcttacaaacaaagtttctactgttacaaatctacaataatcaatacatttataatgaaactaagctaaatacatcaaatcaaatcaagaaccgaaataattggttcttgttcgagctagctcaatccgtaacgtaagaaactaacacagaatcaacgagaattgaatcaaagaaaaatgatgcagaggatacttacggagacatttcggttcgcctcataacgatccgagaatttttcctctggtttttggttagagagagaaagaagaagaagaagaaagtgaagcggaggagagagagagcgaggagagaggtgcttagtttagtatatataattgacaggagtgtgggcgcatgttagcaacgtgcgccgcgattgtctgttgtcggtagccgatgtgattgcgccacgtgtcattgggacgaacgacgtgtcggaccaaatatgagtgatgtcactcatcccttaaattacgctcgttgaaaatcccactattctgaatctgaactcgaaatttactaaaataaataaagaccattgctattaggtaccagtggtgcctagtacctttgcgacatgtggcgttgcgattggctagcgatactctttaaaaactattatattaaattatatgggacccgatatttagttgtaccaatagcgatattgacacataggaaagtgctaggcaccactggtgccctttagcatttctcataaataaattaaaaattgtgtacacgtgaaaggtgtagagtggtcaaattatgggcctagtcagttcaactaattggacctatcggcctaagaacatctctaaccgtactttctatttttcagagcatctctaacgctctctatttaaaaaaaaaataagctttaatcatacaaaaaattacgggataaattgaaaaatatcattttttttgtatccattaatcaaaaatatcatcatattatattttattaaaatatacccacttttttgagtggattgtctattacaccttcactctctacttaagtctaacatataacctaaggggtctaatggagacatcatctataaaagtgggtatatcttaaaagatgtataaatggaggtaaaaatttaaacaattaaagtatagtgaggtataccatgtaatttcttcaaaaattactctatataatagaaaattgataagagttatctaaatgtagagagctggttacttttattttaataaatttttttataaaacttaaaatactattactttatcattattttataaaactaatttatatttaacaaattcaaattataaaatattatttcaataatcacatactaattatagtagaaagtatagttggagcgacaacaataaaaatggttctctattttaactttttaactattcaaactaaaaaatagaaaataacattgaagatgctctagtagaggtacactaggaaaaaaaaaaaacaaaattagataatacctttatacatgataagaaattgatttatgatgatctagtaagtagttgggctcttagctacctatagcgttaccatgaagcccaacattagcctgaactgttggtccctgtgagctcatcatcgaatacttctagtcacatagggagggtggttcttgagttg

SEQ ID NO: 190947 - DNA, 1097 bp, Cannabis indica
tactcaacacaacatccatgtgtacaccaattgaagactttgtcgatcatgtatttaaactctaactcctctcaaacaacaatctacttagagcctcccctcaaataatcttttatccatcgagtctgtcaatctcacgagccttctttttctctatctaggtcatctctcttctttcacccagagcaaaccaacagtctgatagaactcaaccgtgatctttctttcggtggcttcacccattttgtttggggttatctggaatcttaactctgataccacttgtagaattgtcggactccacttattcttcattttggtatgatattgggtcaagtcctctcgattttgctcttgggtttcatcccaaaaaggtctcataccaattgaagaatttttccttgtattttaaactctaagtacacttgttactttaatttatgtaggactttagttgcccactcaatatttttcaatatatatttataaactctatgtaaatttacatataaaacattattaattaaatttaatgcaatatggtaccaatatacacttatgatccttttttattgctattttggttattcttcagagatgatacttgcaaccagaacaataattggaatttcatttgttgttggtcttgtcatctataaatggcgtaggagacatttatcaatatatcattcaattgaggaatttttataaagccaaaacaatctcgtgccaataaaatatgcatatttagatattaaaaagatatcaaaaggatttaatacaaaagttaggggaaggagggtttggaactgtatataatggaaaacttcgtagtggtcactttgtagcaattaagatgttagataaatctaacactaattggcaagacttgattaacgaagttattacaattggaaagattcatcatgttcatgtggtacagctagtgggtttttgtctggaaggttcaaaacgtacccttatctatgaatatatgtttaagggatatctttgaataataatcttctccggagaccaaaaaataaatgattccttaagcgatttggaaatatttaatatctcacttgggattgctc

SEQ ID NO: 190948 - DNA, 2127 bp, Cannabis indica
agagagagagagagagttgagattacccacagttgtgatattgaggtaacccagggaggcaaacgtcctgacaagtaattgtaagacaagtctctgcatatattgtaaaatgtaagcaaaaaaagacttgagatgcacaaagtttaaaagacatgtaatatggaaatgagaacagcatatagaagttacaatagtttgttatcaaaaggggttgataacacttgtgtttcccatttgaaaaagaaaaaaaaagactaccaaggtagtttctatcaaaagatgcataaaaaatttgatatgagaatgtgttcttattggcagctacatgataatgacgaggattctacaatgtaccttactattaactatctatctgtcattatgaggcatggaagacatttcagcaccctaacaaattaattttcaaaaggaacagactatctgtccgtcatcgagatgtcaaagctagtaatatattttccatattaacagtctatctatccgtcattatgaggcatggaagacattattctaatttgtaagaattttgttctgccccccctcttcattttctttgaaaataccttcgacgtccagaattttgttctctaaattaagtaacaattcttacaataaaaataagaaagttactgtaatgtcataaaatacaatgaaatctattcttaaggaagtatcagcatattacttacaagtctttattatgaagtaatccatttgacaggaatggttttacatgagtgcagcatgttattgaaggttgcaacagttgcagccagattcaatacaacacaaagttaatgctataacaaaaaatatggcttacatatacataagtgtgtcgctccattggagaggaagggctccagacaaactattgtttccaagaaatctgtagttttgatgatagatgccaaaaatgaaacagcaaagcagaagtcaggcaagttttaggcagatatcagattataatgataaaaacactacttaattctttacaagtgtgtgagattattcatattgaacagcaaacttgggatctcgcctgttaaattattgaaactcaaatccctgcaaaaaaaacaatgtaacgttacacaaagtaaatttaacagcttattggtattgtaccagtaataaagttttttgacatacagttgttttagatgctcaagttttccaatatcagatggaattgtaccagcaaacaacgcatttctgagaattctgttggaaaaggaggaaaaacaatgtgatgatatggtgagcataaacggatgggctgattagcgaaaaatctggtcagattaccaaataacagactttaatagtttggtaacttacaactcagttaaattcttcaaatttattatgaaatcaagagatgagctcccattgtatatatcactgattctcctacataattatttataaaaacataagtctcccactctagttggcatagtagaaagagagaatttcaaaatgcaatgaatatatttactcacagggattccaacaaggtcaactgagaaaaactggatggtataggacctacaatagagctcccttgaaatctcctacaaatttattttgagagacttgtgaacctaaatacccataataacaatgccatatatctactttagtaataacatcttaaaatttaatgcttacaaagaggttagcttcgtccaatttccgataaagtcaggtatttttcctgagaaaggactgtctgtggcccacctgatgttcaagaagccaaattatagtaagttgagttaacaaaattgtgtttctaaaacataagaaaagatttaaaacatggaacgcaaaatcttccttacatgactaccacatttcgaagattagcaaatgtagaagggatttcaccgctaacacctgaactgtctagataactgcaagaaaacacaaagtggaattctatgaatttcagatgagttatactttcccttacatgtttctataatacttgagctgaactaaactaagtgtcaattctacagactttactcaataacactgttggatcagacccaacttatctatgggccacatcattcttgcacatgtttttacttaagt

SEQ ID NO: 190949 - DNA, 1173 bp, Cannabis indica
ccaggtttgcttttctgctatatttttatgaagtatttttcaagctgttcgagtagtatttacaattttatgacgtgcacattacacatcatggtattaacatagtttgatcatctttgaaccaatgtgtatgctgtgtcaataatatatttcttgtttcattttgaagtggatatgctcctgaaaaccttattaaagtcctccaagggcagcgaattggtaccctctttcaccaggatgcccgttcattggtcccactcaaagaagttgatgcacgtcagatggcagtcgctgccagggaaagttcaagacgccttcaggtagcattttgaagtttcttgtgctaaacataataggtttccctgttagtagaacaggaaaacataataggtttctgtttccttttattgctgtgtccttgcctccaatacattttctttacgagtataatttacttggtgacattggtttgtaggccttatcttctgaagaaaggaaaaaaattttgctcgacgtagctgatgccttggaagctaatgaagagctcattaaggctgaaaatgaacttgatatttctgaagcacagctggcaggatatgaaaaacccttggtagctcggctgggtttgagtgcagcaaaggcatgtactaggttccagttgttattttgtgtgttgatttatatgtattttggttcctctcgagatggctcttgtatataacttttcatgtttcccttatgtttttttttctcttccctttcccatttttatctcaagaaatggtttcttatttgactattatatgcatatatacatatgtgtagatattcttttgctcaccttgctgatgaaagttttgctgtggttgacagattaaaacccttgcaaaaaatatgcgtgctattgcaaacatggaagatccaattggtcgcgttttgaagagaactgaggtaaatgaatagagtggtaggacgattaagtcaaatcttttttattcacagagcacactgcagattcggattttattctaggaattgaatcaaaactcaaccattttcttttaaatgttttacgcttgaaatgttggcggtcttcactatgagagcagtgaaagatggtctgtgctttgagtatctttttgaattttattaccctgtcttctctctctctct

SEQ ID NO: 190950 - DNA, 1310 bp, Cannabis indica
aaaaaactctttgaaccattatatctcacttatatttgtcacatattgtagagacttcacaacttaggagctaggaagattgtagtggctaatgtgggacctattgggtgcataccatttgagagagatatgaatcccaaatcaggggacaactgtgtagcattgcctaatgagctagctcaatcattcaacacccaattgaggagccttgttccagagctcaatgccaatctcaaagggtcaaagtttgtttatgcagatgtttaccaagttgttgaagatattcttgagaactacataaaatatggtctgttataatattattttttcctaagatttttagatgtgtaatgttcaactatttgaactttgctataagattttattttattttatttcttttgttttttaaaacaggttttgaatatccaaactcttcttgctgctaccttgctgggaggtttggaggtctgattccatgtggtcctccatcaaaagtgtgtttggacaggtccaaatatgtgttctgggatccatatcatccttctgatgcttctaatgtcatcatagcaaaccatcttcttgatggtgacactactttcatttcaccaatgaatgtcagacaactcttatcatcttaattcttaaaccaatcacaatagggtcactagaattttgttttgaatttatataaaatataatgataagtaatgaccttcttccattattaatgtcatattgagacttgtagccaaaaaagaaataaagacaatgtatatgtaatcagttgattgtaatgaagcagaatatttctaaattaagatataaaaatcaaatcattgaaggagactgctttaagcattgatttgaccaattaataaaatgatttgatcagctaataaaatctctttttgtgtaagaaattataatataaaatatgaagcattatgaatgatataaagatgcagaatgaattgtaagaatgtcaaaattgtataatgcaatgaaagaaccgaaatatctccagctattgatcctttgagcttcgatcccactaactttggatctacaaaagaaaagtaaaacaaaattagtgtgggtattcaaacttccaatttctaactttagatggacatccctaaatgtatacatggtttaaacttggtttccaatctttccataattcaaaaggagtttttgagaatgccttggttggaacttggtttaatatgtacacatatgtctttagagctttagtccacaaggatttagaaagattgaagttactgctaagcatactctgcaccatg

SEQ ID NO: 190951 - DNA, 1868 bp, Cannabis indica
taggttgggggtagggcccacggggaagttctagacaattgatatgcaggtgtatgaacttcagaaaccataagcaagacagtttgagatacctctcttttgtgacgatttgtaaagtcttgtttttcctactccatttctctcaagatctcatattatttaagcacggttttgttatgcttgtcctatgttgaatgaacaataataatggattaatgatcaacaagagtaaactacctgttcctgcccggcaaagtcattgtcggaagtaagaaagagcatgcaatggcattccttcctatcaatcgatgtccagattaatccaaattatcatttgttattcttttttagaaagaaaaaaatcaaaagagctactgcgaaatgaatatatttacatgctgaaatgactaattcattcatgattttagtttataataacaaaaacatctttacctctctctcataggaacacaaggacagttccagaaaccttgtcccacctcagcagctttgtcatcataatgcctgaaaaattatgccaagtaggtttaagaatgatcaaataacacaataaacatattaatctagaaactgggtagaagttatactgaatctggaaatgctgaagtgtgaagacaaatttaaaagaaaattttatacagagaataccaattacataccgacaaggacaaagaggtgcacccaattgatctttatgatctgccaatccctgttgcgattcaaatgtcatttcatcagcataaagaaaactatgtacaggttaagaaaagaaaaactggaaatcactcgcttaatcatagtcaaaatcttaaaacaaaaacagacatactgcattctcataaataaaaaactaacataactatctatgagtctgtagaaaattgtgcctatgtttaaagaccttcaagtatccattcgtagcacttgtagtaattccttaaaatatataaatggtagttcgggctactattattaacttatcatgtctcatatttgtaaaccaaaaaaattaagaacccacataatatacttcatcacactaactgctatctataatctatactatattacagaagctttaaaaaaaatgaatgaatcagtagataagactacataccttgataacaacagaagtgacccccttatcaacacagaagtatgttccagacctccgtgcatattgctctgagaacttcctcataagctcaacagacttctccgatggttccactgcaaaattgaacaatatattattactaaaacactcttcaagttacgtctttagattatcagatacaccagaaggaaaaaaaaggaaaaaggaaaaaccctaaaattaaacatcattagagtatcaatgaccaccagccatatgaaaaacttagaaataatattctgaaactcaaaattagggcacaaaaatcaattttgagtttctttgaagaaattggtaaacctttggctcgtattacacaggcacgacgagaacgagaggtagggagagcgaaggagggaatggcaacggtgaagcatgaagaagcttggagagtcatggctatggatttagctttaagtgcaacaactgaaactatatttgtattggaaatggaattgtagcacagaagagtaagagcaccaaagtaatttctatacaacgtgtggatgtaaattttccttatgttttcgtaaatatctatatttttataaattttatgtctgaaaatattattattatatgaggaactctttaggtgacacccctatcacaaaagaagatattttttatagcttttaattttaaatttaatagtagcaatttatttatggagtttttttatttttacact

SEQ ID NO: 190952 - DNA, 2073 bp, Cannabis indica
tggttaatctttgataaatattttatagttttagattaatgaatttagatgcaacttgaacagcatcaactttttcatggctatcgttttgaatggagacaaaagaaaaatggcctattttaaatcattacaattttgaattccaaatccaattagtggtgtcacaccttgtcacctctaaatgaagttaggaagtaattaatttcttgtgtttgatatgaaaagagttgtgtggaaaaagataaaaagttaagattagacaaaatcttctttcacattgaataaaaaaattgattttttataactttccacacttttttttacttacatttcccttaccttttttctttcctttccaaaatatactctaaagtttgacaaagcattataaatagtcatgatattaatctacctttctgagctgatgttgccttgggaactgctggaagtttggttgctgcaatccattcaatttcagaaaaagtttcaatgagaaaatgttactaaaagaataccaaacaatagttaatgcatatgaaaaccaaactcagtagccataatttaactgtcaagttaagcaattgtgacatacttctattacagaatgaaacatattttgaagacagagaaggccatggagctgcaatgttgtcattcagatcgcaaacgaagctgacccctgtagttttatcgtatgtggcatctgaaggcaagcttggtagaaggcatccatactctggaatcgaaagaagaaataaattcaagataagaaaagctctaaaccaatgaaaaacatgattttaaaccacctgttgagttatggaaattctaaaattcgagttacctaccttgtgatccaactgttgcttcccagttgtacaatgatacaatcaaccatcatatgcatattatatcacacaagaaaagcatcattatcagattatggacttgtgataataattataatagaattgtttgtttatagatagagtttaatcatactaaatacatacaagaatactgaccttgaagagaaaaagctttgatgtttatatgacaaagattataaatattcttagacacattagctttctgcaatttcatgccaagaaatgcggcacaattcaaagcttgtacgttggtaataaagctctgctgttgcaacttagatacataaatctccattgctttgcagcaagccgtctggttttgtatcacttctccacactcttcaacaacatgtgtgatattcggaaatactagtggacaagctgaaacatttaacaagcaacaatgaaaactagagatttacaaacattttctgaacttttagaaaaccatagttattttaatttttacacacatgataaagcatgctcacctttatttattttacaattcgtgagtcctctaagaacagtattagcagaaggaggatcaagtttactggccagccatcgaaggacaatattcttacagtcatcaatctgggataattgcgctgttgatacagtcccctcgctcaaacttgacataccattcaaggcaattttttgagcagcatctgatatggcattttggcaaacctgctcgcaacactcattgacatgatcgattttcctacaagctaaaagaagtcgtgaagagtctactatgctctcaaatgaatcagtactgataaccgggcaagatgcttcggtcaggtttactgctcgaattgagcatatcttttgaagcttaacatttgctcctctactagttagaatcttctgaacatctgagagacaatgctttgaatgagttaagtttaatgcaagcattccagtgtctttactagactgcccaataagattcactaaggtagcatcgaactgaggacaacatactacgttggccaaatatggtgcaaaagatgtccaacagtcagttgctgttatgctaagtagattatccacagctgaaaagtttaatttacagagtcctgaagaaaaaaaaatagagtataaccaatgaatgtaattatataaatcattacaaagccaaatattgattttaagtgcttacccttgttgt

SEQ ID NO: 190953 - DNA, 3845 bp, Cannabis indica
aaaaaagagtgaatattgattttaaagtcatattcattaattattttatctccccaatctactttaactattatattcttcaacgtaataaagagaaaaaataaaagtagattggttaaagtccttacatgaatatgatgatattgagatttagggcttctcttagagaagattctcaatttttttttggctgttaggaatacgatacgagaatgagtttattttagattaatttaagaaaaaatctagctatatctttatatataaaaaatgtgtttatttaatggtttttatcgatttaagaatataaaaatatttgagaaaaataataatgagtgtctgtcgtttatgctccaaggcagtttttttgtccattatggtctgaaggttacggtttttatcagtttcaagccccattacagaataacttcttaattgatctgcatccataccagctattttttctattgtgatcttactattgctatcatggatcctttaacaaataaatgaaaggaattgttaatcttgagatgaagatgaagtagtttttcctatgatgatgataacacccaggaatcatattcctccaatgatcacaccctttttgctactgtacttaccaggaaaccagtgtatttgggcacactttagaagcgaatgaaagtacattgggatgggcgctatccggtttgtatatctgaaaaacaacctaatctgattatgctctcttttggctgtgaaggagacaaagagagtgtactcataggagaaccatggcacttctaaaatcatcacattgttctttataagccaactgctctacaaagtgttactcctactgatctcaaattctaaccattttgggtttaagtttataggttacctttcctaagtaaaacaagaggattggcaaaagccttgagagatatcattggtgaattcttagatgtatataaggactatttgaatgtgacaaagcctttcttgagaattagagtaaaacttgatgtgacaaagcctttaagaaggggtcataatattcaactgcaacaaattaaagataaattctgggttaaatttcgatatgaacgactgcctgactggtgcatggaatgtggccgcttcggccatccatatcagaaatgttcgatttttctagaacatgtggataatggttttgaacccgcactgcttatggtcctaagatcaaaggggctgcattaccaaatttttggttatgatcggtatcgcacaaatttcttaaggggaaatgcttggactttgcttacccaatttgctagaaacacactatctgaaaccattccagccctcacactcagaaaatcaaccacaactaagaaaactcctctatggagagacttcagaccaacaacaaacacatcactatgcatctcatgcactgcttgctgaccatctgatcaatgggggaaatgacaatgaggaggaaggcacttttgggagtttggcatcaataaataaaaattctactgcaatgaaaattgatgcatcgggccaccataaatccaaactaggagactcttttaggggtgttacaccagcactttctgcaacatttcctcttcaatatgaacacaatatcatggagcagcaatccctcaaaaaggcagcaattaattctacagtgcctattaaaattgcagcaaaaacaaccacacgcgaaggtataaaaattgttacttcttctccaactgaatcatatttgtctgcaatttatatgcctggtgttggtcactcagaaggctatgttgcaacttatcctcctgaaacaaaatccattgtcatgcccaacctaaccaacatatttgtctactctcaacctgcttacccaaaaatatcatactcaatgattactaatactactgattatgacaagaacaaaaaaatcaatcaccaaatagagtttgtaaaggcaacctgaaaaaatgtctttgcaaaaaacactcaagcgggtgaggggacccataccaactctctcaactttagaattgtcaactgatgattagacaaaccagatggcttctaattctgctacagatacattcagtttcaacaacaacaatttgggtgctggtttccagccccgcaactagccatgaaaattgatagttggaatgtgcgtggtttggggaatccaagcgcattccgtcttcttcagttgcttgttaaagagaaaaatcctcatgttttatttattatggaaacaaaattagcttgtaatgtagttagccgctatcgttagtctttacatttcaataatggacttgaagtccctagagtaggtttgggtgggggtttccttttattatggaaggacaatgctgatgtaaccctatcaaattttaatgcaaatctttttgactgctacatggtgtgtgataatggaccaacttggcacttctctgccttctatggggcactagaaactcataatcgaatacacacttggaagctttttagagaaatgtaaggatgttgaaccattgttgccatgattagtgattggtgatttcaatgaaatcttatcaaattaaaacaaaaatggtggagctttacgaagcgagactcaaatggagaactttcgcaaagtccttgacctttgcaaccttcatgaacaacaatatgaaggtgatccgtatacattgattagaggaagacataatgtgaatgcaatccaggagcgcctcgactggtgttttgttaatgatcaatggcaagggatttttaaaccaattacaacataccaccttgattatttcatgtgtgaccatcgtgcaatttcagtcaacattttgcctttggctggccaaaaccaaaccactccaagatactctcgattcaagtttgagaaaatatggctaaatgataccgaggcatctgatctgattttaaaaaactggcaaaaaaacttacctggttcagctgtggaaaatttgtgcactaacattcagtcttgcacaagttctcctcaattgtggcaccatcaaaagtatggaaacatgaaaaaaaaaagatctcaagagcacaacaacaagtaacaaatctcaacaatgctgaagtacattctgcagcaacaatcttggagctgaaaaaatctgaagatatattggatgaacttttagcacaagagaagacttattggcaacaaatatcaagggtagattggctacaacgtggagatgaaaacacaaagttctttcatgcccatgcctccaatagaaaatctaataacacaattagatcactataaaatcaggctagggctgaagcaacttcaaaggaggaaatgatagacattatttgctatttttttggtgaattattcactaccacgggaacagatcatgatgctttgaatcaggtccttcatgtcattccagcaatagtgacaacggatatgaatcggttcctactgcatcctttacagtacatgaagttttgaatgcacttaactcagtgagcccagataagagcctcaggagtgacgggatgtccgcaatattttaccaacacaattggaagattgtaagttcggatgtaactaatgtggttttcaaagttctaaatgaagatcacgacatgagtattttgaacaaatcaataatcactttgatcccaaaaatcaagaaaccaaaagctatgggtgattttaggccaatcagcctttgtaatgtcatttacaagctgatatccaaagtttttgtcctacacttcaaagatgtgctcccttcagttatatctgaaactcaaagtgctttcctttctaatcatctcatcacggataatatcttggttgcttttga

SEQ ID NO: 190954 - DNA, 2192 bp, Cannabis indica
aaaaaatgttacctaatgcactatgttaataattttgtgttaaatttcagaatgatacactatatgaaaatatgcaaagattagtgttggcttatacatagattgttgtatgtttactgcatattcttatggatatgatatataaacactattaaaatctgtccaatgtaataattagtttagctaatcagagctcttttactttattcagttctttctttggccaaatgaagaaccatctactgaattgatataacatgtaaacagcacttagttttgactgttgtagcccttttcaagtgcttaattttgtcttaaaataaaaataaaaaaaattaaaagatcagttttttgtccaagaattatttacatggtccattcaaaaacattatcatacattttgtgaaggggtagttgacataaaaactcttatgacaaaatttaagacagacaaccaagagattaaaccaactgcccagaagacttcattaaagattagttcaaccagttcagatacattacaactggaatatctaccaatataaatgaagaagtataacagattcaatagccctgaagcatcaacaaaaagatcaacaaaattatgatacttgtttttactcaatatcatcatatcaaagtataagatttacaagttttgtgttccatgtgtagagtatatacttttaaagattgagagcatgattggaagaataccagccaatgctatttggagctgatcagaactgcttgttttgatagtgatcttcccatttcgcctatggttcaagccgatatggatagccgttttagagctttgtccgattgagaattgagactccaggaaagctgttagagccaaatctccttttgatttcaaaagacaaccccagattggactgatcttgtcctatggggaaatccttctctttgagacgcagctccaagttggcaccgtatgcagtgttgccttgagaactcaaagctccagcacttgttgccaaaactaagaacttcccaattgcaatctgatcctctactttcaacccagttgcaagatttttgcctatgaaattgacagttactccagcagttgtcttgtttattctgaagcttctcactttggtttcgcctctgacaatgtaggcaagttgatctccaagagtgtggatgtcaagtccagctaaggttgagcaattctctccatgcttcatagataatgaagaatccaagtgaagattcagcttttccttgtcctttgtgatttggaaagaaaatgcagttggaaatcgatcagaaacaacaaattccttttcgaggttgacaccgttgtacccacaatcatggtcccaacaataagtttccatgactggcctcacaagaagctctgatgagaggtctagggaacggtatctataggcagactcttctccatcaaaagacaacgggagtgtgatgtcaggtaaaggcactgattcagaagttgaatttgaatcttccttctcctcatcctccttgaaatcatgataaatatgtgcaccatcctcttttcctttggtcttaatttctctcagccttttaatctcttctttccattgcttcctttgaaggagcttcacacgataatcatactcctcgaaataattttttctctgttctttgctgagcatagcaatctgagatttactcagaggcctgaatgaaggtagttggtcatattcatcctcttcttcactttcaagatcccacaagtctgcaaactcagtatcagactcagcattgtttggatgagcatgagactgcaatagagatgacagtagatagtgcataagagatgaatggatggggaaccccataaatttcctcctatctgaaggcttttcacgctttgcaatggagctcgcttctgacaacaccttcaatgaatggcacaagagcaacaattgggatctcgagttagaactatcagactgcaatgaattgttctcaacaagagcaagtggatgcataatacttgaattcataagatacaaattatcaacagccatgctgatagactgtagaacaccatggtatttttgtgcaacaaagatgtcacggttaaggggtaagcctgttgaaccatctggaggaacagaagcagcatgagtcaaagtgacaactgcatttttccatatcgatgaaccaagaga

SEQ ID NO: 190955 - DNA, 879 bp, Cannabis indica
aatacaagaagtcagggtaatatagtcgggactagtggcaatcaaggccataagaatccccctcgtccctaaggttggggtagaggtcgtggaagggctcatgttgtgggtaatgttattattatataaatttatattgcttttgtaaagtacatgatgattgaaaagaaaataatgcaaataattttagtattaattaaagaatagaggtgatgattgttgaaaaaaataattatatataaaaggttggtaataattgtttaaacatatgaaatatttcatatatatatataaagagagttatatagctaccattatttggatattttcttagagagttaagaaaatattaaataatatttaaagcgactttaaattagcacgttaccgtcttatatctttaatttatataaatctatacatgattcaattatgtataaaatagtgagtagttaactcattgattgatttgttttatgtggagagcaaatctatttataatgacgactataaatgagatacgatgatgatatcaattttaaatatagtcacgactataagtgaaatatgatgatattaatatctttaaatttactaacgactacaagtgaaatatatttgttagcgactttaaatttagtagcaattacaagtaagatacaatgaagacatcgactttgaatgtagtgtaaaagtaaagaatacaaatcttaaccaatgtctaacattttattagtgtgaatcacactgtatgatgatattaatttattaacttgaataagaaagatagtaaaatagttactcgtactgataaaaaaaattatattaaaattttgcatttaatttagttttacgactattattaaacaaaattttgtt

SEQ ID NO: 190956 - DNA, 1646 bp, Cannabis indica
aaaaaaaaaagtaaaaaaaaaaaggtaaaatagataatataggagattgtaaaaaagaaaatgtaacacccctactttacttgtatagtcttattatacatacacattaaatataagtatgtcattttagcaaactcttcaaatgataactagttctgcaaaccaacatgtgtctttttaacatgttttgtccttattacactttttgagaaaacttcttaggatgtcacctatcataagattgttacaggtgaagcacgcttaattttggaattcttaaatgatgggctaccaaaacgaagatgcatcttgttaatatgggtagtatccatcaatatatttaagtcttcttcaactgtgtagtctcatacctacacagtcttagaatcatcacacttaacattcccaaagcgaatgtggaattgcacaacttacccgctcttttttctatgatcacgagactctgactgtcgtaattgcctcctttacagggttcatcatctttgtcgatcacaattccaactaggccaaggctctaataccatctgtagagctccttttcacttgtatagtctcatacctacacagtatacacaggtacgtctctttggttgcttcttgaaatgacaacttgccctacaaaccaacatgagtctttccaatatgctttgtcctcactgcgtgcttcttgggaagaggtcatccatcctaagattgctccatgccaagcacactaaactttagagttcttaagtaatgggctaccaaaaaaaaaagatgcatcttgtggtcatagatagtactcatcaatccatttaagttatctttaactgtgtatctcatacctacacagacttagaactagttcacttatattttaaagaagtgaggtggtgaaatcaggtatgttagaatctgagataagatgtatgaagttccatatcaaaattaattggtaatgggagaaatagcttattcatattatatatattattttatttctatacattaacaatataagactaactggtgcaaacaagtgatatagtcaagcattaattcaaatcctcaactttcaccattcaaatgaacttagaacaatattaagaattttttgcctctcaactttcacaaactatttaatttagtttctgcctttgatttttctatttgttgatctctggatcttgtaacgagtcaatccaatacttcattggttctgttctgtttggcaatttcacaatctgagttgaaatatttatattttttattagtgaagtttgagtttgatcaaacacaaaaaacaaaagtgcatattgttcaacaaaatggcacctgtgatcatcaatgaaaaggtgagtaattcatcaatgttttaagttaaggatatcccacattggccattataaaaagatgacaagaagatgagaaaataaaacaaaatgtttaataggctttatgttttataatttttgaatcataattatgtatatccggaaaaagaaattaattaaatggtatttgttcaaattttttgtaagacaaaagtaatattaatttttatatgactatttgttaacaaaaaatattatatgacaatgtatattcataaatattaataatacttcttaaaaaaaaatattata

SEQ ID NO: 190957 - DNA, 2051 bp, Cannabis indica
aaaaaaaaaaattaaacatcaaaatacagaaattattcaaagtgataatactatagccaattgcaagagttaattctttgggttgattttcctacctcgccatggtaattggttggaataccacccatattatagtgcacggtgggtaagacaggaatgggctcctttgtgacatccacaccagcaaatatggcagcagtttcagagatacctgggagcctctccttgagcacatctgggggtaagtgattcaagtggagatagatatggtccttcaaaggtcctgttacaattaagcagctcaaaaattacgctctttcctctttttctaaatacaaaatagataaaactgagtctattacatcccatatctagatataaaataacaaaatatgtcatgttctggaacacgccctacctacaccacggccctctcgaatttccatagtcatagatcttgaaacaacatctcttgaagcaagatccttagctgtaggggcataccgctccataaaccgctcaccttcactattcctgagaataccaccttccccacgagatcctacaagttgaaaaaaagaaaagaaaagatgagagagtgtgcaagtatttcagcggtactccaaccaaaaacaactctaaattaaaaatattaatgaaaattgaatgagtacataccttcagtgatcaggcacccagcgccatatatacctgtagggtgaaactgaacaaactctaaatcctgcaggagcaaaacaacaacaaggtgcacataaaaatcatgagacactcacaatggaaatcaattaacattgagaagtaagaaaagaaaaaaaaacctgcagaggaaggccagctcgtgaaaccatggcattgccatctccagtacaggtatgagctgaggttgctgaaaaatatgtccggccataaccctgagagataaacaaaagacagaggcatgtgttagtgcatcatcgagtttactggtttcagaaataggcccaaccagagaagaagaaaatgcaataccccagttgcaagaattgttgaggcagcgcggaaacggtgcaaagtaccatcatccatatttaatgcaactactccttggcaggtacctacacataaagttacaaaaaaaataagcaattcacacgagctactaatcccatgaacatcagtctatgacactagcataactcaagacttataaatcaggaaacatattaattgtgcgtaaatgcatattacttaatataacatcagacacactgttacgtaaccattcagcgattccacactagaaatatacagcaactattactatggttattcaaaattattaaatattgcaagcacatactaatatcattcaacttttaacaatgcaataaagcaatccatgtttcagtcatgtaacatttcaaatatctttaagttttgattccttgagtcaaatttagtaccatagatatgtagtgtttccaagctaaagaaaagagtatgtaataactcaccatcactgttcattattaggtcaagagcaaaatattccacaaaaaactgtgtattgtgcttcatggcctgcccatatagggtatgcaataatgcatgcccagttcgatcagcagcacatgcacaacggtacgcttgtccacctacaaataataatacagataaaaccaatatcagacagctctcaacagaaatcactagctaaccaacttcaaactggaatcagatgtctcagtcttacctttcccaaagttaaggctttgaccaccaaatgcacgttgatatattttgccttcttcagtccgagaaaaaggcagtccataattttcaagttcaattacagcttttggagcctctctacacatatactggattgcatcctggtcacctatttaaaccaaatattttcttgtaaaagaagtatcttgaaaagaaatagtgtgcatctatgtgcatctgtttagcatgattcaatcatgtctcaaattttgcataaaaagcttgaaattttagaacaagcaattttttttttttttgta

SEQ ID NO: 190958 - DNA, 2277 bp, Cannabis indica
attaattctgtgtgattcttataaatttgattgaaatttgtagggatatatgaagcaacttctttggaacgaggtaggaaagattcttttcaaacttcagatatatcgaatgggatattggacgaagaaattgagatgccctcacttccaacttgaagtatgttacctttcatgcttatgcagttttgcttatgctctgtttttatttaagtattcttattatagtacacatgcaatgttgatctacttttattaacaatagaaaattttagcaacagttatggtccaagtttgaagttattgtcaatcggttttaaaattgaaagaggtgtttgaattttaatcaagcactagagaggagtgatgaagcctagtactcaattcattagaactaatgtgtctgcaggtttaacttaattgctaaccgcacatctgttaaaatacccaaccccctcttaaaaagtaagacccaaaagaagatctaacgatgcctgaatgtggcatgcgggagagttttatgagtaaatttagcaacagctaacatctttagtaaatcctttgtaaagtagtactttaaaactgacttaaacgctgtagacattcacagtgattagtttaatgtaatgggttggtactagcctttagaatttctcttaaacccagcccatctttgtgctccccaaatattatcactctgcaataggtgaaagttattattattcttattttaattttgttttctttatgctgatttaatcatttcctaaagctttttgctggcagcttttgtcatataacatgttcagtattttactcaaaggtgtaatcataactttcgaaaggaaatcatcgtggaattcaaagtgaattattaattgtggaactgaaagtaactatcaagttgttgatgagccatggtgcatattaggagatgaagcagtgttaaattatagggggttgctgaaaatttcaactttgatagtttagcatcatctgccatgcacatatacaagttctaacttgtttgcctttttgttagaagatttttcttcaaataattgtcttttaggaatttttatgtttggccatgagatgataaactagtctataacacttttctgatcatacttactagtttgttgtgaagttcatttgttctaataaaaggtcaatttttttttcgtgtaccgttctttgagcaaggaggtttctattaattaattcattatgtaatgcggtttcctacaatggagttattgccaaagctatttttcgtattcttatgttttgtcctatatgcatgtattttctttaatattcaacacatttgaagatggaagtatattaatcagtatttttcatcaagaataaatatgattgagagcttctacggtgcaacccaaaaaaaagttgcacccatgcaccccctatttcaatatccaaacaaaaaaaattaaatcagtgtttggttaggaggaatgaaaatataggaacaagaataggaaggggaatggaaatgagaatagaaataggaatggaatggaataaaatttgaaatgcataaatttttttttaaaaaaaaatcattaaattttttctcttgttatattggaatgatctttctttcttttttaaaatagaatagtcgttccaccaaatgacggaaagggcgttccattgaaatgtattgccaatactttaaaatggaatgaaatttgtttctttttcattctattccatttcatcacctccaaccaaacattacctaattctttttatagtcatatatgttatatttgttttaagatattctataatattttgagagattcaaaatagtttttaatttagtaaacaatgtttaaatattttatttcacacctataaaattaaagaaattatgcatgtaacaggttgttttgaattttgttttgggcgagttaattaaattttttaaaattttgaaagatatcttaaataattaaaatgtatatgatcatgaaaaataaattgggcgtaaaaattcttttcagtatcgaaacagatagaaatgtagcggtgcacttattttaaagagtgttttatagaatttttattggaattttatttctcaaattatgacactttttgtgaattattattatactagagaatcgtccgttttaaaaattttgtaaattataattaaaaaaattaaatatgagtgaaagtttaagaccaatacttttcaatgttttataaataatatgaaaatcatataatatagaaatttttaca

SEQ ID NO: 190959 - DNA, 5751 bp, Cannabis indica
ttcttccaaaaccatgaatcagatttcttaaaggaacaattcaagaaaggcataccttttagatacttggcacttaaaatcttacaacacagagattgatcctcattaatgagagctcaaccccacttagccagtaaagcctaattcatttccaaaatctttcagaagcctagtcctccttaggattttgggacacaactgatcctaagccttttatatagataacaaggttgccttgttcacaaacccaccaaaagtccctgaccataccataaattctagaggctagttttttcgacaactttgtggtctgcatggagtaaactgctaaaataaggccaaccgagttgatcaaagtagcatgaccaacttttgacaaggatttcaacttccatccgtgaagcttcgagataaggttatcaagaatgaagttgacatttccatccttattgcgagttctaaacaacaaaatccctaggtaattaatgttgccaatggcattgtcgagcccaagttcttattttataccacgttttatcccttcattggtattattactgaagaaaatagatagttttagcttatttattctctgaccagaccaatcataaaatttctccagatgtcaaacgcccttggcttcccccatggtggccctacccacaaggattagatcgtcgacaaagaaaagactagaaagctagggtctattcctactcaacttgatgcctctaatggttccagcacccaaggtgttctctagaatacgcaagaggatattagcagcctaaataaagagataaggggaaaggggatccctttgtcttatgccacattcaggagcaaaattgctaacagtgcctccatttaggcaaatattgaaggaagtcgtagagatgcacagacaggcccaattacaaaacgtgttaggagccttgaagttgcagagcacatgatcaataaattgccagcttagcttatcatgggctttaactaggtcagttcaaaaaaaaccttcttttcctttttttgagattaaacgaatggatgatctctctgactagcacattattatcttgaatattttgccatggaacaaaagctgcctgagtaaggcaaatcaacatggggagaatcagttaattctattttcaatgatttttgggataaccttgtaaaccacatttcaaagagaaatatgtttgaattgtgacattttttttttgggtttgggagccttaggaatcagggctacatttgttttgttgagacccttatgcatagttcctgattgaaataaatccaaaactacctcacagagatctgcacccattgagttctagtattgcttaaagaacaagatagacataccatctagtcccggggctttcaaacttctcatagagaaaagtgtctttctaatttactcatgccctgggattagttttagttcaacttgattaagggaagaaaagtgttccaaaatcaaatggtccatactctcaagaggtccctggaccgaattagtgaagatattccccaggaaagacgagaacccctttccaaaatttctttcttattcgttatccagacccaattctattcaagatactctccacactatttttcctatttcggatggtggcagcaatgaaaaagaacttaaaacatttatcaccatccttaatccaagaaacacgagatctatattgctaatataatgctttccactgtaaagccttgttaagggcctttctcacttcaacttcatgggcccaattcttagaccaactggcattttcagaatattccggagataatttttgagctggctaatgctagtatccaacttacaaaaattctctctacttcacctactcaatgccagacgggtagcccccactttcttaaaaattctagccagggcccactcatgagaatttgaattttgttagcattaattttcgttaactgaaaataataagtcttttcgtaataaatatatcatagaaataataataaattattatataacactagggattttacgtgattttgcagttaaatctgtatactccacgattttatcttataatgatatatttctgtataattgttacaagatacaagtgttgatctttttctctctcaaaaaaatctatccctttttctgtgaaatgctctcctatttataaaaatataagttggtagttatttacattcaattcagaatatagccgcttatgaagcgtgatcaattctcacgttttatttaaatcatatgttggataatactagacaaccacttaactgcttgttattcttatcctttatcgatggtgaatgttgattttgacaatggtatctcgctaaactagagttaatttccttgtttatcttgatgtagaaaaaatgctaagtgttagaagataattcccctcatcacatctcttcatttgtgttaatattgcgatgtgaatgtctcgctatacatataatctgaggctgtgttgtgtgtgcattcattctattccaaaataatgaattatcttctttggttgtgtactccgaggaagatgcgtgtctcgtcaatatgagttttaatagtcttttatcctcgtctcgcttaagactatatagtcagcgagttgtaaatattttctattaacctttttattaacgagttattcttatcttgcatttaatgatataattttattatgttaggtggttcatattccattgcaagacaagtgtcaccttctgaagtatagttgaatttttaggtataacaaatctcaagcatggtcaacaactagtgtactttgaaggtcccttgtccaccaagccttaaactgaaattttcgtcttgttctagagtcaggatccactatacaaatacaaaagggcatgctgtctaaattgcaagtatggagagattggatcacaacttttggaaagagatgtaaccaatcatcattgaccaaagctttatgaagggccaattaacatgagttgggccatccctatggttatcccaagtcaagttgtcccctttaatgggcatatcaataaatgcatgcgcttaatcaacttagtgataaaagggagaaattggtctttcccttagaaccaacacgcttagagctacttagaacaaaattcacatatcccaggatcaaccaagacctgccaaattttgtgccaatttctataatgtttgaccagaatttcttcttcccatggaagtaaggaggcccgtatacacaagacaataaccaaggatcatgctcagggtcagagtatacaatgccagaaatctagttttttgatatacaaatgctttcaaaagtaaaactagctttccaagctaaaattatactcctcgcactaccaacagtaggaacaacaaaattaaaataaagtataaattcttaagagagtgtaccaaaaaggcaacatccatttttagtttagtaatgaaaatgaagctaggagagcacgactgaatcaagggcttttaattccagaactgtagaggtcttcccaaccctctacagttccaagctacacctatcatggcttctgtggaggagggacaccatcctcctccacaggggccacaccaccaactagctcaccaatcgcagaaccctcatccttaatcaaaaaatccttcttgacagagatagagatatccatcaatcgagctttggctttccacaccgtaagcctagctgactgtcccgaagaaattagcttttccacttgatgagagcacactgtatcaaccttagcgcaaacaatattctccactttgtcactggctagaggttcttctgacaatccagtaaaaatctgattaaaattagcatcttcaacaacacacaccaaaccaactcccctagggaaatctctgaccactcgcttcactcttctaatacacagattttgctttctcccaagagaaaaagttttaaaatccaacctctacttccttataggcattgttcgctcattggttttagaagacagttgaacaccaatatcaaaaatggaagctttccatttactttggcatgaggctctaatagcgtcatgttcttggatgtatctttcttaggcttgaaagaatttagacagtgatctcttttcatcaagatgagcagagacatcttggcccaataaagggctatttttttttttttttgataatcaataaagagctatttgggtcatcacaatggagaccaatatccaagttaatatttttacccttagtaacattaacctcatcacaatgccttccaactaaaatgcttttatttggcccaacaggcgtacttgagcagtgaacttgttgagcatacaccacatcatccacgtgagacaaacgacccaatccattaattaagttctttttatttggcccatgagtcttaaccaagagagtgagctggttgagggcaccctctccattcataaaattctcacagcccaactcaccatcatgcccacaaatatcacatgtaatgtttggttgagaaaagtcaaccttacttttacctttcaaaccaatacaacttgcctctcttctcttcaaattcgaaaccatatttaacttatgtaaagactcagagttctctccaagttgtagacacaacttcgaataaaggtttccacaaacggccataccttgtgagactcgactcggcacagtcgatgagttcttaggcacctaaactttgccaggtctgaaacgagtttgacatgtcattttcactagaggcctgatgttcgagccatctgtatgagtccctagagcaacttcagcatacacggcttgaagctccacttccatcaccggcaatgctaatcccaaatgtcttgcctctggactaattcttcccttgccaatcattgccctaaaaaatttaccaaagaagcagctcgggtaaaaggacaatgcattaatctaaagggaaaaatagagagaaatagattccatgagcattaagaatggtgacaggagacaccagagaacaatcccctctttgatgacccatacaaccgcacaggtagcaaaaattacctattttctcatatttaaattgaacccagcaagcatcagaactaaccagtttgaagacacatccacagaacaaagggttattagcatcaacattaacttaaaatcttatccatttgttccaggtaactagtttagtttcatccagtttaatacacacaaccttactcgcctgaactgtcaacacatttgcattaaccctagaaaagtaatcatgtggcaggtggtgtatttggatccacaaatgtattgtatcaaaggccaactctttgacaccaaagccagaagtccaaggaagaagcacaataatctctcctttatgcattaggtgttggggattatttaccaagatctaaatttactaccatgtatgttatttaacatcctaaatatgaattcctaaaacaatgtaatttaaacacatataaagtttaagaaaccttacattggttgcagtgaaattaaatgactcattccgctcagatctctaacccttgtatcctttctgtagcagagtatcaccaagatctgagcctgattccccttcagttgaattagattcttcacagtcttacatactatgattgagtaccaacttgctatgtgtaggcatgtactctatcactataaggttcgaaattgaagagagaaagaaagaggaa

SEQ ID NO: 190960 - DNA, 1353 bp, Cannabis indica
tagcttttcactacttatttacaatttcattggagatgctcttagatgctaaatcagttcaaaattacacattttcaccaattttgttaaatttgggtaaacatatttattgagcgaaatttgtgaaaatagaccattgtaaattgattcactaaaacaagatatcaaatgctaagttggttcaaagactaacaaaatgatataatcccttaaaatgtcatcagctgactcttcaaactttataaatgaatactacatacaaggcctacaaattcaggtaactgaaattttaaattagaaccgtttcagagataatttaaatagttaagaaccagagtttgaagatagtgtgattagaaaagagggaagtaccttgtaaatccaagtagagttggacaagtttacagtcccattgttgaatcccctaatctcaacgtgagttggtcctgcaccaacccattcatagaaagatcctgcattctacagaatcaaaaacagcaaagaggacttcaaaaggcagagcattaaacacattgttgctaaatggggtttaccaaaacataattaaataatttagtactatttatattgagcattgagcactctcaacatcttctatactttatccttcaaaatacatcatcaaaactcttttacctcaaacttttacgttaaatcatacaccagcttcttaaaacatcaccaaaaccactttcttcaattttttaatatatattcgttcaaatatataacattaattaatttaggtcatttgatgtagtgtgtttttaattagtttctttaaaaatttaactcaatgaattgaggggacaggaatcgggatttagctcaacgaattgagaggacaggaacctgctcgtgacagcaaaccagtccagttataggacatcattgttttttaaaacaccagagaccacagtacccaaacggtactcctttatctgctggcttacagactcagaaattagggtcaagtacgaaaccgtctctgtgttttgctgtgatgagaatgacccaatagactacaagaacagagagctacaggtttggatattttgcttaggggaagacctgcttgagaaagcaactaccatggtggaatgcaattctttttttttcccttctttttaagatgaattacttaactacttgttatatggtgaatctcaatattaaaaaatagactagttcacaagatagtacatacaaataaataaataaaaacaagacagttcatcatccatttaaattacccctttctatgtatctatatctatgttcaagttttacaaactggccttaattattatcaaaaagtaattttaatatatc

SEQ ID NO: 190961 - DNA, 1514 bp, Cannabis indica
tagcattcagcacaaaaacttagttcatttacttggatgttgctcagatgggcctcaaaggttacttgtgtacgaatacatgaaaaacaggagcttggaccttataatatatggtatagctatcccggtttttcttcttttatccatatatttattgatatttagaaatcaggactattccaattctgttgcatattttatttgaaaatactaaaactgaaagctgaagaaactggtattatacgacgcttacatttgttattcaacacaggaaaaagtgatctgtttctgaactggagcataaggtatcaaataattgttggggttgctaaagggttgcagtacttacatgaggactctcctttaagaattatccacagagacattaaagcgagcaacattcttcttgatgaaaaatttcaaccaaggattggagattttgggctggctaggttctttcctgacgatgaagcttatcttagcacgacatatgctggaactttgtaagttctataaactaaatactatgctataatattaggacatttgataacttattgatagctggaaccttctttgggtaaatatagggaaatcccataatgaaattagtttgtatttgcttctcgtctgaataagaaatggaaattgcaaagtttgttaattcgtaaaccaaaaatcataattcttcattcatcatcaagcaggaatttctgacatgacccgtggtattaattacatccaactactatatcatatcattcttgtcattgttatttcttcaccatatcaattgtagcaacctttcttagaaatagcatgctgctagttctagtaaaatcactataaattgaaggaacgcttgtatcatcgttgtttcttctttgttattctaagtaaaaacattcataagtaccgtattgatatgtctacactacaaacataactagcaaagttagcttatacaatatagagcattttaatcagttttaaataagtgtagaagcctatgatatgtgactgtaatgaaatcagaaatatggtaaataggatttatctgatttgaatttgaagtatgaattacatattagcaagacaagaagaccaaaagggaaacttgatgatgttttatccatccaagaaccaggtcattaataatgtgactatttaataacctataaataaggttcgattttgttgtcgaagtggaaaaaaaagggcaggtggttgtgtggaataatcatacaaggatacttaatgcttagacttgttatgctgaataaaaaagtggtttgatgaataattatggaacttctgtgcttgtgctgtattgatgattaaaaaagtgactaatctttttcgtgatagggaagagccaagtaaaacctaagaaacaaaattattatttgtgcttgttttgtattgatgataataagttctcatctttatattatagtgtttggtaaattataaattttaaaatatcttaagtgagaatgagaatgataatgata

SEQ ID NO: 190962 - DNA, 1879 bp, Cannabis indica
gatctacatactaactatacactaattaattaagacaatatatatatatatatatatatatatatactttagtctatatatagggggagggggaccaaggtattatatttatatttagagcgtatatatatggtgttaaaaatatagtttattttaaatagaattcaaaaatttgtagtaattaagttacattatataattaaatttgaattccatgatgtcctgtaaacaagttattagatttaagaattgattatatattttcaagagtgtaatatttttgacatttcaaattattcaaaagttgatgaaaatacataatattcatgtaaaataatttatagattataaattgtttacataataaaaccaaaatataatataatataaatataggtacgtaaaggatgaaaatgatgggtgatgaatggtgagttgtagctttatgggtttgcacgtacagtactcagagaccatgtgaatgctgaccatattggccatgatcttaatcttcaatatcatttgctatagcttcacccaattctaagctcatcattaattaatgtttttgtttttggaatatataaatatatattcttacttgattccatcgaatatattttattctaccatcaataccttgatattttattttaatctatcagtatttcattcattcatttattttacattggaatattattgtgaaaaataatcacaagtatgagtaatataattgattcaagtcggttgctacatattgaaattttacgaataatataatataaagatatttattgaaatttattttagagattatgttttgttttgtgttgtaattttttttttcaaacggtttaattaatttgctgttaaattttagctatgtatatgctattttgtttttagcctaattaaataatctaatacacaagaaaggagaaaaaaattaaggggtcgaccaaaaacaaccatttacaccttcagtcacattgctatatgtcaataaatgaatgaacaaatctaggtgggtatatgttgagcctaaaaagtttttgatgttaatgttatactatataaatctatacacatatatatatataattaattacttatattatatataggaccatatgtatgttcctacccattttataaggttacccttcaataccttccaagggctgcttataagcacaaactatagaataaacctcttgcccccattctataaacttaattagggtttgtttgaatatcactaaatattttaatttaataattattatataactatttttaaaatattagacaatattaaccctggctttgacatttacttattatttttggcatgcatatatgttaatttattggctcttggtcttggatttttcattattaattaagtgaagaattaatatatattattgtataaattttgacggattgcatactcatttttgatgtcatatatatataaatatattttattttagatgaatttataattaactacgtgcctgtgttagaacccttaatataataggtgcagtaattgtcttttcccaaagatacttccctttcactactactattcctttcccataaaattaaagcccaaaagtatatatgtatgtatactgatattgatgcttttttttttttgaccaataaatttggaatccaaataaaatttaattaactaattatatttagtagcatgtgtcaattttataaatatttatgtatttggacttgtcaatataaacattattgccaaacctatcttaacactgcagatgatgatataataaaaataatttcttttttaacaaatttaataataaaataagtcttatcaaaataataataataa

SEQ ID NO: 190963 - DNA, 1503 bp, Cannabis indica
gaatccaagtggagcaccacaaatcaatgccgcccctccccattaccaaccaactcgcaactctcgttacgaagaaaaccttaagtagcaaagatgccttgggtcgaaaaggaggccgaagttggtagcgagcagtttcaaaaagtgtcccccattttacaatatttagtctggaacacattacataaaagggtggaatcaccactggccaacttccacgctaatttggagatgagagccaagttcaaataaaaaaaacttcttaatctctaaaccacgacaatttttcagcaaacaaagggagtcccagtttgccaaagcaagaaacctatttttctcagttgagccaacccactagaatttgtaagctagtttatccaagattgagcaaatagtcttaggcaaaaggaacgtagacatagtgtacaacggggtactcgagataaaggaactcaacaaagttatacgacctacttgggaaagtaatttacaccgccaacctttaagttgctttttgacacgattcaccacaaactataaatcattagatctacttctagaaaaaagaagagagctgcccaaaaaaacgatcctcataagtgagtcccctgtaccccaaatagttagaaataacatcaacatccacaggccggacatttgtagtaaaaaccaaggtagatttattaacaatttggtcggaccacttacagtacttgactaagcaatcttgagcccaatccacttcctcactattgaccctacaaagagtatcatctgtgtacattaaatgggagattgtcgggttttgagaacaagctttgaaaccatgaattaacccctcgactttttgcctgaaataactctcgagatagaacctcactacccaagatgaataagtagggagggagtggatcaccctgtcttaatccccgagaagttataaatcgtttgagagagccaccattaagcaagaccgaaaaagtcacagaagacacaaaccaagcaacaaactttcaaaacattagattatattcaaaggcctccaacacatgatctaaaaaactccatttcaatcactcataagccttggacatatctaacttcatcccaatagagccaacacccgtagttttcttattaaacgagtgtataatttcttgagctatcgtaccattttcgacaatccaacgaccttgcacaaaggcatcttgtagaggagaaataagaagcgatagaatctcgccaagatggttgactaaaatctttgaataatttataggcaaaattacaaagtaagataggcctaaaattgtcaaacttattagcaccatcctttttgaggatgagcacgatagaggtttgattaagagtcttgacaaacttaccggtttggaaaaattagagtaaccataccaaccacatcacctgcaacaatctcctaatgtgcttgataaaaatgaccagacatatttcatccaggcctggagctctcaattgacccat

SEQ ID NO: 190964 - DNA, 4483 bp, Cannabis indica
aacaactttatctcggtttttatgaaaaaattaggataaaaggattgttactaagtttcgtttggcgcagggaagaggtaaatgatgaaaatgtattttagcaccagccaaacaaggcctttgtttcaaagtgggataaaaggtcaatacctcacccatcaggtcttgcttggttgatcattaaaacactcatcctgaaattcttttttttttttttagtgtaattattttaaggctgaaccaaacacaactcttctccttaatatttgcatctcttaattgccaaattactaagaaatgggataaaatgttccaacatactttttatcctattttttatttttctctgggattaaaaacctctcttgcagtgttttttattttaaaaaattaggtgttatgagctatttataggtgttacagagagcaaagtcgagctctttagagtccaactattctaattagctggtgtttgagttggaactgctgacttggacagtgattaagtaagttttatctcaaaaatgatcaaattataaaataattaatttacatgctcaacatcttatgccatttggcttataattaattgaaataatatgtacttaaaaatattacatgttacaagggcatgacttacctaatgaaacaaacaacaaataaaaatattaaaaaaaaaaagtaataatcacaacttgttgaaatttctaacattgatattgagtcgtcttaaccaaattgagtgaagtaccatgtgagttacatcaaatggctgagctggtcgattcaacacaaaatgcctctttacttgagaaaccatattatataatctcaagtacttctcatttggaatctcacttaagatgttcttaatttctggtatttttgagactggaatttgcactgtaaattgactccaatcaagtacatcactaaagggtaacgagtaattatttgatataatcactgggacacaccctgcattaattgcctccaccactcttgggcttgccacttcatacccacttgggcacaagcaatacttacttttgcccattagctcagtgtagtttttttctatgggaatcttctcataaacttggatatcattgtctttgtctttccattgttggaacaagatcattctaatatgtccatggagtccaccagcaaagaaggctaatattgtgcgcctgtgtggggcttgacccaaatcatcagggcccaatgttcccctcttcaaataaatttcaggtaaagagatatctcttttaggttgaaatccttctgaaatgtttgcattgcatagaactcttataaagtccttaaagagtttaggtttttcatgtgaaacttctggagcctgaattttttagaagtataaaaatacattactacaattggaacctcaactagataattcttaattcatattaaaatcatagaatacactattaaaatgaaaaatgttgacttgctactttcttaataagtggtaagacatatttagtcaaacattattataaatagaaatattgtagcacctgcatgcattactcacaaattgacaggactagcaataataaatacactattgacaatcacattagtaacatggattttttttatttatataaatattatatgcagtgttgacattgatgaaagtaagataaatatttgaatcacttacgtaattaagatggatcagatatattatgtcattgagttactcacccagtcatggcaggaaagcatgaaatgatcagctccattgcttgcattccaaaatgggtatttattggctacaacacccacatagtcattcataagtcgatagagtctatctcgattataatcagatggataaataatagggctataaatcaacttaacgatgttagccacacttattggcataaaaaatgtgtgtgcctcctcaggatgtttagccttgaaagggcttttctcactctctatttcttctacgatttgtccttcaattgcatacagcccattcattggtcccatgtggaatattggccgttctccttccttatagctccacactttgaatctcttcaccatctctatatgactcctgattttattaaatattatgatataattaatttggcatgttctaaaacgtattgataaatattaaaagtacttactgatgaaaagcatatgggtttctgtaaatggaacctcttggtataaatctctcattcttattagacttaaaacttttggaaataatggcttgacgaattgctactctagccttagccaaatcatactcaattctatccaacctactcttcttcttcttcttcttcttgattatgttctgctcataaaacaccctccattaagattgtatatataatcaaattatgtctccatgctaaaatacacaaaattaagagaaaaaaaaaaagagccaatgatcctcaccttattagcagaaatgtgatgatgatgatgattagtaataacagtagtattgctttgacgcataaaacttgagagaagagagtctacaacaactttttgtggaaatgaatcattggtgtttgaaatatgatcagtgaaagaattagaaggggaaaagtgtatggtatgctgatttttgttcaaggttatattatgggaaagaaaataaagaagaagtagaaggagcaaagttgaaagtgatgacaaaattgtggagctaaaggctgaagccattattcccttttcatctacttaattaataatcctctatatatactacatgaagttgaagatccaatatagaacaacaatttgttgcatatatatgtttatagtactttgtaatgttctctcatgcgttaccttaaattaatacttaaaacacccacatatatgcttatttaaatcactgtatattagtcaatgtagttatatatacatggagaaatttacatgaccttcatttatgtactcgtttatatataataagaagtaattgtcatatgatgatatataaattataaagcataacatgtaacatgtttaagactcaattatagaacatatttttgacatgcatgtttgacccggaaatagtggctcgattctcctatttaaggtctttgaaaaaatatatatgcattaactatattaatatatcattcatcatggtcaaaattaatgaataaatgtaacactaattaactcaaagaagaataatttaaacattttatttaaatttggggcacatgcaaattgtatagattaaagttggatcatatttatataagttaaatttatatgatgtattttaaaataaaatttctgatttgaaagtataattgttatgattttattacgtcaatgttataaaatgaatttctaatttgacatgggtcaaattaaaaatagtcaataagtattaataacttcttttgacagttattatttaagagttaaaggtccccaatttataaaaagtatgttttcactcttgaattcccatcatcatgagactaaggtcccaaaagtattggactatgtatacaacctttgtaataacaatcgatttaatagattttggtgtctttcgactatatttggatatttattcactactatcaaagctggaggtgaaaactctttcatgtccttttgttgctagtagttagcaaggaatgtttccttggctttagcgcaaggagtgacgagcgtcaatctgaggttgattggcactaacaacttgaagacaaagctgacacgcgtcacctaattgtagagcccgtctacaaaaaggaaaatgaagaaaaagaaaaaaaaaagaaaattaaataattaggcttttcaaatggattttttatagtagaaattacataatgtatgagacaatttgaaggatttacatttttatggcatatatttttaatacatttgggttatgggttttaataaatatttatatttttatggtttaaaaaataatatatttttgtaatatatatttgtatttctataatttatcttttttggttcactcacattaaactttattttctagttccaacaactaagattgactagaataatattttgcgctgacgttgttagccatttatatatgagatttatcaggtgaaccttggaatgtctacgcacgttttccatttaaggctgagatttataagttcccagattttggagattgaaacatttcattctgatattgctccagaggtaggaagatggttatgtctggcttaaacgatgaattctgattggtgaccatcaccaattgcctcttgttgttgagaacatgacttcgtttcaactttcctttccagccatacgtactggcaacccactttggtttgaagccatattggtctcgccgagaccttgttgccattgttgatctccatttcataggtataatgaactggctcttcatgtgttgtatcaatgtactcagtaccgctactgtact

SEQ ID NO: 190965 - DNA, 1796 bp, Cannabis indica
ttgtaggaacttcccagcaagtaaagatgttaagtggtaacatttttagctattcttcaattaattataaaaaatagttaaaaaaagtgtgaagtttacaaacatcaaggaagttcaatctccctatcaactccttgataaagttcgttctttacctttctcttttgaagtgaatatggctcaaactaatatgcaaaaagcacattacaagaaaaatgaggacacgagagcactatataatagtttcatactacaagtcaatgatcagaagttctctaggaacaccctatttggctcacactgttcatgctaccttgaaaaggaattaatgcaaaaaaggtaagaactaaaacctaaaaattgtaggaaattttaaaatgaattttgtaacaaaaaaaaaacaacaaagaaaaatgtaacacctttggcaacaccatccaaaagatctcttggtatatacaagaactacaaacaaagctagttaaagaatttaatcaccaattgagagctcttaacaagttaacaggtatattcacaaaacgtgaatctctactctctatatagcaaacaaataaaagattcctgttcatcagtaggtgtagataacataaaagtcatccaaaaatgacaactcacaacaatatacatatataactaaacaaaaaaaacatatattattaacataaaaacttacggctgactttggtgcatcgtggcaagctagcccaacatccagcagcaaaaggcaaatatgaagagctgttgtctgcaagatcaaaagcactttaagatgtatttactatttagtatttggtacaaaaaagcacaacataacaaataattttacatacctcatcaattggtccaatattttgataaagaggatcaagaactgataatgccttaacatattcatgtaaatggaaccatataatcgcctatagaagttcaaattcagaacaaacacctcattaaacaaataaagagaaaataaaaaaataacaatcagcactggaagcaaaatgtggtaaattaaccacacaaacatactatgttaagggttgcaacacaagtgtcgaattcgtccatgtaaacaacattgggactactagaaccagaaaatgattgtgccaacatattagatcctttagaccctaaaagagctttatttccaacaatgccttccacctgctctcctgatgtttgtgcgtccacttcactcctcttctatagaacaacacttaaaacaattagaactttcaagagaaatatacatatatatatgcatgtatgcaaaacaaatctagttctattataagcttatagatacaaattgcagcactcacaagcttaatatgtaacaatatcatcaattgaaaagtagtttatcaatgggctgctagaagattgttgagtttggaagggagatagctcaggtatattctctagcaaatctgcttttgattccttgagaggaaatgaggaagtggaggaaaataacctggtttgatgctatttggaaaacactagtcccacctaaactcaaagtctttttattgttattaatgtggaataagatgaatgtacatgaggtgttgcaataaaccctttactattattccccagctgttatgcagaaataacaatgaaccagcaaatactttttcttagactgattttgcactacaattatggtataaactattgatagaagtctgcattcagtggagcattccaacctagacaatagaaatcaagacattcggcataagcagatgcaaggaacgacaaattct

SEQ ID NO: 190966 - DNA, 1199 bp, Cannabis indica
ggctggccttgagtatctgataacaaaaagctctgaactttctactaaaacattaagtactgtttattacttaccaaggtaaactgttgagccgaagacataacatcaaagcattgggacaaagattttcaacaagtaaacaaacactagtcagtaagcaattgagaaaatcaaatagttgaagtaacaacaaagaaggtaaactaaaccatattataaacacatctttaccttgctttcctttcttcttctgtgttacattccaagagagcttatcccacaaatgagcttcataccgacccgtccatctatgtctactaacaccccgatatttcgagcttcttttgacagtagtagtggtggcaggaggagcttgatcatcagcttgagtcccctgtttgttatcatcacaactaattacttgatcggttggaatatctctttttcgtctcttaacacaccttaacgccgcttgagcttcactgtcggcggccatactaacccgacgcctcctagtactattctgattatcctcactctttaccatcatcagtttcatgatttgttaaatttaagcccctttttctggttttttttttggtggttagtttgcttgacatggtgactagtttatatctatgtatatataatgctgattataagcaagtacatacaaaatgatataatgttgcttgttttggctttgtattatgttatcgtttagttgttacaactgtttttttttgactaaaatacaagtgtgacgattactacaagacaatgtaagacaaatttttaatgtccataatatgtttttttacccccaaattcaacttcaatacttaacctttaaatcactttcattttatggttataataatgggatattatgttcttttacaaggccggccaatcataattaatcattaatatatagtgttacttaattatgattgattagttaaatggctctaacaagcaatctttgggggcagttcagtcaattattataaagtcggattaactccttcaaagtctaaaaactcatatacatatgtacaacaatacaacttaagctacaaatattaatattataccttactttcacatatgatgactaaacgtacaaaaatgtaacaatagtggagaaatcttgtgttataggtttggtattgtcaatctcctattataatttttta

SEQ ID NO: 190967 - DNA, 1883 bp, Cannabis indica
tggaattttgtttgtttgtacttgaaatgaaattgcatgtgaaagtggcaattgcatgaatttgtccccaaatgcagtaagataagatgctgtgcttctctgaatcacaacctgcaaatttttgttttcaccttctttttttaaccaatttaatttttttttcttttttaaataatttttttaacactaaattgggttttttttttctttgaaaaattacaaatgggttttggcctttggacttgtccaatcgttgagtggactttttgtatgtgatgattgtaatatgttaacccacaaaagctggtaacatgataaattcttaggtttttttttttttttttttacttattttggccattttaaaattaatatttctcaatatcaatatgctatagttacattctatttggttttttaaccaaaaataatatttaaatttaaattgttactaataaataaatattcaaattgattttttaaccgtaacaaaatctaagttatattttttgaattctgtaattacctaactattaaatattaagtgattatttatatgtcacttcttattagtatatttaaactaattatttttttcaatttttttttaataattcagattaatcagaaattgctacgtagtaatttatttaacacttaactatcagttacttacaattccattataatttaagtatcattacagctaaaaattaaacttaaatatttatttacaatcgaaaattataatatatatgcacaaattatttttttgtttatttattgttgtaatactagtttttccggaaagttattaatatagaaaataacttttgtagggatttttatttagaaaataagtcatgatttatattatggcttaactaaattttcctatgagaaaaaaagtttgaaagttatgaaaaaaagtcatataggatatatgaccatttgacacttattttagaaaagagctataaatctagaaaaattgttaaaagtagttaataaaatacatacttacataattttcttttacactcattatagtgtttattgaaaataaatattttaatcttttcatagaaaaattattttaaattttacaatcaataaatgggttttgccctttgaagttcaccaaaagattagtggacttctttttagtgatgattataacatggtaacaaacaaatgctttatggaccaattttacttacaagatttgaaattaatttagtaaataccaaattataaataattacttttattacttatttgtaatgttagaaaaaaaaaaggaaaaaaagaaaagaataccatgtacagtgttataaagaaaagaacaaaaaagttcaataacacctttgaattatgtaaactaaatcaaatcaaatagtatcattttttaagtattccaaatctggtcaaacctatgtgtattatattatttgaataatgtatgagtacatatatatataaaaagcaattattatagattaatttaagcttctggaataaagtaaatttcatattctaaatgagtatagtatagtatattttaatgaattattgggctgtgacaccaaatttgtacacgagattttataaataattttcaattatatcacacacatgtcaaccctttgaattgaatcttaattttacattcatagttttagggtttctatatttgaatgcaaattctctgacaaagttgatcatgtacacttacttgcaaagactattttattgacaaattattacaaaaatacatactttgtccttgatttatacaatatttaaatacatttgaaatctgattttgtgctatcatttgtactatatttcctccaaagttgtatgtttagtttttttttttt

SEQ ID NO: 190968 - DNA, 4295 bp, Cannabis indica
catccctcctaaggttaaggtgtttatttggaaagcttttttggattggtttcctaccaactctaatcttgctactcacaaagtgcctactgctcttacatgcccagtttgtagcgttgataatgagacttcattccatgctctttggggttatgctagtctcggtccgatggttaagttggtggattttgttatcccgtcgacatcttttccaaggataaatctcttctctttgcttcgtgagcatgagtttgtccttactcgtgatgaaatggagaaacttatagtgcttctttgacgtatttggtattggtgtaattattgggttcataattacaagcttctcgatatcgaaggtgttgggatgggctgttctttagctaaaacttttcaagaaactaacatgaaagagtgtagtgtcgatcatacctatgctattttttttttttcataaatttgatgtgtaaaaatttatagattaagttttttttattattattatatgacccgattatcattatctaatatatattgataaatagatgaatattatgtctaaagagatccaactattaaaagataaggttaattcagaagtccatgtcatattttatattatatcctaaatacaattattgtgaaagccaaacagattattttcctagtatatatagaaaaagaaaaaaaaaaaaaacagtgctaaaactgcaacatttttgtgttaatttatcaccaaaattgacagttaacagacatttaatttcgcgacgtaaacaggaaatggaagattgttttgatagaataaacaaacaaagaagctatgctcttaaggaaaatagcaaaagaattatataacaatcagtaaaaataacatcaacctgttatttggttggaaaaaataaaaatattaaaataagaatgaaaataaaaataagaatagaattaaatttgaatttaaattgactaaaacaattgaaaaaaaaatattaaattttttattattttgcattgaaataaaataaaatgcaaccaaacaaaagaatgaaattaaaaattatttcttttccattccattctattccattacttccaaccaaacaccaccaaacaccaccttagtgttactaaaaagctcttatgaacttggaaaagcaactgcccatttaattcatttccaccaaaggaaaaaaaaaatcatattttacaagtccaagtttttgaaatacccccaaaagagtaaacatttaatgataaatgaagacccgcataaataaatcgaccatggaaaaacccatggttattattcaacaatggcataggtatagctatgaaaagggtcttgtaagtaatcatactcaatccaagatccctagttatctgcaatctgcaccaactgcttcaatgacggacttgaagccgtccctttctaagcactccgacaattccgcctaataaagaaaacaatacctcaatataagcatctctagtcaaagttatatagtaccagtaggtagcacaaaagtgaacagccaagcccaaaataagtaactattgacatcaaacatgtcttatatattcacttttgtcttcagattcttggcttaggtttgtgttgtgttaatgggcaaggctttaactagaagtacacattttttcagaaagaaagttgaactcaaaatctcatcagcttaagtcatttccaaccatcaatgaaattccacaccaattaataaatccaagcaccaaacacattgatcagacaatttcatgcacaaactacttttaaatttcagcatgcattagaaaataccttgatttggggaatgagggcaggtcctccgtaggcaaatgctgtatatagctgaacaagagtagccccggctcttattttgttatatgcatcttcaccactaaattaaaagacacagaagaagaggtaagaaaagtaatgactaaaaatggaaagttgcttgtagtaatcatcaaggagtgttatcatcttacctgcttatgcccccacaacctattaatggaatttttccctggtaagaataaacgaaaaagttttaaaccctctaacgtaacaaaataacgaactaaagtttaagcaactagtaacttgtaaatgtaaacgtaataatgtaaactttgtatacttgaatgcaaaaccttttcatctaattcatacacagtatgataagatatattacgtggactatgaagctagagtatgaaagcttccaggtcttaaaatataaattcaagtcaatagtgcaatcctttccttctagcataaaagatattaagaagataatagtgccagctcgaactctttatctttgtaatatattatttatgggagaaatgtaaatcattttgtacatcacattctcctccgtgcaattctttttcattacgaaagcttggtcagtagaaaatttttcttattacaaaataggaagcatacccttgtcaaaatgtacgtctctctcaatagatcagtggagataccaaagagaggcttcccacttagaccaccagtttccgaagctgctggatttttagctatagtctctggccttgaaatggttgtatttgatattatctagggaacaaaaccagaaaagagtcatagatgcacttggatagatgcatttggaagggagcattttctgtagaagttgattagaataattataatcattaacggtctgaataaaaatgacatgcttaaggtgattggttatttctctctttgataatgtttcaaatgatcaattttcattgtgaaatatgcattgcagaaagcattacatcaattatacatcacttgatgtaacacagctaaaacatccaataaaacctgattactgatttttttgcaccaaagatgaaacagttgcttattagctaacaacatggtttcagctacaaagcaggggagggggctcattaaagctgaatgtgggagctattttatttagggaaacttgaaaattgctaaaatcaatagctcaatttgtcgagaatacgacccttagactaatgcatcttctcagttgggcaaagtgaactgcaaactacaactaccattgatgggaatctatgacaagcaaggtttcatttaacccatgttctgaccaaataatgtcataatgcgagagtcacaaagaaagaatcccttagagtaatacattggcttgtaaaatgattatggacttgatatgaaatatgctactgaaggatgccacaatgtggtaatcaaatatgcacacaagtactccagatataacttttaccatttgcaaagttaagcctctaaaagcaatgttcaaacacttaaggcaaagtaaatgaagcatgtaattgaaggacattcccaaattacataccaatccatccaagcgaagggctaaggcaaacctgtaaaaaatagagaagcaaaaaatatgatcacaggaaagaaatcagaaattacaaaacaaataaaattaaattatacagaggaagcaactaaatgagaagcatgtgtacatactgctgcaatatcttcaaggtcttctttagacaagtctggagcaattttcacaagcaatggaggcgggccctcttctccccactgcatttcatcacgagcagcttggacctttgacaaaaagaaagtataagagccaacatatgtattaaaagaggaatttacttttacaaagatgcaaatcattgcactgcccccctaccttttttacaaggtctttcaactgctttcttccctgaagcattcgtagccctggggtgttgggcgacgaaacattaatcacctaaaaataataatgcatttattatcaaattaaagacatttaactcaacctgaaaaacaaggcttcaaaaaagaagaaagaaaaatgcagattatgaaataattaaagaagctcaaaatttggatttgaggaactatcctttctaaatcatagcagagattgggaacttttctgcactaagcagttgttttctattaatttaatatcatcttcagtcttattagaatatcatgcttgttttggttgttttaggacaaaatttgtacagatctttgttggtgtttgtaaccacaattttcctccccagaagtgagggctcccaatatatttaggaggaggtcactcatggacatgtgacctttgtctcctatttttaaaataaataaattgaaaaagctcaaaatataaaataaggaatgatgcaatccaaattaccatatcatttcaactcatactcttaggaatgttctttaccct

SEQ ID NO: 190969 - DNA, 2492 bp, Cannabis indica
tcaatgaccttttccttggtgaagaagaaaaatccattagccttgataatgtggtgtctagtttccctggtagacgtgttcagattatagtggctatgcgcattttgggtcctgtgaattgccccacggttcctctttttgtctatggatatagttctaccgggaaaacaagtataattgtgggaaaattactatgaatagtgcagaatcacaattaaactttaaacaatgaaacaattagcaatgacaagattgacaaatcaagaacaacattcgggcataaaacatagcaaatagagtgtgaaaaatcaaaaaaagataaatgcattgaataaaaaaaatcaacaccaagatatatactggttcaattttgatagatcaatgtgatctatagctctattccagttatggaacaccaccgtaattcttttttattgattgagctagaataggttgagatgagattctttgttgagtactcactaagtgtttcaactctcacacttacactcaagaatcttcttcatctacagaagattttttttaaaaaactcaaactcaatctctctcttttctctgcacctctctcttctacctctcaatcttttctctcaaactcttaatctcatctgaacagggttctgaatctcgtatttagtatcttaaaaagataagtgaaagtggtatttatagacttaggatcaagatcctaaagttggtagctgcgagaaacaaggttgttaagttagttatctaactaactaacttgaccaactcctctttgagcaaagtctcaaagtcagcttaagtattagagcttctgggaacgtaaacgagcttttggactcaaggaccaagaatacttgctgaagacgcctccggataagataaagtctactgatgtcgactatcaagaaattatcattccatgatggatagctagccaacaagaactccctcctagagtgaggctagctatcttgagacctgaaccaggagtagatatgatagtcattcgagaacttcctttcggactcgactatcattctacaagactcctttcaggactggcaaccgtgagtaaacaacttccagaaatgacgattgtggaggcttttcatttggaggaactataccacaataaccatctagatattttgacatcttaattgcccttttgtttattcaaattgatctgaactctaaattttgttcccaatttttcaggacacggtgtccaagacggctatgaaatggtcaaaatttctaaaattggagctattgaagctaagttcatgggcgttgatctcagaactatcatgtttgccattgaaagtggacaagatgtttcagaggtcggctctctctgtgtatatatatgtatgaaattctatgtatttagtttgtagtcaatttgtaatagatcttggagatgtgaactgttttctgtagtttttttttaataggagaaagagtttgtgttgggtcaatgagaggcatacgaggtgaaaattaaggatcaagcagaggcagaatgatagaaatgctaaagaggagttatagttggactgatatgaattcaactaatagtgaaaatcattgttaggttgatttagtttgatttgctaagcgctttctttcttaagtatcttattgttattacctacatatgaaaaaccatccatatactagtgagaagtacggtaacaattcaatcaatttaaaagatgaatttgaataatctaaatttcttcttcaattagtttggggtaatattttttatgtaattagattattgaaagcaaaatctacttgcattggaatgcttttggtttcttcattagcaatgttgtgcatagttgccaaagaaaaagagaataaagatttttcaagggggtggaaatttctgttgagtatacagtattaatttcccttaaagtgaaaattagaacaatagcttatttgcatcatcggttgtaaaacaataaatcaagagaagaatagagataaagttactgaaacagcaaagctatttcagcttcatactgaagtcagaaagttcgaggagacgaatcctgggaatgctagctgcttcctctctttctttctgagtgttgtaaccccagtccactgattaaatgattttagtttagcaattagcactttattacaacactgcagaccaaaaaatattgaagaaagaacatagctaggtacagataaatacatgtatgagaggtagtgaggtactaaccgagatacaagttccaaccatctaactcaggttctttaatgacattctttagggttgccagtcgatcttccacaaagctgatcaaatgacactcacaatttaagattttaaacaatactagtaccagatatacaagtgggcagaacagaagtgccagatcaacgtataagaatatgtttataagatgatattgtgttcattctattagaatgcattacatacttttgggtcaagaagc

SEQ ID NO: 190970 - DNA, 2305 bp, Cannabis indica
tttttaaaaaaaaaaaaaggagattgtgtgcgtttatttttataagatggaagaatcattttttacaattgtcaacgtcactatagttgacatcaataataatcatatacacttaaagtggatttccctactgtgctgtacagccttctcaaaagagtagtggatttccattaccaaagtgcaaaaactggagaaaaaaaaaaaagatagtggggacaattaaaatattaaaaaatatatatcattaaaatggttaattttaataagataattaaaagggtacaaccacaataattttgataataatttgaagtatgtgaaataaataattttaatgcttatgactccatactatacaatctgctgaggcttcaaaataacaatggcgatcaagccaaactgctccaaagcgttatcatcacatccacacattttgctcaaataactgtaaaggtccccaaaaaatttatttcttcaattctaagatccttcaaataagagcttcctactcgaaattttttttgaatataccagaaaaaaaaaaaagaaatgaagtaataattagctttaaaaataaattgtgtaagaagtcagtcagtaacaatcattgttcagcatatggcaaattagattctagggccaacatggctgtgtcttagttgaaaatgcactttgtatatgaatgttaaatttccacgttagctaagtagattaattggtgttattcttttcagcattgctattaggcacaagtggtgcttagcactttctcgatatgtcgcattgctattggctagcgatacttcctaaaaactattatatgaaactatatgggacctgatacttagttggaccaatagcgatattaacacgtagaagggtgctagacactactggtgccttttagtaattctctgttcttttctgttaacattaacagtttgttaagtcagttaatttatctggtttaaacttatatataagtttttgctttcacattctcttcggactttttcttttcttgtttctctcgttctctcttctccaaatttattttgcagaaactccattcttggagctactatcttgaagagcaagagggatattgttctgattattctaaagggattttagatttaaatgcagggagttcagtagcaatattcacgcaagagggatcatcttgtgtggatcgaatcaatggtgtttcgattctcttttctaataaggatacttaattagaaattagtacttgacaaatccgtgcgattaaactcaaagtggacaatattatactattgtaaaagttaattaaggtgaggttgcaacctcgctaacaagttggatgaatgaggcccaataagtggtactagagccaaaggggacgtgggctgcattagcgttgcgtaggagaagctctcaatatgaccagatctcgataaaaaatgtatatagtcttttatatcgaaaatctacttaatattgtggtggtttgactgcatgtcccgttgacgattccaatgtatttagtccatcgtgttaaaagtctttctaataatattggagcatcaactcaaatcttacattaaaagaatgcccttaaatataaaatttaactactctattactataaggcttttttagaaggtgtcacaatttgataatagtatactaatgcgaaagttaaaagtaaactttgcagcccaaagttggatcaactggccaacaatacttaattaccacccctcaacttgtttggtgattatatatatatttatatatatatatatatatgtgaaattatagacaatttcattataaagagggaggagaggtggacacgacacattattaattcaagtgataaggcatgcatacgcatgcatcacgtagttatgaattttgcatatagatcaaagcacttacatcaattaaaatttctttaatttccataacctttgaacttaattgcaatcaatatttacggagatcactacatgtatattgatcattcagtactttaataataggctaataataatataataagtgtttaaaatatgattgagtagcgaacaagataaagcaagaagaggaattattaggtaagaagatagctaggcgtgaaaggtccatgggagaatgtagcacatggtgtggctaactaggtgatacattacactacgcctctacccgtgggtatatatgtgggcgacagcaaaaccacactatacactataaacagtactagtagtgtgagtagtgtgagtgagtgtgcatagtagttattgaatggaccacccta

SEQ ID NO: 190971 - DNA, 3446 bp, Cannabis indica
aaaaaaaaaaaaagtcaaaaatctaacgctggaaaatatattaaagaagaaaaaaaaaaacatgaggtgtattgtctatgtacatgcatgtatgtgcatatgatgtgtagaataactagaaacagtgtagaagatcccattatcttaaatttgatcaattcaattattgacagtaccaactcaatgaatccaaaagccccacaacaaatagatcgatgagtcacttgtaatttttactatagaagaagccaagaattatattcctttgaaaatctcattccaatccgatcaaaacaaaaactgattctcacatcctttcaataagggtatttgcgtggcacacatcacaatcatataatcaattattcaaactggacgaaacttactaatcttagcacaactaaaaatcttcttcatgggtcatcaagcaaaaactccccttaatcatatctttgccattaaagctctacaagaacattccataatatttaatgtgaattgcagtggtaactgatcagaactcatattacatacattaaaagaatgtacaagataaaaaggaaaataaaattagtacaatgggaaaagaagaaaagaatcaactgtgcctaaataagtaacgaatactattgtttctattaacttatctctacacaaaaagaattgtgttgactataccaacaagtttctcaacaaagaaaagtttcagcaagaaacatccttagaaccatagctaattgctttgaggcttgtgtctgacatatttgtcatccattttcgaggaccctttgaatcatctaaaatattatatgcataggaaggccacctcaaatcttctttaccttcacaagagccttcaaatcccaatcttaacattttttgagttctctcaagagcaataagactggaaaatgtggaaaaactattgcccaaaaacacatcagctctcaaacaaacttcatagtcgattgcagactgaatcagatacggatacttcttgtaaatcccatcaaccccaagttttttcttctcaaaaggaagcagattttctctccaaccaaacagtagagatgaatcttcaagcagttcatctgcaacagctagataaacaacagttggtgttgttttcaagccaataacattgctaactctcttcataatctcttccttgctactacatatctgagttatgttcattttcttctctagattcttacagtgaatcatccaatctttctcaactctcatatgcacagcaacataaggaaaaggcttagccttgtctatgtcatttgcagggtcatctttccttcccatatctctaatcttcgacactactttatcagcttcagccataatctcatcaaccaaagctaagcactcaaagaccttagcatattccttaacagcccagtgatcatgccacagaaaagggttcttcccaactattctaataacttcataatcatcaattgggttctccaaactctgcttcagctgctctaaatctctctccattgtccaccttcttccacttccctttcggagctcgaaaaccccggtccggttcgaaacatcagaatacttactaatctgaacaaagcctctacagtgagaattaaacctgtccaactgaaaaactttgtcgaaggaaattggtttcaaaagctctacttctttgtagaacagagaagcacttaagcttggcatgagaagagtcctgtttagcattcttgctgtgagacaagatctggccaaagctatcttttgattatttagtccccacactatctgtggaacctccagaaacttgtcgtttctgattccaatattgtcgtttaaggacagagaaaggttggggatgaaaacgatgtcgtttggttccgctgaagagctaccgattattgtagtgactggaggaaagaaaactgctctgatcaccagcgccaatgcagctaagaaaacacatttggatgtaattgaattcaagtagcagctccataaattcaatgccttacatcccatttcaagaatttatcaaccaaatctgaaacatgcaaaaaataataacaattaattagtattacatacattcatgacatttggcaaaatatatataaacgttatataattatgtatctatgtgtacaacaaatattgtgtaccttaaaaatctctggtatttatgggcaagaattgttatacaaagagagtctgatgccaaagctttcataaacttttaaaatctgcataccccaaaaagaaaaaactcagaaaaaaatatatactgattttaaaaacctcgaatttatcgacagaattcacaaactgccagaacagtagccatgtcacatgtgtcttttaatactactcgtaatataattataataagaccctgtttttagaattagaacccataatcatgaactaaaaataaaatactagtagatgaaatagtgcaaaaatgattacaaggaataaaatacttactttgttctgagaaaattgaattaagaaaaagaaaagtaggattttgaaaacagaaatggtgtttgcaggaatctgaattgtgaattgtgagctgtgagttctgagaacagcctagagaagatcaaaagggagagagagaaagaggggagagagagaggtgtgtcacgtatatgaatcaaaaggaaaacggaaaagccaaaaatcccgcgttggaaaagcgaaccatacccgtctcactcatgactcatgacaactcagaatctcaatttcatacctttttattaacaaccacctcaattttttaataaatcaaaatcaaaactaaatcataaattaattttgtattaaaagaaaggaatattacttcaccaatagcctcttatgtttttcttgctaaattaggtatattattttattttttttgtcaagtttagagtattattttttacttaggtatattaaaggtaagcacattgtattatatttcttgttttgttcttttttcttgttgagaaagtattatatttttatgataagtttaaccatatatttttattaactttgaattttcttatgcattgtcttattcaccaaagaagaagcaagaaagaaataaagaatctatcatgagtatttaggaatttgccaaaataaagtacagaagacagagtgctttaaagaacaaccaaatcatctaatcctgttgagatacacacatttatgaattttttttttttttgctaaatgaacgagagactattctgtacaaataaaaaaagaaattaaataattttacatttagggtgtgttagaaaagtaattgtgtaattactaggtagggtaattattagggtggtaattacatatttagtaattaaactatattttaaaatgaagatgtgtttggatatgaagtggtaattacatataaaatcctaatatcttgtttggcaaaa

SEQ ID NO: 190972 - DNA, 2329 bp, Cannabis indica
aaaaaaaaaaaattaaagaagattttagtacaaaaaaaaaaagtataagtacataaaaattaaaatgtaaagagatttggctgctaattagtaattaacaaaaaaaaacaaagtacctttaatgcaatttttttttttgggtaaaagatcctttaataccaaagcttagtactataaaaaatgtcaatattagattaattttggcttaattttagtgtaactttttcttaataataataataataataataataataataataataataaaaaagccttttgtcataatatcacaagacctttacgacttttgtcaccttggtctttatatctttatgactttgatttcttctttttagaatatgaaataatttttgggcactatcttatgattcgttctttataatattaacctttaactaagcaccaaaaccaaagttgttagtgggaaagtggggtttcttcacaaaattttatccatttttatgtaggagaattattttatatattattttttttcaaatttacgatttgaatttttaaagtagttttaccggtaggttttatgtgggttactatacagtttttagttacgatttaagttgtttcgttagttgcaatagaggtttctatatagaattatgtaaataaaaaaaaaaaaactaatttagaagtataaaaaaaaaaagaccccttttatttatatacatttagaaaataattaattttacaatatacataaaaattaatatcatcatcataaaacgaaatagttagatctcacaatcgtaattatcataaagtgtaatactctcaaaagcgttaaatatatataaatatatatgtacataatttttttgctttttaattatatctttctgaatattctttgaagaaaaacgtcattaagacaaattaattatttttttcacactaaataacaatgttttttcaagtatatttttttataataataataataataaaagctaagctgtatactgtgtcacatgttaatgttacaagttgcatggcattattctaattggacttttgtctattgagttgttaatataaattaaataattgaatgttttgttttttcaattgtttatttattagcattatttattattatcaagcaaactccatgctgaaaaagaaggaatataattaaaaaaaaagaaaacagaaacttaattaaataattaattggagccatgataagggcattggccttcattgtctcttaagagacacaagtaaataaataaataaataaaaaccaaaataacttaacctttttgcttcttcttatttttttttttatatatgtatttatatatagtaatttacggtataaatatttaaatttaatttttagttgtacataaatatttaagtttaatttttaaagacatacttaagttatatttctgaaacttctatagtacttggtcgttaaatgtcaagttattatctacatgtcatttttattagtatatttaaataaaaaaaataaaagtttaatgacattgatcaatcaagaattgtcacgtgatcattaacttgacacttaatattcatttattaattaagttctagaaatataatttaagtatagctactattaaaaattaaaattaaatatttatctaattaagagttaaatataaatatttacgccacttaaacaatcgaacttaataatagtaataatagtatgtgagatgagatgtgtctctaccaattaaatagacttatgggaatctattggagaaggacttgtctcacattgaatcatgatgatgtgattctcttttgttgatgaatttattcaaattttataatagttaattttttattttatttaaatattttaagtaatgtaaaatatacttattattgatagctcttgtgtaattgaaaaattaagtgtaacttgtaattggtggtaattgaattacgttgtccaatatgaaaattaggtgtaaagaatattactatattagataattaatgttatttatttatctaattactactttgttaaacatcaacattttgagatacaatatcattattaagttatgttacgtaatttagtaatttaataattacatatttacttccaaatgtatatttataactttactaaaaggagaattatttccgaaatgaagaaggagaagaggaatgatgaattaattttgtttccaaagtaggattgagacaccaaatccgtacttaatttataaaatactaagatactatgttgcatataatttagaagactaaaagtaattgaataatataaaaataggtaagt

SEQ ID NO: 190973 - DNA, 2035 bp, Cannabis indica
taattttatcaaatcctctattcttttctcccaaaataccagcctccatgacaaaaatgtcttttgtaatagtttaagactacccaataaagaattcatcagtaagtacttaggagtccctcaatgtgtttgtaggctcaagagttcttcctttcattatcttttatagaatgctagcaccaaaatcaattgttggaatgggaagtttttttttagggttgggaaagaaaccctgataaaagttgtggtccaagccatcccttcctatgttatgtcttgttttcatctccctgtttcaacctgtaaacacttagagagactcatagctaaattttttgggggtttgggttttaggtccattgtctaccataatcaggctatgttagctaagcagacctggaggatttttcttatttcctcatccctcttgttcagattgcttaaggccaggtgcttcaaaagcaatgatttccttcatgcccccaacggtcactgctcttcaaccactaagagaagtatcatgtggggaagagacccactccttaagggccttatttggaaagtaagaaatggcaattcaattccaactattgggtcttcttggattcctaatgctaggcctcttcattttaacgagggtatctccacccttaactattgggtctcacatttcattttggataatggaacctagaatgttgatagacttgaagtctacttccctaagaaaactatcgatgaaatcttcaaggtccttatttgccctactatggaagacacactcatttggggatgtcatccctcaagtaacttcactataaactcaacctatcaccttgccaaatccctagcctcttcaccctatccctcctcatctaatcttgatgcttttaaaaactcgtagaaggtagtctggtctatgaaaaatcctccaaaaaatcaaacattttatatggaaagccttccaccatgtgctgccttgttcttttaaccttttccaaaaataaaaaataattattttccaccccttttgctccctttgtaatggcaagaaggaaattgtcactcataccctcctaaagtgtaccagagcaaaaaccatatggagacaaaccaatctccattccttctatctactcaatagacactatgacaataagagctttctactaagagcttttgacaatctaaataatgatcaacttccctttctttttgatatttgctggatgattatggatgtggaactttttgtaactaatcttttgcagtactatagggatgtccaaaaccaacactttcatcagaattcagtgaatccatctccctttgaccgtgttgcgcaccaacaagagatggacatggctagactcccttctgttgagatgtttaatatgaaagtggatgatgcccttgatatccattctttgaaaacaagtgttaggtgccattgttattgatcgtaatgggaccatggtagcaagcatgtgttctcattttgcaggagtcttaattcccatctatgctaaagccaaggccttacaggcagccctttcctagtgtgttgtcatgcacttgcctttagaagcagtgaaatcaaactgctaagttttagttaacaagatcaagcataaatggagggacatatcttccctttcgcgtcttcttcaattagtacaaaactctttatctttatttcttagtgtttccttaagccacattccaagtactgacaattgacaatgtttcaacacataacctaactaggaaatcattaggcttagatagaaagatcatttggaatggtctttttctaaaatgtttatttcatgaatagataaaaacaataaaaaaaaattataaaaatacggtcgtacaaaattttaaatatattaataatttttatgattttacttacagaaaatacagtcgtttatgttgtactctaattaatttgttgttgttttaattatatttctctattacttttatgtaattttcttgttattttcatattgtttctataaaaaaaaaa

SEQ ID NO: 190974 - DNA, 2847 bp, Cannabis indica
gcactattatgatcacagtacctgctgattcaaaaatgctgctggtgtagaaacaaactccattaattccaccaaattgttgacaaaccatcaatcctattcctatctgttcataaaaacaaaacagaatcaacagaaataactaaaagatatagaaagggtaactctatgatttgttcatggtgaattattacagtaacagatcgttgatatctcttttggaacaagtccaacattttggcctttggaaggttttcgagagttgtgatataatcctgcaagccatgacatggtatctcttgttatgttatcttaaaaagactaagacatgttcaaaattggtagcaaaacacaaaagtttatgatcattgttcattgacaggaacctgaatttcggctgcctcctgatttatgttggcattcttaccacgaagcttctgcaatgagacttcaaagtctttatgacgtcctgtcttcgcctgcattcataacgaggttgagagttgagaccaggaagagagtttatattgactttgttctttttacactttgatagcatcataccagccatctaggagactccggaatgaaaaagagaccaaaaagcaaaatagcgcatggaataagacctgcgaatactttgaaagtgagtaatttgcaaatgtatcagtcaaattagagatttccactcctaactatacttctttgagtctgtctgactatttgtcacaactgttaatacataatatgcctatgaaattttaccaactaatgctaatgtcctccatgagagtacattgccaatgatgaaggaaacagatactccaccgcagatcatgaactacaagaataagaagacatcattaggcttgctcatatttcatgcttttcttctctttaaataactctttcctataaaatgactataatctctaaagcattgcaacatttgaatatgttcacctggttcgcagcagttagtgatccacgaagattcttgggtgcgatttcagctatgaaaacaggtaccttaccatttgtccaaaagaagcatcaaaagacaatggttttatcaagtaggatgaactaaaacgactagaatgagaagaaactcaccacataggaaaaggctcccatcccatatccagttgcaagtcttccaaggtccaaaggcaaaactccctttttagcattcaagattcaggaaattaataatacataatataatattattgatcatatagataactatgatataaaaagaaagaccacccaaccacaaacaacttaagttttttaggtgaaaacactcgtgaaatcccaaattttgatagaacagacctgagcaaagtaaatggaaagccaccctgcaacacagaaagcagtatacactctcattgcctgcaaaaacaagtacatttgctatgttagatttagactgaattctgaaacgaaaagttcagcaagtattcaacatggtgctatcttgcttacccattttctaccaacataatcagcaattggaccacttgtgattgcaccaatcatagcaccaaaagtcaatatagaaccaaatagagaatactgtgtacatatacatatacataaaagagtggaaaattcagcttataaatatcatagtcataacaagtatattcacagaacacattcaaaaaccaatattcagtcaagtttcttttccaaaaatcacaacatttcatcaataattgatttgaatactgtagctttcaatctttctgaaattgcctgactgagattttaaaagttcataagcaacagcagctgtctttctttcttgctagttttgaccatgaaatttcatttcaaagtgcttttctctacatacctcgtctaaagataagttgagatccctccttatagcagtctgagtaggtgatgaataacccgcctgtcatttaaacaaaatgtctcagaaatcataataacaaacaaatgtgtctgcttattaccttaataaatagagtagttgaagatgattatatatttctactaagaacttacacaggttccaaactcataggaaccacaaactgcaacaaaagtgctaaagtaaaccatccatggatgttctctgctactttcatggtcagttgatccatcttcaacaaccatgagtggctctcttgtctcatcttctttggtagccatttctgctttttctaaataaccttcagttgattatctgggtttctctttctccacatatataattaaagagtgttagaagataaagattcagaccaagtgtatcttaaaaatggtttttcaccaactcacttgaaaataaaaaaatcaagaaacccacttggagggtgttcagttttctaacaaaaatgtcacttttcaattcctatgtttggcctacaattcctctttcccatacttctcttaaactcttttaaaatgtaacgtagtctaatattatattatatgatatctacacttttcttgctccaatttgatactcctctatataaattgacaaggcaataaaatattatagtttagtttaatgcagaattccttgtctttttgcaggtaaatcaattaaatagcacatggtgtatctatctatctatctatgaaaaagatctaaaatgagaatagtcttttgttttaccttctctattgaaaaaggttatattagattaaattagacaatgagtaagaaagagatccaaagaaaatgaatgttttgttttgagtggtccttaattgagtatggcccacattattaggtcctctacctgtggttgcaatggatttgaaattagctggcgcagccgtaagttattaccaagttga

SEQ ID NO: 190975 - DNA, 834 bp, Cannabis indica
accaacaaggttactctcacaaaacaacctattatgttaacaaatcgagaacctagacacacaacagtagcaaaaagcccaaattccccttttcacaaacaaagcaaaatgcatacatgtagcagagcaaaggggaactatttaagaaactatggcgaacgcaaaaatatttgacctaatcatctgaacaagaaaactccaaataagaggcgtacgtcttaacataaacggaagggaaagtacctcgacagagcccaagcttgaagacatactatccctaagttcatgcagataatttctagaagtaataaccttaattcctaaaattaaatcctacgcatgcatagcaatagatttcttcaaccacgaaactatatttcacaatcaagtctagaaaaatagtttaattagggggaaatacttacttgtaagatagattaagagaggagatgatggttgttcgttgtcatctagaattccatggactgtttggtgacaaggccttgcctagctcccgcagtagattaatcatttgggaaggtaatgaacgtcaaagaaacacagcggcagagtcgaggaagaaggggttaatctttaattcaaagaggtgagtaggggcgaaggtttctgggcaagcaggtcgtctaagagagttctctgggcaaaaagttgctgctaaagtggagaaggaaaagtgacttcaatagccaagactttcatttatatggatggcaacggttcacacatttttaaaatatggggtccagattgaattaattagagtctacgccatccaacggttggggatacaaaaggtttgcatttaatgcacct

SEQ ID NO: 190976 - DNA, 774 bp, Cannabis indica
gaaagagttcaatgtgataatgatttcttcaattactggggtagacttccagaactgttttctgttctgctgcagacaattcttccactatttttaatgttctaatacagactatgttcgtttaaccatcatttttataagaactaataagtcgtatagttaagcatccttgctgtttagttatcattcaaagtttgaaatgcagcagtcgttactagttttatcagtaagtagacagaattctcatagtcctttcctggtttatcagtccattgtcatctcggggccgctttggacaggacctcttcacgacgcctcgtatcttacagaaatgttaaatttggctaaggaatggggatgggcaagtggagacacagaaacagctctcgagaaacttttgaaacaaatggtggatgaaagtgatccccgattaccgtttggttacatcaagttggatgaggtagttttgcaaatatatattctctagtgcctatgtctcatttcaatggacagtttagttctactatatcttgcaaatatctaagggtggtgttttcatttcatctctaggttgcaagccgtgccaaagtaaattctccacccttaagaaccatgatggacgccatacagaaggtattattctcaatttcttttgcagcttttcggttaacaaaggagcagcaatgtatgtttttggtatataggtttctttcttggttaacttttttgaaaagttgacattataaagcaagaaaaatcttgggcattgggtga

SEQ ID NO: 190977 - DNA, 3461 bp, Cannabis indica
aatattactatcattttaattgagaaataaatatttatcattgttaaattattggactttttaatgtgtcatgctttcgagctaatcaattcgtgtttacgtgtcgtgcttttgagcttgttgtgtcgtgtcaaagctcatatttttcgtgtcgtgtcatgcttaagtctatatttttcgtgctgtgtcatgtttaagcacatattttttcgtgccatgtagtgcctaagtttatgttttttcgtgctatgtcgtgcctaagtacatattttttcgtgccgtgttaaaaattcggcccatatttacagcactaacaacttattcaagttgaggcctattggaaattggaaccaaattactcgtctaattttgctgtcacgactctgtagaaaaataataattttgtcaaaccgcagttttcagtgtgctttagttcccataccgttgctttacaagcagatactgaacaaggtctaggcatgttactatctgactagtgctggcttcaaaagcgcctgtgaaattaacttagctttttcagactctctaggtctcatgaaataggtggctgacctaggtagaacacctagggacaggaagtaaagggtagtaggagtatcataattcacatcaacttttgcaaatgtgggaaagcaaactactatttgtaaacgaaacatggttcattcacattcaacagctgtgctgaatgtggaaggttcaaacttcacagttttttacagtaaagcttctttgcagactttttgacacaactccttgttggttttcaaagctcttatcttcactgtgtgattgctttgatttttgagcttatgagtagttgcctttgtgttcataaatcatatacataataaccaaatgtgttttagtggcttatattattatcctgctgtcaaatttaggtactcatttaatgaggaaacaggaacctacgatgaagtaccaaatgctgcatcaactggggagtaaaagaaaaaggagttggttttgctacatttgtacagactaagccagattttggtttttgtaaaaggaattggatggctgaatggggcagactactccatctttattctttagaatctgttctaaatacttggatgtgttgttaaacgatagagatccatatattatcctgtgttagttaacatctcacaaatgccttagttgtatttcccctcaaaaggctcaaagctataaatttcatattcttggaagacacgtggaatattaaaaaaaaaatggaggaatcattgtgaatgaagttttttctcttttttcattatcaaaaaagaacaaaaaagttctttttatttattatggaagttacaattattttattttgatttttttgtagggtagaatttacaaattttgattcagtaaaagttttgttttgataccataataaattttgatgagcagttttcttgtagctcttgtttttacaagtaaagttcaatacattaaaatttaaggtattggtaaagttttgttgattgaatttcaatttaggatattaaatatgtcaagtttcaaaatccatgctttgctgtacaaatggttgagctttaaaaaataaggatttttggttgcctaataatgttatcatcttaaattttaaaggtgttgctatttaaatgtaattaattaaaaattatttaaccaaattagtatgaaactgtgaaactatgaacctgctgcagacgtgcaggttatataatgttactaagtctaacattaacaagggcactaaactcaaaaagaagattttcactaaaaaaaatcaaaataagaaaaataaaataaagcagcaaggtccgaagaagaatcaatcatcaaagttaactaataccaagcaatttaaactcagaaaaatgtcacttacacagcatacttaaagataaagccattaagtatcacaaatggtttcactgcagaatagtttaaactgatgagacagtccaacctttgctaatatcataaaaaggtatgaaaatcacttaagaagactctggtgctggttgagtcacaccgaacttgaccaacaacttgctcaaagagtcaggggaacaaacttggtacttcacatttccagacggagaaaggtagacctcagccaactcaagtttctcagaagtaagacttgtgctatccatggtcttactcaaaaccttgagggcgagctggaccgcctcttcccttgtcatttcgtccttgtaatcctgcttaagcattgattgtgctgcttggttgtttgcaccaatagcagcagctttccagccaccatagttaccgctagggtcactcatgtaaagctggaagccgaaattcttgtcccaccctgcaaacaaaaatgaaacgccaaagggtcgaaggccaccaaactgtgtgtaaccttgcttagtgtcacaaagtgactgaactagctgctcaacaggcattggctcttggtaagagaatgtgtagcgttgagcttgaactcttgcagtgtttatcaagatgttggcatcggacattattccggccacagcacatgcaacatggtcatcaatcttgtacattttctcggtggaagttgaggtttgcaggagtttggatgttactttcttctcaccaaccaagacaacaccatcctttgacaatattccaattgcggtacctgcattaccaatggcctccattgcgtactcaacttggtagagacgtccctcaggggagaagatcgtagtacggctatcatatcttctagacatctttacttatcactgtgatgaagcaaaaaaaggataaatacattttcgaacaaaagttgactggaaaaattgaaagatgacaaaagcaaagttctaaaagtgatctcaactcaaataaaacaaaagacaacaacaggtctttaaattaacaatagtaccgaaaaattcaatgaagcaagctgtaagcaaaaaacacagtacagaaatggcataggcaaagtacatctatgacattaataattcaaagaaacaagctgtaaacaaaccaatgaaagcctggataagaaagaaacacactatttatttatgaacggttaacaaaacattagatatcaacttcaaagatataataccattatggttcactatcttaataatgaagaagctctatgaaacacactcttcgaaatgagattattgtaacatcttctttcctagcatgcgatctcatagcactcaactaagcatgaccaatacacaagagccattcttagacaacgatatccgtaagaatataaaaaaacccaaattacattattttatggcatccaagaagcttgaccttcaccaatttaacaccccttttgaaaaagggggggaaaaatgaaaggcaaccacaaacctcacacaaatccaaacacagagaatacatacatgttcaattatcaatattacaaggataac

SEQ ID NO: 190978 - DNA, 4612 bp, Cannabis indica
ccgcaatatggtatcagagcagggaagttgagcttccctccgatcctttttcgttttcatcttcttcctctcgccgtgttcttctccggcgacgatcgtgtctgaagtgaagaattcatctcttcatcgacacttctctttcttctcagttcttttccgttcatggcttctgataatcaagaaaccaattctggtgaggaaattccagctcgaatcaatgatggagatgattcaaatcaagctgtcaacaacagatcgaatacacagttgataaggatgagaaatccaatagaggatccttcagatccatattatcttcatcacggtgataaccctggaaacgttcttgtatcccaattattgacaggacaagataattacatcgcctggaacagagcaatggaattagctatttctgtcaagaataaattaggattcttgaatggttctatccccaaaccaccgatttctgatccagttctttacaacgcatggattcgaaacaacaatatcgttatttcttggatcatcaactcagtctctaaagaaatctcctccagcatcctctatgatgaatcggctgcagaaatctggaaagacctcaaagttcgttttcaacagagaaatggagctcacatatacaatctcaggaaggagctgatgaatctaaaaacaagaaaatcaatctgtgagcctgtattttaccaaacttaagactgtttgggaacaattaagtaatttcagaccaagttgcacctgcaacaattgctcttgtggtggagtcaagaagctacaagaacactataacatggaatatatcatgtcttttctcatgggattatctgatctctatggccaagttcgaggtaatattcttatcatggatcctttgcctgaaattaaccgtgtttttcatttggtaacacaggaagaaaatcagagaggaagccagaacctctctacagatcccaattcgaatatggcctttgcctttcaaagcgaaaaggcagtcggcaaaccagattctcaaggacaatctaagaaccatcatcctaagaagggaagaccattttgcactcactgcaatatgcatggtcatactatcgagaagtgctataaaatccatggttatccacctggatataacaaaaatggcaagggaaaagaggctactgcaaaccagtttcacacttcaactgaaaactgtactgcctcaagtgaaaataacactatattgcctcagttaactccaaatcaatatcagcaactccttaaccttcttgctgctcaaaccacaaatcccaatcctacagatcccagtacatcagtaggtaaaagtaatattgctttatcaaattgttcaattcttccccaagataaatcttggattattgactcaggtgcgactaggcatatttgctccaatttaaaaatgtttttaaatttacatccaatcaattctgttaagttgattttgcctaataataatcatgtaatggtataccaaagtggacatgtgaaaatatctgaacaacttgttctcaaagaggtgctttatgttcctaactttcaatacaacatcatctcggttagttgtttgactcatggaaatttttttaattgaaattctttgctgataatttttacatacaggaaatcaactccaagaggatgattggcaaaggtgaattggctaatggtctctatatcttggacaccactgccgcttctgtcaacaccttcaatgtttcagctgaaacatggcataagagattaggacacttatctgataaatgcttaggcttattacagaattctttgccatgtaaaactagaaatttacatcaaaatcaaccttgttacatttgccctcttgctaaacaaaggaagttaccttttcctaataatactagtttttctaaacaatgttttgatttgatacattgtgacatttggggaccatatcatgtgccttcttattctgatcataagtattttcttactcttgttgatgatcattcaaggttcacttggatatatcttcttaaacaaaaatccgatgttcatgttataatacctgaatttcttgcatacatacaaactcaatttaattgtgtttttaaatgctttcggtctgacaatgctcctgaattgactttcaaagatttattttccaagcatggaattttacatgatttcagttgtgttgagacacccgaacaaaatgccgttgctgagagaaaacatcaacatcttctcaatgtagcacgggctctttttttcaatccaaaattccaatccgtttttggacagattgcataatgactgctgtttttttgataaataggactccctctcctaatcttggtaacaagactccctatgaactattatttcatacacctcctgattacaacaaccttaaatgctttggctgcctagcttttgcatccactcttacatcccatagaaccaaatttcaacctcgtgcaaagacttgcatttttataggttatcctcgaggtatcaaaggttataaattgtatgacattaattcaaaacagattattatatctcgaaatgttattttcatgaacatatatttcctttccatacactaaatactgagaaatctactattgatcccttttctttattgattctccctaattctcacatcacaaacacacatgtggatgattatccacatcacaatactagtcttgtttctcctaacccaatcttgcaggacaataacattactgaagtcgatattaacaatgaaaactctgctgccaattctaacgcaccagcaatcacagaacccgtttcggttcagcctgaaagcaatcctgcagcacccattgaaactgaaacaacttcagttcagcctagaagaaccagccgcaccaaaaagccaccacgataccttgatgactttgagtgttacaacatatttcaggacaattctcctacaccccatcctattgccaagttcatttcatattctaacctttcacaagcttacaaagctttcattcttgcagtcacagcagaattcgaaccccaaacttacaaacaggttgctcaattcaaacaatggctgaaggctatggatgttgaattgctcgctctcattaccaacaacacttggaaagtggttcctttaccacctggcaaacacgcaatcggatgtcgatgggtttataagataaaatataatagcgatggcagcgttgaacgcctcaaagcacgattagttgctcaaggttatgctcaacaagagggtcttgatttttttgacaccttctcacccgtggcaaagatggtcaccttcaaattgctccttgccattgtagctatccaacaagggcacactctccaactcgacatcaacaacgcatttcttaatggcgatttagaagaagaagtttacatgcaactacctcaagggttgaagcttccatcaacaattcaaggcactaatcttgtttgcaagctcaacaaatcgatttatggtcttaagcaatcgtcccgacaatggtataaaaagcttactgctgctcttcttgatgaaggtttcacacagtcccaagccgattatactctattcacaagaggatccaacaacaattttgtcgctctccttgtgtatgtcgacgacatcatccttgctggtcctaacataaccattcttcacactctgcaaaccactcttgaaagcaggttcagacttaaaacattaggaccccttaagtactttcttgggttcgaaatagcacgagcaacttctggcctttttttatcacaacgtaagtacactcttcaactacttactgacactggatatatcagcagcaaaccagcaaaggcccccatggatcctcggcaaaaatttgatgacaaagagggtgatctccttgacaatccatcacactatcgacaactcattggccgccttctgtatttgactctctctcggcgtgatataacatatgccgttaatactttaagtcaattcatgtcttccccaagaactcctcacttaactgcccttcatcaccttcttcgataccttaaaagctcaccaggacaaggcatcttctattcaaccacttcatctctgcatttacgaggcttctctgactcggattgggcctcctgtcccctcacttgtcgctccacaaccggcttttgcatttttcttggtgactgccttgtctcttggaaaacaaagaaacaaccaaccgtctcgaagagttccgctgaagcagaatatagagctttagctgcaaccacaagcgaaatcacatggattcaatatcttcttcacgatatccacattgctcaaccaacaccggctttcatctattgtgacaacctctccgccattcacattgccaacaatcccacctttcacgaacgcaccaagcatatcgaattggactgccacttcatcagagaaaaaatagccaaatccaccattcggctcattcctgtcagctccaatcttcaattagctgatgcatttacaaagccattaccctccacaactctcactactcatctctccaagatggccatcagtaatatctatggtccatcttgaggg

SEQ ID NO: 190979 - DNA, 4124 bp, Cannabis indica
acactctttgattattttcttattttaaccatctctgttttacaatggagaacttgttaaccccgagggagaaaataaagataaaaataaaacagagaaaaagtaaaggagtacccttttgatttgggaacttggaatttggtcacacttttgacgaaatgaattttatattgaagtaactttgatggaatttttttctatgatgagtcattactaatactataataactgtgttagggaaggtgtaaaagtcatatcattttaaaaagttagaataaggagagggtaaaaattaaaataaatatgttatttaattatgtgggcaaaggagtaatttgaaatttgatttaatttggatcgtctctcttaatgatagttataataattaggctaatacaataaaagagtagcttccaagttctaagtcattttcaagcaatttttagataaatatcatttaaattaatggcataggatacaactttgccctgttttttgctgaaaatccgtaatcttcttcctgttgtgcaatcttacatgatgttcctagtgccacattatcattgtgattattagcatttacttgtataaactgcagtgcaaacttattgagtaaaactagttatatcttgttaaaagaagccttagatgctatcatggataacatgtcaaagcagtggtaaccaatgatcaaactttctccgagtttcagaagtctctgtaatcctttctaaattcactctcaaaagattgggcaccattagtttaagttgtcaatatatatttagttaaagctgtctgcaaatacaattgcttagtatgttaatttcaccatgttaacagattggagtgtccaagcaacagtgagctgggtactctctgaggcctttggaagcagaaatgtgtccattgttgctgaagaagatgttcaaagtctctccaaggctagtgctgctgggctattagaagctgtagtgacaactgtgaacaagtctctagctgattgtcctcgttttggacttaaaggtcctaacatgccccttgggtcttctgaggttcttgaagcaattagtcgatgcaactcaaatggaggacctaggggaagattttgggctcttgatcctgttgatggaacattgggattcgttcgaggggatcaatatgctatagctttagcgctcattgaagatggggaagttgtacttggcgttcttgggtgtcctaactaccccatgagaaaagaatggcttgcttatcatcaccgctatcatagaattgtgtcaaagttgacgccaacaaattcagaatcatgggataaaggttgtgttctttatgctaggaaaggaagtggcaaggcctggatgcaacctctcgtccatgttaataaaaagttagtttggccaaactctgcgaggccagtacgagtttcccccattgacaatccatcaatggcaaccttctgtgaaccagttgaaaaagcaaattcaagccattcattcacagctggactagctcacagtgtggggctaaggtggataagctttcctttactattattttgctatgtctttggaatccagccaatgaatgtcatatttttaagaagaaaaagaactacctaagtagtggttaacataacatgtgtttcacttgtaaaatcaacacattaaaacgtactgaaactcagactatgctaaaaatttgattgtcatctgactgcaggaagcagcctttacgagtatacagcatggtgaaatacgcagccatagctcggggagatgctgagattttcatgaaatttgctagagctggctacaaggaaaagatatgggatcatgcagctggtgttcttataatacaagaagccggtggaacggtaacagatgctggaggtcagctgctggatttttcaaaaggcacgtaccttgaaggtcttgatcgaggtataattgctagtgcaggagccactctacatgacaagatcatcaaggctgtggatgctagctgggattcctctagtctgtaaaatgttcttatggtaaacatcaatgataacacaaagccatgaaagcgttaaacaaggcaagggaattataaatcagccatttatcatttttttcccgttctggattaattgggaattatcaatatatatcacccttccagggatgcatgtaaaaacaaacaaagaataatgtttgctttgaagaaagggggctttatgcttgcagttttggcaaactgttacctcctcaccccacctggaaaccaattagctttgagttgaaaaagctgatgaactttgtataattacataatataagagagtcttgatatgttttaggactcgttttctgtacaaaaaataaatgtctttatgtaattggctcttgtgttttttggaatcctagttcacaaattcacacaccatcacattcacagcaataggagactcttaacactataatctgtatcaaagatgctggtatttggatctctaaatttgagtccaaatattctaaacccatcatccatggcaataaataacacagcctataaaagatgtgcattgattatcttacaaagcaggagtgcagagtaggaccccaaaataaaagagtacagaaatggtacgcgtagcaaattaaataaggaaggccatatcactatttacatttgcagcacatcacaaatcattcttgaaattaaagattttattttgagagaggttcaatattcattaatgcattgtgcacatggtcatggatatatggggcaggggaaggacttctttgcctaactatttgagtgtagttgagaaaggttacacacaaataagtcccatcacagctcattaaatagctagtggttgtctcgactgaggaattatatttagcctctaagatcttttgagatgtatttatttatttatattttgaaattatctataatgtaattgacagtgtgtcaaattgtccactggggtggtcggtcctccattttcaattctctccctcgttgtcaatttgcttggaggtgttaaagaaagagcttattactaaatttaaaatcattttcaagttcaaagtttgtagtggagcaaagtagacatttttcccccctttcaaaaaatgaattcaagaaaatatttatatatacgcatataattaaatatgtaaaagtaggagaattttacagataaacatagagcactgtatagttgcacttgcatgagatatggaccacatccaccaaacaatattgtgacagaaggagaggaaaatgttttaatgtaacatttatggtggaaaaaatatttccaaagttctggtttgcagcttaccgaattctattgaaaatttattaaagtgtctttaattataattacaaatactgtacatatgtattacatgtagggtactggaccatgttattattattcctctctatcatgctatcctacgacaaagtgcctcaagaaattgcaatattgggccttgaaattacgtcacctgcaagaagagcattatgtgcatttgtgtggtatatactataaaatcatgagtagcatagtgaatctgtttgactatatatgaaataattgaagctttacattacatggtaggagactattgtgaaagaacaatacacacaccattctcttattaagccttatctattcttgtatattattgcttagataatcattattcaaaatcatgttttttattgattttgatatcatatatggacacaagtcacaaaccatttatggatctttttgttactattctaatttttttaagcactacttttggtctacacgaaaaaggaagtttgatttggaagtacatatagtgctatagtatccgattatagttatatatagatgtccacattttgagacaaagcaaaaatatgtacgtaaaaattacgttttttttttttggtttataatcacgtattcacaattttaagatgtgaaattaagaaatatagattttaatcaagaaaaatcaagcttatatctaatctctataaaaaaaaaaattaacttttagtcacaacaaaagttgtgattaattagaaatcatcattttctatgttgtgattaaaagatctgt

SEQ ID NO: 190980 - DNA, 2399 bp, Cannabis indica
tttaattatatatcaatgaaaacatactggtcaaactaataaaattttattgatcaagtagagtttatggtaccaaataccatatgtagttttttttttttttggataaaatcaccaaattttatatttatccaatggctaaattttatcatggggttaagcttagtaggctatatgagtattattaaaaacacaggtaccaactctacattttgataaaaacacaagatacttttttatattgatatatcaaaaatatgctgatacctttttgccactcttggcaggactatcttgatgacatacaagcacaagacacatgccgttgacagtgatggaagagtcatctctaatgctgatgtagatttctacattgatgatgtatgttctccattttctttagctaacctctatccctctgtgttgagaattcaatcttaaagccctggttgctgtcagtcatcgtcatttctaatttttagtaaaacacttttaaagccagcattagtatacacattcaaattcaagtaaaaagcatttacaaattcctaaagatgttaatggctaacaattaaaaataataaaacataacataaaattaaaatgttagaaattaagaataaaatctcaaagcctgagtgttgagtccctattggtacctacatagtttcttgggtttggtaggattaggaaaccttgtttctaaatagctaaaactagtatcctaagtttccgtacaaagagctctgttatgcagtgtcgatcaaagtgttgctatcattattggtagtgtgttgaaaaaaaaaaggttctatatgttctggctcgaagcgatcagacctcgctaagatttacactggtaatttggtagattgatatatctatgaatgttttgtaaaaatagcctttatgaaatattttattagtaaaataactttataaaaaaatttattagcaaaataactttgtatggttgcagaaacgactattaattacatcgtgcgactataaacgactattatagtcgtaaaacaaccataaatttattctgtgcgactattatgatcgcatagaataaattaagtgaggttattttacaaattttaatatttcacattgttagtttgacaaatttcactatatctatggcttccattaattggcatagaaaatcataagaaggcagtagttactaatgtttggtttctcttttttctacaggacatagtatgtgtggtagaatcaaagccagcaaagagatacggggattacttcttgcgtcagattgtcaaggtatccatccacaacttcttgttcatacttcgatcatacgactgtgctgtgtactttcagtgcaaaaaggactatttctttctttgcttatttattttaactttgtgtttacagcttgaaggggtgatcaatgatatggacagggtaaagctggaatgagacaattgaaaggttccattttgtcgggttttgattttgatgatgatgatggtgttgtgttgttggtttattagtttttctttttattgttagttgggcctttagttaaaggcaaaccttaccagagagtaatttgtgctattatttatgtgctcaacctataattttgctaattaagttgataatatttgggaacactatctttttcatttgtaaaattgaatttctagcagagattgtttttcatgctcatgttgtgcctgctttttgacaaggaaatttgataaattatgcttacatcaagcaaaaaataacaatgtagatttatttttcatctcctcaaattaccctttaaatcaaaaatcttaccctttttcttctatggcataaatttgaagtatttatcaaattattatcggattatattatgtctttatcaactattgtaccactattgaatcattattggacctttatcattaacttttagattccactactattgtatctcattgtactatatacaaaaaaaaattaaaaaaaatgcaaattttactaaaaaaaataaacaaaaaatcaaaaaaaaactataaatccttaagggcccgtttggtacgcaggactggattggattagacaggctaatttgtccaatccagtgtttggacatgttagaagtctggataactaatccagttgacctcatcagtaattatcccatccagcagggtgggataaataatcccatgcaggtgatatttttttttttatcgtttttttaattttaatttttattaatatattttaaatttaataagaatttaaaggaaataattatcacacatttatttatacattttttttatcaaaaacttatttattaaaattaatgaaaatgtataattttgaattattatacataagtttttaaaatttagaatattatt

SEQ ID NO: 190981 - DNA, 1632 bp, Cannabis indica
atgttaaaaaaagaattatgctccccattattgttgtactactacttatattactacacatgaacataatttttagtccaacccctcttctagaagtactaatgcataaataagctgatcagtactgaaggagtcctccaaagctacctttagaggcaaatctagtcatgaaaagagcataagaatctttgagactaaaatggggtaagagaaagttccctgatttgttgttcttcttcttcttcccattcttggccaatcttttaagccttggtgaagaagtttggttctcatcacaactctctggctcttctgtgatggttgcaagcttactcttgaggatttcttcaatgtctttccacgaatcggttcgaagactttttcggcttgtgcaaggcactgctctccacattttcctataatcccttctcatgtttgtttctctagaaaattcagaacaaaaaaccaataaaaattgattgatctaatatgacaaccctgaaagtaggggtacctcttcacattgaccaagttgtgtgaccactaatctcacctgagatttgttataccataattgacaaagaccatctttagtgctcctatcttatccttatatatatggtttgagagagaaaaaaaattgaggaaagtaacaaggaaaaagtggaatgagttctctgtattagttggaaagcttagtagttatagaagagggtccaggccagaaggacaaagttttatgtcttagctttctttacagccttggttcaattataacctgtccttgtttgataacttttgtccactaatatcagagttatttatctcttggattggaagacatcatgaatatacaagatgagattccatgcttttactttgaagtttttagatatgtttattttatttatgggtcctttttttttttttaatgtaatttgaacagaacaaagaaagagacatgttgtctgctacaactttccatagttgccactctgtcattattaaagttttaagcttttaatagtaatgatttcagcatatatgattttgttgtagtaaaggtaaaagtttgctctttcttttttgtttttattaaattcaacattgaaattattttgaacattacaagagcaatcttcattttagccttaagaagacactaaaatcactcttaattaagttttccactcttgttcaactgccacaagattcttatggacaagtttaagcagttgacaagttggtttgacaatgaatgatagaatgtcaaaactaaatactaaaagtcattaggtatcataaacaatagtttctccaaaacaagaagatttttataatactaaataatgggttgcttttgtttttatcataatggagaatatgaagtagtagaatatcaattgttctctaataaagtttttagaagaaggtatagggaaatgatataaaaaacaaagaacttttattaaagtggaagaaagtttaagttctgcattgtgcttttgtgaaaggcaagaattgaaccaagtctttaaatgcatgtcttgggatccaaagtagaatataatcacatttcctttctttgattattattgatttattatggtacatcttgcttaagatggaggt

SEQ ID NO: 190982 - DNA, 2429 bp, Cannabis indica
aatttaaattattggaatgttattcaaacaaattaattttctactattttaatatgataactattctatttatttgtataatattctattttaaaataaaagaaaataatatttcaatttttttaatatatttaatatacatattaaattttatttatattttgctgaccaatctcctggcctcccgagatatacctcatatctctcggcatacagattctcaaaaggccaagcatatcaagatgagagttgctaaaggtatcacttgtgcttagtgtttcgctcagtgtcatatcgttattggtgtaattaagtatatatcgggtctcataattttaaaaaaataattttcaaagaatatcactaactaaccgtggagtaccacctacaaaaagcattagagaccactagtgtctaataacaatactctacgagattggtcaatctcaagcgtggacccactaaaaaagaatattttagtagtgtactacttcatttctcccaaccaatttaatatatacatactatttttgcactgttaattaaattagtaaaatataaattattatgggctcgtttagtacagtgtataagggtggcattgtattaaataataaataacattatatttggataaatcaatgtattgtgttaattattacaaccaaaatttttaatacaatgtatgttgtattatttaatacacaacaaacgatccgtattagcttgtattatactatttacaaaggatttgatgtcaacaccaatctccgacccgaaacccggacctaaacccgaacaggaactcgaacccaaacccgaaccgggactgtagaccgagacccggacctgggacacgcacctagacacggatcgggaccaggacccgggaccctggacccgaatcgggactgggaccgggacccggacctgggacccgaacccaaaaacggaccctaacccgggaccccaaccagaacccagacttggaactcggacccgagactcagacccggactcaaacccggacccagtcccaacctggaccccgacccggaccctaactcgggaccccaacccaaacccgaattcgggacctggacccgtagttggtgttggagtcgagtgtatttaaaatatattataataatttcacacaatctattaatgcaattcaataccaaacattgtattgtattaaataatactaatacaatataatataatacaaaaactaacacaataatacaatataatataatacggtatactaaacgggtcctaaatgtatatcatacgtacaatatatattaatgttcagctcacttattacaattttctttttagaaaacatacattgcatattattttaacaaatattatatgttattagtgttggaagcatgctcaagtagttgggttaatttgtgagtgttatttttagatcgatggagaaatagtttaaagcacaacgtgatgaaggagtattaattgttgacagcaaggatgattataattaatgtggtacattaaaacaataattaacaaggtgtactaatttactatatataggcatatttttattgttttattaggtgtatttgtttcaggaccaagctaggtctttattttaattaatatttctaacaactacattaattatattttagtaagtaaaataatgtagttattaaggaaacaaatcgtgtttctttatagaaatgaaagcacatgaaataatataattaaggttaattgatatgcataatatataattaaattattattatgtggggtctattgaaatgagcagatataatttgaagcatgtgttcgttatattcatcaaatcccataatatatattctttaatttagtacaaaaatttatgacataaccaataaccataaatataaataggaccattcatgttctatggcttgcaaatgactcaagatctaaatttatgggtggattttattgaaacagactcattattattattggctaacgcggttaataatccatcatcttttaggtcatattttaatgatttagtcataaatattaaacgacatttatccaatatttctcaagtttgtgtttatgttaaacgaactgctaatcaggcggctcatagattagtaaaataagctttagtgcaggataatgtttgtatctggcatgagaaaattcctgctgttattctctttgttgttgtaaataactctatctaatttataatatcaggcttttactcaaaaaaaaaaaaaaaaaataaaggaccattcgattaagattttctccttttttttttgtttgaagaattttttttattaattaattaaggtgttgcttagcaacattcatcacccctcataattagattaaaaaaaaatcaagctattgtatttaaagagattatttat

SEQ ID NO: 190983 - DNA, 1482 bp, Cannabis indica
tggtgacaccgaagattaattaacaaatatgacgaatttctttttcaatagataacaaatttcagtactaatttattttatcgaaaatataaattatataaataattagaaattgaaattatcaatatataatatttaaaaaatagctctactatttcagtcaaaatagtcacaacttcgttttcctaaaaagctaagctaattaatttggattaaacttcagaaagaaaaaataaatatattacttaggtagttgttgtcagtagcacatgattataattattaattaaaaatttattatttaattagtttaattgatgaagataattgttaattaatcccaatgaatccgcgttttgaagaaccccacctccattttaaccaataaaacgtctctataccattcacaacattaaacttaacaattctcacaatattttacccaaccaaccaaaagagtgtaccccagggtggcatattctggggcgcccacagattctggataagatcgtacgaaaatgacaattctacccctcattctggtgggtcagccttaagccacacagactgtgcctactcactctttttttatcacttaccgggttccgcctctggtctttttatatccacgattaagggggtggccaacaatgactccgggttgcttggagcactggtcaacttttagggtaaaagcgtaattttgtgtcttgatcgccctgaattaaaagtaaaatgtacgttgaaagagttagaacagttagagttgttcggatacttcttgtattgtagtggttgttagaaaccatttgggtgaggtagtttgggttcatgtgattaaattggactatgcaaatactctttgtggtgagacggctgctttttgcttaagtttggataccgcaaagctcaacggtcataagttcgtcatcgtaaaaagtgattttaggatcgtaatcaactcccttaactgtatttcatcgtgttgggagattgagaactaccctagctctttagatattttaatagttatattttttcttgtattttaattgcttaccttccaaaaaataatcataaggtctaattattttattaatagacgatattaaaaaaaataaaaaaaagagttagaacagttgatagggctgcgaaaaataaaaggaaaaaaaaaccaatcatgtgagaaatgtgaggggcagaaaaggacatttgcttaaatatcttggttttcttgatgcagtcttctaaggtggagaatgaactagactgataagaaaaggaaataaaaatgaaaaaagggcaaccttataaatgttagtctcacttttctgttgtgatattattgtaattcgaccaataagtagtggcattttgggattttcactgtgttttggttttggagtttttttttggtaagaattggttttggagttatggtttacttactttactgagaatctgactcagcaccatctaata

SEQ ID NO: 190984 - DNA, 1090 bp, Cannabis indica
cataccaaagaggtagtgatccaagctattgttcgacatgtattcatagataagcatctttttcgccctctctatgcaatatcccagcactctaacaaggtttacatgttgcaggtttgcagtcagcttaacttcattctcaaactcttcgaaaccttgatttgatgttttcgaaagtctcttcactgcaatttcttctcctgtcctcaaagtaccctaatggaaaccaatgtgcttactagaaaaattagcaatcaccaaaaacatttgaaccaaatgtactatgatcaattaggacaaaaaggacagttatctttctttacacactagttgccaagataaaaattacacctcaatattgtttccatgtgcttttatttttgctgtttaataagaaaaaatggtgaagcagtaattgcaaacttggagatcttaagtaaacaataaaagggtctagtagtaccttgtatacaggtccatatcctccctctccaagcttattttgacttgagaagttatttgtagctgccttaacagttgaataactaagtacttgcagattagaggcatcactgtctcgatgttcagtagctaatctgattttgagtttataaattgaccttttaatgatattcataatccctacagccaaacaagctaagttcatttagataaaagtaccaatagtcttttatatcacacacagctaaggaaatattacctgttgaattgagtgctcttctttgtaataaacacaagatggttgccagcaaaagaataatcatagcagttgtaactagaaaaatggtaaatagtcgatgcttcagtccttgctgatctccatctccctcaagagctatcaaagtagttgattttatgaattataaggtacttttccacatctaacaaaataatgcaaataatccccacaactccttttaggtggaaattttaacttttcaagctaagattaggatgtaaataactaaaacaccattcataccaaatgaggtacctgctttggagagaacccagttgttatcgtttcctacatgaaacacaaaatagtcccataagattcatcttcttt

SEQ ID NO: 190985 - DNA, 2504 bp, Cannabis indica
tatcagttagagtagttagtatatagtttgtttagctcattgctcttattgaacttgtatatatattgtaatctgcacacaattcctcttaaatcaatatattttcttctctctgctacactgtttttccattctctctcaactaacaagctgaattatcattttaagggctaagggcgaaaatactacaatgcatcaaaatattaacaaaatggactatttctgccaaaacataaggattgaaaagtgaaaactgtagtcaatttccgatcaaacatgtatcatccacatccagaccaattacatataagcttgttaggccttgacttcatttcagtactacctgtttgaaaaacattatgataacgatgagatgatcagagtactctcattcctacaagagatgatcagagttcaaaactacgttaactaagaatagttaaattatccgttgagaaaaacttaaggaaaaaatctttgttcttgttaatgaaagctttaacgtaaacacatttgacttaaacagtcattaacagattcctaaaaaacagaaacacccaacatggcagtctatagctgtagcttataagctagaccatacaaaagaaaaagttctgttataaaggactggtgcctaacatcacaataacaagcactacgtgattttccattgtatatttattaaactaaaaaatctaggacttgaaatgatcaaatttaacagtacacaccaagttgaaaaataagcatgcgtataacatgagaataataaaaaatatatataaaaattaacacaaactacaaccatgtacacatgaaaaatgacacacataagttgatagtgaactggatagctgcaattattttctaaaataatcagcagagcctaaaaatgtttcctccagatgaaccaaacacatgcctcatcaatatcgaattcagctagaaaattttctgaaagtggattttattagactattacttgggcaggtctggtcaagagattcacatgcaaataccaactataaccattatataggcaaaacagtgaaataaatttttttttgcactatgtaaggaaacaatagaccttgtaataaatacctaaataccacaactatggcataatgaatgtatacaatatatgatctgcagatataagaccaaaaaaatcgcgccctgcctcatgattattcagaatgacatatttcttacagcaaaagatatctatttttcctattcatacaattttataatataatcaaaaatacatagaccaattttcacaagaatctaacctcaaaactattataatggttttcataatatcaaccgttttgattcagcagcgtaagtggggcttgcgagtgattacaagtgacctccataacagcaaaattcacacacacagtggaaatttcaagaaacatactgtgaaatccttgaagccatgttagcaacctgagcctgcatttgggtagctctcactttcgctcccatagctctgtgaaagaattgctccctagacaacaatctaatacttctcaagtactgatcaaagggtatagctccatcctgaacagctttatccaaagcatatatggcatcttccacagccaaatctcctgccgtacaatcaagcatttgtttagagagtgagtcgacgcattcgaaagcatcgtcaacatcaacattctccaaactcctagtcttcccttcattctccctcaaccatgcctccaaaatatcagcattcatcaaaaccatctgcaattgctgctccaacccttccatctcagattgcatctccttcaccccagtattcaactgttcctctctctgcctcagaaccccctgagcattaaacatcccttccatctccgcctccctcgcctttctcatccctgtaacgtcaccgtgtaccatctccaccagcttattgatcgcattccgcttgtacacctccgtcggatcatcgctctgaggccgagaatacgacccacttccactaccgtaaggagatggcggataagccctcggcggaattgctggccgtgtatacccggacgacactgccggccccaaattcaacgaattaccactcgaactcggtccgaaactagacccgtgactcggactcgggctagggttagggttgggattgggattgggactggaattgggattagggcgacgctgagagtaaagaggagggtctcttccaaacataagactcaaattcctagacaaatcaacaagattggaactagggtaaacccaattttgcaaataagggatcgaaaccagacctgaaggattgacatgagggtgagggcgcttgatgatcatgtcgcgagtgggattcacgtaaacacatggaggatggcgagggtaggtctccataagccaaatgacaacagggatgttgtatgtaacaccctgaaacgacatcgggacagtaccgtcggcctgaaggagattaacggagcgtccatcgttgtgag

SEQ ID NO: 190986 - DNA, 4693 bp, Cannabis indica
tttttttttctttgatttgaaatcttgaacaactcgttaattttgaatttgactttttgggtggatagttttttgatagcttatcatttggtatgatttagatcaaagcattataaatcccagattttgaactctcaaaaggtctacattgtaattgatagttagctttatatcaaactaaggccttctgtggatttttgccccacttttctttcaggtatctcaaattcttaattactgtaattccagatgcttggctgtggttcctcaaggtggaaataccggccttgttggtggaagtgttcctgtttatgatgaagtaatgtactttctatatttctttgctggttaccctttagaatacaggataattactatatttatctttttgtatgtataattaaacattctatacatgtatgcttgtgtataaatttttcaagactgaacctacggtaatcattgctctgcattatgatttttcaggtgattatcaatgttggtttgatgaataaaattatatcttttgacaaggtatatcttttaattattttcaagtttcccctatttttcaccaattaaccatgcatgcaaaatatatttttggaaccatgtctgtgtggtttttcagtaattagagtattgagtggtatgctttaaaaaattctactgttaattcttgtcttatttgatatttctcttcagtaaaggtaaaaatgacaagggttttatgaatatgtctaaaatatatagtgattttactgtatacttttcaggtcagtggtattttggtatgtgaagcagggtgcatactggaaaatttgataactttcctggacgcacaagggtaattttcttattcatcaactttctcctcctcaattctcgtagaataacttggtttcacaatgatgaaaggatcaacttttatgaatgctcatcttgttaaaatgagatactcatttctgcgctatatgtttattgtcagtaatgtggcatgaataaacattttaatcagtcaccactgatttttctttgttgtaagaatttggataaaaatttgtagaaatgagaataattcataaatggtttttggtgatattgaagactataattcctacataagacatgatgcatgcatttaaatgagtctgagcatagtaattgttaaagtacctatgattctattcagatttgttatgccgctggacttaggtgcaaagggtagctgccagattggtggaaatgtttcaactaatgcaggtggtttgcgactcatccgctatggatcacttcatgggaatatacttggtaaggcttgttcttatcccaattgtattgaattctggtagtgcaaaatttgtttactttgttcctgtttattgagttttgcattttcatcaaagagaattacttcattttgttcttctctttcttcaaagaatatctactttgatttcttaaccatttaagaggagccataaaatttactatctcacagcataattggtgtaggctttataaaatcttattttccttagaggcgcaatatatcaattatacttttttgaattctccaacaggtgttgaagccgttttagcaaatggtgatgtgcttgatatgcttggtactttacgcaaagataatactgggtatgatgtaaaacatttatttataggtatttaccaaaccctcttgttgttttgccagcaaaaattaatttgtgtagatattataagttaattatcatttatgtaggaagtgaaggatccttggggattgtgaccaaggtttccatacttacccctccaaagctatcttcagttaatatagcttttctggcttgtgaaaattattttagctgccaggtataattaatttcatactgatgttttcccaacttatttcattcttttttaatctaagtatggaaagtcttaatttactaaatctgtacttttgtttttgctggaattttgagaattcacttacttgtcttgcctttgttgccaaattttatcatatcagaaactgctcatagaagcaaagaggaagcttggggagatcctatctgcatttgagtttttggataatgcagcaatggatatggtaagcttatatctgtttttcttttttcttttttcccatgccgtgatagttctatctctttttctgttttcttggtcatgattatcgtgtaccacttaataatttatgttactggcttagatttgtaataggaagattgttgaataacaatctccaatctatctagttggtaatttggcatcaaagtacttgcttgcaatgtaattttcttctctagaaaaagagctcaagtggcagtttacattattgtttttcacttatttgttttttcgaatgtgagggtcttactaatttttttgacacagtaggccttgaataaattggaaggagttcgaaatccattgcctccttcactgcacaacttctacgtattgattgaaacaacaggcagtagcgagtcctctgacaagtagtgtcctttacacatgcaattttttctcttaaaaaatagatgttattcgccatgaatttcgttacaacagatggtatgttcatactaataggattttcctgctttgtttgggcatttccagagaaaaacttgaagcttttcttcttcatgcaatggaaattggcttggtttctgatggtgctttagcacaagacattaaccaagcattatcattttggcgtttacgtgaggtatcattttgccttcagcttgtcaatagtgattattatacgggttgatcattgcattgtttttaacatacggttagccatgattccttctcaattacttagaaatttgtaattacatgttgtcaaaatggttttcgtatgtactttgcattcaaaataaaagagcaactacccctcctgctcctggttacctacatagcaattggtatagtttcttagtccccaaatattgttgggctaggcagggagccttttttttttcttttgattttgtttttttaaatacatataaataaatcaaaaaacctttatgctatattgatgcagggtataccagaagcattgcaaaaatcaggggccgtttacaaatatgatttgtcgatacctgttgaacagatgtatgatcttgtagaggagatgcgaacaagacttggtaagcaaactttatggttgttactttcaatagcaaaaataacagtgctatggaaggataggggtcctactgtgcaagtgcaacactgcaggatgttactttgagatagtagttttgttttaatctaatgattacttgcttctaagatttataaccagcttgactagacgttatcgtagaaactacattaaaatctgaactttaattttctttgaaatccttaaggcgccccaactaaagtagtcgcatatggccatcttggagattctaatttgcatctcaatatttcagctcctcagtacgacgaaaaggtaaagtatttttctcaatgttgctgttgtactgaatctgagttttggcaaagtagtgaataaattagtttacagatattagcgcaaatagaaccttttgtctacgaatggacatctaaacatcgggggagtattagcgcagagcacggagtgggtctcatgaaggctaacaagatttactatagcaagtcaaagaatacagtgagtatttcatggattacgaaaaataggacccgagttaatgccttaactttcctttctttctcattcttcttgagttttatagttgctttaacacaactctattcacatgatgtgtctggacaggttcaactaatggcttcaataaagaaattgctggatccccaaggaatacttaacccatataaggttctaccacactccttgagtacctaataagagttaaaagtaagaaatttggttctctcctctaaaccctttactcatctaactgagaaccaatagattatcatgaaaaattgtttctttcccttggaaatgaatgtaataaaaccatgttgtaagtttaaaatggtgtttactagtaaataaaactcttgttgttatattctaattccatatttgatttggtggtagcattagaatatatggtgttattatctttcttaaacaaaatagtttatgagaattgtatgcaattgatattagaatcaattttgtttttttttttcccttatgacagatatggtttagaaggttttttccttaaataatagggggaccatttttaaggaactaaaaaactagttttctgaagaccacaaatttcttctcctataagattgtaaagatcttttaagtggtccacacaaagatattgaattttctcttctgtttttgatgttgtcagtttagttatttatttatttattctagaaacaaattttgcaataaatggtaattaaaattataagaagacagctccataatacttctgttatgtatttatcaagagggtcacattgtttttatactttataataatttctctaattgaagcctgtatgaaaaggaaataagacaaaagagaaaatggacaaagaatcattataaaaaaaaagacatcaattggacaaattggccgagaacatttccattgattaaggttcgaatatgcttataaaactagtctgctatagctgtagaatttttaag

SEQ ID NO: 190987 - DNA, 3214 bp, Cannabis indica
ctcgtaaatttttgttaacagagtttaggtacgttgcttttgtacacagattaagtttaaccaaattaccatttgatatcaccggttcttaactccgattgtatttgtagaaggaggagggctcagtctgtaatgggttccgaagaagaccaggtctgaattctctgaaaagaaattgcctgaaatcttgttaattgagtttggttttcagttgatgctctttaacgctgtttttgatgatgataccataggttttggtggaggagaagcaatatgtgaggactctggtattgaataggcctaggcagctcaatgccctttcttttcaaatggtatatataccataaacaaatttcatgaatggactatggaattcataattttgatgtaaagttttgttctcgagaattagagtaaaacatatccaactgcatcattaaaaccaagtttgaataagtttgagtttttttgaatagtttcaaacatggtgtaagatcaaaagattctaccctttttcatgtgtgtgcatcctcttcaatttgtttgtttgttattattagttagtgattttcatacatgtgatgagaatgagtgactaattaactagcatgctatattcaacatccatggaacaagaatccaaacaatataatatatagtctctctgtttgctttatgtagatttctcggttgttggaacttttccgtgcttatgaggaggattctaatgtcaaattcgtggttgtcaaggtaatttgcttctgatgcataaatcattgtatcttatctttaactttccttgaggaaagaatagaggaatacaatcaataggtcaaattgaaaattgagatttcctccctatgttttaaggggaaaggaagagccttttgtgctggtggagatgttgctgctgtggttcgtgatcttaatgaaggtatacattccacttttcttatatgttttgctgattttgaatccccattattgatgtttaattctggacaaattgaggtgtcttttactttcataccttaaagcaaaaggtagcctaggttgattaggttacttttcttaaatgttagttgtttcattagtcgcaaccaatgtgattagtactaaactgatcccattgttgagtgaatggaacactaaaaaattcctaagccttttacgttggtcttaaaaaaatctgcaactgacattctgttgtttcctcttgtacaatataggtaagtggaaattaggtgcagaattttttcggaaggagtttaccttaaattacttgatagcaacgtactgtaaaccacaggttagtgagtttatagttgaagtagaatcttattataagcttatagccattatttcctatgtaaatatctttgatcaagttatttccttaccatttaaatttaaggtttcaattctcaatggaattgtcatgggaggtggagctggagcttcaatacatggtagatttcgagttgcaactgaaacttcggtatgtctcagtctcacacatttatttgttctgcatcctatcctttcctgtaagtcatctagctggaattttcttagagacgatgtaaattttttaaatgataatggaaatataaatatcttcaaagtgagggatctaaatttggtgaataatattagaactttttgcatggtgggaagcttatgcctttattttaatactatttttaagcttttggcttgtaggtttaaagaaacacattgagctatatgattctttgaaacaacttttcaaacagtctttgctttttttacttgttattggggtttgcttttccgttttcacaacataattaataaatgaagggaacaaaagaaacagttgtattcacttttacctatttttaactgtaacataggttcatttttctcttgaatgactttggtgatatgtgtttgaggtataattttgtaattcagaaagtcaaaggtttatgagtattttagtgtcgacttcacacacttcaaaacttacccttgtaggtatttgctatgccagaaacagctttgggactctttccagacgttggtgcctcttacttcttgtcaagacttcctggattccttggtaatggcagatatccttgatttacttaaattttgcttgatatcttttagctaatcattttccttctgtaatgatttcttttatgtggtacagtaaatgtgaacccaaggccttcaagcatgctaagggaatagtgtgaaatgttgtttttttatttttgctgaactactgttacaaattgatgattttgatcaagggccctcgtattgtatttgttgaattaagtattatgcttgaataactcccttttccctccttgagtttttgtatcttctgtttctatttgtttttcttctatgttatttgtacaactaattccaatcctgttaatctaaactacatcatttttcagcatgcattcttattttagtattttgtatccataatgttatgtaaatacttcgcaggagaatattgtggtttaactggttctagattggatggtgcggaaatgcttgcttgtggtcttgcaactcactttgtcccatcaacagtatgctactttctatagtttcttttctttcttttttttttttttttaatttcagtttctgcctaagtttgtcataaataatctctgttgctaaattaagttatgacataaaagggtttaaggggaaattttgcttctctctgtgctttgtggataatgtataaataaaatatctaactaaaaaacaaacgattgaacagaatgcttatgtgatttactgtttgctttgcctttcttattaatggatagagactatccttgttagaagaagacctatacaaggtggattcaagtgatccagtcatcatttcagaagttattggtaaatactcacagcagcctcatctaaaagagaaaagtgcttatctccggttagtatttacattagaacaattcactctctttctaattacacacacaaaatataaatatatagagaaatgttgaatactttctatatcacattcactcaaatcaatgaatgatatgtgtactaatgattattaaaattttaaaatataaaagaaatgaataatgtacacatgtcattcattgataaaggagagtgtaaaagagagtgcaatttttgagttttctttcatctctctctctctctc

SEQ ID NO: 190988 - DNA, 1772 bp, Cannabis indica
attttagtaaagcttatgatacacttaattaggattttgtggctgattcactcaaaggactttgctttccttccaagttcatcacttgaatcgtgatttgcttgcgaggtacttcttacactttaatgttgactgtatggttcttttaaaggtcaaaaagatcttcgtcaaggagatcctatcttatgccttttgtttgtcttggtgatggagtatctcactcgtttgcctagccatgcttcccattctaagggttccggtttcacccaatgtgcaaattgatgaagcttattaacctatgccttgttaatgacctggatatttccagtaagggcaatgtgaattcgattggtattattcaagaggcttttgttaagttttgtgccctcacgcaactctcagctaatagttcaaacttcaaagtctcaaatatattttggaagtataacagatgattgtaagcagcatattttacacgtagctcggatggaagagggttcattccctttgaaatatttaggggtgaacctaaggccaactaaatggaaagcttcatattgtgggggaataatagacaaggttcaaaggaagttgcacaattgggctagcaaaaacgtaatctcttatatgcctctccaaatattaagaacgtgaattaatgaacaatatttactttccatactattcaagatacattactaaatttacaaaataaacaaaacccctttgaaattaaataatcatgaaactagatcaaaataagcatggcattggaattttttaacaatgatcttgtttgggaaagaatgaaatcgttctaatttaaagcatgtaactggacttgatttcagttcccatgcttggtagatctacctgtttagtcacgccttttcccaaagaagcacacaaaaaacctcttctcatagaaaaaatgtcaagcgtcaggaaaaaaatacacacaattgtcaaacttactagttctgtacattcatgagtcatgactcatgcatataatatgagtcggatgattagctacatcctaataaattaacacatcactctacattacattgcagcatacccgctacaagaataatcaaccatcttttgtcagagtcgataaatatttttgtataaaaatcatatttatctatgtcatcctcttcctactgttcctatattccatcctctttccttttctttttccttctgagtctgcttttgcatccctttagatcccggtcttcgaccattgctgagcaataccctctgtgctagcctccctcgactaccaatagagagtctaaccttctccattccaacgtttacacctcttttcatgtgttgtgttggagattttggttgaattctcttgtggatgcttcgccttagtatgctgcttatcttcctactgccagccttagttatagttgcttttggactgtcacaaggtgtctgtctaggcaagcagttggcttcaggatcatctatatcatccttcttatcagcagaaaagggtgccaatggtaagaattgaagcgggagctgtgtggtgtttggagtgcttggaagcggtataagagagttgcgccttggagctggtaaggctggcattctccttgctatagggcatatagaagctcttccagttctgcttggcagaaaagactgttcaaccatatcagggttgttctctttttctgtagcatcaatatacttgacaaattcattcattggacgaaatggtacttgagtttgggctttgctgttgt

SEQ ID NO: 190989 - DNA, 2617 bp, Cannabis indica
ttttttttaaataacataaatttcatatttatttttaacacaattttataaacattatttatgcttctaaaaataaatattaaattgattccatatacaaacattaaattttttgtacttatgcttcaatttatccattattttattttacttttttccataggtaaagacaacattattgctatcccaattgaaattgaaagctagtattggtaggcaaatttttcaaatctatattttcatagtagcttcaacgttttttttttttttggtttcaaatctatacatgggatattgataaaatagatgttaacagcacgatgttgaacagctcagacaccatgtcagtaggtggaagtttcaacttttgtactttggtgtgaaatagctaatgtggtcctcaatccaggggaccaaaactctcttacaagtttgactctcttgccctctcattctgggcactacaaaattatataacttcacatacatatatattcctatttggaccaacttcatatatacccatttggaggggtccaaactaaacaaaagaccccttcatacacaagttgacttcctctttagatagttttctcaacttaaacttcttcaattttgctgtatcacacaaaacctttactctgaaaaagtcctcacattcttgcaccaataaaacttgaaaaaaagaccaatttttggttttgttgtttaatcccagaaccaagattttatttatataacagtacatacatacatgaaaatcatgagacacactatcctaacaaaaatcccataatattaaattatatataaattaaaaaaaaagtcttaaaacacttggaaaaaaaaagtttttttggttatgatcatccttatggaaaagaagagaaattgtacaaattgggagcaaaggagctgaatctcaaatcaaacactcagaattacttttgtttttttttttctttcaatcaacaaagttaaaataattatacttactttgtttttggggttttttttttccttccatagcctaattattcttccattaataaaaatcttcctcaagacgaagctgcggcggagccagaaactctgggcgaagtgaccggaaacaagggcaaaagctgagggggctcggctgggtctctgggtgaaggatgcaagtaaaaacccttctcggcaatcgctctttcttcctccaacgatggagaattactcatcgttaacaacggcgacggcgacatagacttgttgaaggcatcgtcgtttaacggcgtgaccggactgagagtcaaggatgggaaatcaagtagacttggggacaagatctcaggctttctcggagaaaaaccggagttattggcagcaaaattcggcaaaagggtgttgatcataaggctatttttgagattattactgttgttgttgttgttgttgcaattcctcctttcgtagagtttgaagccttgtttctttggtggtatgttgaaattcctctgctcctggggttgcctagaaggtgtttgtttaattgtctcagtggaacctgtaagcatttgaaccacttgtttgaagttagaggtatcagcttgaacaaacgttgttgggtaagggttgttgggatcagatctgggagtggtaggctttgaaaccggagtttgaactccattgttgttgacgttgctgctgctgcttaaactgttaatactgccattgttggtggcagtagtggtgggtgagtttgaaggagatgatgatgatgggttctctggtctctcatgagatgattttgagatgtactccatggatgattaacagagatggatattggatacaaaattaacccccacctcctccaccaccacttctactttctttctttctctaaagagcaaaaaaaaaaagaaaagagagaaaaaaagaaagagaaggtgatttgtaatgtaaacaaacaaagagtgaaaaacaaggcttgatgggagaaaaggaaagggggaaggaaggaagggttgcttttttgtattgttgtgcaactctttctctcgctatcaacacacattatatatataaacatagttttaggttctctctccttttttaggtttttattttttctttctaaataagtattcaacttaattttttgggctttttattttattcatttgagaggaatttcaaaactcattagttagatcctcataggtcatctcatcttgttttttaaccataaatatttttcttatttttctttttactttaaaaataataataataattttaaaagacacaatgcattagacttattagacattgttttttttgggcatcaccatcgtataatcaatcaaatattgaatatttagcacttatagaagtagccagagtattattatgaggtattaaaatgtttatcgctactataacgtaatattttataattagttaacgattttttattatttttatcaatataaaataagtagaatgtaaaattaaattaaattaataataatattatttattagactaattagtaatttttcttccaaaattttttgacgtatcaaagtttgaagtccataatagatgaggatgatttagtacataaacaatc

SEQ ID NO: 190990 - DNA, 3705 bp, Cannabis indica
tagaagatatattaattttttcttagatatagttctttttttactgagggctatagcacataaaatcgaagttttttttttcttaatagagataaaagtggaatttgaatagtatagagttttattttggtttattatattaggtgtttttatattagaattaagcattaagtataactaaatttaaataatttgtgttttttttaattttaggtttattaaagagagcaatatatatatatatatattatttaaaagtatttaaaatataaaaattattaatctcatcataacgcaacattaaaggagaattaattaggaatgtttaacaaaaattaatagatttacttatgtaattatatatcatcatgataatatatgcacacatataaatattatacacatatgaaaagtgatttataacacatacatgcatgttatgtttgtgtctgaataagtattaattctataaaccgatactaaaagtataatttgtagtagtgaaaatgttaattaaattaaatagcttattaatgaaaaatattatcaaaatcttgcagtgaaaactatatatcaactataatggcaacaagggaagttatatttgaagagaacttgaaaattgatcaagggggtggctggcgaataccttcaacttattcgtagaatatgcgaaaaattgggaaaaataaatgaaaatggtaggggattttcacaaaccgctgttgcactcgctgatgtggaagccttgttcgatttgatattaagtacgagtttagtagaaaattctgttaggtttcgatttcgaacagaagatgtctacttgattggttttaagatagaacaaaatggaaattggtttgcattcgaagataccaaagaactgattcgaggttcacaatccctagggtttaatagtagctaccaaaaattggacaaaatgccgattggatttcaaaacctccgacaatccataattaacctagcaaccggaaatgatggaagcacatggtcacatgatttgacaagagtgatcatgtttacatccgagtcgttgagatttaaacctatagccgagctcatgcagagtgttctccaaaatcctcacgaagaacctcccgtaattatcgaaacttgggttaaagacctagttcataattgggaatatctttgtaaatttgtgcatttgagtaacagcaaaagtggagttaggaaggaagatatatacaaactcaaagtagggttacaagctaaacatttaaaagtaccatataatttcgatagggattggccgtgcgaagagagtaaacttattaagggaaaagaagtaccattagttgagttaaagattgttgttgatagaattgtaagcataatgggcatactggttaagtttaaagattattaatgcgttgatattattctaataatgttgtatgatataattttagtaaatttatttcaaacgtacgtctttaatttgtattgatcatattgttatgatgattaattcaaaaagattaataaagaagtacacattgactgtgttttcggttttcagattgtgtattgttttcaacaaagagaatagaaaataattttttgtcttaggttttttagactatgttaagagtttttttactaaaaaaagatttaatattctacaccataccatgacataaacctattctactatggactggaccatatgaacccaaacttggacccgatctagcactccggccagaccccagcctgaacccagactcggacccggacccgaattcggatccactcagactaacacccggacctctaaccccaaaccctagactcgaatctaaacccaaacccaagccccaaacctcgaaaccagacccaagatctcgacctgaacccaaactagacttgaatccaaactgtggacctcaacctcaacttgaattcagaccccagacccacaccagagaacatgtagagtacttttattccagtcaaatcaccaatggtatttaatatgtgcattcatgaatcactcagtggaaacaccattattttttattattattaaattaagtagaacaacaccaatacatacatgtacttgtaagtaaatataacatatatatatatgacccatcttatttaagtacaaattatttatttaacatgtagtaaatatatataaagtaaccactatatatgatcaaacaaagcattaattattcatctttaaacttaatcattatgcccttatttctataattttaggaggaataatcttcaagtcaacaagctgtgtctctttttcacctggccgatccctatcaaaattatatggtacttttagatgtttatcttctaaacgtttttgaatcttttttaattcttcattcttaactccacttttgctgttactcaaatgcacaaattcacaaagatcttcccaattatgaactagttgttcaacccaagattcgattacgagaggtttgtcgtgtttgtgcaaagcacactgcatgagctcagctacaggtttaaatctcactgactcggatgtcatcatgattgctatggtcaaatcatgtggcctagcgtttctatcatttccggtcgctaggttaattatggcttgtttgaggctttcaaatccaatcgacatgttcacgattttggctttgtaggtactatcaaacccaagggattgtgaaccttgaatcaattgtttggtatcatcgaaagcataccaaattccatttggttccatcttaaaaccaattaagtagatatcttctgttctaaaccgaaacctgactgattgactagttttgtctatacttaatatcaaatcgaacaaggctttcacatccgggagtgcaggagaggtgtgtgaagatcccttactattttcgttcatgtttcccaaattttgacgaactttattgataaattgtaggtattcaccggccaccccgatcttaatttggaacttttcttcaaatttaactttcctcattgccattattattcaaatttaactgccactgcaagttttggaagctatattaatttacatagaaatattaaaaggccttgtaaactatgttgaaacaaatttcttttacaaaattcttaaaaagaatttgagtgatttggaaggtgtcttggattgaggagtcttgggcaagtgtcatgtcaatataggtgtgacataaattgataaatctcattaacatgcatgctatatttaagagttttcggggataaattttcttcattctcatttcacttgtacttaactttttaaattcaaattttagcgaaaaaatctactaataactttagttctgttaaccaaatttggtttctcattcaactgtatataattatgtacacatggcacattcttattggtttagatattttaattgtttagatattataaaaaaaatagttttaaaatcatttgaaatatttaaaaatcaaatagaaattaaaaagttatatatattaaattattttttcactaaaatttatttctctcttttctctcatgctcttcccttctttttggttcttagctagatctgaaatctccatttccagttccccacccgatgcccatctccgattgccaccatcctaattcgatccaaaaatctaaagtctcgatccgtccccaaaattcccaaagccctctcaata

SEQ ID NO: 190991 - DNA, 3200 bp, Cannabis indica
atatcaatatcgatgttatacctcataagggtgtctagacaccaattcagtatttctcatcataaatttgtattaactttttggcacaccttggagcaaactttttcacatgataagttatattttagcaaaagatcaccaatttaaatctctattttagatgctcctatgttttgctggtttaattttagtattaaattaatttattttggtattttagtaaaaatttaattgcaagaaaattaaaattaaaacttcaagctgaaattcgatcatgctcgctctaattaggaaaagaaaaagtcgtgaaatagaaattttagagctctttctaagctttccaatgaaacttgttcgtagaagaaagttatacgcgttttactaagagatgtcgggtttaggaaaataccttggacaacaaattcgccagtgcagcttatttacctgcaaatgcaactagacacggggctaggccttttaggtgtgatttttagagttaataggatttttcatatgcttttgagtcaagtaatgtaatcataggggagacctaattaacgtgagaaagagttcttggggagaaaaattcaaagaaaaaaatgaatcttcacggtttgaagacgaatctagaacacgattttcacttctttttcttacactacaccaaaatatgttattagtgatatttgtataacatttgttaaaagaaatatgagaaatagtaatattttagttacattctaatgtctctttaaagtgaataagcaacattttaaaaaaaaatgccattatagatataatttagtgccatttaataaaaaaagtcactaatttactaatatgtagttttactaacattaatagaaatgtaactaatatatatatatatatttcaaatatcactcaaataatagtaatttaatgacatttgatcaaaaatttcactttagtgagaataatctcataaatggtaacatttttaaaaatagaatttggatcaagtaaaactttgagtcataataattctatagtggccactgctaaaatcaacatgtgtttcacaataggggctttagataggaatcatgatggggaaaaagaggcaaatcaagattatttacttagtgaacttatttacagaatccatcattatgtgaaacaccatcatatctttatatgatctaccattttctcacattcaggtgaataatgctttagatagagtacatggcatggcacaaaagctgtaattagtgatgaattatcatgaatcttgtctaaacatgtattatgctaaaacattggatttggatatcaaatagggtatgcaataattcttctgaaatagtatgcacaaaaataaacaaaacaacttaaacttttcatttttctcttatggagttcactattgattatagaacaatcagttacaatagatctgttcatctaaaataaatatttaaaagaatataatacttcacatgtttgatttctttctcaatacatatttccttacaaatcattttattcatttccacatctcattcgttcaaaaccgaatctcaaattacaaacccagatcagcaaaatgataccaagacaaaccccatttacagcagatctaagaatccagacacatactgaaaatggagatttaagcctttgcaggccatgttgcttgagctgacatgataattcccacaatcactccaaacagcccaagtgcacttccaaaaatctcaatacaagaatcttaacaaaaagcgaggagttttgggcatcggataaagcacaactgcttccaattattcctacgcacaatctgtgtttcgaaaagaacaagtcacaaagaaaacgaggaagtagtggcagtactataaatgagttttattcagtcagtcaatgattaagttaagaagaaacagagtagaaggagacaaacccgcaaacaagatttgcaaaaccaacaataattccagaggcaaagattgcatatcctgctctaagtgattcaggttcatacaattgtgaagctggaacactctccaatttagtttgtagaataattgcaacaataacaccataaatcgcaacagcttcgcagaaaataacactacacaaagaacacaagcattgtatccacagaattgttactaaacaattaaaactaatagaatgaacaaacttaatccaatcttctctgtgaaaccttcaaaaagaacttattaaaaggtcaattcaatttgatgtatgaaaactctaataacaacacgtcatgaattctaacccacacaaagttattctctctagatttttaagggcttacaaattactcaaacattagttcaaaattaagtctttgatatacagttctcactactacttaaacttcaattcaattacaacttgtctgatacagatcccaaatctgatctgaccgccgataaatctcacggaaatcccacaaaacacacaaatctaaaatgagatccaaactacttctaatgtagaaattagggttagcgaatttacctaatgaggttcttggaggtgattcgaggagctttaatagcagcaccgatcaaactacttccggtaatataaattcccctgtgaaattaaattaaccagacattatttcacgcaatttcgatcaagagagattaaaaggaatggaatatgaatgtgaatgtgagagggtttgatttgattagttaccaagcagccccaaggactgaaacaccgatagcgatggcgattcctagggcggagtaagtgtagggagagatcctggcaagggcgctggcccatgaggtaacaccgacgactactactgcggcagacatggttggttggtcttcgttcgagttactcagactcagacgatccacgacgatagtaaaatacaggaaaggcagcttctctctatttccactctttctcactcttattatctctaatttaatcaaacgacatgtcgtttctaaataaaaaaaaatcaaatcattattattatattcactactattgttgtgattttgtttttgttattttgttctttctttttttttttgttaaaaataggattttggttggtacgaatagtagtgtaatctgaagttagggagtgaaggttcgataggttacgatagtggtccgatagttgcttataatttattggcatgatatggaggttatgg

SEQ ID NO: 190992 - DNA, 1538 bp, Cannabis indica
ttattatatatatatgaaggtttacgtaatttttagaatatatatgtatttcgttacacattgaggtgttttaattttcaggagtatagagtgtcggtgatgatatatcgtagtgcttatctagtggatgtcattaaagaaaggataggcagagttttaaagcttgattccatcaaaaacggcatcgtttggagaggatacgacatgcttattttcaatacctggcactggtggctccacaaaggaagcaaacaaccgtacgttgacaacacaaaccaaaactccaattaatacaacaataatatcttattatattttgtataccacaaaatttagaacgcaataaaaactaatactatgtctatgtgtacatgtataaaatatattgcatgcatgcttcgtctgattaatattgttttaattaattaattaatgttattttgagatttataaacagatgggattatgttgagataggaggaactataaggaaagatatgaatcggttggtagctttcaaagagggtttgacaacttggtccaagtggatagactctaatattgatcctcaaaagaccacagttttctttcaaggcatttccccaactcattacaggtagatatttctgtctttttctaataattaagggccttattactttattatcctctgtcaaatttaactaattttatcctttgtcattttttttttaaaataataattaatttatccatctatattttattgttgtaaaaaaaatgaaacatctataatatttattcaacaaagctgtatctgcacgtagtactatataaaatatataacatgatttatttaatttgttttaatataataataaatagtacaaaaaaaaaattactcattttggtttatttttggggagagaagtggagaagagtggaatggtgcaaattcaacgacatgcaaaggagaaactaggccggtaataatagggcgttcaacatacggtagaggttggcggccgcccgcagcggcggcggtagtagagcaagtgttggctaaaatgtcaacacctgtgaagcttcttgacataaccagaatgtcacaactgaggaaagatgggcatccttctgtgtatggctttgacggaacaaagggaaacgattgtagtcattggtgccttcctggtgttcctgactcttggaacgaactcttctatgctattcttttttccaattgaattttttacataattatacatcgatgatcgatccaatttatagttatatattattaatatacatcaccacacattacaccttattcatatttattgtttttgcaacaccttattaataagaattaattgtattatgaaaagaattttgtactttttattgactttttggagaaaaaaacatatttaatttgaatgaaaatttacaagaagcaaataaaatcgcattttttatactattttttagagacttttctttataaataaagttcagtaccaatcattgagtgattgagcagttcatttcattcatcttca

SEQ ID NO: 190993 - DNA, 2996 bp, Cannabis indica
ctaatgcttgagagagtaagagaaagataggagaatatgttcaatggcaaaagaaaaaaaaaaataaaagtcatccaagagagagagagtgagagggagatagaggaagcattaaaaaaaaaaaaaaaaaaaaaaaatagtgtattgaatgatgaagtttgggatgagctgcatgtaaaagcgataagcattattgccaagaatacttttgcttcctaacaaatttgagagggttgctcttgctggtttctgaatacaaaagaatttttgctgttacaaatcttccaaagaatacacagaaaaaagttaaaagtgtcactaggaaaatgggacttaatgtaaagcaatatatcaagaatgttctttcctctcaaatcactaaaaactgtacctgaccacaacctcttaatacccttacagtcaaataaatcatgctggatagactcaagatgcaggtcacaacgggggcaagtgggggaggggtgacttttttgtgatacaaattctcagcagtgggaagagtgttatgacaaagacggaagataaaatgcttaatcttggggggaaatctttgtgcccaaaaggacttccaccaagacttgaggatgtcagtgtttgaggttgagagcttggatatattagcaagggatttggcaagatgatacccagttttgatagtatagtggccaaaagtggtatgcttccagaagagagtgttaaggtgattagtgtctgggggtagagacaggatatcttgaacaatattgttaggaaagtggttttttaagagggagatgttctgatagaggagtaggtcagagacatgggtgaggtgattaggtagggagatgggaagaaagtggcagttagggatccaattgtcattgaggattcgagtggtagcaccattaccaattctccaacgaagtccaaattaagcattcggatttaaaaagcgaggctaggagagaagcttggttagtttggattctccaagcttatttggcaagcatggcctggttgaaagatttgagggatctaaaacctaaacccccagaattctttgagttgcaaagggcccgccaattcttccagtgaattttacgatcaccattattcgatccccaccaaaatttggccatttctttttgaacaaaattatagaaagaggttggaagtttgaagacatacatggcataggtagggatagcctagataacaactttaagcaggatttctttacctcctttggagagaaattttccttaccatttagaaagataataccaaattctatccttaagaggattaaaagagtggtttttggatctgctaaaacattggggtaatccaaagtacttgtcaagatggttagtggagcggatttgcatataatcctggatgatagtttagtaggtgaggttggtattaggggagaaaaaaagatagaagatttcttgaaatttaccaattgtcctgagatactttcatacttggccagaccctctatgatggcattacaagcctggatgttagaatggctgaataaagtgctaccgtctacaaaaaggagatgtgaaatttttggggcagtacgagcaatctttagacctaaagctatttaattgatttcggaatgcttaagaatggaggaaagaccctcagagcaaaggagaaagaggtatggtgagaggggatccccttggcgaaaccctctcgatggaatgaaatttctaagggcatgaccattgatattgaacctatggttgtagtggacaggcaagtcatgattaaggagataaatttggaggaaaacccaaaattttgcataatgttattcaggaagcaccattcgactctgtcaaaagcctttgccatgtccaacttgacagccatccatccaatcttaccctttttcctacatttgatagagtggagaatttcttgggccataaggatattgtcagaaatgagacgacccttgagaaatgcactttggttagggaaaatgagagggtctataattaacttgtttctattagccaaaaccttggaaatgattttataaacagttgtgcaaaggctaatagggcgatagtctttcagagttgagggttttctaactttgagaataagagtgacaagagtggtattgaagtgggatatattagattggtttttgagaaagttgagaacatcctcaatcacagttttccccacaacatgccagttcttttgataaaattgattgttgaaaccatcaattcttgtagatttgtcaagggccatttggaataaggcttttttttacttctacaggagaaaaagtctcttccaaaatttgataaaggttataatcgagttggggaaaggctctagttagcgcatttccaatagcaccatcttgcgaattttgagaagtaaagagctcagtaaagtaggtttcgatggtgcttagaatactttcagtgtcttccacttatgagccatcatcaagagtgagagaattaattcgattggcttttttttctattagaagcgaacttgtgaaaaaaaaaacgagtgtttttatccccagattggagctagtgaattcgagatcttgttggaatatattttaccaggatctagatttactaacaagtatgtttttaacaacctaatatgaatttctaaaacgatgaaaataaacacataaaaggtatgagaaaccttacagtggttgcagcggaattaaataactccttccactcagatctctaacccttgtatcctttctgtagcagagtatcaccaagatttgagcccgattgtccttcttattgtttggattcttcacagtcttacatactatgattgaggactcacttgttatgtgtgggcatgcactcaatcactaatggataaattttggtttgtgaacaagacaatggattttgaaattaagagaagaaaggaagaggtctcgaaaatctagagagaaaactaagttttta

SEQ ID NO: 190994 - DNA, 954 bp, Cannabis indica
tagtagtgtactttggcttaaatggaatctattttgctggataattattgttgaatgtccatgttagataacttagttcttgcgagtcaccggtcttggcctcttaactttgacatttaatagtcacaattgcattcattagaagtacaatagatttgaccggtgaggcagttgattgtaacattgtgctttgatcgaaggctcaaacacaaaacaaagaaagaaaaaggaatactgtaaacatttttatgatgtatttgtttacagtttattgacagcatgacctgttttcaaactagctgtaacagatttatattgttacttgtaatttccactgacagctctttcttagattatttcttttgaccaggacatgggtgatactcatattaagcaaggcgctgtcctttggttaaattcataaggatgcctctagatggtaaattactaattgttagaaaaaagagctttagtgagggattgtctcttctcttgtatgagtttgaaattttcaattggtagatatgttactctaattttgtgtaagtttgtgatataaaagattgtattttcagtagtttaagcaaatcacgttttcttttttgctgaagattctcacgtcaaatttttagttgtgagatttgtgaggcaactttattagttcttttttttttcctttgctaataaagtgtttgatcttgcagaaaaacagagggcaatcagattgagacaagactcgagtgagtctggagcatgctttgtggcattcagtggcaaggatgctgaaaaattaaatgcaagggtgacgaagtctgtgaaggcaatttcaattcaggcaatgtctccaaaaaagtttattattttggactcagctggagatttacactttttgtgctggtccaaccatgtacctggacttgataaggccagtcacatgcaacggttgccacgagt

SEQ ID NO: 190995 - DNA, 1890 bp, Cannabis indica
tgaaattatccctttttatttttgttgatcatattagcgtcaaattataggagctgtataatatagtgacgaaagttttaattaattattaaacttatttttttttttaatataacacctagctagcgtacatattatagttataaatataagcttttcagtttgtttttgaatttttaaaatgatttaaagtattattttaatctgcattttatcaaaaaaaaaaaatagaattcaaacttattattttaaactttctttttcatcctatatataattcaaaaaataagtgagatatatgttattttttcaaaaaaaaaaaaattaattgggctattaaaactttaaaaataactaaatataattttaaatatataatattgattaggtatttttaaaatataaaaatatattaattaatttaaagataataaataattagttcaaaatgagaaaaagccaaaactctctatatatatagctgaaatattaaaattacttcaaacatatgcgaaatcacaagcagactaagtggggcaatcgccccatgtgaagtttgacttgattctaagttattttggacttaaacttaaatagtttttttatgggcatttacactgttatttgtgtttttggaaggatgacacataatatttacgaaatatgattagtttggaatgacctggagtaaaacccttccatgagggaaggcccaatccagatggaagatgggtctgagaccatctgaagcccaaaaggctcgtctccaaagacaagattcatccaaatccagaaggcttccagccttcaagaagacagcgtaaagaaagcactccagatgataattgggacacatctgtggaggatattctaaggggcgcttccaaaagccctttgtagggtgacgaggctgccctctgacgtctggtcccatagaatcaaatcttttctcttatgtcagagcatggtagtgcacaccccacaaaaaagaatacctcctttttgtccaatggcgcttgcctgacatctttgtctattggagtaacacccacgtgacaccagtcttagactgcgtggtcctcatccatacagaaaccctcactcacgagccagactcctaccagtgggccttaagtcatgtatctcatgtatttatcccaatagtgtgcctagtttgcacagaaaccttaaaggatcacgggtatgcccagatccagatcctagctataaatactcatttataccttcatgcaagggggatgattcacttcacatcttttatggtttcttcttctctaaaccaaaaaagctcaagtgagaaaagatagcaagaagctagggttcttcaacttgtaagacccattgtaatacatcaaaacctttcgaacaatacattgactcgtggactatggttaattaacaccggaaccacataaaaatctccatctcgattacttatttgcctatttaatttcttaagctcttatttaattagtttctaaaaatcttggtaaatattttggtattttcatggagagttgtagaaagagttgaagttaccttgcatatgcaaaaatggtggctaccaaaaaaattaatgttgagaagcctactcctctaggccaagacgtcatcatggaggacgctaacctactccatctagggcacccccagccgagcattgtaagggatggggaatcatttaaagttggcgaccaacaacctgataaaacccatcaacaggaacaacatcttgaggagggcctcaaagacaatggataaacagaagagggcaatggtgaaatcaaaaatggatactagaaagatggatattattatgagcaagacctcgaggtggtctgagtatccagcaagctagctgaggcccaa

SEQ ID NO: 190996 - DNA, 3373 bp, Cannabis indica
tatatttatttttttgtgttacatgataattttttgtatatcatcgtttttattttgtttttgttttggcagtatttgatattggcaccatgggtgattaggagtacttatgtatttgtaacgaaggaggatccaagagagagagacttgtcatcttttctggttttcccatatctgttgctaagaatgtttcacaaccagatttggatctctctttctcgttacagatcaggtaaaggtaacaaccgaatcatagacaagagtctagagtttgagcaagtcgacagagaaagaaattggtacgtactactccaacttttaaatttttaattcaaaataaaaatatatgtacatagttattaatttgtaccgggtgtgagaaacaaactgtactatttttttttgtaaggaacatactgtactcttggattcctttttcaacccaacaaaaatttattaagtttactatagatagttatttccttacgtatctatcaatcttttcttttccaaatttgaattatatggtgtctattgtcgatctaattccttattttaatttgtttgaatatatgtatattattattagggatgaccaaatattattcactggattatcgttctatttggcaacccatatattttcaaattgtacgaacgtacctatatggagaacagatggagttatcatgacggttctgcttcatgtctttgttgtggaatttctatactattggctacacagagctcttcatcaccactatctctactctcgttatcattcacatcaccattcctccattgtcactgagcccattacttgtaattattattaaatcaaatctctctctctctcaatattttaattaattggattagtttgtttattttcaagtataatattattaacatgcatgagtatgtatatatataactaatgttgcagctgtgactcatccatttgtggagttcttgacatatttcattctattttcaatcccactattgacaacaatattaacggacactatctctcaagctacggcatatggttacatcttgtatattgacttcatgaataatttgggtcactgcaacttcgagctcattcccaagtggttcttccatgtcttcccccctctcaagtaccttacatacaccccctcgtacgtattctttctctttctatatattatatattaattgttggcccctttatatatatggtaactaatatttatatatgtaggtttcactcattgcaccacactcaatttcgaacaaattatagcttgttcatgccaatgtatgattacatctatggaaccgtagacaaatcttctgaagccttatatgaaatgtcactaaaaagaaaggaggaattgccaaatgtggtgcatctaacgcatatgaccacaccagagactatataccatatgcggatagggtttgcagcattggcctctaggcctcaaactgagtactcttcctcaaaatggtacctttggttaatgtggcctttcactctatggtctaccataatgactgggatttatggccatacttttgtggctgagacccaccgttttcataaccacacattgcaaacttgggttgtaccaaagttcaagatacaagtacgtaaacgtgtatatatattaactaattacaataaatgtacacttaaaaagttaaatcatgatcatgataacatcattataataagatatgcaggggccattttattttgggcttaggcttgtgctttggcctctaaatccgacgctagcttagatcaaaaaaaaaaaatgttaaatatataacattaaatataaattaattaacatatatatgattggcaaacttttattttatattaatattaaatgattagaaaatatttgcataggatcccaaaatgtaattaggttcaaaataattatgtccgtcgatcgaccaaatatattcatgtatatttttattgtttcagtactttctacaacggcaaaaatcatctatcaacagcttgattgagaaagccatacttgacgctgaggataagggtgtgaaagtattgagccttggtctgttgaatcaggtacaaaataaagattatatagacaatagatcttgattgccatctatacatttatatatatgtatatataaatgattaatttaattttgatatatgtagaaggaagatttgaatgcatatggtgaggtgtacgtgagaaggtaccctgagttaagggtgaaagttgtagatggaagcagcctagcagtggctataatactaaactccataccaaaagaaacaacccaagtcttgttgaccggaaattttactaaagttgcctatgccattgctttagctctatgccagaagggtatccaggtaataactcttgctgctgaaagttaggtgtgtctcagaatttacattaaaaacaagaccagaagttaagcaaaaaagacaagaaactgcacgtcaaaaaaaaaaaaaaaaaaaaacaagaaactgcgcgtcactgtatagagcctgaagcattgatataaatatatcaaatattattgactaaagtgaacaggcttattattaaaagctattgcctctaagtatttatggcagacatattgttgttgaaagcatttattgaagatatatgaatgttttgctttattactatttttagatatcaaaatatgtgtatattatataaatatcttacctaatatataaaatatctattctaactttattttttttaagagagtattctaactttattttgatgtgcaccttaatagaatatacaaaataagttaactttaacaaaatatactaaaaaaaacaagttaactttaacacacccatttgcaatgactcaacagttgtaattccaaacccaagcagtatctataaacctcttacgatcgagaaaaatagaagtaactgcataaaactttacataaaaaacgacaaattgaatcagtggaagaaaactaacctctataattaagcatcctttccaaagtttcccaaatatataaataaaataaggcttatatttatttaaagaaatattgttttgattttataattatctgtcctataattttattttttaattatgttataatattgcttttaatatttttaaattatactattattaaatatcatactatactttcaacaaatatatgagtgaagtcattcaaaggttagtattacaattataccattagtttttaacaataataattactttttcatttaatgtattaattttatgttgaagcataattttgtcaaccacaaaaataactaacttcataatcaaccattcattacaacaaacaacaacaa

SEQ ID NO: 190997 - DNA, 6029 bp, Cannabis indica
ccagaaacatacccaatgccatacctgacattgtcgctagtgtttcttgacttccctccttacaatatagcaaaacaatctaatggtcagcacaaactactaaacaatatttcagggtcctcatcaagcagccagaatattttgttattaccttagctgagatatcagcagcattattctgaagagcaaaatgttgtgtcaaagcagctctagttgctccacttgcaacaccagctaagtaaacaaaggaaagaactaagttgcaactctgatcaaggagcattatttaaaagtgcaattattattactgttgaggtttagctacaaattaagaacaattactttgagtacaatgcctttgatgtcttaatgttttggcgtatggttagaatgatgcctcaactcaaccagcaacatcaaaaagcatgacttttgccaaaaaagatataaatatataaatatatatatatataatatatatttatatgaaagtcaacaagaaactaagcaagagtgccagatttctttcttattctagatcaaaggaacttactgaatgatctcgataggctccctaagcaaactacaaaaacaaaagacagaaggaaatagtggagaagtcaggtccatcaacatcctgccaccaataaaaagcattgctcgtcagtcttgccataacagaaaaaccagtactaaagcgagatggtaattcgaacaccaaaggccggtagaatggcctaacaaactttaagtcagtgacagttaatatgaatcctctgacagttttaaaaattgtaacttagcttcgtcatttggctaaaaagttcccataatcttagattctcagtctcatcaaacagcatataattatcaaattagtgaaaccaatgtcattattgtctttcacaattgatattacaaaaaaataatgtcgattctcatttctcatggaccaacagtaacacccagatttctacacataattattattacatgacagcctcaatcatacaaaaggaggataactgatcaagttaagctaacattgattttaagagagatatagacacttgagttttgcaggtatacaagactcagaaaaagcatttcattcatttcacctatcagcagttctaaaagatgtaaatgtaccataatgatagaaacttcttatctccctgaaagttaaaagtgttgagaaaataaattataaggaaccaactgaaaagataaacatgataataacacccatgcatgtttacaggaagtcaactatgtgatagcatctataaaaactgtctaggtattgaaaaaaagactttgaaatttcatctttagatttggatttaaaaagagaaaattgatggcaacatacccagatcattcataagatccgcaaccaaacgccacattttggcattgctatccagatttgaaccctgataattaaagagtcattaatccaagagttggagagagatgggtacagattccctatgaaagcccaaaatttttaagctaaagacaagtaataatatatatgagattagatcatatagaaagaatttttttttttttgaaaaacatatcgaaagaaatttgaaatagcttgaacaccccaaaaaagtaaagtacacaagaagtagccaagtgtttctaatttgcatccatttgagaaaaccactgcaatagttccagcgttagaaaatcccttcagaatgacaaaacgcacctgataaaatgtgaataaaatacctccaaccattccagttaagtccctcaaaaaccactgcaatagttccagcgttagaaaatcccttcagaccatttattgcaaagctcaataacatgaaaattgttcaagtctttatcaaaaaaaaaaaaatgtagagttaatttacctggaatgtagcaccaatcacagtagcagatttttctccaacaccaatagcacttagcagagccttaaggattttaaaagaaagtgatcagtaccataatacaacttcaattcaaacatttgacagaggatataagcttacttgtgtagaaagcatggtcctaatgtatgtagaaagaccctgaaaaatgaaaagatagaaaaagaaaaattatctccatttttgttatctcacagcattacaacatttccatttgcattattacctgcaaggagtcccagacttgaaaagggacataatctggggtgacactgtttggaaaaccctgcacttccattccacaagattaaaataacaatcaataacattcaaatcttgaacataataagaataattctatacataagagttcaaatcattgaaacaataaatccgcaaagcttgcctcaggtacaaacgcttggagaattcgcccccaaacatggtggaaatagctggtcgatctaatacattcaaaacaaaactaaacgaaatgggaaatacacagaaagaagaatcatggcaaggaagatgaaaaattgaaacagtaccttcggatacagagtgaaggagaggcagtaatggtggcagttttagagagcttggttgaagaagaaccattccactcttccaatataaaactcggtggtggtggtggtgatgatgatgacgacacttccatggcagattcgctacactgaatgaaagcagagtagcccaattctagttaagaataaccataacaaggtcaaaatggttataagcttatttatttagagaagtaacattagaagtagggctacttgtaaccaacaccacctctctctctctctctctccccaaaagttccgaagccttcactataattcttcctagacaatataagttacaagaaaccaaaaaatcgaatcttggagagagtattgtagaagacgatgtgagttgcccgaaactgtgcttgtcgagtatcatagaatgtggaggaaagttttttctctgcttccaaacagagccttttcctccaatcctgaaattccaaccctttactcctttctccaaccctccattttcgcccttaagagagacccacctcttccctccaccaagctccctactcaaccccctaaaaccctaaactcagacaccgtaacctctctagagaccactctccacaaatccctcctcaccgatgacactgatgaagcttggaagtccttcaaggctctcacgagtggctccgccttcccaagtaagtctctcgccaattcactaatttcccatttgtcttcgctcaaagacgttcacaatctcaaaagggcttttgcctctgccgtttatctagttgagaaaaacccaggactgttagagtttgaaacagttgaatctcttttaaactcgttcaaatgtgccaaaacttctgcccctgcttttgctttgatcaggtgcatgttcaagaataggtttttcgttccctttagtgtttggggaaatgtgctcgttgaaattagtaaaaaacatgagaatttcccggcctttttgagggttttcgaagaaacttctaggattgctctggatgagaaattgaggtttatgaaacccgacttgtcagcttgcaatgcggcgcttgagggctgttgtcatcagctaaagtcagtgattgaagctgagaaagttgtcgaaacaatgtcggttttgggtgttcgtcctgatgaaagcagttttggttatcttgcttatctgtatgcacttaagggtcttgagcagaaaatagctgagttaaagtgtttaatggttgggtttggtatttccactaaagggctttttaggagtaatttgattagtgggtatgtgatgtctggtaatttagattctgtttcagctactattttgtgtggtctgggagaaggtggagaaagcttgaatctaggtgaagaaacctattgtgaaattgtgaaaggatttcttcaaaatggtgaagtcaaagctttagctactttgattattgaagctcagaagctagagacttttactgttatagttgataaatctgttgggtatggtgtcattagcgcctgtgttaatattggattatcagacaaagcacacagcattctggatgaaatgaatgttcaagaaagcttcttggggcttggtgtttatttgccaattttgaaggcttactgcaaagaacatcgaactgctgaagccactcagttggtcatggatattcggaactcggggcttgagttggatgcgggaacatatgatgctcttatagaagcatccatgtctagtcatgattttcagtctgctcttactttgttcagggacatgagagaagcaagagtatctgatttgaagggcagttaccttaccgtaatgacaggattgatggagaatcatcggccagagttaatggcagctttcctagatgaggtcgttgaggaccctcgagttgaagttagtacccatgattggaattcaataattcatgccttttgtaaggctgggagactagaagatgcaaggaggacttttagaaggatgatattcctgcagttcaaaccaaatgaacagacatatttatctttgattagtggttatgtgtctgctgagaaatatttcaatgttttgatgctttggaatgaagtaaagcgaaatgtttcaattgatggcgagaaggggattaaatttgatcagaccttggttgatgccttcctctatgctcttgtcaagggaggtttttttgatgcagttatgcaagttgttgagaaatctaaggagatgaagatttttgtggataagtggaggtacaagcacgcatttatggaaacccacaagaagcttaaagtgtcaaagttgaggaggaggaactttaggaaaatggaagcacttgttgctttcaagaattgggctggcttaagtgcataaagagcaacaagcctagagctatccattagctagctcctacctatggttcaggctctctaacaacaaaccaaaagggaagttatgagactagaacttgaaaaatcacaccctttagatttgtttcacatggctgaataagctcacaagctattcatttcttgatccatttgtctcaattttcaggtgctgagagaccttacatgtctgttgaggaggattttaaagttaagttggcttggttgccctaccaaaaactgaaagatttcattacatatgaatgaaaaggccatgtagttttctaatttgaaacattagaaaatattttcagacgatgactcgtgtgtgtctatgatgaaataattggtggtctcctcggttcactctgaaggaatgttaaccaggtccaaatttggtacccggaattagtattgcttggaaattttcttcaattgttgaaacacttaaaagcagagacaaatctctttcattttcgctgttagcttctcatactcagaaaaaaaaaactgccttgctcaaaatacatgttttgcgttttatttttttcccatgtatcaatatatacataagctataatagaaaatattgaaaattttgtaatttcgttggagtcttgacttagtgacaaacaatggtaaagtttatatgtgattgtgaacacaaaaaagttagcctccatacaaaaactatgctagaaatgaaacagtatatattgtattaggccatacttcattgagaaaactagtgtgtataaaaacaggatctcaccatccatacaaaaagtatgctacaaatgaaacaatacatattgtattaggccatagttcattgagaaaactagtgtgtataaaaacaagatctcatcatctcaccatccgactgctctggctagcgcaaccttgttcaaacaccgaataacaagaaatattttcataatatatatcgttttgtatttacttaagagatcttaactacatcaagaacagacacttgaatatgaacgcaaattcttcttgcttatttgaatttcctataagaaaaatgagagcactcaatgttcgtcccagtagtattcatttatcagactttgttctcatgcagtcatgtaaaaacaatccatgttatcatggtcagaattta

SEQ ID NO: 190998 - DNA, 2731 bp, Cannabis indica
gcatgtactactatttagaatagaattattaaatctataaaataatttataaatatataaaatttaattattcttgtacaaaggtatatatatatttttttaatgtagacttaaaaaatgtataacaaattataaattagtgattattcttatttataattggttcaaattaattaaatttgaatttaattattttatattttttttttgaggaaattattttatactttacatataaatatgtacacaaacatataatattcacattgagattcatcttccatgcaatgcaagccattaatattctatgtgtgactgtgtgagtatattgtataaattcattaaataagagtaactacacacaaaatgtaagttttgaaaatgaaaagatgacaaatgtgaaccatgtacaactacccaactgaaaattcttaaaaccattttcaatggaagaatcaaatataaaaaagaaaggtttttttttttaatgtttttccaaattgggaattataaacaagtggtagaaggcatgcaatagtattgccaactgcagccaagtgtgaaatctctcttgttgccttttcattggttcaaacttcatgactctctccatatctccttattttactcttttgccctccttcaaatataaacttaaaaatggaaactttacatttgaaatgagagaagagaacattactatcttagagtcctctgttaatagcttgatgatgatgattgtcatgtttgacccaaacaaaatctattccaaaagtcatcatcatcttaattttcatcccaatttttcatttaatttgatggttgttttgtcattcataatcatcatcatcatcatctttatctaaacaactccttcatttttatgttcatgggaatatgattgtactacaactcatctcatcactatccatgatacttatccagtgttttgctatgttaagtactttgaaccataatctcaaaagaaaaaaaaagcactttgaacaaaaattatataataaatactatatcaacataattaaattgttatcaagttttgaattcaaatttatttatttaattacatatataattataattaatttaattatgataaaattttaaatcatatctatttgcataaatttatgctaaagatatctgttcaaaaaaaattatgctaatgatatgtaaaattcttttttaatcttaaattttaaattaatccacatcacaaaatccaattatcctattatggaattagtatgataatagaatatgtaatattttaaattaagttatatttgaataatggttaatacaattggagctaaatttacgttttaatttttatacacttaattttttttaatagtcttaactttatttttatttgcaaatttgatatgcaccaattaaattttgttgttaaatactaactaggatgactaccatgtacatatatatatgtgagagtaaaatttcaaagccaataaaaataagctagtatatataagtgtacacaatgacaattcaattaatattaatgattagattaaattagcgcctcaaatctacaaagaaaagtaaaattagaaggattttactaaccaaaaaaataaaataagggattaagtgtataaaattaaataaaaatgctaaagtgtactcataatgcctactattcttatgagatataatattactattgatataattttatatcgagtcttcatattttacttgaaataaaagttatatgaaattgttaacgaattatagggtgtcacctcataaaaatgctaatactcaaaattaaaatatttattattatatgtgtaaaaattggaaaaggtattaatgtaattagagtgaatgggagggggtattttggaaatgtaagtatagagagtgtattataaagtggcatcgtatttgggggtcctttttccttagttgctctgtctttttctcaagtcagtgcttcatcatcaccctccaaacccaaatcccaattgcctcacctttctcacttctcagggtttttggtgctgtggaagagactggttcgacaacacacacacaaaaccaacctcacagatcatcatactcgcacaaaaatggctctcaaactcaacctcaccatcgctcaatctccaaagttaccagcttttgctcttccaccaatggctagcctcagatctcccaagttcttcatggcctccaccctccgttctggctccaagtcagactccattcctttaaaccctttattttctactttccattctttttctctcgttttctgatattattaatatttggatccttgtatgctgtcatgttcttgagatattctttttattattaaatttttaatttttggatctgggcttttgttcttaattgtttagcttagactaatttgggtttctcctcattttgatttttgttattgcttatgttgtcaaatgcatttttttatgtaaagttttctgctttctcattgtttttttttttgtttgactcttatgattttcgttttgatttgttatggttcattgcatgatttgagattccacgtttctgaaggttgttctaatttgaattattttgcagggtatatgcagcattgtgatgttatattggttatgttttgttttttctttctttctctttgatcggttcagttgttggatttaattggcgttttctctcatggattaaacat

SEQ ID NO: 190999 - DNA, 1554 bp, Cannabis indica
aaaaaaaaaaggcaagaggcacttttgagaaaaaggtactaatgacaaaaccgttattaaaagacacacataatcttaaaacacataattagccttttccaaatcatattgagagagatgtttatgaatataatacatcaaccaaatcacaatcaactttatattatatatataattataagaattaagaatttgactaatcaaaaaaataacaaaaaaccaaccttgctgcaaccaggaacgagctcctgtagtaacttcatccgagcattaatcttttcccttctagcctgcaatgattagaaagaaaaataccataaaaatgaaatctttaatcactcattaatcataattagccactaattaaaatgggtttaagtttaattaagagattactcgctctgctaagctatggctatcagtagcttgaccacgacgagctcgaacatgaacgtaaggaagcttctcggcgtcttctctgatttcattcttgcttttcttcgaagaaacctttgcctgaattttcagatagcgaaagagagagaaaaaaaaaagagaaagatggcttcaattgactttcatggaccaataattttgcctcacaaaaagaggaaccctagaatagaaaaccctaattttgtctaaccttctttctcgctccttcctcttcattaagggcttctgactcttctcctccaccattggatccgaaaccaacggctgcgatgagttcgggttcgaatcggtctccgtaggctcgttctttaccttatccaaattagcgctcgagttcgacggaaccgaactcgtcgtctccggcgagtgttggccgccggcgaacactgagaacttggaggcgcgttcaatcaacgcggggtcagaaagaaatgtcagattggaaccgaacggtagttgttgagggaagggtttgttgtggagcggatcgccggcaattttatttccattggattccggcacatggtgaagaagctccatggcttgattcgccggtagttccaaaagcgcagtgaaggagctcgcgttatccggcgttacggtgatcagtgtctgtatttcttccccgaattggaccgaatcaaacccggattcaccattttggagcccgactccgattgacccggattcggttaaagtcaaggcagataaattctccataaatgtctcacccaattgaaaattcagctgaactcaatcgaattcagcttcaaaaggtcttctttctcaagcaaatttcactccaaaacagccgtagctcgtgtaattgaacaaatatagatagatataaatgtgtatatatgttgtatatgcagaagaaatgtatatatggaatgaagaatagcggtggttaaaaatggcggtgggaagtgttcgtatatgggttttgatcagagagagagaattacttctcggccatttgaagtctatcgaaagcaacgttgctttgagtggccactgccatgtttaattataccactttttcctctactttgtattgtatgtatatctacagttagttgagtcctttttaaaaaa

SEQ ID NO: 191000 - DNA, 3326 bp, Cannabis indica
accatattttgtggtataggtttaatgtaagttcacacacaaaacatatcgataagaaccttcctcctttgccaaagccaaaaatatgcatcactaattacaacaaaggacctagaaggaaattaaaaagtatttgtgtcttgatttgtcaaatcagatctcatctcttttagctagcatataaacaaatataacaacacgataagcatatacaacttttgcagtagagaaaatgaaaaagaaaaatagaaggatataaatgtccctaccctacaaacattaatacatcaaatgaagaaaatatgatttactttttcccataaccccaatccaaaggaaatatacaatgggatatgattttgatgttttacatcattacaatccaatttaagcgatgtagatggctccttgtagagtctagtctttgtagactgccttttgtcttctatgtagaaatccttttgtgttctgtgtttctatttgtgttgttgtttcagtgaagttttttctttgtgcgttttagtgtgctgggtgtgggctgcttggtgttttgttttctattttttgtgtttaccctgtgcctctttgtttcttgtggtggtggttcctcttttggtgcgatggagggtaaaggcaagaacatgaacattcaggtggacgtgactgatgagattacaaaccaccttttgcaaagatacagtgcgctagagatggagatgctagaaatgtttaaagacatcactcttcaagatgtggttgcaagcaaggcttgcatgggaaaggtagtaggctgcacatatatggaagcttcggttgtgacgaagattatagtgggagcttggtgaaggatgggattttggaaaataaaaaattgcgaagatggagtcctgggtttttcttcaaggatgaagatgactgctgttgcatactagaaagaatgcattggctggtcaatggtgttcatctgaacatcaatccttggcttgtggagggtgaggttcggttgggtgagtttgaagtggccatgttttgggtccaattccatggccttcacatctggtgtttatcaaacaacaatcctctgatcattgcaaaaaaggtgggtaacttcgtcaaggtggaggacagaagaaaagaagaactggtgagaaggggtatctccattgttgggtcgatatttggatgactcaccatatcctccagggcttttcctcactactgacggtaaacctaaatcatggattcaatttaagtatgaaaaattgcctcttttgtgcttcaactgtgggagattaccacatagggatagaatttgtcatacttcgactacgatggtcactcccaagtcgggtaatgctgttcaaatgtatggcacctggattaaaattgacaaaggaaggagcaactatttcaatatggcgggcaagggcgtgactaagctaatcacatcaactaaggaggttcctgagtggaatatcagtcaaaaaaatgtaagaacacttggaaaacaagaaatgtagcttctgggcagattacccaagttgtgaccagagttgagagaggcaaacaacctgtgatggtggaggaccgtgtcgttagcgatgaggtgagctatcaaaaaggtgattcagtacgaggtggcatggccattaccctgtattcttctgacattatgatggaggatcgtgggaatattgtgcatgggaatgttgaaggtatagctgctgaggtggtaaatgaggaaaatttgaatttttagggtcccaattgagcctgaaattttggacctaccacaaccagacttttctttgatggatgggagagaagatttaatttcggatattgggccttctatttcccaaagcttggaggtgccttactcttggttatgccggtcccaaagacctcatcttttcctagaaccaactcctatttgttggcccaataacgactctaaagcccaaaagatgtttttccaactgtatggactagacttcaccaatctctacaacagtcaggcctctttaatttccaacccacttgatctttcagagatgatcgtgcatttgttgggcagtagaaaaaaaatcatacatggtttcaccaatatcctcctactttgaagttttctttgcctagttttcctagcaaagaggtgagcagattcctgaagagtctaatgtagcaaactgcttttgcattggtgctggagacaagaacaggggttctcagaaaaagggccatggaaggaaatctagatgcaacgataagttggcgacttcatccaaaagaacctcagggttaaaattaggagatgaaggcaacgagatgagcacttgaatgtggaacagaatgaattaccaagtaacttagaagtgattttagctaattgtgttgaggttccaatcccgtaatcagaattttgtcaatggcgaggaggaggccacaagcatgcccccaccttcatcatgaggtgcctgtcctgaaactatcgtgggcttcgaaagcctacgacagaaagaaccctcttgggtttaatctgtgagactaatgtggatgtgttgtttctctctgagactaaggtgggaatggaggtagtgactgttatcatgaatcgattgggttttgcaaatgtcattgggatttcgtcagttggaatgggcagaggtttttgtttggcttggaggcaagggattgtgattcatgttatagagattttttactcgaggtttcatggtgtaattctggaggctcgtaatttttttcagcgtcatttgttttgtatttatggaactcactacgctaacttgaaaggggcctttttgagttggtttatgaataaagtggcgggattgtaatgaccgcatagttaaatcatgggaattagcagaaaattaagaggttcaataattattatgtaattttgtgtttttaaagtaggaattagggcttattgtcataaataagtcttaggaaaatattttctcaatttcagagatatatttgaatactagatgcattaattgtgttatatgtgaatttttatgaatttcatgttttatgctcggtaactgtggaatgcgacgtgcggcctatagagtcacttggttgtggtttagaagttttgattttatggggtatatagtggacatttagaaggtcgagagtgttcggggttatgtttttggaccataatacccctaggtcttaaggttatctttattttaagataggggcatttaggtcctttcatgttagcttgtaaatgatttattatttgaattaatataatcaaatttctaatttgtcctctagtgagcatatgt

SEQ ID NO: 191001 - DNA, 2712 bp, Cannabis indica
aaataatattaataggcctcgtttggaatgccgtataggttcgattgtatgtattttattatattaaattgtattttatgcaatatttttatgtaaaaaccatatgtagtattaacttttatgggcacctaaatatataatattttagtataaattaaagtttaacatagtattatataaaaatatgatatataacccaatttaatataatacaatacaatacgacctaatacggcgttccaaacgagcccatacaatacaatacaataaaaccaaacaaaccctaaataaatttttgagaatatcagataattatattacatttagtagctaccaagttataaccctatgttaattagataaatactactttagtgtcattaaatgtatatatataaaaaaaaaatatcagataatataacgtattaaaaataaaatttaaacaatatattgtacacatacttattttattttacataatttaaaattaaaacaatttaataattcgtaaataaacaaaagatctttttgaataatatccaaatactttcaaacatatttttcattacatcttcgtataatagttattcaaactctaaaaataagtcaaaaattttagctataaacaaaagtagaaatttaatcaagttagactaatagtaattatgcaaatcattattataatattctaaatttatggggtttatttgtaaatttaaacgaaatagagttgactttataattttcagaaagacaggggaataatttaattatacaaatttaaagtgcgagttttctaattatcggttattgttttggtttatgtgatcctttctctttcctctctgaactgtttcgttccccaattcaatgaacagttaacagaacgaagattccaagctccgatcaaatcaatcaatgaaaccatagctctctctaaccttgcaaacccaaattcaaaaccctaaattcaatggcgagcgtctcagtcgccgccgagtggcagctcctttataattcgctactaccgtaagccggagctctatcgaatggcctggaagcatatggacctcactcggaacaaggtcgcctgcgcacccttcggtggtccaatcgccgttatccgcgatgactctaagatcgtccaactacactctgaatccgccctccgcaagctccgtatcttcaattcagccggtgttcagctttccgagaccgtttggaaaaattacaggcggaagattgattggaatggcttggactgatgatcaaaccctagcctgtatcgttcaagatggaaccgtttacaggtacaacattcacgccgaacttctcgagccaaacatctccatgggcaaggagtgcttcgagcagaacgtagtggattgtgttttctggggaaatggagtcgtttgcatcactgaatcgaatcaattgttctgcattccggatttcaagaatccgaagtctgtgcagctggctaatcctgggattgaggagccaccgcattgtatggctgtgatcgagccgcaatacacgatgtccggtaatgtggaggtgcttcttggcgttgatgatgcttatgtcttggctgtggaggaggacggagttcaacaactcggctttgaggttctgcgcgggcctttgcagaaaatggcggtgtctcgcgatggtcagtggctcgcctcgttcacgcacgacggccgccttttggtcttgacttcggatctgcggcaagtcatcatcgagcaagattgtgaggtacatttctggttttcgatttactgattttgctacacgatcatattgctatttactgattactgatgttttgcatagttgcatattcgagttgttcatatattatgtgagaatgtgtcttaaattagtttgagtgtgtacagtcagctcttcctccggagcaactttcatggtgtggaatggactctgtgttgctctattgggatgatatgctcttgatgatggggccaagaggggatcctgtgcgttatttttatgatgaaccgataatacttatcccggagtgtgatggggtgagaatattgtccaactcaaacatggaatttctacaacgtgttcctgattccactgaatccatctttaagattggtagtacatcgcctgccgctttactttacgatgcacttgatcattttgatagacgaagtgccaaggtagagttgctaaaccaacctatgtagctgatctccattggttattttagcaaattacactcagtgacatcatagttattgtaaatatatgtatacaaaccaaccaaagttttcttggctgttgtcaggcagatgaaaatttgagattaattcgttcttccttgcctgaggctgtagaggcttgtgttgatgctgcaggtcatgagtttgatgttttgcgtcaacggacactgctaagagctgcaagctatggccaagccttttgcaggttagtttgctttgattgctttaaatgagttgactttatagagctttacttttttttttttgcaacaaatgggaaatttggagaatctgttagttttttcatatcattaagtgtaaactattttttgttgaaatttctggaatattttggtaataattaggcaatacagaatattgcaatggttaccttgtcttttggattgcttgtgtaaattcaaatgtcataagcatgtctatgcttacagaccct

SEQ ID NO: 191002 - DNA, 2416 bp, Cannabis indica
tgtttacgtatttttaaaacatattatttattttactaatttttttgacaattataactatattatgcatgtatacttagaataatttaaaattatattttatgtgtaattattaataattaagctttcatgtttatttttttaatttatttactttaatttaaaataattataaaaaatctaaaattaaacaaattaattacaaaattttaccgacgaagcagtgggaaaattttattatgtgacaactacaagcgagttttgccagagtaaaaatgtgttggtaaaagtcaaatatccatctatcaaaaaatacttttggcagcgcattaatgcactggtacaagtaatttttccagctctggtaaaagttttaccggcatgtacacttttaccaacacttttcattttttattggcaaaagttgcagtaccgacgctgattttctgaccccttttgccaaagcaaaattatacgctagcaaaagaagatttcatttttccaaattaatacccaactcttgccaacgcacaaaagtctaatttcttgtagtgatgctaaacaacttgtttctacctaaattttgtatggaggcttttggtaattgaagttttaatccgaaaggtttcattaaagaatattaaaatataaaagagcaagttggctaccgtcaataacatcaaatttagagaaatattaaagggtatccatggtgcttaaggtataatattattattagtgtaattaaatattatatgaagtctcatttattttattttgataaagattataaaaggttgttagtcaaggatttcacctcataactcataatagtactatcttggtgccccatataacaatgctctcaaatttattcttctataatttgtaaataaagggaaaatacaaatctctagacctttcaacaagaagtctcttaacggagccacaatacgatctatatatcattatttaattatatatatagtacataactgaatacatataagacttcatacacactaatacaggattattattcacatatatggtggatgcatgcatgcatgcatgcatacttattatctttgagaaattaagatcagtcacgataaaaacctgctgcaactaaaactatactccaatccaactaaataataaagaaaagatgcattaattgtatggagtatataaaatataaatatatagtagagttctagttttgaatccaaacaatatgatcctgaggaaggaaatggcagactggaacagttccttgtttaacgttaaggactttgaaggccaagtggtttgggttccatcctgaggtgtctttatggcaggcagctactgccttaactttgttcccatcatcactaccttgtaaggtcaccatataagcctcagtggcttgtgaagtgtggcaatagaagactgcgaagggatagtttagcttgtggcacacaacggttactttggagtttgagtttctcttcttttctacttgttttattgtgtacttttgtatcccaacagattctttctcctgtactacatttgtagaaattgcttgtacgttgttgttattaccaagcttggaagtggtgaagtctatcattgactctaatgaagttgcacaatacttgtcttcacctttgatactcggctcttcacactcttcgattgtttgtttcaccatctcagcctcctctgagtgtggtttcacagaaagtttgttcaaaatttcaggcaattttttagatgagaatgggattgattgagctacttgacggggcaagaaagttgaagtactactcatactagtactactcttgacgaagttcaagttcatttgagtcccaggttgaatgtccttgtccaagaaaaacagagctacactaggattgtcatgaagttgagtttcattggctgcatacttgtacacaaatgggtcttttcctttcacacctactccaacataaacaggttttcccttatgtgttgtgtttacagaaactcctccttctttaccaccaacaccaacgttggtacctcctttgttaccaacaccaacaccaacaccaacgttggtacctcctttgttaccaacaccaacatcaacgttggtacctcctttgtcaccaacattattcacagaggtactcttctcttcccttaatatatctacaaaatcatcaccccattataaatactttattaatccctttttaattaattagttcattaaataacaaatttgaaaatcttaattaaagatcgatgcctgctggcctgtaattattaattaccataatgaatatagggtgattttataaaccaccccttaaaaggcttgatggatccaacttatatatatttttatatttgagagaatttattagtttactttttttat

SEQ ID NO: 191003 - DNA, 2755 bp, Cannabis indica
atttatgatgaaaccactttcaaaatccccctaaaaaaatactaaagaagaagattatgtaagtcttcagaatctagaaaataaataaaattaaactgctcaaaaacttacccattggcatatggcacctcttctcgtccacggtacggtggtggtggtgacctgctaaagctgcgtccacgaggagaaacactacgacgtctaggtgaacgtccacgaggactatagctcctggatcaaaatcatgagcaatgtcaaaaagcacgagactctaacctatgttagtattgacagttttcaggtttacaatcttttgcaagcaaaagaaatattaaccagacatgaaaaaatacaagtatcaacataaaaatatgaaaagaagatgacaacacctgcgaccgtaactaggacttctgcgatatctgggagggctgcgactgcggcgtcttcctgaaccaccacgcatacggcattctcgagcaaaatgaccaggctcaccacattcatagcacttcaaatctgaaccaccagaccgaccaccacgacctcctcctcgtccaccgccgccacctcctcctctagagttatgagaaagctcaactctccagccattcttacctgcttaaaaaaaatataaaacgaaaaaacataatcatgaagtgctataatataatatcaaaacccaaatggttcaatagcaacattgcaacaagttccacagaagaaaagggaaaacgtggtcagcaatacagggtactgaaaaaaatttgaaatgattaaatttggatatacacaattaagcttgccagagtatattaaaggatacgtgcacccaatatatacacaattaagcttgccagagtatattaaaggatacgtgcacccaaaatatgcacaagcattacagagggatgtagcaatttttctaaccaaacacatttatttaaactgggaccgactattataaacagtggcatcacatcaagcctttttctaaccaaacacatttttaaactgggaccgactattttaaacagtggcatcacatcaagtttccaaacaagtaatagatattaaacataaatgcctgttctataatgatcatttaaatttggttgtaacaatattttttaacaataatagctcaggtcatatttgaattctaaagaaagaattgaaaggaagcaaagagtgaaagagatgaactggagatacttcattcactttacaaggactttttaattgaactgtgaaccttgtgcaatttcacaaactgacaaaacatattcatttaaatctactaacataaaagacaaagaaacgtaataaatcataattaagcatgaaaatatttaaatttgtagaactaaaagaagaaaaaattgttaaaaaccatttaacctaataggcaaggtcttgcaaatatatacatggcacgcttcatatacagtagatataaattcattttggattttaaagcaataacctgatgagaacaccattaaggaacataacaaatagcataaaaaagtatataaaacctcctcataccatccaattcacgtatagcatcctctgcatccctactgtcatcaaagtcaatgaaagcataaccaggaggcctccgggcaacccacacactgcaagtttatcaacgagaatcagcgtacaaggcttacaataaccatcgaaagatagtgtattagtctcataactaataatcgatatcatacattcacagtacaacagttgcatacccctccaagaccaacaaagtgtatgaaactataaccattatgatgcataatgaaagtatctccttgggtatcataacataactttccaacacttgaaaatttcttaaaattaaaactagttttaaactctcaagtgccacaatttagtgaaaaacttctttgtttaacaattacaaatcacttgtattacagaaaatacacaaaaggtgaaaaaacttaaaagtaataatagtgaataatttagataccttctaatcactccaaaagcacggaactcatcttcaagatcacgctcagttacccgtggacttaggtttcccacatacacacgagacatagttcaaacttcaacgggatctgtcaacacaagtaaaaagacaatgaaaattcatatcgagtataaagctatacaaaaggaatatgacattagttgaagttcaaatacagtaagccaaattaacaaatgtatacatataagagaaacagattaataacagcattaacatcctattaaatgagggctctttcaaataaaaaatgatgggaaggcttaaaataatcaaatttttaggtcttactcttcgttatgaaaagagtaaagtgcaataccaagttcaggatgcaaattaagaacaaaaccctgcgatttttatacagacaaaaattcggagaagaggagcaaaatacagtacaagtaaaacaatatggagacaaagaactacaaagccctaaacatctcagagaattttcgatggagaaaaaatttaggcaaaactaccgcacgtaaatgttgaagaaggaaagaggaagcagttgccaaaacaatggaaaagatataaattaaagttctttacctgatgatatggagaggcgaagaattgagaaaaccctagcagatttcaacggaggcagactgtcccgagtttttcacaaccgagctttggggcttggattttgggttttataggagagaccaaattacccaaccagcccttaaa

SEQ ID NO: 191004 - DNA, 2099 bp, Cannabis indica
ttatttaaaaaattatataatttctattttttgtataagttattattattattattattattattattattattattattattattattattaaaaatttccattaatttatacaagaatgcggaatgtcacagtgtttatgacatgaaatctttgttactttgtcaactcctgaagttaatgcttctttggatatatatatagattatagagtcaactgctgacactgacacatactcctcattaagattgacaattacagcttaacttgtttcttcttttagttgtcattttagcataatagtttaagctcaaaaagattggttaccacatcaatggatattacttatggaatctggtaaaccaatcctttctgtttctattgactcaaaacttggtttggtgctatgaacactaataacaagtcaaaatcataaaaactaaatggatagcctgaaatcttgagaaaaatctcaaaaggcctctcaatcctcagagtagctaaatactaataattaattattagaaattcaagaatagtaggaacaaaacttgtaaccagttaccagcttcaatatttatcatcatctaattatataaactaaatatgtgacaatgcccatgataattaatgacaataataataataatatttataacactagctggaacaagagagaaggacctcttctaagtcttaaaatctctttccatctattatgtcagattcaagctaatgctaagttgaggaggaagaagagatgacatgacatgacatggcttattcacttgttctcggacgcttcgagggttgggagccggccccgattgcatcttgcccaagatcatcagaagctttattttcttgaggtgtctctttctgctgctgcttgccaagctcgtcggaaccttcttccgagatagctttagcattggttggatcagttttagttttcccgtcgttgtctttccccgatgcttcaagttcaccttttaatgaggaatctggaattgcatcaggagaggggttctccaaagaagatgatgaagcctttaacttgtccatacccgacttgcattgtttctcgaacatcatttgaaggtaccgcccttgctcttctattcgcaactgcaggttcctttgtatctacagagaattagaaacagttcagtaccacaaagaatgaacaaaccctttacatagaataattcatgtatttcgaaggcaacgattcatacctcaagctgttcatgcagccgcttctgcacttccatttgcatccgtagagcttcagtgatctcaatacccctgttaagcaaatcacgtagatacttattcagcataacaaattgaaccttcaacaagaaaacattttaaaggtggaaccttttgacaattcgactcttttataagcacaactaaatggacaaatttctaaaagagcctgatacaattacttgattagaactcactccgaaaaactaacctaagggagcatggtgcccaaatagttttatactacgagctaatctcatactttggagccaacatgcccactctgtggtggcctactctaggctaggcctaatccaccacttgagggtgcatagctctcataccacttgatacaaccactagggtagaactctcaaattactaaccaaatccgtatttgataaatgtgggatcctcacagagcctcgcacacatcatccatcagtaacaaaataatgcagcctacacttctatatcaagtttacaacacatctctaagaccccaccaacttggatgaagctacattgctattttaagggacaaccttctcaagattgtcgataaggaatgcagtgaagggaaattcaatagcaaacccgagccatgaggatcattagcttacagggacccaaattgaaaaccccaacaaacactaattgcttcctagaaattaacagcataagatttgttaatgaagcaatggctggagagtgcgtcatggtcattcatgcagatgataaagttcctaccaatgctttccacgtataaagtataaagccaacgggtcacacccaacatggtaagttctaactatagggacta

SEQ ID NO: 191005 - DNA, 6612 bp, Cannabis indica
ggtggtggggtggggggggggaatcattcattgaggaatttttttcttggtgtttgtctcatctaagataatgacttctctcctaagagatttctatcaatttggtgtggtgagctgttgaatcatgttgaagaaaccagtagaaaaatcccacttcaataccgacattgaagatgatgttgaggcttggaagttggagctactgacggtcaaagaatcagccatggactctatctcgtaatcagtcaaaagctccatttctgaatcagttcttgagcaactacaactccaagaacagatgaaacaccttgaaaccaaagaacagacacgagttgccacttgccaaggacccttctcgtagtgctcaagaacattcaagaaaccttaaagaatgagtcatgaacgacattcgacaccaaaacgatcaaggaatgatagaaagtaaaagcccggtcgtgtcccaagctttgtttaggggccgacttccaccaaatcatggctaagctgctgaaatcactcaggaaccgagagatttacgatcgaatagttttgcagtcggtccatctttagagcaagggtactccgataggaatttccacattgagaagcagattgcaaaactcaagatgccgcttttcgatggtgaaaatctagattgttggatcatgcaggctgagcgatactttccttgctacagctatgatgaacacaaaaattttgaggcaatgttcatttccttttcttggaatgcgttgttgtggtaccaatacgaaagtaagaagcgggccattttgagttgggaggaaatgaaaagattggtcttgaaacactttcgtgacactcacatggggaacctttacgatcagttcttgtctattcggcaagagggaactgtggctgagtactaaaagaatttcatcaggttattggctcctcttgataacatcccttttggggtccaatgagcactttcttcaataatttgactttgcaaatacaggctgaactacagatccaacgaccaagaacaattgatgaggccatggatattgcccaagacattgaagaaaaattacaaaccactcatgtgaaccgtccaaggctaccagaatattgtcgagtaggtcatcacagttctagcccatgcaaccataatctagctccaacccctacctgaatattcctcaacgaccatttggcgagaggaagagtttgacaccaactcaagttcaacacaaaagggaggaagggttatgcttccattgtgatgataagtgggtgctaggccatcggtgcaagaaaaaggaattcaatgtggtattaatgttcaaggaagtgaggcggacccactagattcaaagggtgacaagtcaaacaacgaggcaccggagttcgaatcaaatgaaactaataccaacatggaagtttcgctgcaatcagtggttggactaacctcgaacaacaccatgatactaaaaggagtcatccaaggtagggaggtggtgatcctcatagatctcggagcaacacacttcacttcttaagatgttgtcacgcaattgaagatttccattgtgctcagtgtttacggggtcaccttgggtagtgtagacaacgaaagataagggttgttcaagaaagttcatctccactttcaaggggttgatgtgtggaatgacttcctgccaataaagttaggtagtgcagatttgattcttggactacagtggccaaccacactcgacatgactcacatagattggaagatgcaaacaatggagtttcaagtagggaactaatgtgtcaccatcaaaggagatccttcacttggcagaaacttagtcacgctcaaaacaatgtacaaaaccttgttggctgaaaagaatggcatcctgttggagctgaatgtggtgactactatccccactgagatagagaacgagtgctcgaattacctcggcaacttgctcttcaaacacgaggctattttctcaccacccgaggagctgccaccctcgaggcaacatgagcacgccattaatttgcaattgggaacaactccgataagtgtgaggccttattgccatccatactttcagaaagcagagattgaaaaagtgatcaaggagatgttgccttttggaatcatacaacccaataacaacccattctctggtcccgttttattggtgaagaagaagatggatcatggcggttttgcatcaattatagagctctcaaccgcgccacaataccagataagtacccaattctagtcattgataaattattaaatgaaatacatggtgctatcatcttttctaagcttgacttgaaatctagttatcaccaaatccttgtgaaggccaaggccgagacagcatttcgaattcatgatggctactatgaattcttggtcataccctttggaatgacaaatgcaccaacaacgttccaatcatttatgaatgacatttttcagccgcaacttcgtagcatcgtgttagtcttttttgacgatattctcataggtagtaagattgaggaggagcacatagcacatctcgatatggtgtttgaaatactaggctgccacaaactctatgtcaacaaaaagaaatgtgcttttggcaaacaagaggtatcatacttgggccatataatatctcaccgagttttcgctgtggattccgagaaaatacgagtgatgcttgattggcctacacccacaacgatcaaacaatatgggggtttcttggtctctctagatattatagaaaatttgtggccaactatgctcggattgctcaacccttgatggatcagctccgtaaggaccaatttgggtggaatacctagctgaagtggcattcaacacactcaagtctgccatggtttctatacctgtccttgctttaccaaattttgaggcccttcgaaatagaaactgatgcatctgggattgggttgggggccgttctattgcaagaccagccgccaatagcttacttcagccagaccttgggacaagaagcaagaagaaaactatgaaaaagagctaatggcaatagcatatgcggtagcaaaatggtggccgtatttgatgggcaagaagtttctagttcaaacttaccaacaaagtctgaagcatttgctagaacaaagagttattggaactgagtaccaaaagtgggtgtcaaaattgatgggttatcaattcgatatagtgtataagcctagagcgagcaactgcgttgctgatgccctttataggcagccaactattgagtttcagcaagtcttagttgctgccgagtggcatttatggcttgcattaaaggaagagatcgcctaggacaattttttgactaagaattctaccgacatccaacaaggccaaccccaccatgggtttctcttacacaagggactgctgtactacaaaaaccgccttgtcatcccaaaaaaatcaagctttttgagtgctactttgcaagaattccataacacccccatgggtggacatgtgggcgagctaaaaacttacgaaagactccaagctgaattattttgggaaggaatgcgagctgattttgctaagtttgcgcagggttgtgagacttgccaaagaaataaatacctcattgcttctccagctgttttattgcagcctattctgctttccgaacaagtatgggagaacatcaccatggatatcattgagggactaccaaagtcaaaagggtaggacaccatattagtagtggttgataggttgtccaaatatgcacaattcttgaagcttagacaccctttcaccgtggctacagtaaaaccttcatgcaagacattgtgcgcctccatggacttcctactccattggatagagatcgaatcttcctcaacaacttttggcagtagtcgttcaaattacaaggcactcagctgaagcggagtacaaccaatcacctgcaaaccgatggccaatccgacttaattggagcctcgagacttatttcggtacttcacttatgaccatacatggaaatggcttaggtggcttccatcgtccgagtattggcacaatacttctcatcactctgccctcaaatgcacttcgttcaaagctttgtatgggcaggatcccccacccctgctgccatatgaaaagggtacgaccatagtctccaccgtagactttgttggagtctagggatgcaatacctgattatcttcgcatgcacctccttcgcgcacaacaccagatgcaaacgtatgctatctccaaacgccatgacgtcaaataccaagtgggtgatgaggtctacctcaaactccaacccaccgctagcaatcccttgtaagacgcaccaatgagaagctcgctgccaagtattatgggtcttttcccatcacgcagaaggttggtaaggtggcctataagctacagctgcccaaccacacttcaattaacccggtctttcatgtatctcaactccgtcatgccataggaggaggtcacatgccagccacaattccaccacaactcgcacgacttggagcttcgggtagcaccagaaacagtcctccaccagcggcccaaacctacagatcccacagcaacagaggttcttatcaagtggacttccctcctgaaatttgagccacttgggaggagttcaccacaatccaggaacaatttccagacttataccttgaggacaaggtgagagtaattgggttggggggggggagcctaagttgaggggttcctttgagtgttattccttttaattgtattatattccctaatttttttgtgcaactggtaattaataaagtaaacctataaatagaagaggagggggttctctggtaagggtagctaacaaatcaagaagagattagtctcattggagagaacagccttctcgaaaggctgccttggagagtttgagcctctcgaaagctcattgtaactattgctactatgatcaataaaatcattcattgaggaatttcttcctggtttgtctcgtctatgatagtgatttctgtcctaagagatttctatcaatagtttcttttaaaattttaggacctgattagtgattagcagtctctttctcaattaaactgctttattttgaagattcatctatattcatgtggaccggatttgatgaatattggtctcattcaaaatagttgtattagaaataaaagttgaattcaatttatgagtcgtcccaataatgcatagctagattaagcagttgtgttcatactgactaatttttggctgcaggatactcagttacttcaatcatagctgacagaaaactggagaagcttttttgctcaaatcttcagttacatgtcgaatacagatgctaagccatattcaatgagaaatattataccaatctaagtgaccagtaaacgagggcaggtttgaatttgaaattagtttttcttttacgatgatattaccattttgatggcattattttgtatatggtggcttgtttgtcgggccaggcctagtcatttgttactattgcaaagtgataataaagaatactaattgttttagccaaaacattgtgatgctaatttcttttatttatggcatctttgtgtgagtggcagatcagaggcttggaatctaatcttattatgtgctctgctttatagacatgaactgacaagcaaacgcataggggtcttctctttaaatgcagtgttggcacacaaacatattggctttgttagtgaagttacttgagaattttaattttctgataatctaatctataatctttcaaatagagatccaaacaaatgggaccctttgattctgatctctaatcatgtactcccatcaagatgggccaaattcctttaaaacagtggggtattcatactagtaggatgaatatacatcttctccagtaggttatcaaatgttacatatttatcctgaccaaaaaaaaaaattatatattcattttcttccctcgcgtagaaataaaataaatgatgttttataagcaagagtaatttaagtcgtccctctcttgagagagagagaatataacttcaaacattgtaaaactagagctgattctgatttgttgtttgaagcaccttttaataatataaataaataaaaggggtgcacaaaatgcgagttagccgaccaacttggtcaactcggcccttcgaataatattataaataagaaaaatagtaaaggatactcatggtgtttagtattattttaaagtataatattgctattggtgtaacgtaatatcaagttttacttattttactttaataaatattataaaaaattactaagtaattatagaacgacacttcatcatagtgctaggcaccatatgtgcttcataacaatactctataaataaataaaaaaaaatgttaataggtattactggtacttaatactttcctcattgtcatatcgctattggtacaaataagtatcgggttccataaaacttaatataataatatttagtgaatatcgctaactaatagtagagcaccactactagaagatgctaggcaccattggtgcct

SEQ ID NO: 191006 - DNA, 746 bp, Cannabis indica
atatatatatatatatagtattactaattaattaattattcaaaagtccaaattggctacatacccaaatccaaaagcaaagtaatttatttttcagagaagcagtaataatgtattgatgagtaaatttgattcattgaattacccaaaaaaacacttggcaaagtctttcaacttaagaaagagtgaattgcagagactattttaggtaatgtgcatgtatatgtacacattaatattatccaaatattattcacatttgtttggagagcttattattaataataatacatataatattattgttaccaaaacaagtgtaaccgacgaaagcaagaggttatccaaggctgtggagctaaaccaaaaatgaattacgtgcccaaaacttatggcggctaccgttactatgcttttttttatcttttatctactacagaaactactactgttgatcttatgtatatatatgggatatttatattggttgagtgtaagtctgagtgtgatgactatactctaaatgtttttagactttattttagaaaagagagtgagagagccctgattggtggactggtcaataaactgtcagcatcaaccaaaaccgtacacgtggatggatagaggtagtgagtggtcccattttagttaaatggggttttgacacgtcataaagatgttttgttgcacccatgtgcctttctttccttgccatggaattaacctctctctctctctctctc

SEQ ID NO: 191007 - DNA, 3921 bp, Cannabis indica
gaggattaatggattagtggatatctatgaggattgcaaacctagagagatgcttaagcaaccaaattcaaaagctattgagtattaagtcagcataacttgaaaatcacattacaaacaaatacttggctgttaagacagagagtacttgaaagctttgcaatcaaatacaatgaccaaatgttttctaaaaaatgcaccaaaatatcccatgcacacatgcactaaaatatcccaaatgtttcctgaatttcatggaaaaaatgtttgggaaccaagacaactgaaaattgcattacctgaagcttaaagggttcgccaaacacattaaaggaaactcgcttgagatgaatgcacaaaatctgcaagcagaatcaaacagttagggcaaccttatataaggaacttaaaaactacctaattacaagtttgttagccagaaatgatgtacctaaacttaataagaaaatctaacttgggtttcaataagctggttggaaaggttccaagtttttttaacacccagaaatcctcaaaactctcatggctaaagtttgaaactagggttccctgtctaatcttataatatttagaaaaccataataactgctatgtagatgtcaagagagactcaaacctagaccttgtgggagcaaatcacacgagcctaacagtgcgtgctaccccttcttgggtgtcaggtcatatgaaggtaaccagaagaaacaatctatgctctaatagtattttatgcgattctagtttaagttttttctatcgaaacaatcaatcactttgacgaaaaaaaaattcagagtctatactaaggcgtcctgaaatgggacaaaataccttccttattagtaaaagcctttacagatttaaccattccttccacactcataatagtccaacagccaccctaaaccactgaataccacacaacaacacaccagtatctcacatgtctatgatgccagctgatgacaagagctacattggatgtatatctataggtagagcaggccaaggcccctcaaaatttataaaaataatataatttatcaaaaaattagattaagatcagctttataaatacctatacaaaaatttatttccattagagcccccataataatgttgtcttggttggacttctgatttcttaggctgacactggcttaagataaaacatcactacagatacataccttgggagaacgagcaatgcttatttgcttcagcgtatgagagaacttatttgaccatggaaatgtatcttgaggaagaaattttcggcagtcgcagaaatcttgctcggagcatgtcccaagtttcttgatctttgtctataaaacaatgcaaaaaaaagaacaaagtatacaattacatcatagcagagcagactaatgaatatatgtaagaaagtgcaagaaactttagagtcaactttaggccaccaaaagcaagttgggttgaccaataaagcttcttcttccttttttttccccctatttttaatagttaaacaagatcacattatgcaatcaagtgaattgagacaagattatgtcatttcatgatgacaatgagaaataactgatcaaagttgggaggtacctcatctgctcctatagcggttaagaacctaattccagcaatatgccaacaactggaacagcggtaattttctacttgttcagcctccgtgaactgttttaggcaatcctccaaggtacacccaaccatctgatatatatataaatatataaaaagcacacgagagaaagtataagaattaaaaaattttcagaaatgagacacctttgttctataggaagcagctactacaattgaggtccaagaaataggcttaaaaatacgcactatcatagagtggaatcttcagaacatactatgttggcgccagtagcaagcacgggagatagaggcaagctgtgaaaagattcaaagttcaacgagatctgcaaaatgaacaaaattaaaaaagggcatggattacagaaatttttagtgaaactatactaaatacataagagctccaaaagaccaaaaccaaaataacaaaatagaccctgatatagtggatttgcaaaataacttcatgaagatcacatcacatcacgtcacaaaatatatatatatggggtcgacgtttttttctcttcacaagtttcataatggctagagtacatgcaacgcatttcaggaattgcaaaaatgtacacaaagctataactcattatccatataagcagttcattgtaataactaataagtgctatattaagcaataagaacctgagatgaacaactttggcaagttaagatgctaccaagaatcccatcaaatggtccaatgaaactctgtgtccacctttcctgcttattcagatcctccccactccttggagtaataatcctacaacttgaggaacaagattcaaacaaagaacagtaacttggatcataacaatcagcaaattcttctcttaaagaagacagaagatgaaggaatgcttctgctgcatcctacaaatttacagaatcacaaatcataaccacatagtaatgtgcatacgagtaatgcaattaaaaaagcgcaaagttcgacctgctgagcagtgagactgaaattaggtatgtactgagccatcgaaagcatcactttccggggattgagtaccacactttgttcaccaattgcacataaatctagaatgatggagaactaattaattcagccaaaacaagttgaaacctctttcatattatttacaatacaataacgatgtgtaacagtaagcccatgacaaaacttgaagcaagaaaaagtgtcatttacagacatagccaatcactaaacaaatttattacacagctggtataaaaaagacaggtcaagtaaaaggacattcagttaacctggaagtgatacaacgtaccatccaatgggaaaagctttcaaaattcaaactttgcataaattgcaagttaccttgtaacaatagagccagagaaaccgcaagcggcaaactatcaaccaattcctcatcatcaggcgaccgttcaatttcctctatggatttgtgcagaaaaatatggaagtggggacagcttgctagagcctgctcatttttccacaatcaaatgatcagtaaagtcaaaattctgtagaatgtagccgggaaaaaaaaaaaaacaacactttaaaacaatatgacttctcaatttcaactttctttcttttgtcctttctatacttgccaaattttctgctattttcttagcatccaatcgaaaaagtaacaaatccaagtacaaaatcgcacctgtaaaatcacattaagaaaacaattgtttccaagattctgcaatccgggaaccaaccgcaagttctgaggattttcactctttggcaacaaccactgggaagtgctcaacttgcccagtttgtcatcccttaaagccaatacaaaaccagcaatacccaaaatcccagcgacagatatttgaaacccagaagctgaaacccagctcgaacgtgaaatcgtccgaatcccatgcttgaaaaggtgaataaaatcgtttagcttgacctctccttgcattttccttctatcccaacccttcccaaattagagcaacagaaacgacaaaaagtcgaaaaaattagatgagttgagagcattttagaccagctttgcctaagatggttgactgagatttgagactgagtggtactctcgtgggctctacccactccaaaacccccccgactgtaggaggagaggcccgagaggagtagttgtgtctagtagaattgtttctcctgctgctttgtaagaccactccttgttacattccaactctatattctttataatattttaacaaaat

SEQ ID NO: 191008 - DNA, 1037 bp, Cannabis indica
aattgacttggggttctcccacggatggcttcctagtatttggtccattttctctagtatatatatggctggtgtttctagtttcttgcgtgccaggagtaaacccagccagaggggtcgtcactctaagtcttgttggtgggggaactcgtggagttagttgagtgcttaggttaggatccatcaccattggatccctttgaccggtgggacttgaacattgggatctgtcaccatcagatcagttgattcagtggattgagaccttcttgttaagaccatcttttgccgaattgaagagaatcagattttaatgaaatcgtatccttttgctctcaatgaaagcaccaaaatattgaccttacttttagacaacgacactgagtttttaaagtaatgaaattgaatgactgattaccaataaaataataataatgagcaataagaacacaagaatttatagaggtttggccctgtgatagtagtaataacctactcccttttttgttgtattacttaaagacttattaagatcataacgtccggctaagtgagtttcttaataatctcgagaaaacttacattgattttagcaatgtaatgactctttagaaagttcaaaatcgaatccctaaacaataaaatgacttcactatttataggttaaatgttacatctctaaaatctctcgatgttatgaaattgatcccacaaatataaggatttaattatgctacaactgtagagatatttaaggaaaatatcttagagaatctgtatttgccgtgtccttttctgtggaggattacacttcactgaacatacatgttttgctcgggagattacgaggtacaaaacatattcagatacttcttgttgaaggcgtagacttgactaatttgagctcgaatccctcttgacagaataccaaacaagtatagctagtctaagtattgaaatgatccccacgtatcaccctgtgcagaaataggaataacaagggctaaaaccctccaaattatttaaaaatataatat

SEQ ID NO: 191009 - DNA, 4996 bp, Cannabis indica
caaagtaaaggtcactctcaatgtgtttggtccgtgtgtgaagaacatgattagcagctagcatgatggtactgacattatcacaccaggtgagaggaggtgtggttagagacatatgcagttcagtgagcaaggattgaatccaactgatttcaaaaactacaacagttaagcttcgaaattcttcttcagtagaggacctcgatatggtgctttgtttcctttgagtgccaaactatgagatttccaccccaaaagatgcagtaaccagttgtataccttctatcatcagggtcagcagcccagtctgcatcacagtaagcttcaaggtttaaatgagaagctcttttgatgtgcaggccacaagccaaagttccaacaagatatctcaaaatccttttgaaaataacaagatgagattggagaagattatgcataaattgacatactttgttgactctgaaagtaatctctagcttagtgattgtagcatattgtaaagctctaacaatggatctataagatgaagcatcaagaacaagttcactgctagagttaggaagcttgagaccactattcataagggagctttgagtcttaacatcttgcatttcaactttgtataataggtcctgatcaagatacttctattgggagagcacaatcccatctgagcttggtagaacctgaataccaagaaaatagtttgcatgtcctaaatctttgagagcaactaagtgcttagggcagaaatgagagatgctacttcaagttgattgttgccagttatgagtatatcatccacataaactaagacataaagacagttttgtggagatattctcactaataatgagtgatctattttggcagatgagaaacctagatgagtgagagctgatgacaatttctcaaaccaggagcttatttaagcccataaagagctttgttaagcttgcagacatggttaggaaaatttggatcaacaaacccgtgaggttaagtcatatatatttgttcttgtaggtcctcgttgaaaaaagcattgtccacatcaagttgactaattacctaaccttttgctactgtaagtgtgagaataattaaaatggtaatgggcttagctactagactaaatgtcttataaaagtcaaagccaacttgttggtgaaagcctttggcaacaattatggctttgtatttgcttatagagccatttgggttctcttttaccctgtagacccatttgcaaccaataggacttctgttgggtggaaacttgaccaaaacccatgtgttgttcctcttaagagaagtgaactcaatatccataacattgagccacttaggatctttgagagttgttgagacaattgctggggtaatataagccataaggactttaggctttctaataccagatttggatctggtttttatagtatgagagttgatataaactttctcgggaacaacagaagtggaaccaatggaaggagttggtaaaggagctttaacagactgtttgagtatcataccagattgagatggcaacaccatagtggtagtgggaactggagtaaataaagatgatgcagtaggcatagaagctggtgtagatggaacatcaaatctgttaggataaaaactgtagtaaagttattagtaacaataggtttaatcaattgaacatcagatgtatggccagtgtcagagtgagaggaactgcttggtgaagtagttgggagaggaataataaataagatcaggagatgttgtaggagggagttgactagaatcatagtcctcctttcttgtttcctcaaacccttcaggttgtttcatgaaaatttcctcatccaagtcaccatgtagaaatgcagttttaacatctaactgctccaattttaggtcttccattgctgtcattgctaacagaactctaatggtggtgtgtttcaccaccataagagagaatatttttgtgtaatatagtacctccctttgtgatagccctttaccaccaatctatccttgaaccttgctttttctgcccctaggatgccttctttgtgcctatagacccatttgttgcctataattctcactcctgcagattttctcaccagaatctaggttccatttttcttcaatgatacaacctcttcatccatatcattatcccattccatttttcattgctttagcatatttctttggttcatcatagttgaaatatgtgatattcagtgcatagtgtattaaatcaacatggcctagtctctctaggacctttgagactctcttgtctctatccctggcaagctgataattatgaaggtcttctctgtcatatgatacttcccttgattcttcactgatctcaccacctaagcttccctcaccatctgcctcagtagttggacccttagttatttcctttgaatggttaccctcctgagtctccacctcaaattgaactccaccatttgcatcttcttgcagtgtccctagttgagttaagagtgtattttttgtatagtttatcttccttaaaaatcacatctatactgacatagtatctttgatgattgtctggcttaatgcaccacattctgtagccttttacaccaattggatacccaatgaacacacatgtgactgctcttggttctagctttccctgtctaatgtgtgcatatgcaatgcatccaaaggttttcaagtgatcataccttgcaggatgtcctaaccacttctcaattggtatttggaaattgatggctgatgagaggcatccgtttatcaagtaccaggttattgcaacagcttctccccaaaaattctttagtaaaccaaagtaaattaacatgcacctaactctctcaagattttccttattcatcatttttgccaagccattttgttgtgatatgttcttaactgtcaagtggttagattaacaacttgtttgcaataatatttaaacacaccagcacaatattccaaactattatatgttctcaacctttgaattgtcttacttgtttatgtctctatcagtttcttccattctttaaaggtattaaatgcctcatttttattcttaagcaggtaaacccaaacatgcctagaataatcatcaataatcatcaatgaaaagaaataaaatacctggctctacctcgagatatagtcatggatggcctccaaagattagagtaatgtagtccacagttccttggtgttgtgaattccagttccaaattttacccttgttgcctttccaagagcacactgctcacagaagccctgatcatgcattgtatttttcccaagcaacccatgtctattcaagatttccaagcctttgagattcacatgtccaagccttctgtgccaaagcattgttgaattcaccatggtcttagatgctacaagaacttgatattttacagtgttcccttgcaacacatacaccccattgatcattgcacctttcattactatcattgattccttaagaatcttcatgacactattctctaccttaactaaacaaccttctttgtccaccatttctactaaaatgaggttcctcttgacctcaggaacatgcctcacttgttgaagttctatcaaaccacctcttaccaactccaatttcactgatcccattcctatcaccttgtagggcctattatccctaagtttcactgtcccaccctcaatctttgtgtagttgcaaaactgagccttatttgaacaaatgtgataagaacatctagaatcaatcacccagtggagtctagagtaaccatttgatacgactaacaccccagcattgtcataaccctcactatcacatccatcagaaaccaaatttgcattccctaattttcttttattgtttccagatcgtgccaacttaggacaatccctctttcagatgtgtagttgaatgacagatgtcgcatttccacttttgcttcgatttcccattctttccactttcttaatcattttccctttctgttcatattttcctcgaacatacagcccctcacctgaattttcttccttaatctctaacattcttttaagttctttagacataaaggcactgtgaacctcttccaatgttccaaacatcatagtgtctatgaaatgttcatagccttctgtaggcatagaattaagaaggattattgcatggtcttcaccttctatatgtccttcaatgttctccagatcaagaatgatcttgttgaagtcatcaagatgatcctcaatcatttttttaggtgataatttagaggcatacagtttttacttcaagaacaacctgtttgccatagactttttcatgtaaaattgctcgagtttcttccataaactcccagcactcttttccttggatacttctcttaggatcttatccccaagacatagaatgatggcattgtgagatttttcaagcaacttggatgtctccttctctgccttaccttcgatattgcctttcactttctattgcgacttgaaatccattatgtgccagaagagcttgcatctttaccctccataaaccaaagtcgttctttcttgtgaacttctcatgatcaaaattcgcattcctcattgttcccagggtcgattcttcaaatagctaatgatcacaatcttcacctttggattcaaagtcagccttaaagctcagatacttttttgggaataacttgagcttgatcaaatttcaccaaaatccgttcgataataaacaaaataaacagagaaaaagaaaagtgtttcttgtattgaatgtgcatctaaaactattacaaaagttaagttctaagccttcataaaattgcttacatatagatataggcttgaacatatacacatggtgttgacagttagttaactaacttaactgacactaactactaactatagataggactaaattcactacagtcataactgaaaaata

SEQ ID NO: 191010 - DNA, 2548 bp, Cannabis indica
aggaatctctgatcaattgatgagcattgtccggggttgaacgtcgagggctgccttgaccacgcgcctatgccgctgcctctttcaccgctgccaaattcgggcccgaatgatgacctactgtaccatgagtagggattaggcctatgataggattccatagtggaattggagagtgaggatggtctattgtaagatccatagtagggtgaagggtagtatgggtaataaggcgagtagcggtggggcccaccataaggcccgccataaggcccaccataaggcccaagcttatcatgaccttcatcattcccttggcgtcttttcgtccatgagacgctcatgtttattgagcgttttggttgaccgacccaacggacgttgtagaggttgggtaagttactctcttgtcagtaattagtcaagggaaaagttactattaccttgttcattgtaagccggaagtagtgaagcaggaacagggttcgaagagagagaactgatgagatttagttctttctttcttgaatcactgttgctgcttccactaccttcagctgtcgtcgtcgacataggtgacggcggcgacagcttcagatctagctcaaaagaaggttgttttccgaaattattataatatgcaggcacaaagacaacagtcttagaatcaccatcatcatacctttcccccatgttcttcatatgcagttcgttctcggctgcggagatcagcctcgggatcctagatgaaaaagggtgagcaccaaatccctccatgaataagaacaagtgagaataagagagaagaagagagaaaacttaatagaaaatataaaggtgtttttgttgataggtataaactcttgtgttctttttttctttgggtgaagattaatgggacattggtcttctttttatgtagggtttggagttaatgcatagtcttcaagtttggaaagatatccaattttacagttttaatttgatatatttgctaatgtaattaagttgatgactagacaaacacagaagcatgtatgtataatgtgacttggttatataaatatatatttatatatatatatatatatatatttgtatatttatatattgtaaaatgtgttaggtctacggtgccggaaaagtggtcggccggagattggtcagaattgttatgtgagtcaaatttggtcaagtattaattattgtgaagagaagttatttgtttgaatatgcatgctaagactaaataattaatgagtaaatggaaatatttattattgggaatcattttattaaataataatttgtcatggttaatttgtataaggaaagtacagttgtaagtgactaattaacctcatatgttattcgtgactgtgaaaaaaaatcctctatttccatatatttgtatattattacaatatctcatttgtgtaaaaaaaaaaatagaagaaaaaaaaatcataatatatctctctaccaatattataataataaaaaggaaggaatttagaagaaataaataattataatagataaacaatgatgcatatagaacaaatagtactttatgcccacatatgcttactaactagctagtaaactttgttaatttaagtgagataaaatctaaataaaaaaattgacatatatttgatacttaaaatcatttgaactatgtaaaatttagagatttactaattagtaattaaacattagaaaccgttgatacgatctctcgaaatggaaatcttgtgatcaaattacggcgctgaagaattaataactaagaacgctaaccctaattagatttctttgttacctcttactgtctacattattaatttttaatatttacgttacgactcttgattcttccaagacattaataagattacgtacttaaaattaggaataggtgtttcagactcttaaagtgaaagtttttgtgatcaaaatacaaattaacgatgctaaataattgcttagaatttttcattttaggaaattagaataatgtatactactaaacctaggttttctatctaaataaacttagggtttctctttctttttcagtgtcttcttcgttaatgcatcgttccattccttgtgtgtgctcaagtcatgcatggctgaggggacatctctgttccattttgtcgatacatgtgcggtataaggatctcaaattttcaaggattattgattggggctttgggggtatgttgcagataggatagttgtgttaagaaattaacaaaatcactaacattagtaaacctaggttttctcttttctctctctagctcttttattttacgtaatgattagaatcacttatgaaattacaatgcagatatcagaaacctcctcgaattagaataactcatcgtctaaccgaagggcatatcttgtcaaaccatgaacggctgaagtaagtgagcaacatgggacaaaactggcctaaaaaaatttagataataaacttataccgtcctcaaaataacataccagaagagatagagcttcagctttgtaacac

SEQ ID NO: 191011 - DNA, 2612 bp, Cannabis indica
ctttattaattaatgtcgttctgtatttactactgctgttgttacattaatagaatagaatagtgtacactgtatagtagtatatatatctatatatatatatatctgtaattagcacagataactacatatgtagtacttgtattttttgtcatcccattcccagaacatgaatttttatagcgtacaagataaatttaaatgttatatatatgtatagttatatatatattaataattaaatattcgtggtcgaggatacctaactctattttattatgttcctataatttttatttgttaataaaattagcttgatcttttgtgtatacacctagctaaaataatatttgctagtaataacttaattaattattattattatatatatttacatatgattatactagtgctgctgtcgaagattttcacagcttaaaaattaatataaactgtatgtcatgaagcatgaatatataaaatatatagccttttgttacagttatatatatagttaatacaacaaatatactccatggcttagcgcctctatatatgttggtcgttcttcataattatttcactactttaagatttttctcgaaatgttattgtacattacttatcatacgaacttaaaatcaaatgttatttaaatattaatcatgaaaaatctgccatatttaagtttctcctatatgaaatctttataaagatcatttgtatatattataatggcctacaagatccaatgataagcatttttcttttattataattaacaacagagttatggtgcatgtgtagctttaaataaattgatccattatgctatatatctttaattagatgtaaatttaaatttgaataatttctgtattatatatattttgtccatatcttattaaggatatgcatagatcctattcttccataaaaaaaaataaaaaataaaaataaaattcattaatattctgccaaattatttacgaaaacaaactagttcagtcccttcctggttattatttattaccttaaatatatttcaagttttttttttttttttttggttaaggaaatacatatctagtttagttagtctaaatatactaaatatgtaatatataaatcatagaaagtatcttattgagagttttttttttttttcttttgaaagaatcttaatgagagttattagcaaaaatataatgcatgcgttttttttttttttcctattatatatatatctcaatagctcatttttttttccgttaaagacttctaaaacttgcaacacataggatcatgcttatattgtattatataaatataaatattaaagccccaaatttatctagtttagttttttcaacagctatagtaatatgaggattgtgatatgaaatatatatgtgtgaatgcatgcctaattagtacagtatagctattatcactataagaaatatcaattttgttagtacaaagacaaaagtttagtattgtgctggtaaaatgaatttacttctgatgtgttagcaaaaggagttagcaaatcagcgttagtattaaaacttttgccagcacaaaatgaaaattattggtaaaaataatttttttcagcgcgtaaatatgctgataaaagttagattttagccactgcaaatatgcgctagtaaaactttaactttttaccagcggaatttacgaaatgcgttggtaaaagttatttttaacaacacagtaacaaattgtgctagtaaaagtgacattttttgtaatgtatatattattgtggaagtttatttatttatatgtaagtatatactgtatatatacatatgtatatatatatatgctatacatatagtaaaagttaatatattcctggcttcctaacaatacactaagagataataatagtgactaataataaatatatacattaatgaaactgagaaagttgtctagttaaatataccggctattaatattgatgctagctagctttagtatataattaagtcataaatcttattggtaattaaatgtatacatatttaaattttttcacctgcatatttagtaaatgtttaccgaaagtaccaaatctgggcatgcaaaaaagaaagacagcacatgcataaaggttcctagcaaggtctacgagttttgagtttttaatttctgtacatatttctatagccatttttaatacataatattatatataggatagctttgctttagtttctaaatccaatcaaggttaatgaatatatatatatatatatatttatatatatatatatatatgtgtgtgtgctcaagagtaaaaaggcagaatgacaatatatatatataccattttagtgaaacatatttttgggtaaggtgtgtgatgacaaaattattcaattggtagttttatacttttgctgcaattatgagatattaataattccatatttacctaactcatcactttctctatgctatattatgcagtatcttcaagtacgtgtggtagatacttatatcgcatctacttcattaagatattttacataatcaaatttaaagttgatgtaatttttttttgaaattaagcgttc

SEQ ID NO: 191012 - DNA, 3754 bp, Cannabis indica
ctttcaaaaataaatctcatatttcgaaatgaatgcactgaagatttctattctagcctaaattactcaagaagtggaagtgtctggtgcactaagttatattaaatttatgtttttgctttcgaaacttttcaaaatttttaattactttgtaattttaaaaatgaaaaagtgaaattaattttataaaacatattttaagaaaaaaacttttgcttttttaaattaaaaaaagagaaaattggtgtacatagacataatttagtagtaaattaattataaatactgtttgaattcttaataatataatttttataaatatattgcacataaattaattataaattggattaatatgtactagaaaacattaaaaatgaaaattggcagtcgaaagttaaaaaaaaaaaaagagaaaaatttacgacaaaactaataattttttacagtaaattttttgtatttatatgtttagatatatattttttatatttttacagtattttagaaaaataattaaaaaattatataaaagtgaataaaaaataatatactgaaacaacataaaaataataaaaaaataaaaattaaaacagacaccaaaataataagaaagcttacttctacaaaaaaaaaaaaataataagaaagaaagtaaaatttataaaccatttttttaaatttttttatgtatttttcaaataattaaaaaaaaaaaaactcaagggacagagctgggccttggaaatccgatccaataattacaatgggccgttaaatgaagtcgataatccaaactcttctatgctcttcttctttcctcctttgctctgactctgaagctgagccctaaactcctcctcctccactatcactatcagtctgccatttctctatctcagcttcaagctccacgactcataggcagctccgtcgcggtgagtaactttgactgcaatttcaatttctcctatcccgtttcccatattgcttttcagtttattgtttaatttctcataaattgatgcgattttagaccccttatagttatatgtgcgttctcgacttattgttttcgattacaggagcttcagataaagaaaaatggggatcattgaaaagatcaaagaaattgaggccgagatggctcggactcagaaaaacaaagcaacaggtatctttatctgcatctttttttttctttaatcaatttaattctgtttttcatggatagaattacatataatttaattgttacaatggttataattgcagagtatcatcttggtcagctcaaagcaaagattgctaagctgcggactcaattactggagcctccaaaggtatgggatgcaattcctctattgctttgccatgcttgctcttaaattgcacaggaaatttctctacttgttcgaatatgttgattgatcattttcttttatatgaatctatgaacattcagggttcgagtggagggggagtatggttttgaagtacaaaatttggccatggacgtgttgcgttaattggttttcctaggtttgctatctttattatgacaatttgacatgtttgtctttctattgctcacaagactgttaaattatgcgcttggtttataatgttgtatatttgtaatttaatagaattttgccaatttgagtgcacaattgtttgcatctgagatggagattgttgaaatctttacttattgctattgctattgcttgtagtgtgggaaagtcgacacttctgacaatgttaacgggtacacagtcagaagctgcttcttatgagttcacaacacttacttgcattcctggtattattcactacaatgatacaaaaattcagttgctcgatcttcctggaatcattgaaggtgcttctgaaggcaagggtcgtggaaggcaggtgggatggtttttataaaatttcttcacatatcttttaatagtattaatgagaataattttagagttcgtcttggtctgttggtcatttattatctcttgttcttcttaataatgtaactattaaggaaattaaaaaaatttgtgactctttacttctgtcaggttattgctgttgccaagtcgtctgacattgttctgatggttcttgatgcctcaaaagtaagtatgtactttgaatctaaattccccactcttctctaccgttgctactggattgagttatgagtgacatcctttacttctttatctatgatggattctgcatcatttgtttagtcaaacaatattgttatttcttatgttaattgcttgtaaaatgtatcagagtgagggtcatcggcaaatattgacaagggagctggaagctgtgggtttgcgtttaaacaaaagacctcctcaggcaagcttttgatattgaagatagtcttcttcttcttctttttttctattttgaaatgctgtgttatatttttactgttttgattattctctttagtttatattttgttgattttgtttcataacctgcaggattcttaactgggttttggcattgtttcttcttggcagatatacttcaaaaagaaaaaaactgggggcatttcattcaacagcactctcactttaactcacgtggatgagaagctttgttatcaaattttacacgaatacaaaattcacaacgctgaggtatgttgttaaggttcttgttaattgaatcacctcgcacactcagctcagcttatacatgtttatctacattattcgactttacatcttgggctatttgaatagggaaatcatattgtttaatggtgattttttttttctcgcaggtgctatttcgcgaggatgcaacagtggatgattttattgatgtcattgagggaaatcgtaaatacatgaaatgtgtgtatgtctacaacaagattgatgttattggtattgatgatgtggacacattggcaagacaacctaattctgttgttataagctgcaacctgagggcaagttctttaattaaacttcactaaataattataaatggagaatattggtttcattattcaatatattttgaaatctcttagtgttgatttctcatatctgtgccgctttaacagttaaacttcgatagactacttgcaaagatgtgggaagagatcttgttcgagtttacacaaaacctcaagggcagcaacctgatttcacagatcctgtagttctatcctctgtacgttcagattattttcagactttctatttgattgtcaagtaatttgctctcgatttctctaaatctggcctctcttttgatttcctttcttggttggttttacaggacagaggcggctgcacagttgaggatttctgtaaccacatacacaggaatttggtgaaggatgttaaatatgtgctggtgtggggtataagtgccaggcactaccctcaacattgtggtcttagtcacaatcttcatgatgaagatgtggttcagattgttaagaagaaggtagacttatttcttcgtttagttgttcagttgaaattaaagttgcactttgtttatcatatcatcgccattattatagccaaaccattgtaggatattttagcaactttatttctttagactatttcaaattccagatcttttacactttgtttggaacttggaattttgggaggaaaaaaaaaatcacttggttggattcaaacaaaaaatggactaactttaagataatatgagacttaaatttttatttagttttata

SEQ ID NO: 191013 - DNA, 883 bp, Cannabis indica
aaataaataaaaattattaccctttaataatgataaatagtggaagaaatatttccatttttttttatctcatatttaagttctctcttaattttaataaaatatgtacatactataaaagaatgactactttatcattaatttacattactaattaaacatgttataatttaccttattttctcaatcatattcacattatataacatacacgtattacattgggataatattacaaggcatttaacgatatataatctttcattaataaaaattagaaaaaaaaattgtaaaatttgtgttttgggcaataatattcatctcattcacccccaaaaagaaaaaacaagaaaaatgaaagtaaaaatatgcgagactctttgattttataatggttgaatttctcacatgatcatatataaaatatataacaagtatttttacacattgcgttatctaaatcttattaataattaaaacattgtgttactcgaattcttacttttgactaatactacagatcatagtcatgtgtagaaaaaaacaaacttatttatacatacattacattaattaattgttattgcttaattttaaactttggtcaacgatgcctttttgaactattaatactgtatatatacagataataaccagtttttaaattaaagcaacaaaaaatgcatacttttttatttgttttcttacacgtttgctatatctacatcatgaataaaatatgtctgctaagacagttgatagattgagtatgcactagaaaggtgcaacttaatcttatacatataataatgacctgttttgtacagattttgcttataaataacaactatatactaattaatttattatcattaaacaaaaa

SEQ ID NO: 191014 - DNA, 3344 bp, Cannabis indica
gagagtttcactataaataaccctattaaaaattaatattataatttgtgtatatttaagcatatcttcttttaattaattatgaaattatattgattcgtaagtaattgcataatcaaacatctagacttaagatctcctgcacatgtttttcctaactccccttagcacacaacatcgtgtggttcaaacttgcgactccccccaacaaattgatgcttccataattgcagcaaattcaaatttagggatatgcattttttagtattacttacaaaggctgtagtattgatgctcacgcaaggagattccaaacatgtagaatttcactgtaatgccagcttaggggtttatatatccaaatatggtaagcagaatttcacatagacaagaaacaaaaataaaggcatattctctttcatccactttgatacaatttttcatttttattgtcaatcatatgttataaactagtcacttatgattccaactataaattacacacaaaatagagcataaaacaacaaatctgaaagtttatacttacatcaattataatagtactaattaagaactaacaatgaacctaaaataaatctattattaccaacaataacctaaaccaaatataagacaaaaacttaaaacatgacaaaggaaggaggaatatgcatacagtggcagctaaaggttggagcagacgacaaaaccatttaaaaactcaactgtgtagtaccatggaagctccctcctttagatacaaaagtgcaaggtttctcaactgggatactgctacatttttaaaatttccagggtacacttattttaataatcaaaaataaataaaataattgtacataaataacatacaaaattgtcatttaaaatttatttctttgtacttattccatcacacatttcttataatttccctctaaatttgtgccagaattagtaaactaaaacctgcacctaccagccatcaaataatttaccatgctaattgcttaatttcggtctcaaaggaacatgaccataagaagaaatgatttctgcttagcccagtgcaagtctaacataaatattcagaaggctcagctagcagtaaccttcaaagttcaaactgccggtccagcacagtgctaaaaaaatataggaaaacttacaaaaatactagaatttgaattaacttttacaaaaatactgttacacagaaatattttcaaaaatactgtatttttataaaacaccagtagaacacagaacagaacaactcaaaacagcagtagaacaactataaagcactagtgaaatcttaacatagtatactgtaatatggaacttataaaaaaacacacagtaaaaaaaataaaaataccacttgacaatatttttgtaaaaaaatggcaaaaattaatatactatgtaaatttcccactacatacactaaatttacaactttattgtattttttattagctcgtcaatggaaaatactttcctttccttaaacattttcttcatctcaactttctctatccctctaccaaacatagttgatgtttttctttttcccttttaaaggttacattcaaaggtctaaattagtggtgatcaagaaattgcataaatgttagcttcatgtaatagctgctcagaagaggaaattaaaaataagctactgacattcattcacattatgacaactttaggcttaccattaccattatcattcattaccagattcaattcacttatgacgacgcgcagcatccagctactctgattagccattggatggaatccaatcaatctgcaaatcatagattagagattccagttgctcgaagcagttgccgggggagaaaaaaagaaagaaaaactataattacaataagaaattggtaaaatcaacaacctagaaccagtgccaacaaatctaaagacctgcaccggtgacaagggatgaggaaagcaaaaaggaccaatcaggcaacttatatttcctctacacatcactacaatacatatgaacctgtcctcactcatcggtcaagtctctgggatcaatgcagctaaaggcgtatgatatgatgctggctcattgagaagttggtctctggtatcacatgcaacaaacaaacttcttctcggttgcctctcagatgtacacagatttcacatcattaggaccaaatgaagtggaacatgttggacacttgcggtgtcgagtttcaatgatatgttgcacgcaagggttgcagaataaatgatagcatttcgtaattacaacctggacagagttatatacaaatgttaataaaagatcaaaaaaataaaaacctgaatgcaactgctgtaataactgagaaatattccaactctcaacaagacaatataatttttgtggcttttgtcaagccaaaattgtgatcttaatttaaaaactgtgccagaggcagaagcaatacaagacaaaagaaaaaattgttctgagcattaattataaaactagaaatcttgattccgataactcactagctcagaatcaaacccaaaaattggtcataataataataaaagtaaaagtggaacatagatcagtaagaagttcatctatctaaattaaatatacctgttttgtcctatcaaggcagatgctgcactttagtatctcccgatattcacctagttcctgttgaagcttttcaataattgaggaaccttctgtctgcgctcttagtcttgaggcctttctcctcaaaacttccagctcttcctcaagtcttctcttttcaaacctaatgaagcaatagattagcccaagtacgaaagacagaatagatcatattggaatgagcacagcacatatgtacctttctttctctagttctatttgtaggtccaacaaagccactcgacttttataaatcttagattgtgattcatctagtgatctacaggtttgttctgatgatcttttaagatcttgtaatttcttttgggtactgtccaacatcacagaactttggaacttgtctcctaatagcttctgaatctgatctgagcaaaccttcaactgcatagcaagaaaataatgagggatagaaaatggacatgaaaaaggaaaatgtgtctcttatgctatttggtatgtgaggaaagaaaatagagataaaagtgaaattacaattgtataattttacatctattattttgaattaaatataaggataaatatgtaactttactttaaatgcatattatacaacatttctcttcacttttctctccaatttaggagagaacgatattggtgggacccacctttttttccttctcaa

SEQ ID NO: 191015 - DNA, 2074 bp, Cannabis indica
aaaaaaaaaaaaaataaaaaagtcaagttcatttttgttttgatgtactttttttaattacttttttaatgtcatagaataattaatatacatgcatatattgtttattatccttttttttacgcaattgagattcagaatttattgatacctaaataaatatattttggttttgtcaataaaaactaaaatggtatttacttaatattttatagttaattttttttaaaaaaaataaattttggttttttatacacataaatgttagtataatagctaatattatatacacaaatatatatatatatataccagattatgaaatatgtgatctccattttcttccattgaaatacatttctcaagtagttttcttgaaaaatttcttgcttcattaagctcaaattcatcttgaaaagcaagatctgtggctttgtaaagatttaacaacataatcgaaaagtattcgcagtttgtctcgatgtgatttttaatttcttcgttatgtaagaaccagcagagttgccctacatgcacacaaaatgaaaaataaaaacaaaataaattaaaataatatttatcattaattgaaaattttatagtatagaaatgtcacagttgttcctattataatattaggggtatctttaattatatttttatcttttaatgaagatatatataatacgaaatttcatacttctatatatgattgtgtagagtagcaagatatttcaccaattaatttaattttaaaaaattttaaaataatttattttgccgaaaacaaaaattaaaaataaacatattaattataaaaaaaattaataaatacaaataattattcttactcgaaaatactttatagccatgcatccttagaagacgaaaagctaatgagtctttaagtaattgaagttgtaacatttcccatgaatggaaattaccaacttttaagtatgattttccatcgtaattcctgaaataattcataatgtttggaatttaacaatcaataaataacaaataaacttttttagtaaattttagatcaatttattaatttaaaatatattaattgttaaaaacatacttataaatttgttggagaatattttcaatctcaatcgagaaatgctcagccaaccctaatctttgcagatggttgataatgcaaagctttataagatcttcatccataggatatgtagtgggaactgcatgcatacataaaattaatttaattagattttataccgtttggatatacattccgttcatctctctaaccattagatcgataattcagttgatcgaacagtttttaatcactgaaagtcaatgtacatcaaactttgatcaaagtatataaaatgaatgatgcgtgtatgtaataattaacgagataaacgcaataccgaccctaaattttagttagtcatagaaaaaagaaattgggtccttatttagaaaaaaatataatattttaaaatcagcaaaaaactcgatattgatgtctataacccactattaatctcaaacgtgaccaaattagcattggccataagtaggctaggtctatgcctagggccacctagtccaaggacccaaataaaaaaaattccctttcaaaaatacatatatatatatatatattattaatttaaaataccatatttgtttgtaaataagggcccaaaattttctttttatctatagtccaccaaacttcagagccagaatgtgaccaaatatatttcttatttattatcatcaaattataagtattgaaataataataataataattaacctccaatagtcatgtgattattattggaaaatttatgaaccagagcttgtaaatagtgtaagcatttagagttggatgtggccataaaagcttttgctgtggctgagggagaattgaacaaagatcctttttcacacaagtgcttcactatatcatctttcttaataatattattcccaaaatcatgtgatgatgatgaaggtaacacttcaagatgccatagcaataaatgctcattctctttcttcattagtctacata

SEQ ID NO: 191016 - DNA, 3927 bp, Cannabis indica
ttttgttgttgaattcattaatataacaacttctaatgttacttatttttgtgtaatttgttcaatattatatgtttgttcttgttgaacaagtatacatgagttggattaaccaaaaagcttttatctttctcaacaagagaataaataaataaacaaacaaaaattgatatctttctatgtttcattttattctatgcaccaaggaatctaataaagctaaaggactcgtttcacaagtaaattcaatagctcttctgcccaaaggactaaaaaaatttctctgctccactctttagtactatcctctctttattctctctctaaatcatcaccaatatgcagagagcagagttacttggagcaatacatgtcagtttaattattaattttctcctttctcaaattgctagtttagcttccaaagctaggaagatgaataaatagttgagctttttaaccatggattcttttttctttgtaacatattttctttgcctacagcgatttttttttgcttgtgaagaaagatatatatatatattatataatatatatacacacacacgtattgttctctatatatagctacttcaaccaggtattagccgaaatttcatctacacaaaactacacacgtgcattgtttgttaccattgttttctcataacaatggtcaatttttaaggtgaaatacccaaaaagttttgccaaccacaaaacgagaatgtaaaagtatataaatctttttttcatggcttggatgctgcacgaattgattgactgagactaaatgccctcataaacacaagtactactacctttattttctatactctgccaagttccaaatctctctctctctctttaatcttccttatatgtcccacaaagatgatgagtgacccacacactcatcatctggaaagcgatctaaaccctagctactgaaaaccctttgaatgcttattttgaaattatatattaaaagacaaagcaaaatttggagagagactagaatcctatgtggggttggacttcgggaggccttgtttgtttgagtgtgtcaccataataaaataaaatttgtgctagtgtgtttttgtggataagatgcaattttactagtctttcaccaaaaaccctaatcatatttgtctatgcctattgtgattgttaaattaaagcctatcataacgtcgtggaccttatagaaggaattgttgacttgggtttggtattcatcaagaattctaagagtgcaattatagaaggatatagtgatgctgaattttcttgtgatagagatcaccaaaattcaacattagctttgttcttcctgattggaggaaattgcaccagttggagtgtacagctacatgcagtagttgcattatcaattacaaaggctgaatacatggatgttacagaatcaattaaagaaggtattcggattgagggactaaagaaagaaatacatttattgggagaaattcctacaatctacctagattgtcagagatgtatatgtctatgcaaaaatcttgtatttcatgatagaacaacacatgtagaaatcaagtatcactttattcgagataaagtgacaaatgaagagattcagataaagaaatttttactgaagaaaacctagctggtgtgggtactaaaattaaacctaacaaaatttaaacattatttgaatttgttaggatggtaatggtgaataaccattaccttgaagcgtaaagaccgtgaggaagataaaaatacattaataagcttatgaaattgttaaattaaagaatatcataagctgcatgtatcactaattggtccgtggatataactacaccagtttaagattacaactagatcaagacaacttaagatttatttccttatcatccaggtttatttctctttaatgattgcatctcttctaggatggcctccagccatgctgtaacatctttgcttctatcaactttttgatagctagtaggttctgagctattgatctcttttacaaccattagtgcaaaggaaatgaattcagcgtaactaaacctgtcaggggctctactttgtctttttttttctctatctctagctaattgatagctactcagatcatgctaatctttattgtcttcttcttttcttatctcagttccatctggaacaacatgtttggtgctataggagcagtatgctccacctcaatgtggacattttcatctcaaacatattcattgtctttggagtgctcttagttttcatggccatgtcatcttctttaaagacaacatccctactaatcatacatttcttgaatccaggttttaaacaccaaactcatatcccttaacctctttagggtagcctaggaatatgtatcttaattcttttagttgcaatttatcctgcctaacacgtacaaaagcagtgcagccgaaaaatttcaaatgatcaaagtttagaggtttacctgtccgtaactcttgaggggtctaaaaattgtttggtactgagaggcatctattgattaagtagcaggtttttttagaatgtctacccagaaagatctgtctaagcctactcctaacaacatgcatctaaccctttcaattattgttctattcatcctctcagcaacaccattttgctaaagggtcttgatcactgttctgagtctttagattccaactttggcacacaattccttgaactcatttgagcagtaatgaaggtcattgtcagttcgttagaacctcgaatttgttacctgttggattttataaaagcttcttccatgtgtcaaaggccactagaacttcatctttgctttttaatagataaacccaaactttcctgctctaatcattaactaagattatacaatagtgtgctccacctttagttggaatcttgtatgatccccataagttagaattaatgagcatatgctaatttttctatggtggtatgttctgtcttgttgaatttcaatctgcaagcttttcctaaaacacactcatcacagaattctagcttttttgtcagcttctctttacacaaccttgtttattcagttcttctagtcctctttgacttacatgacccaatctgagatgtcatagtctagcttgactattattgattgagctaacagtaggtgctgcactacctgtaattgtctttccatccaagaaatacataccattgctcaaccttcccctcatcatagtttatgtaccttgagtggtcctcatcactccatcctcaacattgacagtgtatcctactttatcaaacataccaatggacaaaagatttctcttgagatctggaacatgcctgaccttctgcaaggttctcaaggtttcatcataattctttatcatgaatgttcccacaccttttatctcacaagccttgtttcttctaaaaagaaatgtgcctccatgtttctatgaaagattcttaaacaatcttttttggtgccatgtgaaatgaacaccctaaatttaagatccaattaatctccacctatatctgaacttgacaccataagtgcatttgttgactcatagccatctgctatttctacaacttcatacttgttggacttgtgctgattttcccttttcaatttttcctttaaaacaagacaatcatctctaaaatgaccctcctatttgcaatagcaacatttcttgcatgtagctccatttgagcttgaccctcctgtggagttcttgaatggttactttgtaaccatttaaattctgatttctcttgtattcactcttagggaactttccttttaacaatgagcaatcattccccactattctctcatttctcatctctcttttttttttttttttttacttttttttttttttttcccttttttttaac

SEQ ID NO: 191017 - DNA, 2527 bp, Cannabis indica
gatctggcctccaatgcgtatggagaatcaaagtcagagtcctttgcatgaatgcttgccagattagctaatgcctttgctagcattaaaatcgtgtatcggttaagattgtgaatgagttgcttaatctaaatcttccaccatatgaagttaacacaggaaaaacataccagcctcgacgacatctttgaattgggccaatgttgaaatcatttcatgatcaaagacattatcgaaaagtccatcggaacccattactatcgtgtctccttctattaactccatgctactaacctgttgttgagaagagttataaacttccaaatataaatcaaaactcaaaaagacaattatggttttctccaaaattttcacataggaatcgtttatatgcacatctcatccagcattactagcaatcaaacttcttagtacatgttgaacgcagaccagaatggtcatcttggttgtgagccatatattgacctgattattacagcttagttctatcacatcttcaaattacaagcactaaaagggtgcctcatcataccttggcgtcaaggtatgtttgactaatgacctctgagctcagttgatagggacagtcaaaataatgttcttgtggaatggaagaaaaaactactcgacctgaagaatagaagaaaaaatatgcaggatgaaaggagaagaaaacactaagggaacaatggaaagctaagaatttgaacaatgacaattgaagggtgtgtacctgcacggataacccttagcccacaatccccaacattggcaatcttcaaaattccattcctctccaatatggcgacaatgctgctcagataagtggaaagctgaatcaattaggcgaactaggacggaagcagaaatctcagaaaatgaaaatgcatactgaaggttacttacactgttgcagaacctatagaggaggtagcagcatgtgctttcctaatgagaatttgtggatcactgttaacctgtaaagacaggtaaaatacttgggtttgtcaggaaacatcaatgtatgcagtaaacaaatactatgtccatcttaaccattgctctgtgagtaataatatataaaagactattagctaatcagatatggttggattaaaacacagtttgaagaacatctcataggctatcaattatttgaaaaatactacctcttcatcctccactaaatccgaaaaattagtcattagttcctgcgggaacattgatggatctacattctgttctgcccaactggaaaaagaaatgaataaatagatattaaaacttcaagagtcataattctagatcattaatgcatgataacttaacttcaactccttaaacaaattctacatgtttatgctttctattccagaaagcttagctatagatatagtcatacataaacacttagccttgtccaattccatacccagaaacaccatcagcaacagcaagagctcctcctttgtagctactcacaaagaaagcatcttccccacctcggtcaacctatttagattaacaacaattgaacacattataaatgtaaaagcaacataaacatggaaaataagaaatcacatacattttcagagtaataccttgctggggtgtggaataaggtgtacaccaacacaaaatgacaacgaacgcctacaacaacggcaaaatggataaacaaacaagtttaataataccttcataatataagaagaattttttattagaaaaatatttttacttataccaaaatgcagaactattcatgatcattctaaccgaaaatgccacaacaaatacaacgaacctaaactactaaactggatactttaaaagcaactaaattatgattttgagcaaaacccagatatccacaagctctatctgttatactttgagcaattattgaaacaaaaaatccgtagtaatagttgaccatttggttgctcactcaccggactggattatgttccgaaggagcgcaaaagagcaaacttctgttctttgaagtttcatgtaaggtggggagagaaggaccaagggaatggatagtgatagctggacgagagtgaggtacagaagctctgaatatgggaactgccatattcccgcttcaactcctcctaaccttaaccagcctattggttcgtacaaatatttgcagaggaagagtgtgtggccacaagtttcagatttcttggagttttattttaggctttttcagtctcaatatccgaggctacccaacccaagtgatttttcttcttaaaaaattatataaatggttatttaaaaaaaaaaaaaaaaaaaaaaaaaaaaaaaaaattttacatttttacatttaatttttttatatatatttttaatgttattttataaaattagaattaaaacaacatcaaaataacataaaaaaaaaataatatataaataataaaaaattaataacgaaataataaaagtacaatataaaaatattttaaaaaacttattttatataaat

SEQ ID NO: 191018 - DNA, 1342 bp, Cannabis indica
agaaaaataaaggaaaaagaaaagggatcccctattttagctcaaaactaaaaattgtagagagaaagagcaagagaaattattggaaaataatataatatatatatatatatagctcattgtttacacaatgcacttatccttaattttgtatttagaacttaaaaaaaatgagtaatactagaaacacatttgaattgtacatactaattacacacaatgatgtgcattcaatcttaaccatacaatcaaaagtgacgtggttcctacttaaatatataaatggctaatatttaatacacataattgtgtgtaatttaaatgtgtatctagcattactctttaagaatatatgataacattgtaatttttttcataacaattttgttgtttgtgagaaagatgagcaatggactaaaccaaactatgctatgatcaaagctaatgtaaactgagctctctttcctcaatcaaatagtttcggatatgactttgtggctagagatcatgagggtacttggcttttcatgcttctaaatcaagtaatatcaacccagagattgcagagatagtaagaatcaatgaagctctgagttgaataaaagctcatgaatgattaaatgttatagtggaaattgattgtgtcaatgtggtacatgtaataaagagtaaagtttgtatgatttatcaatacgacatgttaactcatgaatctaaattattattatttgaatggttaaataaattagttcttttattaatcgatcaacgaataagatattagatagagacttttattccaatgtcgattgtactattagtaaagaatttatttctactaatttattgtccatactttcgaataacttttaattaatgaaagctattattttctgttaaaagaaatagcatatgaagctttaattttctttgttcattttttttgaacgaaaattttgctatagtattaattaacaaatccgctaacaaaatagattagtaggaacaaaccttccactaaaccgatgatctaaaaagaacaagcgtgccacagttgacctccgtgttcacagatcattaaacaaagacaacaaaaatattgtttaaaaaaataaataaaattttacaatcaatcaaaccaaactgagaagagatatggtatgtataataaattgcatgaacaaccaccttagaaatgatctaatgtttaatcccgcttttgccatattcagttgaacataaccaaacaccaattttgacttcattcattagtaatttttaatttaaaaaagtcttacatgattagtttataattgtgctaaattagacacacttcataaaa

SEQ ID NO: 191019 - DNA, 2777 bp, Cannabis indica
gcaaaacttgattgagaagagtcttctttttcagatcaagttccaattttatttcgggtctaggatacttcactatttccccccttgatgtgcaactttgcaacccctatgcccaccctgtgagtggcatttcctaatttattttaacgatagtacaataattctgtttgttaggtggtcgaataatatactcttgtgtgtggtgctctacaggagataagtcccggtaagttcacctaccacaccctgacccaccaaaggaaaataggttgtcaataatcaagcttctcaaagaaattaaatttttatttttttccttaaaaaaataataaatagatttttctcaaaaaaaaaatacctaaagcgcacgcttcctctccttcccatattgtctgtgttcttctctctctctcccactatataaaaatgcatatatagcgttacctcatcactccaagagtatttccaaacagtgtattcttctttcttgtttcttcctatccagttatacccagaccataccctcactttaaactctatatctgtcttcatcatcctcaggaaaaaaaatgggaagcattggggcagagagaaccattacaggatgggctgccagagactcttctggtgttctctcaccttacacttacacactgagtgaccctttaatttaaattgtttttaaatttcatcatcatcatcataatcaaatcaatcttcttggtttgtaattgtttgtatttataatattcaatttgctttatattatgtattgttctcaagagaaaccggtcctgaagatgtgtacatcaaggttacttgctgtggagtttgtcacactgatgttcatcaagtcaaaaatgatctgggcatgtccaattatcctatggtcccagggtacgcatttcaaattctcgttagtgttttatcaaatggttttaacatttttttccctttcaacttactgattggataattaatttaggcatgaggttgttggtgaagttgtggaagtgggatcggaagtgactaagttcaaagtaggtgatattgtcggagctggctgcatagtcggctcgtgcaaacactgccagccatgcaagtcggacaatgagcaatactgcaataaaaaaatctggtcttacaacgatgtctacaccgatcaaaagcccactcagggtggcttcgctgaggccatggtggtcgatcaaaagtacataattctactttgttatatataattaatgcaataaagaaaaaggtaataattttaccatttatatgtgctgaccaattgtttgtttttcaagatttgtggtacatataccagaaggaatgggggcagaacaggctgcgcctctactatgcgctggagtaacgatttacagcccattgaagcactttggattgatgcaaagtgggctaaaaggagccattttggggctaggaggagtgggacacatgggtgtgaagatagccaaagctatgggacaccatgtgactgtggtgagctcttctgagaagaagagagaagaggctctcgaccatcttggagctgatgactatcttgtcagctctgatgctgacaaaatgcaagagcaatttgactcttatgactatataatcgacacaatccctgtttttcatccacttgagccttatctttcgcttttgaagcttgatgggaagctgattttgatgggtgttatcaacaccccacttcaatttgtcagccctatggttatgcttggtaagttagtttagtttagcttttttttttttccctcttttacgttattattattattgttattaaattgattttaatggtgggtaatcttgttcgatttttgtaggaagaaagtgtattaccgggagtttcattgggagtatgaaagaaacagaggaaatgcttcagttttgtaaagagaagaacttgagttccacaattgagactgtgaaaatggattacattaacacagctttggaaagattggaaaagaatgatgttaggtacaggtttgttgttgatgttgctggaagcaaacttacttaaacaaatgaaaaagtatgaacgagtaccaatttaaaggaagaaaagtctcgtaacttaccaaaccgaagaagataaaaaagcaaagttgctattattatttctgttatatttttcccaagtgctctgttcgtgagttgatgcttttgtcaattgtcaatttttctttcaaaaagtgacaaatttttattacttggccattagtttgatatggtttgtaaagtcgtaatgagggtgaaagatatcaaactttgaattagtgggattgaacaaatgtccttatgcggtctcctttagtattcaattagtggttggtatttgccactgtgtcaatgatttttcaggaagataataattaaaaataaagaaaaaggtttctcccaataaatgatttaaagactcataacagtcatttccattattttttatacatatacctatataaggttttttttttttttgaaaaagttatacctaaataaggttggtgagtattaaatgggaaatatgcacataacttacatttataactaaaagcattacagcataaatattataatactaaatatgatatatatgtcaatttcaaaaaaaaaaaaaaaactgtaatagatatatatgtttgttattttttttagtggtacgtacgatatatatggttactggcgtaagtatagcctagctatgtataattgaaattgatcataataagcaaaataggtta

SEQ ID NO: 191020 - DNA, 1092 bp, Cannabis indica
catgaagaagaaagcttcatcatcatcaacatcatcatcagatataaggagaaataatgaagaaacctgctactgtgtggaacccttctttccaaattgaagatttcatggaagaagatcatcatcatcatcgccgtcctcgtcttcttcttcatcataatcgactcaccattaaaacccctattgatttcatgcctactgcagtgccatcttcttcttcttctactaatttagatgcatccaattatcgtgaacttcaaaagaaagagatgatcataactaaagatcatcaagggttagacctaaccctttcactctagatccacctgattgatgatttcatatacatgcttatgtatgtatgtgtaattagatctgataattctctatgctggtacatctagcttcttcttcttctcttgttcttatttttgtcgtattttatttgtataagtcgatatcatgattgtatatttatacaaatatgatgaataattcaggggcattagtactctactgtgtgtagaaattatagaattaagtttaaattatttaattaattgttttgctaagaaaaaaataagttaaaattatttaattaattaattgttttcatatagagaacgaaaaataaaaattaattaaatactttaaattgtttaacaagtatatttttttaaagcttacttgattcatgttattcttctaagttttctattgattaaccattatattttgtccttcaaataattaataccctcgttttgatttcattactaaaacatttattatccttctgatcacttgttcttttgatccccctatatgttaataattaatgagaaacgcattaattacagtgatcgaactatatataaccaaaccaaacattcaaacaaaaactatttgttcattggtatttctcgctttaattttgttttccttttttttaattcatttgagataataaaataaataatatcttcatctctacaattgtttccaaggcaaagattttagtttatatatcaagaaacattgaaatgtggtgggctactgctacatacttgtagcaatagcccacacactaat

SEQ ID NO: 191021 - DNA, 2486 bp, Cannabis indica
ggatgagcatattcattcttccacatagtgtcactaaggaggttgagaaactttgttggggatttctttggggatggaatgggaatagaagtaaacttcatgtggccttggcttcaaggatggtatcaagtggaatcgagctattcttgcaaaatatgtttgggccatttctaccaaaagggactttgggtgaaatgggtcaacaacatttatctaaaaggcaagaattggtgggaatatgaacttaagaatgacactagttggtattggaggaaactatgttctctaagggacaaattcactcgagaagacattcacaaagcaggggctggtaagagattcaaggctgccttttttattctttcggtctttacgagaattttttaatttttttttatgatcatacaagttgtaactatttaagattttctgtaaagttttataaaattatgaatagtttacaatacataaaataaaagtttaacagctgcttatacatatgtaagaatttatagtcacgcatgcagcaaaatattaaactttgttttgggtactgtaatttttttatttttttaaaagtttacatgtaatcttatacagctacaatgtacatgatcatgaaaaaaaaaaattaagttaaaaagttttaccgtaatgccgaaatagatataagggtctaccgaaacaatactttaaaatgtgtattatagacttaccctaacataatttgttttatgtgattattctcttattaaaaaaattaagctatacattttttattatatttggtaaaaaccatactgaattatttttctggcaagttggatgagatgcatctccagatgattatttatttattgttgacacaaattagtaactctacaattgtaaaatttaaaatcccccatttatgcatattaaatttcatatttttgatctaaaatataaaattgagaaacgatttactaatgactaacttatgaatgtataaaaataatatcaagttacctactactcatttaatattattacatttattaattgctattggatacagaaccttacacacaaaattatcattcgtattacaaacatttaatgtaatttcatttagctaggattgagattttacaatcaattaatccagcaaaatattattctcagcaacataaactaattatatataatagcccatcataatcatcacatatatatatatatatatgattaatatggttcaaatgggaatggaagtgaagaacaaggaaatgattccatcttttgtgtaatgatcaatattagtaccaaccccatcttgctccttttggtatatcatcattgctgtcctaacgaaatctatggcagtttcaataaaagcttgagaaaatggagactcacccactcgagcttcattcatttccttccatgtttcactgattaaattccttatgtgttcacggccattcttttcatcacaaataccattttctttcatatagcattgaatcgatttaggattgtctcctcttttcagttcatcctaacaaagtaaattaccaacaataagtaaactaattaaaagataagtatcatttttaaattttgtattttaaaataattagtataaaaatattatggtaatcacaataaaattcgtgagtaaaagtaaaaaatttgtgactaattattaattattatttgtgactaaaaggtccgtaaactcaaaaagtacaatttgttatactaaatgtgtttttaatcacaatacttattgccaacaaaactaatttattaacaacttgtgactaaatagtatgtttcagtcacaagtaatttttaataatgacgaaaaaacacatattaacaaaaaagatttatgaatttatatattaaaaaaaaaaaaaaataagagtatatagttactaacttaccgatgaagttcctaaatcatcaacaagtcgaacaatgattcctgagatacgaataaaggtgggatattgaagcaagcagtccatgtcatcttcttttattggattggttataaggcaataaagattgactagaagtaagggttctgcaattgatatccatccatttttaatgtattcttccaagcttggtgtgtatccactatgataccaatttgcctccaacatgtaacatttacataaatccgtccactacacaatcaaaagccacttttttttaagagagtgtaagaattgtatgtattatcattaataaaaaatgaagaaacaattcagtaaccaattagttactaaaacagttcactcagtgttactaactaacaagcctagctaacacacctaacaacttaacaatatcttagattttttaccatactttctgatccaattaattttaataatccaatcgatctaatatctattggatattgaatttgatcggttttatccattatagatgtattttagagttaatatttttttttgaatcagatcaga

SEQ ID NO: 191022 - DNA, 796 bp, Cannabis indica
atctcatcgttattaagtcttactttctacatcacttcataccatcattatcatctatgtttaaataaccggtataatctaacttcaaccttcagggcgggaagtccattgcaaataccaagacttaattgtcatcatttacaaataggaattctatgtagctctaaaatcaataaaaacgaccactctatatagggttctccaatatagaagcatatattatttattggtgatcttcctttacaagggtcaaggtcattcttgttttattttattttattactacagttaatttttctgataatgaaaagaaaaaacagcaatgatcaatgctggaccattactcaaactgaaaatgaaaactcgaccttaattggctactggcttctgttatggtccaactcccattattcactgttcaatgcaatcatgatttatgcatgcaattaagctcaacccaaaaaaaatctgaaatttcactttgactctaatattgttggtgtttcttgatatctcaggcctaatttgattcttttccgagtctcaaatatgagagtattttttcgttttacatatttatctatggaagaagaataaatgttctctctttttttttactttacaattttcttcctttcttggaaaattattggaccaactcaactttaatattgaaaaagacagtatattctgtcttggtgtctacaacagaggcaatgttgtagtttttgtctagaatggaagcattgtagttatgtgcaagtgttcaggatatgattgctcataactttgatat

SEQ ID NO: 191023 - DNA, 2281 bp, Cannabis indica
aaaatgtaattaagatctcttaattacttttaattacacaattatagtttaattactgacaaacacacaaaattatataattaacttcaattataaactaattccaattctctcatttctttataaacatgcccttaatacatatagtttttacaatgtaatcaccattacaattctattgttaatacttgtacaatataattccattacacttatttatatacaaataaaattacctttataaccttattttatactcatatttatgttaagccactacccatttctttatcattctaaaattaaatcaaacatcataatgttattcccattactcccattactgttcctgttacaaccaaacgttacctgtattgtattttccaatccaacctatctaaacgcaaacaataaaatgaaaaacaaaatataagtcaagtaataatggtgaacacttcaattcagttgtattacgtatggattggttgatgcttatgaacagtatagaatatagaattcagataaatattgatggagggtgcttgctaaataagtagtctcaatgcactttggcgaacattctagatttcattttctctcctctctctctctctctcttttatcagatacacaactaatctaattctgttctgtggaagtttctagaacaactaaacgagttttcattacgaccttatctcctaaaaaagtgacctcatggctcatggtaggacccgtcccattcgaatgcactcagtaataagtttaatgacttttacgtatacaagaactgaaaggaaattagcaatatttttatgtataatacataacaattattacattccacgaagaatttgcaacaattgattaaatttcgaaatgaattttcttgtttcctctttcaaataagtaaaataaaaggaagtacctacgaagaaaacgtgaaacagtgacaagtgaatcgaacaagtgtgtgtgttgagctcatttcatcctacgtggcattcagtagacacgtgtcaaaggcttatacgtaaagaagacaacgtcttgacgaagttgttgcctgatgaaattgaaaagtaggctggtcaacctgttctcttctctttaaataatccactcctcttcattctttccttcacccaaacccatactcaaactgatcaactcccatgtccgcctgagttcttataaatttgtttttattcttcttcttcatcatcatcaccactaattagtagtactaagtttgctgtaatctctgaagaagaagatggtgatgagaaaattaagtaacaacccactgtcatcaccaatgtccaagtaccacaggttcaaccccactgatactgagctcattgcacacttgaagctcaagattgatggagagagatccaaactcgatgattacattgccgagatcgatgtctgcaactgggagccttgggaactacccggtatgtacatacacacgtatacatatagatacagtgttctgttctctttttttttttttttttttctttttttttttttttttctgggcattatgttcacaattgtatatgattcatgttctgggttttgagattatgggtattgctgtactgaattcagtattttgttggtgtgtttctgggcaataaactcagctaaatcaatgttgaagtcggatatttacgagtggtggttcttgtgtcgtctcgattataagtactcgaaaaatagtaagcaagtaaaaaggagcaccaaaacagggtattggaagagaaccggtgaagaacgcaaagccaaaggttgtactggaatgaaaaggaatttagtcttctacaaaggtcgtaaacgcaccgattgggtcatacacgagtattattatcctcaaccccatattaatctgaaagatcaggtctaaattcctttgctgttgcatctcattattatatatatactccctcttgctctgtccatgcatgtgtatgaatctttttcgaaatgtcatttgtggggttggagttggaggaggaggctgtgccattaaaattgacattgaatgataaacctttccaccacatgaaagtatgcctttttttttattcaaaaatatgcagaagccaacctgtgttatttgtcgcttgatgtgcgatccccagagaaaaaggcggaattcagatgtatcttctgtatttccagaggtaagaatagtcaattcccttttctacattttactatgaattatgattataaacctgagcattattaattcctaactttaggaggg

SEQ ID NO: 191024 - DNA, 912 bp, Cannabis indica
attattcctctgtacttttgtggtccaaaggttttactgtacatttttgcgtcactagcttccgcgtcgcactggatgcttattagatgatgacctatatatctttaagttggcttttggtcccgatgatcactttcctatatattcccatctctatatatacctagatgatatatatcattatcatctgttatatatatttctggaaattagcattcaactatttcaatctcgtgatgatcatgaatataattaatttgaacacaatcatgtcacgcgcgcagagatatgagatcttatatatcttatttattccaagtatcaaattcaattacccatataattaattaaatttttactttgtgtatttatgtgtaatgccaagcatcttaaagtgtctagtatgatctaaaatttcttttggacttgattttaccttttgtattccccgaaaaatctattttatggtatagaggccgcttaattatatatgacctccccctctagcattatcacatatagatcaatactgttcatatagatcaatatatgtaagctataattaatgcgtgtaacgccatcttatatatgtatttcaagttatttataagccttatgtctaaaacaaataattacaagattagaaataatatttgtaacaactaattatatttaagtaaaatatttgatagtaaaacttctttctatatattaagaatttattaaaattttacagtagagtcaaatatatattaactagcttgattaaaatgagacttgtcaacatgtgtctaacatcctaaaaaaaaaaaaaaaaaacttcattttgtttctttattattttgttaagttccatgttgaaaaatgcacaaaaggttctttaaaattatttaacatgtttcaaatcatgtc

SEQ ID NO: 191025 - DNA, 1157 bp, Cannabis indica
aaaaaaaaaaaaaactaagggacaaccacggtgaatcacattagaacctcatccttgtggagaaatggagaaattatattggggttccccttaagctagtagataaaaagtaaatattttatggtaatgagtttttaatttaataaattaattttcatatgcatggatggggtctttttttgaccagaggtttattatggactacagaaaaaggacttccataacatcatatcatggtatggctatggaccaagcccacgtcgggtgagcaccaaactccgaccatgggtccaacgaattgtacggccactgtcacagtagcactgttgtgctatctttgtagagcataaaaaaaccgagctgatcaagtccagggcatggaagcacaagacaatgtctcttctttttctcatttcatcatactctcttgtatttctcagctacaatttcactttcccgaaccagatgtcacttactttgtatcattgttgttcgtaaacgacttaatttatttcttcatataatcaaataattattatatatttgattaggattcgtattggactatttttttccccttcattgacttacatttttagtccacatccttgaattttttctaatttctctctcctgcctcatgttgtactctcttttaaatcatttttttaactctatttaataatattatggggttttttctattttaagctaatactattcaaaataaacattaatacaatcataaggagaatataaatattaatactatttattgatttcaaataaacaaatttacaaatatatggttggagacaaaaagtgaaatacacaagtgggctatgcgggcgagtgaggctcacacgcgaatgagggaacaaaatcatcaaaatttgttgacgcgtgcagtattatagtgttagaacgtgatagtggctgctacgtgtcaactttggacaaagtgtacttgagcatgttagacttcttttcttaacgcaacaactaattatcaatgaaataacgacttgaaaacaaccaaaatcagttaaaaaataattatatatagaaataattgtacttaaacctaaatcaattttaaaagaaatataaataaaaataatagcacataaacacaaaatcaacttaaaaataattat

SEQ ID NO: 191026 - DNA, 2245 bp, Cannabis indica
ctcattaccaattttattctattacattattgttataaattactattattattacattctaccaaagcaaacatcactttagtttcgatataattcagttttcattgctaatagcgtagctgatggtctagctaaaagtagctacaatttcttgccagaatgttagtgttttcaaaggtaggcacccccacccaactgtggctaaagctggattttggagagaaaacaaggatatcaatacaatctcatagactaaatatattgatcatgtatacaacacctaattttttttttttttttttttttttgtttttttttttttttttatggattggtcttccaaaacaagacttatgaagatatgctaaaaggctaagcctttgaagatcataactgtaatctgagcaacatttttaaagattgatcataaggtggttcctctcggggattaaatcgaagcagtaatcacttgaaatagaacatcgctaaattgcttgttttttgttttatgatgctacaatactgtcatagaatggttctattttattagttaatttctggtttctttaattgccattatttttgtttaaactaataaattcttgaagtgtgattatacacaacgtataggttgtaatgtaatgtaatgttcaatagtacatatttacagttaaaacaaaaaacagaaaaaagttaatctatgaaaaagattgaaccacagaagaagtggtaaccaaaccagagagaagagccacaaagagagcattgttgtaagtacttggttcagtttgcattgaattgttcctaacatcattatatgtgtcattgaaaaaaggtccaccaacaagtgcaccaatagcttcatttggattgggttttggtgagtatagccatttaaacccatccttacaaccagtttctgcatcaactggaattgaagatcctctgtggtgaacatattggggaaagttactaccatatccaacaacatagctcatctccatgggattttgccccaacacataatccacctgaaaaaataatattgcaacaaaccagttttaagaataaatttggattagattttattttgaattgttcaatattgttacacaattttcttccttttttttttttttttgtggatcagttaattttttttttggctgcgaaatttcttatctttttacattatacaattaactctttaatctttttatttttgtggtaattgtcaccgtgtacgtttgtgtatacatgatatatttttaattgctttgaagttttaatgtcacatgtatacatgtggaatttaaccgacggtttaaatttgcaaataaaaataaagttaaaagagtattggcacaaaaaaaaatcagggagataagtataaattttaaaacttaaggagttttaccaccaattgccttaaaattatgagatttcatcttaaaatgaatcaatgataaacatatgatgcacctgtgacatggcgaatttccgaagatcttctggcttgaacgatttgccatcgcagtaaagcatttcggtttgggatgtgagcatgtagtcactgtaaagcacagctagaaatgcagaagccatggagtgttgtagagaatgccactctatcacccaaattaaaccatcttcatccaaaaacaaaaattagcaatttccctttaaatcatttacttcaatcttcttatttatcaacatgtaaagagccttactttgtgttctgctggatgtagatgttggtgaatcaggtaaaagtccacacatgataatttcagcagtctttctatacatctgaatatcaacattctctgtaactgtcatctctttaccaccaaaaaaattgatcctagacaagagaacctgctcgaaaaattgatcaaattatactctttttacagccacaaaaccaatcaaacaaaaacaaaaagagcacctgagttccagcatgcttatcatcccaactaaaccaactcaaacttccccaattagcgaatgcttgcccgtttatctcagttacataactgagatacgactcgtctctagttgcatggtataaccatgctgcagcccacaacagctcgtcaccataacctgttgagttgtagaattccttcacttgtggaaagcttacgctgtatgaaccccgataagtatcagcaaaagtaaatagctgctgagcatgtatgaggagcaagtcggaataagaagagttgattttcttgaa

SEQ ID NO: 191027 - DNA, 1757 bp, Cannabis indica
aaaaaaaaaagaaatgtggacataattacactattatgtttgaagtaatttttggtgattatcttaacatcttattgaagaaaacaataataaaaaatggcatgaccttttataaaatatatatttactttttataaaaaagaaagtacattccattccatctgtacccgccatcgctttcactctttaaaataatttgcaagagagagagtcaaccatgcctatgttgtactgcaaattttttgtattgtagtacatgcaatgcaatatcatgtttgttaaaagtattattaaaacataaatttctatatatttaattatttttctctgtatataaataaatcatacatttttctcaaaatattgtcgtggggattttgtctgtcttgttatttgtgtgtgtgtatgttgtttgatcattctcagtctgtttcgaagaaaatagcaagattgtggtaaggtcgtatctgggttttgtttacatttgcttaaagttcaaacctttggtgattttgattaatttttttttctttcacggtcaggtataaattttaaaatggagaatgggactacacataaggaagggcctttttcttcttcagagattgagaagtttgaaagagaggacatggaagaggttggatatgaggcagaggatattaacgcaattgcaccatggaccaaacagctcacccttcgtggactggtgaccagcatactgattggaataatttactgtgtcatagtaatgaagctcaatctcaccactggtttggtcccaaatctcaatgtctcagctgctcttcttgcttttgtgttcgtaaagacatggactaaggttctcagcaaggctggaattatgtcatctcctttcactagacaagagaatactgtaatccaaacatgtgcaactgcatgttatagtatagctgttggaggttagaaaataataacgccaagagtttgttattatgttttctttattattgttttgagtcttggttgtttattgtcgttttttgggtgaactgcaggtggatttgggtcttatctgttggctttgaactacaaaacgtatgaacaagcaggagttgatacaaaaggcaatgctcctggtagtacaaaagagcctggtattggttggatgactggttttctctttgctacttcttttgttgggctattggctttggtgcctcttagaaaggtcttttaactttcttttctttgtttgctttttttatttctttctttaaattcattgagtactgatgtagttacgttatgactttttctttagattttggttatagactacaaactagcttatccaagtggaacagctactgctgttcttatcaatggttttcacacaactaagggtgacaaaatggctaagtaagtaatgggttttttttttttaatctttctcttgatattcatcccaacagaattgagtaaggataagaagtctaacaaattgaggctcttttttgcaggaaacaggtacatgggttcacgaaattcttctccattagtttcctatggggtttctttcagtggttttattcagctggagatcaatgtggttttactcagttccccacttttgggttacaagcttggaaaaacacgtaagtgctttgtatgttacattttaaaagacaccactccactatgatttgcttatttcatcaccatcatcatcattgactgaaaaaatatcattaccattttgcagattttactttgatttt

SEQ ID NO: 191028 - DNA, 2781 bp, Cannabis indica
catggagttttatggataaaaatcaattttttaatcaagaaattaattttaattaatgtcctatcgagatggacatcgagcttctatccaatttctacataaacaaaaatatataaattagtatttaaatgatatttttattctaaaatcataaaataataataataataataataaaatagctttttgtaaagaacatatattataggagtgccacgaaacataaatttccctttcataaagaagtgggtgtgatagaaatcgaatggttctaactttctagtttctatgaatactactcaaatttgctagaatcatccaatttctttctataaatatcctagaaataaaaaaagcaaataaaaggccaggtgctgctacgatggatcatcgaagtaacgctgagctggcggagacagcgatggagatggagatggagacggagacggagacggagacgaagacggagacacagacggcggctcagcctcaggaagttccagcaaatgccagcagcagcaacatcaaccagggtatgcccgtttggaacttgctcacatttgctcgccagcttatcaaccagggaaagccttctcaggccctccaagcggtaaaattctccatttctttctttctttaaactttgcatgcctatgaattcttttgattttgcttttctgaattatatgtattcatttttttttctttttcttttttgaattttttacgacccaattgtatgtatgccttttcttgtgttatgatgctggcaataaagtagtagaaaaagaagacgactaagatgaaggcgaagagtgttctttctgtcagggacgttattcagcgagtgaagttttgctatttgggttgtttaaccttcttagggttccccatctattgtaaatattttaattaattagtattagttgaattggaaaggaaagagttctttttcgatcagtaattatcatcatcatcatcataattttggaggttgggggcgaagagagtggggtctgatattaagtgtgtttctgtggtggtggttgttcctaattgtaatttttgaatttaagtgcgtttctcttccatgctcactgagttggaggaaattcatagtttggaccgtcttggcattgtataatgccatgattagggggaagtactaatactgtggaagatttctttagcagctctagaatggaaaagagaacaaaataaggtataatctctttctcattttggcctgaagtcctgaaacaaaacaacaacgcagtttgaaattatttcaaacactttagaatgaggtaacatttattgtttatctccgacttttgatagttataaggtaaaagctaccaggcaatgctttgttctcagtcagctgttgagcggtcaagttcattttaacttcactagtcatctgaatcaaatatattctgatgctttgagagctgtctttgcaacactattctttgttcaaatggggatttgactttgtgcatcaacttcattgaagttggtttagaagtttgctaccttgtgcatctagattaaatcttgccttcaaaatggcaaaaaatttaacactgttaggttcatatgttgtgttattttagtacacaaatctccttagtttagttgttttggatgagaacacaatgcagaccaaaaagaattgagtgccacctgagagattacagttgaatatatgggaaacactactacgaaaactttctctatcatgtattaacatttctttttgaacaggtggtaatggcaatgagatctggaggtggggatgaggctgtatttcggtccttgcatcgtgcacgtgaattataccaaagtagattgcgggaaaatgctgctgttgaccagctagcttccttgtttgctgaatgtgcaatagctgaagcccagcctttaacagatgaactgccacctaattctgatggtgaagcattggttgtgcccgatgctcatggaacctctatactggctgaatcggggcaggatgcagattgtgttggatgcattctcggatgggagcagctttatctgtttacaatgcggaggtcttgttagcaacaaccgcagagatgagcactatgcatattggtgctgccaaatttgaattgatgagcatgcaaccaaggaggggttgtttgttcccctcttgttctgtggtgcaacatgaccacatgccctttttggtatccgagtgaatagcttttttgatttcagctcatctgatgttttacttagatggtcgggaccatgtattgtcctgaagggagtaaactgctgaatttttgggatcttttgatcctcatattagtcattactgaagagactgtgacacgaatatgatgatatataatcatatattagtctgttttaaaggactataccattctatatcatattattattttattttattttatttattttttttttgcaaaacagcaaaatataattttacatttttaaaattttcacaccagaccttgtaataacttttgactttatgtccaaccttaccaaaaaaaaaaacagaactatttgacgttatgttagttaaagtgattattaatattattgtttgaatttttcttaattatttctttaaaattttaaaagaacggtataaaaaagttttgggaaaattctataatccatctctttaaaagagatatattgatacatctttatctgttttagtatccgtaaataattttttatctaaatttttttctatagtcatgtaaaattata

SEQ ID NO: 191029 - DNA, 2594 bp, Cannabis indica
aagttttaacaatggaaaatgcaaggtttggttaaatacttctgaagaggtggttctccaaacttcccctaggcatgaactcataaactagaagtctatgatcctcctcaatgcaaaaaccaatcagtttaaccaaattaggatggctaaggtcaccaagaaaattaatttcagcctgaaattgtatgacacataaaacaaatcatgataagaatgaaagtggataaaagaaacaagtaaaaagacaaaaagcaaagatgagtaaatataaaccgtacaagccattctttatgaccctgaagtccatcatggttaagtgttttaacagcaacagtgagtccagtaccaggtttgacaggagcagtaccattctcttcaatccaacctttaaacacacagccaaatccaccctcaccaagaagactctcaggtctgaaattcctagttgctaacttaagatcattaaatgtgaattttctgagctgagaagcaaccttcagttcttcactgaaattaggtgtagatatagtactttctatattactagtgcttgttgatgaccccactggagcaacttgttgatctctgttcttctcatcagtagatttacctaccaccagaacaaaattacacaaaagcaactcactcagtaaatgaacacacatacatagacacacatttataacatccaattttatgggcattagtaataaatgctaacatttataactatatttgaagaatactacaaatatatatgagtcagtttcaacatatactccagatagccccacatgtgatgatatttatgaggccttttgtgaaactacctgagtttcatgcaaaaatccatagcaactacaagaaaccaatttgttcttgtcgtattagactctattcaagttaagataacaaaggaaaattttggaaatttgtatactttgctcaataatattgtaaaagcccgtgaatttatgaggcaacttaacttggattagctaactcaaatagttacaaaaacaaaaaagaaacaaagagaaaaaaaatccattcacaaaaatagaaatgggaaaacgacataaaaataatttaccacaagaagcggtagtaccactcatgaagctatcaactttcgatctcgaaggcatgcaattcctaaaactaaacctaacccaacacccagtttcctcaacttccccatttttcttcaccttcttcttctctactactactacccttgatttgctcgaatcttcccaagtttccacctttgaagcatcaggccccaaacccatcttcccaaacctctcacaacaaaatttcaaagacttacaacaagcaaaataatctcacacatctcttacttcccatttcagaccacctaacatcgaatgatttaaacaaataaaaaggcatcaaacaggtactaagaaaaaagaaaaaagattgtactgctcgtatataaaaagattaactttttaattgtatgatggaaaaattgagaaattctgatcagacccaattgggcaaaacgggttcagagtgagattcggaagagagaagccgataaagaaaggaagaagaagaaggcgtggaaaaagagagctctttgagaaaaaaggagagaaagaaaagttttgcatcatcaagggcaagggcaggggcaggggcaggtcggggtgtttgaaacagaggaactgggcagctcgggcaggagagagaaataagctctcaatagtgaccctattaggctttagctttagcatattctctcaacccaaacatcaaatcagcctaaatgtgtatttagtttatttatttatttatttatttctaattatgtaattattcctaaagatatgaacaagttaatttatttattatttttattatactccatccaattactataattatgtttttattctcatttctatacataaatcatctttctctattcacctcataattaataaacatgtaataatgatattcttcaaaagcaaaagaaaaaaaagtaattttatttaaggtaaatttaagataaatgtatttatttaggtaattttgttgcacttaaataaaattgtaatatagttcattttattgcacttaaatttttatgtaaattttgcagtagtgaaaattctcacgtagtcattttgttacaatattaattcagtgacaaatgttacattaaaggtgtaacgattgtaatttttattgtcaaatatgaactacataaaagaaatttacggttaaaaaatttatataaaaatttaaatataattaaataaataatgtaaaaaaatttatcgataaaaaaattatataagtatttaagtgcatgaactataacaaaaattttagaagaaattacactctaatacttattttttatttcttatttaaacttttatctttattttactacttttaatttatacccaattttataggtcatatatgtacattaagaattctaattttgataaggttatattttgagaggatatttatttatttgaaaactattgtgaagtttatatttgattaaatatataataaaaaaatagatagtttttaaacttatc

SEQ ID NO: 191030 - DNA, 1285 bp, Cannabis indica
gttttttttttttttaaaatccatcaaatttctttttggtatgaaataatttacatatctatatacatatttaattaattttatagagggaaagaatctttgatagttagtagttgataagaattgtcaggacatattttttgaattcttatggaaagaaaataagaagtggtattttctcctaacacattatttatctaattattaaaatcttatcttgataatttaatgtttggtagctgattaataatcagattaggcctctctctctccaaaaaaaaaaaagtcagattagtgaaataaaagagtgtaccagtacttggtgtgggggcacaagtgttaatcatttttcttttcaataagaaaatgagaactatctctcggcccttttgggcgtgggcatagcaaaattagctgctgtctttgtctaccaagtatttcacaacacatgtcttgcattattactactaggaaaagaaattttggggcacatatttatggtgcctagcattttctcgatatgtcgcattacgattggttagcgatactctttaaaagctattatattaaattatatgagacccgatacttagttggaccaataacgatgttgacatgtaggaggatgctaggcaccaatttagtatttatccatatttatacaagtttggaagatatttatatgtctcagtctattcttgctgtcagttcttctctctctacttagattttgatataaaatatttatttcaactttcaagctaacgtttattaatatttaacagggttagttaaaatggtcataataaaagctgattttctttttctcctcttatcattaatggcggttgcttcgttcaagtcaagtcacattaacttttttatatattgtgaaaaattattatttggaaatatatgggatgttttttctttctcagttgatgcaaccatagggtttgataggagattgttttttttttttttttttttaagtcatttatatattacatcaacataacttgggattcgaacccaggacctccaatacacacgcatccctatgaccacttgaactagcatcgagtagttgataggagatgtcatgaaacagagatattgtgtaccaaatatccactaatcccaatcagtgttttttcttttaaaagttaatgaaatgctattattttccgttatatttgtaaaagaaacataagtatgccacatttttttttcatgattttatgggttaatttgtaattttagtaagtttttttaaattaattta

SEQ ID NO: 191031 - DNA, 3109 bp, Cannabis indica
ctgttagttctgtttttaggatagttaaaaaggtaagtagagtgttagacagtaggttgagaagtcttgctttgtggtcagagttttcacattttctttttatgtgtgtggaaatgaataagcttttcatgaatgcttaaatttgtaaatgtgattttgcgtttatgattcgaacagtgtgaaaatgtactataaaatggtttccataaactatttgtagaatgtttagattttctcattttccctgtttttctttgttgtttagttactgtagtgtactatttcttgaaggaatttccattcattatttaattgtagttgtaacttgagcagggcgatttcttgatttgcactaaatgtttcaaaaatgaaagttacggggagaataagtcagttgaagattacacctttattgagtccaatcaagacagcggtcatcatgaagctgtctggaatgagtctgaaacactgcttctcttagaatctgttatgaagtatggggatgactgggaacttgtcgctcaaaatgttcccaccaagaacaaacttgattgcattgctaaactcattgagctacctcttggggagattttgggctctgcttctgctaccaataaaaaagttaattccaatgatgtcaatggcaacttgaacagtttgaagcaggttgaattaatctcatccgagaatgaagaaattgtcaaaactggggaacaacaagatgagaagacaaatgcgggtgatcagaatggagataccgtggaacatgtacctcctcttaaaagacaacgaatcgattccttatcaggtcttggtggttcactgatgaaaaaggtaggttactaggtgtcttgaaatatgtcattccagaatttattgaacagctatatgtccttatgggggtgaaaatttgattttctttattcgtttagttgaattttgatgaccatacattgccgaatgaattgtctcataaatcttcagcaaaataagcttgctttagtaattttggtgttatgaaataattaatattccactccgaaatgtagtaatggttagcattatgaactttgaagtatttccacactcctgtgtcttagtttttcatgcttactggactgtgggtttatgtattaatgtgcacgtgtgttttttaatttaactgcctagtaacattatgcaaagatttgtatactaaagttaatagtgtttctattaggtagctattttgtcaactcaggttggaccccatatcactgctgctgcagctgaggctgctgttactgctttgtgtgaggagatttcatgtccaaaggagttattttacggtgatgatgattcggtaactaatgagctacacactcggattccagataccgaaaggttatatacattctgttaacattacttgtttatttggtcatagtagtgcaattctaaaattctttagtatcttatactcatcagggtcttggaggttgaagatgcaatgatggaaggagggcctactcaatcaggtagatacttttaactcaaccaagcaaaatgaactggttagtttattttcttcgataattattttgtttgtctttttgtacacgtatttccattgttgtagttttaatttcttgaacaaggagacatcatctttttatatttttagctggtttattatttcatttaaggtactagccattgtttactagcttcttcatatttatgtatcttatatatctacagataatcagggcaagtcagttgagaaagatgatataccattgacattgcaagttagaacggctgtcgcaacggcacttggtgcagctgctgctcgtgcaaaattattggctgatcaagaagaaagggagatggagcatctagtggcaactataattgggactgaggtgacacaattttctttgtttattacttcttcattctttcccaatatcaggccacacaaggttaatcatgtgaatgaatatttttcttagatgaagaagttgaattgcaaaatcaagcattttgaagacttggaggtaatgatgaagaagaagcatgctgaaatggaggaaatggaagagattcttttagaagagcgaatcgatgttttacaaaaggcatttactgctggtatacctagatggaaggatcacccttctgttaaatcttagaatgcttctacatattgtcatgtaatgtaatagtaggaggaggattcgaagtagtcgacaatctaatccgatgcattctcgaagcttactagtttgccccattttgttcaatccattaacttggaaaggaaatgcttgtacttctaccttcacagttggacatgtaaattagggttgaattgtttgttactagtaaaaatgccaaaatttggagataactgtgctctttctcttaatccatatatgcaggtgtgctctttcaaccaagcatgaattgggcatacctactcttatatttttggtgtttaagagaatagccaactaaacaaatacaagttgaaaaaaaagagatgtttcttcgttctagtctagacaatggtcctggttgtccgagcttgtaaaagctgtttttgggtttcttaaatttcaaaagaagagttgttaatccgatctaatttgcactacagtgcattcaattcgcactaagtgcagattttatattttggattcaatccaatttgcataataactcaaattcaatgtaatctgtaaaagcacaagtgcgaattttagattttctaatccaatttaatttacacatgtggatatttacactttgcagattggattgaattggatcgttcgaatttgattaggttggatattttatgtacactcttattcaaaaaagcacttctgagactgttaacaagtaaatttcaacttttagttttatacgaatttgtctttcttcttatctattatacctcagcaactctcctcttaatacttaatagctgctttaagacattctattacgcgctttctctcagcctccgaaaccattggaagcccatcaacatgtcttacatagtacttctataataacaccataattaaacaacaaaaaaagtaatttaatttttttttctttt

SEQ ID NO: 191032 - DNA, 1093 bp, Cannabis indica
tctacttaatattaattaattaactaaattatttaataaataataaactttattagctagctagctactataactaaactatttaattaataaatttaagtttagggtagtgataacattgatataaagaaacttaagaaaaaaaaaaaagtcacctgccgtttactttatatattattaaattaatatactactcttaattagttaatgatgattaaatgaagggtgaagatcgatgttattaagatgtgtagtagtttagacgtaattaataattacgatatatatatatttgtggatctgacagtacatgatatataattagaaactttataattgatctaattaatttttaagtaattataataaaagagttggctggcccctgtggataagatcatatatgcgctgcaaattaggtgtacgtacgtactacgtagtagtatatttatattatgaatatgaatgatataatatagattaattactttttgattatagttattttaatttcacatcaaattacgaagcacatacatactcttttaattaatatgaaagatatatatgcttacttaattattcaaaccaaaacgcatcgttttacttagaagatatataatatatataaatgacgaggcacacacaaagcgcgcgattcataactaaataagaaattggcagttttttgacatatcaacacacacaaattttttttttttttaataattaataaaggcatcaaggcatacatttaaatatgagtaattgcaaatttatttgattttgagctaagatagactagactagttctcagagccccaaagtgatccaagcaccctaaaattttaatgaagaatattacatgacatcaaatttttttttttttatattaattatgtgaacaaaaatattgtacagcggcccaaaattttattatatctatattatagcttaggactagattaaataattataatgaaattcataatgatatgttatataacataaattatcagtatgcatggaactttgaaaaatggacaaaactcaacgagaaacgtaactaaagcaaccacaccaaaattgacta

SEQ ID NO: 191033 - DNA, 709 bp, Cannabis indica
gatgaataaagtttgggttgcaacttgcaattgacatacatgataacttaatctatcacaccacaactgaattaaagatgccattcggtgcatatcaggagcatcttcaagagcattttcgatcatttccacctgtttatcattcattatagttcgcttccgttttctccgctgcttttcttcacgatgaacagttccaatctttttctcctctacatttcttccatgcccactttctttaataagaacaccaacttttggttcgttattatccattttatccacaacattttttcctctagtggagctagtatctgaaccacttgtttcaacattctgggcatctttatcaatttccgttatgcctccaaatgcactcatgctagatttacctttgtcttcccttactgtgtcaccctcttgtatatgttcgctgtatttatgttcgccatcttggtaagcagaattctctgacatttcctcctttaagttaccacttctgccaagtattggaggctctttcctcaataaaggtggagagcatacccctgcactctgagcctcctaagaggaaacaaactttacttagctcactcgattgaaaagataaccaaataccatcagaaaactcaaatttattcacgcgcaactgaaaaattactataatttaaataaacaattgcctattctaagaacatagaaatatata

SEQ ID NO: 191034 - DNA, 1358 bp, Cannabis indica
tatttggaagtacaaaaggcttgtatcatgttcttatttatttatttattggaaaaaaggcttgtatttggtactataagaagcttgtatcatgttaattctcattattttgtttattttaaattactcaaattaaattaaagtagtagagttgagtcaaagtccaaagaagattaatttcattcactcaagaagagcaatcacagagtatcttaaatattagtttggaactaggaataattaagtaatttgaagattattgactaactatggagactaaaataaaaaaaagggcaaaatggtaacttgatagtataagaggcttgtatatcatgttaaacataatacaagtctggcattttaattagacactagcatggcagtaaaattaatatgagtttgagcacgatacgatcgataataatacgatacgtaaatataaatagattaatataaaagtataatacattaattttttttatataatttgaaaataataataatatatttattaataaatatttaaattataatcattctaattaattgtttatataattattcgtaaagtattgttgaaaaaattatataaaaataattaaaattataaaaaaaaacacacataattagtgagtaactcattaagtgtaagaaaaataatagaaaagtagagcccaaattcaagtccgtataaaaaaaatgagttgacccatttataaaaagtggattagctcgagtaaagtatgagacaaattagagcaagacatgaaaatatgagttacgatcgtgtcaggcttattctttaaaatatttgtaagacacaatacaatctataacttttaatggaccgacaagtcacaacttatattattacgagcttttcaaactatgaatagttggactaaccccacacacatgtatttagtcaaaatccaaagaagattcatttcattcattcacataagaagcaaaaatccaatgaatctaaaatttcatagagtagcttagcttatatataagcttagaactagagagagggacaaaaaagtaattcaaaggttgttgactaactaaagaaaataaaaataaaaagaagggcaaaatggtaatttggtagtaatgatattacattcttttttgtatgttcttcaaaatagtctcttttgtttcaaaggggtaaaagtccaagttgtctggtggctggcattgccaaaccttctcttgattcattcatatcatatctctctctctccaatccaaattccaaccctgtcttcttcttcttctctctcaggacttttcacgaacaccttacctaattcaaatcttcattatcacaatgcagcagcatcagcagc

SEQ ID NO: 191035 - DNA, 1337 bp, Cannabis indica
ccttgatttcaaaataatactaaaacagatgcacgcatgccgtattgaacttcttgcattgcattttcatgcattaaagattcttaaaaatactcaaagaaatatcttaattaatatatagttgccatttaaatgaaaaattacaactattattacatattctatgcgctattaggttgttatatacacataatgttaaaaatatataagaaaaatgttaagtcacatcttaagatatcatgttatatattatggtgcattttaatatttggtcctatatattttaatttaataactaatataaaaactactaactaattataaaacattatatcgaggtggtgttaaatatatatcttaataaagtatcaaataggctcgaatatatttatatatatattacatacaatataaaatactgtgagtttgtttggtacgttgtattacaccgtattgttaaataatattatattaaattgtattttatgcaatatttttatgtaaaattttatgtgatattaatttttattggcaggctaaatatatagtataaattaaagtttaacacaatattatataaaaatttaatatataattaaatttaatataataaaatacaatacaatataatttaatactatgtttcaaaccaccctatgagtaattaaatagcatagaaaacatatatatacttgatcactctatagaaataattgaaaaataacatagattggtattgctatactaatcacataaatgttccattaaaagagtcttttaaaaaaatattaggctactaactatatgagctaaaaaattatttgtcaactcataatttaataaaataattaaaatattaataatataagcttaagataaactcgttagacataagtgaacagtgcagtgccacgtcaagtgaaaaagctgagtgggatcgatctaaccatatatatacccctctaattcctcagtcacgtcaatcaacaaattaaaattacatgtgcacttatttattgcaaggtatatatcagatgtatactacttctatttcaaaattggtctcgtttttatggtggactaatatatatatacattaccatgtgtaaatatattatcaactacatctgctagatatataaagattatgatatatatatatgtagagaaataataactcaattttttatttgagaatgtgagcatatattataattattttattaattttttttaagaaaaaaatattgaataattacacagtgccaatcacaaactgtaaaaataatttgtttaatttcactctcgtgtgtaatgcatgctttaaattaacaact

SEQ ID NO: 191036 - DNA, 1360 bp, Cannabis indica
ttgcctcagaaaagcactcaagtgacagatttgatgaatttggtgatgtttctcaaaccaatgattcatttctaacttctatcttcttccattggactaattcattctgcaatctctccttcctctaattctaattcatcctctgcacctgtctcttccttgttaagtataccttccaaaccgaaaaaatcgccacttaagttttttaagtcatcagtctcttcttcttccttgttaagtagaccttccaaatcaagaaaatcgtccggattaatttctgcaatcaaatctgagtatgcgtctattaacccctgatcaaaatcaaaatccaactcatcaaattgctctcctttattggtaggagattggaaggcacttcctgctgcagctcctgcagacaaagctccccttgatgtgctatttggtactttcccagacttactttgattggtgaactgttgtggggatgttgagttcaccgagctctcatttttcataagatcaaagacttgaggagccaatgagctgtcagtttcggctatttcttttgaaaggaacacctcccatcttaatcgattattgcttccaaaatttctgaagtccggcttgtgagaagagggataaacatctttaatgacttcaaaatcaatattgtgtgaaggggtaaacacatatatggcagggtactccaaaatcaccctatttgttaattgttgtctcagaggaaccttaacatctaattcatagaaaggtgaagttgacccctgaaaatacccccaattcaagattgtctcaatcaaacatacttattatgcaaaaagaatgactgataaaataacaatcaagtaaacacaagactatgcacaaagacaatgcaaacaaacacttggttacatttaccttgatcaagctcatatattctaaaactatcaaagtaatcagttctaagacaaacaatagcaaaccttttgatatttcctgatgaagaacctaagattttccaggtcttcatcacaaaatcgcttcaattgatgattccaaggaccgggctttaaatggttcccaacaatggaggagatattcaggttttcatcaattctgtatcagcatcaaactcattaaccactaagaaagtaaagaccttaacacataactcaaaatgctagaaatcaccaagctcactcattatcaagtaacacaacatctgttgaatgaaaccgccactcgatcgtccagtaaatgcatttcttcctaaagcatatcaatcaaagaaactttaaaaaccaataagcaaactaacattaaagcattatactaagttctagctaaacaagtaaattcaaccaagaatactgaacat

SEQ ID NO: 191037 - DNA, 1537 bp, Cannabis indica
taattaataattaagagttaatatgcatagattataacctaaaggtttcaccgaatgagttggtttctggcaccacaaacccaccgttgatcttcttttcctcagcttcttttcctgttgtaattaacaatcaaaaatatttatgaggaggggagaccaaaacatttgagtacggaatttatgtcaaaaagaactgtacgtacgggcaatattcttaattagtatatgtttaacaattattattatagtcataataatagtatacttcaataaactaaaataaaatattataataatagttgcggtccaatataatttaaatatatataaaagataaattaaggcatgcatcgtgaaaaatgtaaataataaagtcagcccaaaaaccttcaatatataaattggattcagaatatttattttattagttagacattattaatatatactggtaggtgggaatatttatttaattatatataccaaattggtgaggcgcctggttagcaacggcagtagccatcttgaatcaaaaagctgctgaatacttaatttttagaagaataatgcaagagagagcaatgaacagaaaagtatttgagggaagaaaattaattattgtagtggtggtggttaagttcgctgctggggctcctatttataattgctcggaagtccttgcctgagaattcgatgtttccgagtccttgacagagaatttcgagtttctgagtccttctctgaaaatttgcacgtttttctatttattattacttttttaatataatttttaataaacagaaattaatagtccccacacaaccagcaaagtctcatgtgagaaagacacgtatatttgattattttagcaaaaagacatatatatattgaaaaagcacaattatagaccaggcccgcacgaagaagacaaaaaccaaataattaataataataaaaaaatcctaaatcaggtcgacatataagtccatatattatatatcgatccgtcggtcatcggtgtatggtttgaatattttgcttttactccaactctataataaagggtctcgatttaggtttacaaactatatatatatgttttaattagttaactttaagaaatttaattttcacgtacttatagcaaattattatatcaacaaataacatctcatgcatgtcatgaagtgacatatgctattttaggaattaataaaacttataagtatcagtgttggttatagaaaaaatatgtattttcatcatttggaggtgtcattattttattttattttccctcttttccaaatcgtagaaactgcttgcatacgtactatatttcgtaaacaataagtttgtgattcaaaaaattataattacaaattaaattaattaatttcaccaaatgaagatacataaacatataatgttgtatatatatgacatgtgaccatgtggaaaacctcacttttatttccagcgtgtgaatatatccatgctgacattattttatatatgtcaagacatatatgtactg

SEQ ID NO: 191038 - DNA, 675 bp, Cannabis indica
aacataatgcttaaactttaaaagtattatcctgcattaccattaaaaagttcaagtattttggcaaaagctcatcaaattcatctgagatgaaaacccttctgacatataatttcaagttggatttgttggcgttgtagtaactctcataaagatcatgaggagctttagggggcacaaacaacacagccttgaactccacatcaccttcagcagtgaaatgactccatgttaaaggcttatcatcactgaaatcctgtatgaaaacatagaagattcaaagctaagaatatgtgtgtgacaggcctaaaacaattaaacacaacgtataacatatttgcagcttctgtacatgtgtaccttagcaagagagtggtagaatttgttgtactcttcttctgtcacctccttgggactccgcagccaaatagctttgacatcattcaaaagttcccattcataagttgtttccttcaccttctttgtctttggttttttctcggagtcttcatcttcagttttctcagcatcctcctcttcttcctcagatgttttagtttcagctgtttaaatgattaaggagcaagaacatgtaaacagaaattgcaaacagcaaaatttaaatacaaatcatatatggaattctgctatgagtaacaagctccgaatgaaaga

SEQ ID NO: 191039 - DNA, 3412 bp, Cannabis indica
taaataaatagatagatagatatagagtagagtagatagagtaggattcgacctttagaacgtccttactttcctttacgtaaggacaataggaatattaagatctagaaaatcaagtgtaggagtgattatttcgttttttttttttttcggagttaaccatcttatggaatgatgattgatcattctctggaatagtaggatgaacaattccactatttggatttatcctttgctagttaatcacggagcttggagaatatcgatgtttaggtggtgcagccttgaaaaacttaaatactcacgagaacctacttttacaaaaatccttttctacacaactctttgataggcgattctccaactcagttcttgaataaatctgagaatggtatctatattgatattagactaaattctgtgcaaaaggtttcaagctatttgagatgcttgatgtctccccgaattctagacccaattactgacagattattctttgatgcctaacaactgaactagactaagtattttttacagtatcagaatcagggactaccatgacagttcttaaaaataagacacttcagccacaaaaacagataagactcttaattagcattagccttaggcaacctggcatgagtcaccctaatagggggtctaacactcacctaacaggtgttatgtgcaaacataatattgaattcagtgaccatatctttgtacattgcccattcattggggcaatatggtcaagaatgttttcaggggttaggcatgttggttaccagaatattttgtctcgtggatgaacagatgtaataggtagtttcaagggtacttttgggagaaggagaaaagataatgtggaatgtttctgttctggccttttttcggctcctatgttttgaaagaaacaataagatatttcatccatttgtgttagaattaaatattaggtgtctattttggttgggtctttaaacctatagagtttaaagctttttttattttcagtgctaaataatgattgccacctttggttgttaggttgaattgtcaacttttatgttaatatacaatctaatacatctcatgaaaaatgataatttcttcatcagtttccaattatcaaagaattttcttaatcatatttcttaattaaatgcagcttccaaataacacagcaaggaaagtttggacatgacatgaccttcatgaactgattatgacactttattttctttatctagtgtgaagcagttggcaaagttgcagatattattcaaattcctgcatttctgtgtcgtcaggtaaaaaacagtagtctttttgtttgcgtacctccatatgcatgttttctatcctttgtttttgcacttacattttatgaagggtgctttagttatttactagcaatgccattttatctcatgtttcacatctcctgtttgaacagacagatcttctagttgcagcagccaagactgggaaaattatcaatgtcaagaagggccagttttgtgctccttcggcaagtgatcttttctcacattcttttgtattttttttgatggttcattggtttttttgcttctatcggtaatgattaatcgaatgttttgattttcttaggtcatggaaaatagtgttgaaaagattaggctggctggtaattcaaatgtgatggtctgtgagaggggaactatgtttggatacagtaagcaataagtggtccatgtctcttgtattttaatttatttgacttagaccttttattatgttaaagatatactagtagtctacaaaggattattgacaaagatattagaatatgcattttttcttttctctttggcatgcatgaatgttcttgtgcatgtccactataaattgtcatttttcaactttaaatcaaaaacaaatgttcttgtgcatgtccccatgcactgacaatacatatgcatttgatgccagatgatttgattgttgatccacgcaacctggagtggatgagagaagctaattgtcctgttgtaagtaatgtttttcctgcattatttcatgtttatcatgtcattgttattattattattattataaattttgaagcaaaacatccttgttttaaattattgataatgagaaattacagtgcatgggggtggtaagaacacccatcagtatcacaaaccaaccatgatccgaactaaacaaagcctaaacaagaataaaattacacaatagagaatctctgaataaactagagaatgcaacatcattaaaaactttacattatacaaccagatgcctgcccgtaatccgattttatcccaaagactatctatatcgtttgatcgtccatcaaaagattttttgtttctttcccaaacccccccaaaaataaatgaaacactcataggccacataagcttttttgtcttgccttctctacatagaacctcaatgtctcttcactctgaggactaccccagctctaatttaattcatttagcaatctgtactacagtttctgcaaaaactctcaatgttctgagtttgattattgttactattatcattgctgctttgtattttgtttaaatatatgctaagtttaatgtgggatggaggcagtgcggaataagctctcattataacaatatatatttaatgaatttaagtatatttaaaataatcatttaattagaacttttgtcctgttaatgaatgtaaacttgaagagaaattcctatacgaattgacatgtaatactaatgatgttatagatgtagagagttacctaggggcttcaaacactttcactgttccaatatttctatggttctctcctttatacatttacgagagcccctaaaggatactctattaattgatatccttactttgaattgatcagatctcttagtaaaaatgataccacctaaatgaaaaaaagtgtactcctatgacttgaaatgcttcaacctagattggttgccttggggattctgcttttgcataatttattttgtactctctttcatttacattgtactgtctgtgcttacatctcttttacttatattctgtctttatttacctttgctctggcctccacatttaagaagatgctctatcaatagttagaacttataaatttattgtgattatcttcacatataattctgtcaatactgttttaggtggatgatcaaatcatctgatttaagacctttgttgtaggttgctgatgttacacattcactgcaacagcctgctgggaaaaaggtgctacttgctcccatgttttatacttgtgtgaacaatagttttgtcctgtgtttgaaaccattgtattttttgtatagtttatttgttttgcattccttaaaattttcaagataatact

SEQ ID NO: 191040 - DNA, 3235 bp, Cannabis indica
cctcactctctctctctctctctctctctcattgtcatagctttttttttttgaactgtcactaaagagacccctgaaaccctaataaaagcagcttgtcttcaacattctctactccctttctcattcactccctttcttttttcttttttctctctcgtttggtttgggtccctcggcctgcaaacccagcaaactcaaccgggtcattattaaatcttctatagtcagcaacgccttcactctcaaacccatttctttttcttcttcttcttcttcactcgtcgcctctgtctccacccaacgaacaaaccaccttcttttctctcatggcatctcgctctttagacgacgctgagttttggcttccttcccagtttcttactgacgacgacgttttaatgggcaaggaaaatttcgataagaatggtgttacttttggtacagataatggctgttttggtggacaacggccctgtgtcaatggcttcccaactgagtttccctacgagtttgactcgtttggttctaactctgctctcagttcgcctgtcgaatctgtggtaagttctaccgagaccgagagctctgacgaggaagactttttcgctggattgactcgccggtttgctcagtctaacctccgcgaggctcagaaacctgcggccccctgtttgagccaggaaaaaccagaggtactatttcttcatttttcgcatggtttcttgatttaaagtctattgggcttttcataaatggtggttctaatatgcttctttgttcttgcttttcagtgggtttcgtctgggtcacctcagtctattctgagtggaatcggaagctggtctggtcgtagtacgatttcaagcaatggaagcccaaatggtccttcacaagttgtgtcgcccccgacgacgccttttggagctaagaatgatacatgggatctgatatacgcagcagctgggcaggttgcgaggttgaagatgagtggtgaagacgccaagatgagtcaacaaggtagagggcttttgggtcctcctagaactcctagccctcttccatctctgagaaatcccaactctggactttactctaaccagggtctctcccaaaatattgcccaggtgcgctacaggcccttttcatttgtcttttagaatagctggtgtagtttctgttttctgatttggactttgttttcattgtcgcagtttcaagctctgaaaccggacatagcagttaagccacagggtgctaatgcatggggaagacaagtcaaggcttgctggtcagctcaagcacaggctcaggttcaggttcaagctcaggcccaggctcaggcacatgctcatgcacagcagcagaaccaacattatttccatcaacaggtccaaaacaggggaaggaacaatggctacgaaaatggcaggtgcgggcgtgctctgaatttgtcccaatcagcttggccctctcttcaagttcaaaatcaaaaccaacttccaaacagacccgccatgggagccgctgctccacacactggatctggagccaagagagaatgtgctggaactggagttttcttgcctcgcagatacagcaaccctcccgagtcacgaaaaaaatcaggtaaatttcctacatattttcgcataccacttctcattactttttctttgggtatataaatttggttgatgaaactattatgctcatactctgtttttccccttttctgcagcttccccaaacgttctactccctgctaaagtagtccaggctcttaacttaagctttgaggactcaaatggttattctcaacctcgttttggttgtaatattgctccagatcatggttagtgagcttgttttcaatacattattttttctcagttccattttctttgaaaagttgtttttgttctaacttttgggttttcattttctttcttcacagaagctttaatggccagaagaaacgctatcttggaccagcaaagacgaagtttaaggcctgaagtggctctaaatcatgaaatacgccttcctcaagagtggacttattaattaaagaggagctgaacatcagatatatttttttatctcaaaaagaccaaaaaaaaggacagaattcagaaagcaagtgtaaacgttagaagtgttatagtggtatttgggttataagatttattattattattattaaattatgaaattcaaaatttgcgtgtagttttagggagcaataagaaatccaggtttttctttttgggatgtttaagtttgcaattgtcattagccttagatgaagaaaagaatatagtaatagtagtttaggaggaagaagaagtagaagacgatgaagaagaagggtgttctttattgtaataagtgggaaatttcttccaacgttcaacggaagaaaaaggttgaaaatagctggaactttagggcaagttttggccattttggggtataggtaaaactttttaaagtttgtaatgggagggaatcaacattcctctctctcttgctgtaaaattgcccttggagggttattaaatttgaaataagaaaaaaatctttattagattctgttctatgcagtatactatgtatgcacattcaaattacatatatacagtttttttggtttcactagtggggactcttttcaaggggaccctttttcttctttttgccggtactgtaatttgagtttcttaactttgatattcaaaaaaaggtacatggggttttatttttaatttctacttaaaagaaaaggaaagaaaaaattaaagggttttgttctgtttggcaactgtgaaaaaaagaatatctcgtgctgtgttggttacagttgtaattgtgaactcattcggatttggtgctttattttctttcgagactagaaaaaccattggtcaaaggcaccgaacaagccaaaagctgattataagattcaaatctccaaacggagagatttgcggagtgagagagaatgtgttatctttttcgcttttttgggtttttgcttcagcgtgaagtgttggtattgaggatacacatttgggaatgggataggcgtattgatgtgtagattttggatatggacaagtctagtgtgttcaaattaagggtttttattttcagaaatattatttgctttatctgatttctaatttttctggaccccacaactgctattgcttttcttttcctttcttttttt

SEQ ID NO: 191041 - DNA, 4127 bp, Cannabis indica
cacaatcatcccaggcttgacatcagagtgagtgaacactgacccttcgaaagcaccagcctgtaacatttatacattttattttattttttaaaaaagttacacatatatacacattatattgggagagaaaatataaagctctgttaacgtctacataaattgtataacaagacaaaataacaaaagcaattagcatattcagcgtgaattcttcagatggcttcaccaatatcaaatataatatagacacataacgtttgatatttcaaccttacacacatatatatctatacaacttaaagacagattgttaccgtaatattacatgctttctcttttaaaaaataagggttaacagaggaaaaaaaaaaccttcagagttccagtagccaccccttccaagtgcctaaacccgagaatcctaacacggacgcgactaccttccttaaacttcttttcaagcttatgaattccatcttctgtcacatcagatatctgaaatcaaccataaaaaggttaaagaactgaaaactgaaaatctttacaaccaaagccacaaaagaaatcttcaaaagataaagaaatagaggagataaaaagcacatacactaacatacgccggtgtaggaaccggtgaggttggtatttcaaggagaagacccaaccctctatcaactctgaccactttcaagtcttcatatatatctccaactttaacatgctgcatacaaaaaataagatacaaaactcttatcactcattattaactttcattggacaacatagagagtggtatatacactggaaccagccctcaaagaaagagcaagcaaaactgaaaagaatgtttaagcaaatggagttttgatttttgagccggtgaatataatataataaaaaaccttctcaggaaatgctaggcctagaaaatattacattcataattctatatctgataacagcaagttagatagtaagcaagcagtgacaacacaatctaaattccatatccataatgtattagtaagctagtaaaacagtgaaaaagtacaattcccaggaggctcaacagttcatattaaagggaagcaacaaatcatcactcttggaattcaatttaaagggaaaaggattaatatgtttcatacaaggatgccaaacaagaaaggattgcaagccatgtaaagtaaattggctcaaaacttactgacggaggagacatgttctgaacaagatgtggattcagagtcaaaccaacagctctacttgaaggatcaataaacaatattcgagcattaacctgaaacagaatacaaaagtattttaattaaataaaagttgacagctaaactaatattcaatggaaagggaaacatattcaatcaagttcgcatactatgtaaataaactaaatctataattggtgcaagctctagacaaataggcacaatcatagaactatcttaaataacataactagacagaaggtcagaacatatatataaggaactacagcacatttgacatgaaaccacataataaattaaagccaaatcatttaactgcataagcaataacccatggttccaggaaaaaaaaaacaagctgttcgcacaagcaatagaaactttacaaattacaaaaaggcaacaacatttcatctttttcaaggtaaggttagtttgcctctgtactaaaatatccaaccacatatgcaatagaaacatgttatttataaataaaatctatttcaatgatagcatggtgtaataaaaacatgacaatcacaaaacattcacgctgaatgcttataccaaaacatcctagtgtagatatccatcagataacacattcttctacaaaataaaatctattaataaggacaactcaagatgcaatgaattaaaaaagtgacaatcacaaaacattcacgctgcatgcttataccaaaacatcctagtgtacatatgcatcagacaacacattcttctacaaaataaaatctactaataaggacaactcaagatgcaatggattcgtaacaaagctactctcacacagcgtagtcatactaaaatacccaaatacatatgcattatttactaaaagttcttatggataaattctatttataaggataagatggtgtataacaaattcatgacaaccctaatctcacaatgcatgcacattccacataataaaccattcaatgatcttgtataaaagcctaaaacaagaattttcttgcacttacttttattgagaaagaaaaccatatacaccgaatgttaaaaatcttagtactaagaaaattaagataaaaatatactgcaatatcaatatattaccttcttagtttgattgtaatcatcctgccaatttgaagtagcaaaactactttgcaagtgaaacatatcaacctgtaaaattgagattaggaaatatgtatgtaccttgtagtcattatctcaatcgaaacattattttttcaagtagctgacgtgactagagaaaataaaacttacagttccagtaaagtatgtcagaaatgataacataacaccattttcaagggttgattgtacacgagcattaaccatcatgccgggagtaagaacatcaattgaaatacctttaacatccttggtctgtttgggcagtaacaattaaagattataatcagcccgacactgagaggaaggctgtgaacaaagaagagaaggtttcaaataataggcataccgcatattttgacacggtgtctgggttagaacttaaataaacaactctatgggctttatcaattttcccaacaatgccctgtagaagttgtccagtgttaatctcagagctggctgcaagggcattgaaattaaataacataaaaatgtgaaagttaaaaaggggttaataggaaaccaaagaaaaagcttataccaaggaatatgtaatattaagaatatatgttatgcccactggcaatggatcacatcataagagtacacagtcataataataataaataaataaaaacaacaacaacataattacaaatttccaataaatctcaatgaccattaccaacgtattcagtgatcagtctaacatactttcagaagctctcaatgtcgatcacaatgatcatttcacaaaattcaatgatgctaagatagatactagatttctggaggtgaaagttaacaccatcatttgaaagtaattttctaggaagaaactacaatccaagagatcatatgtacactaaaaggggggaaatctagacattgacacattgtatatcgttacacctttgtgcaccatcatgtgtctagacatcattcataaagaatgctacagcatgtatgaaaagtaaatgctttgacgagaaccttgcctaaatttatcattgagctgcctacttggttcatacttactacattttttttactgagatacttactccattttcactaattagaagtcatatgcatgtataagagctagaaatgcacattaaagttgagaactgattctaattatccctgggtcctgggaaatgttcatgctgtgtgtatttggttaatgttactcatattgaccaatgttattagtttctgaaagtcgttgtataatgaaaacaatagatgtgaacaaagtaacataaattacaacagaaaagaagagtacttaacaaaaattaaattttttattcaacttatgtttaccatttttgctctctctaggcaagaacccggtgaatgaagtcgaaccaaaatgaagaatataaccatggtcttcaatacttttcacataagcactgaggacctgaagaaaagaaaaacagttgaccactcatcattagcacaaagtatcaaacacatgagaaaatataaatgagagaaagttatcaaaatatctatcccagcttatttggttgacataccatgccttcttgaatagaatccaacatgaagcccttgtgcaacaaagaaagacgcagggaaagccagatcttccttttgccactctctttgttatcactatccaggtgtaaaaccacagaagctaccatttgcccaacgtggaagacactgggcagcacattatctgctatgctctat

SEQ ID NO: 191042 - DNA, 1259 bp, Cannabis indica
cgttttttttttactttctggttttataggatttgaatgattttgtgatatcttttttttgggcttgtttgtccaagtcatacaagcaatagtatgaatgtcaaagttgagtcgtacaagcttttgttacagaatgatgcatagcaatagcaagtggtttttttttttctttttactaaagacttttattttctttggcaatgaatgaaaagtaatagtttttttttgttataacctttttatgattactctcatttgtcaatgtttgttgtcccaagcacatgtcatcgattcatttactcattttaacttacttaacaacaacaccatcattatcataccaaagttgtgtgtctactaattgacttttgggttcttggttaatgagatcattagtaaaaaaaataaagagaaaagggtggaaatggtctcataattagagcatgagaaaaaaagagggctatggcagagaagcagagaagggccataacattaacaactcaactctgtatatgaacaaagtattaaatgatgctcacgtctctgcctcccaacccaacacctcctttggcatttatgttaagtgaatggccaccaaatatatatatatttgtttgaataaaagaaaacccaatattggatagtctttgttattattctttcacatgtgacaaccccaccatccaattcatcaacattgaacaaattcaattcttgatgtaattacaaccaaccttgtgtgataataatgtcataacatataactgtaataatggtaatcataatcataattagtattgttgtatttattaagaagagaatgaatcttaacttgactcattttcaaagtaaccataataacttgtttcttatattgcttctttttttattcacgtgagaaaggaccccattatgggatttccattgccatgtgaggaagagttgcatgtattcattggggaccattcttttcgtctctctttctccaacttgcatcaatgtatatgtttatatacatatatgtataattgtatggccatgttatattatgttagttcagggcatttcttaataaatgacttttaggcttaatttttatctcaaacttggagttaaaatttcttcttctcacttttgtgtaattacatttacaatcaatgtcacccaaagaataaaaaaagaagagagagagagagagagagagagagagagagagagagagagagagagagagagagagagagagagagagagagaga

SEQ ID NO: 191043 - DNA, 2765 bp, Cannabis indica
tttccacctgcttagtttcttcagtgattggcatctctcaggtttccccatatgttgcacatgtactggagtatatcaatgtctttacaccatgtgcggccattgtttcgagaactatcaaggtatttgatgtaatgttgtgataatatctgtgtagagaatttaaaagatgttacaacgtctccggtggttaaatgattttaacaaccatgcatgcccaaaagtatattgatctataaaatctatgaataagactactcaaaaatgaaatttgagcctaagttaaagattctaagtacagcaaaaggcaaattttaatgacataatttcactcacttgaggggatcaagggtgctttccccaacataagctacggcagcaaaatgcattacagcatcaaatgcattctctgaaaatattttatttacctggagcaatcagttaagtaaacaaccattcttgctatttccaaacaaataatgttttcaagaggaaaaaaaattaattgagaagagtattataaggatacagctttcgcatcccccaagtcagcataaataaactgaagcctcccaggttcaggaaataagtcttggagaaccttaacagcacccaggtttccccgtgaaagattatcctgtaagaatataaaatggttaaatatatataaaaagcaaacatcaacgtgatccaactggctcaaaatttaatttctcagttgatcagaagatgacattaccacaatagttacacggtatttatccttaagaagtctcaatgtagcatgtgagccaataaagcccgcaccacctgttactaggacatgagttacaccttcttcatgacgtgaaaactggaggaagtgatttttaaatgacgtgttagtatcacttagaaaaataaaaaatgagtttggaatatgacacattgagaaagaaatagcactcataatggttatgttggagaactaaaaacaaggtgccatttaaagtaaagcaaaggtcgatgtaagagaaatgtgtggtagaatgcaagcacatgttgacatcattagacacagtaacataattcttcagattcaatgaaaaaattaaaaaaaggctcggatccaaaaaagggggaaaattatatatatgatattgacaactcccaaaagagtgacccatttatgatcatcttttgaaatataaatgaataaataacaacattagtattcttcaaatccaacaatataacatgcaactgtaaaaccacgagaaaagtaacacatacacgcctgatttcattacaaataagatgttcttcagaacaagcacagaaatttaaacagattaatcaatgtcctctttgcctacgttttgttttgttttcttttcttttcacttacggaaaccaaaatgcattgcctgggaaattcgagtagatttccccaaaaacaattgaaagagctacctaaagaactcaaatcctacaactccaagagaaacaaacaagcaaaactaataaaatacttactgacaatttttcacttaaacagttcaattttatccatcactcgaagtatactttcatatttaccgaccagctattcaaccaatgactaaaaagctctcaagttttgtttctgtcctatttcctttgaagctaaaaaaaaatactatcctggcagcagccttgcttgccagaaaccatagcagagtttatttatctaaacagaacacagacattgaattcatgtataattggccaagctttttaaaaaccacaccctgtcttaaaattagaataaattagatattttggcaaagtgtttcatgagtccattcgaatggaagtgaaataattacagtaacaaaaaaaaacaaaaaggaaaatttaaataagataagtgattttaccacagtaggggtattaaaggatggggattgcttcagcatgacaaaacataatgctgcaacagtggcaatcaaaagaatctttcctacaacattgttcttcttcttcggatctgcataatccatgcctattaagtagaacaaggtcaagaataagggattgaaaaatcttcattaattcatagtaaaatatctgacataatcccattgcagtaaacaaagtaaccaagaaacagataatagtataaaataatacaatatctgatttttttttcctcccttttttgaattcccacctctacccaccacacgttttgcaactctatccttgctttatttgaaaaccgtttttgtctcatatttcagagaaaaaaacaagagcttgatgtctagtataaaaatataaagcagacaactagtctacaaagttcaatctttaaacctcatagggttagtttcgtatagctttgatagccaccatgatttaaatgaaaattaattacaaccaccaattttagattctacacaaaaaaagcaaacaaggacttacctccaagagacaaggatctaccagaccttggttgagttctggtcctgcctaaatttagcatttgggaaatttctactgtgctggctttcaaatatttgaatcaaatattaagcctcagcaagaaatcatgaaaaagcctctgccttgatatgttcttgaagaaatgaactgcaaagaataaaaatcagaaatgttcagcaaaagatattaaaggtgaccgaaacagaggcaaacaaaaaagttgttgagctgggtcccaaactagatgaggaaagttatcaaaaagtatgaaaactaaagacatcgaaaaataaataaat

SEQ ID NO: 191044 - DNA, 1252 bp, Cannabis indica
actcattggccggataaacaattgcttcactcataacaggtactttacttactgttttgaggctgttaacgagggattaaatacacagagacgattggaaactttttctggttgtttgagttttctcttatgattctctgtgtttctacattggcattctacaggatatgaattgatgtagctattatctaatcctcttttctttttcatttttcttcttttcagtattagttaggtttgtcattcttagtttataatatgtgttaatcatagcagattttgttctagtctggatggttttcgagattctgttctcaatctttttttccatttgaaatgtaagggccagggccaaagaaactttcagaagtttctgattttggttcaatgctcctttcatgtgaatcccatttgtatggtatttgttcttacacatattttatattttatttcagtactgtgtctaagtttgggataatttatatatcttggtctgtataaagtgtttggtgacataatatctaattttttgtgtttctaggcaatttgaattgtaattattttaactactcacagtgacaaataagttacctggaacattgttgtgttgttgattggagagataatttgtagtcgtttcaaatattatcctgtattttaataggagaagcaaaatagacaatgcttcaatgaatagttaccgattaataacctgtttagagaagttgtgaacaattatggtttattcatttgcatctgttcagcattgatgttagtctttgacatgtttatgtttaaactaataaaatttcttaaaatatgctgttaagccacaagaaattatgttagataggcatttattatataggtaagataagatatccatttttcatgttgtgtaatttcacttctagtcgtaactggaaagtgtactactgctgtttttgtaataggcatggtagaagctgagaagttggaaggtcttgaattcaaatggggagtaatgaagaaaaagggtgggaagaagaaagatgttcagttttatggctcttttacatatgatggtgtggagtactttctttatgattctgtttatcttttcggggaaggtgaacctgatcctcatattggtaagctcattaagatgtgggaaggtagtgataaaaaaaagaaagtgaaagttctatggttttttcgacctcgtgagatttctaggtttcttaagatggaagaagcttctgaaaatgaaatt

SEQ ID NO: 191045 - DNA, 1220 bp, Cannabis indica
tttttacactagatactaaatttttatattaacacaatcatgtaagttattatattttttaatggttataaattggcattctatatttatgaattcacgaatgagtaagtcaccataccaattatagaaatggagtgatggggtaaattttggttataaggggagagctaatatttatgaattcatgtttgggcaagttattaattacaaatagattttgataataacttccaatttcacaaaacgggcgggtatggctctagaatatggagagcttaaaactagaagacgaggggtaactttttgcatgtaaagataactttttgttatttacttttatgagctataatgtatgtgggtgactttttaatagtacttttggaaccatgtgagttcctagaaatggctgaacaaggtaagaagttatggaacaaataatgaccataatcattactaatggtaaaagctgctgtaatgtatgtatttaggtaggtgttagatggtttgagaatataggttaatttgtggtgtgcataaatgaataaagcaaggagagggttacaactgtatgataataatgatattaatgggtccagtctagtggacataataagatattatatatttatatgaaatatgatgtaatggcttttgatacgaagtaggttccttataagaggacattcttggtgttggaatttatgggttaatgggtttttatgacttatatgagtcatgaccattctttatttttcttcaaaaaaaaattaatctgacagccaatcatatacacatataatatggacgtacagaaagtcccataatttgggtatgtaaataatattacttaacttgctcttacattttcggcataccacaaataaacacactttttccacttcatcagtcttcacatacaatacatattttttgagaaatatgtttaggtccatcattatatcttactgtgattagatttgcgtaaataaaccaattacattaattacgcaaatgaaaagataaaatataataataaaaagaaaaatcctattttcttttttttttaagaacaaactctcccaggtttccttgatcctatgatattgcgctgcccacctagtatgggtaccatttttttatttcctcactacaggagcctcccgacctatttttgggcattcaccattgggtggctctggccaggaggagttttttttttt

SEQ ID NO: 191046 - DNA, 2002 bp, Cannabis indica
atgttgatgtggtggtgtatacttattcaaataattaaattatatatcatttaatgtttttaataaaatattaaactaattaaataagattattgatagtactcaatagctagatgtgatcatccaatcaaatctaaatttagttaatttattcttgcacgtaacattaaatctaattattattctatttcaaacaaaaaaaaacattattattctgattaatagattgagttcttaattattggttctagttattatatgtcaatttcaaacaattgaaataaaataacaataattaggacttattacgaaatagatcttatatacaattaaaatgcaaatatataacatcaaacaaacctagattttctttgttgagaaaagagcaaaattattaaatcaattcactaaatctttttttaaaaaaaaagaaaattctattaaatacacaaagccaaaatatctaaaaatcattacaataatagtctaggattagagacagaacggtaaatcaggccaccaaactcaaggcgagtcaagagataaagtcaaacaaacaagcgaatgagccataacattttgagctattttacaatgaacaagagaaataaaagagaaagaatgccaaacatgaaaaaatatattgagctataatactaaattcagtctaacacatgtatttcctattgatagcttgaacaagacggagataatcagaaaaaatggtgggggaattgcaccccaatcgtcgacacagggtaaaaggattgttgcctccaccacatgtggagagaaagagattgttgtaggagatgccgaagaacacaagaccttcccctcacaacgtaccaccgtcacaccagaccaacattcatctgttcctcattgatgctcgcgtccacaaatagattaaaatcactcattcccaagttctcagacggagaactagaaagaccacccgcagccatcgtggtcttcacttgagcaatcggaccaaggtggtttgagcatcttgatagcgctacagaaaactcaaagcccattgactaaccaaaccatctgagagcaaattattatcatgaacaaaagtgtttcgcgggtaccaaatccttcaacacaacacaagaaattcttccatattttctttgaaagaacatccatacaacacaataaattcttccatatcataaaaacaagaagcatctttcaacttatctaacccattaacaacccaatatttttgaatagttaattttaagagaagagcaagactaaagagcttggattatggtttcattatcttgaaaacataaagagcaaacatcaaaagtcctcataccatatcgtgtaagattagcatagctagacacaaaatcaaggctcactttacaataaaattctttaccttgggtgggatggtgagggaccataagtaattccaccagcatgaaggcccagatgagggcaaaatgtgcccccatcccaacttcaaaacgaagctctgatacccactcataactgtatacataccagtttttgtattattctaaatcaatcgatcttgactactaaattttgagacagaaatagacaaaatagtcttagatttaatgttgtcaaagagctccttaactaacggtacattccaatggtcaaacataaacttaagatcactcacaagttgtaactcaggaccaccatggaatgaataagctcgtcccacatgatttttagaaatccaagcatcagtctgattatgaatagacttcccattatccacgagccaccgtatcctctctttccaaagatcacgtcccccacaaaatacttttccaaagaaacaaagtcctattagtctccccacctctatcacattaccattaagataataaaatcctttcataaccttagcccccaaagagttaggaaaatcatgcaactaagtcgcttgcttagctaatagagattaattaaacataaacatatcacgaaagcccatacc

SEQ ID NO: 191047 - DNA, 1118 bp, Cannabis indica
tataatatatataaataaaatgtgtttatatatatagtactgggaagaacaagccaagacaaaagtaaaccaaccaaccaaccagaccaagacctatatgagtgttcgatttaatacattactggttattaataattaaagtaaaagggagggtgtgcgttactatatatatatgatgtgggggcctacgtttgaaactgacaaagactatacatttatttttcaccattgtcgttggttattagtggtgctcaataattaagtagttttaccattaattagttagtgatattttttaaaattatatgagattcgatacttaattatcctaataacagtatgacaccgaatagagtagtgttagtcactaacatactactttcagcatttttttttttttaaatttaataaaggtattattgtacagtactttaaaaattattttattaagttaaataataaacgatatttaataacaaaaactattttttaacatttctcatctcatttagtaatgattttcatttaataacaataaattaatttttgaggcggtgggaggtgtttttaattgagggtaggagctaggaaggtgtgtattaaatgcaaaagttgagtgtgtagaggtttatgcgtgcgtgtgtgagcatatatatatatatatatatatcttatcttggttatagagagagtgtgtgtgtgtgagcagctttcttttcaggttagatgacattagggttctgtagctacagtactattcatatcacacatacctaatcatctatcattttttcatctggttttcaaactctatattcttacctatcttataatattagggttagtttagtaaagctctgctgcgaagaaaaacaactttagctgtgctttaagaaaaaacgactatagcaaaactgtaaaaaaaaaaaataaactgagtatttagtaaattataaattttaaattgtgttgcattaagattctattataataataataataataataatattttaatctaattcatgaaaatcataaatatatataaaaaaataatgtcatataaaatttttaacttttttattatatttttaattatttttttcttgtagtataaa

SEQ ID NO: 191048 - DNA, 3615 bp, Cannabis indica
ttttttttttttttttactaacgtccatggaaaatccttcaagcgatcctcagtttgaaactgatattaataataccccaacaacactgctttctgctccaaattttgctcccaactctggttttcctaatcaatcttggaaacctttctcgaattcgttaagctcttcttttaacaatcaaactcgatcaaactaactacttagcttgcacatctcaagtagttcccactgttatcggccatgatcttgatgatttgttgttcaacagtgacaaacctcctcagttcttggtaaatgacaattggaaaacgcaaagaccaactactactttcttggctcagatcttcgatgactgaatttgttggaaggcccttgaacaaaggttctcaagtaaatctaaggctcaacttctacaactcaaaggacaactttgcaatgttcagaagtagaacctctccattgctgagtgtttttacaaggtaatattcctaagtgacaacttggcgattcctggatgtactattagtgatgaagatcttgagctttgattgctgaatggtcttggaccaaaatataatttagtgatttttggtataacttctagtagtgaatcgaagtccttggaagaaatacaagctttattaatggcttatgagtgcagacttgaacactaccatagtgttgctaatctttcctccaaaatgacaacaaatcttgcaattggggatctttaagaaccattcattctggtccttacaagcctctatttgctcaaaacccttcatatgaaactctctcaagatcaggagctaagccatacaatcgatctttcccttcaaatggtttaagatccttatgtcaagtttgtttcatgctcgaccatactgctgcaatatgtcactatagatttgataaagtctttgtcactcgcaaggcctccataaattcacctcgagcttacttgactgaagttgaaggtgatcatgatccacaaatattcctcttcaacaatcccgactttgtagatgatcctatgtggtatgctgatacgggtgccaccaatcatgtttcatttggcatggaaaatctggacactgctgctccttacactggatctaaatctttggctataagtaatggtaagaagttagtaattttcctatatcggtcatgttattcttccctcttcttcaaattctcccttacatttaaaatttgtcttaagagtccctgctatcacaaaaaatttggccggtgtttctaagctaattgatgattataatgtgtttcttgaattttacaaatattgttattttttcaaggacaatcttgctgaaatggaaacgtaaaaatgacctctatatgcttggagatgattctcagtccacctcctctgctggttttcatgtcatcttgccacttcttctgagtctctcaccggttctcttcaatcatttaattccttagcatcttcatgtaatcaatattgtaatatttcaggtcacaaatgtccaatgacaaatgatgtaataaaactcagattagtaaaagcttactttctaaaaattggtgtgatcctcaagttttttctcagcttctcttactaattatgatgttaatgtttggcattacaaactacgtcatccctcaattagaaatttaatgtacacacatctggagatcatttgactatggtatgataataatcaaataatacaaaatccttccgctgcgtacttgatttagaaccataaaaacaacacaagaatggtacgtatttaactcaaataaagtacattagccctctccttgttaagcttcatctggaaagggtcaaagcgtctccaagcccgaccaactctactcataaattatctcttcatgaaggtgctcttttttctgatcctatgctctatcacagtacactaggagccttacaatacctcagactaaccaggcttagtgttacctttattgtcaataaactaaatcaatttgttcaagctcctaccattgtccattgggaagcttgcaaacgatttcttagatatttgaaagggacgattgctcaaggtcttctcataacaccaacaagtcttatggatcttcacgggtagttcgatgctgtctggctagctgtcccgatgattgtcgctctacaggtggttatgccatgttccttggtgggaatctaatatcctgttctactaaaaagcaacaagttatcgctcgatctagtattgaaagtgagtttcgtgctctagcaaatgcggctactaaaatcaagtggatcgtttctcttcttggtgaactccaagttactctatctcaagctcctattttgtgggtggacaatcaaggagcctttgctcttgcggcaaattccatgtttcatgctcgtagcaagcacatagagattgatctacactttgttcggtaccaaattctcgctcaacacctatcactctaatatgttctctcagttgatcaaatcgcggatgttcttactaaagccttgcctactgatcgttttgagtatttgaagtccaaacttcatgtggtgaatttccaatttcgttttgagtatgttaagtagtaggtagttatatctgttagaggttgttaatagtcaagctgttttgtaactaattctttgtactctttatctctataagtaaaataacacctcagaatgatctaaattttttctcattctcttgtcttgtaattcttttctaaagaactcctcatagatctctctctgtttctctactctccaaaaacctcttcaagccatcactttcaaaacaacaataatataagctagttacccaaatttatttaacaatgtctcaaatgatgcaaattaacctattaaaaatgcccctatttttattgtataatttttaatgctttcaccatatttattgagacgtttaatttgaaatcttgcactaacggagtattttaataatttagagaggaagagaataatcgctaatcataatcaattcacaccgtcctaattaggatttcataattaaaatgacggtggataattataagttgatgtaatatatgcaaaatgttctcaaatcaaaaatgtaaaattataaaggtgcataactatatttataagtgctcaatatataaactaatttttatgttactttgttagcatttcaataaattttagtaaaagtgattttagactttctaaaaaaaatggtgtttatcatttttattattattattattattattattattattagtacataatgctagaacttacatgttatatatcgactcaattactgaaagttacaccattaaattagatatttctttagaccatattagttgtacaaatctaaaattgaagacgactgatcatattaaccatataattatgagtatagttaaaagtaacttaattaagtgtccaatactattatttgttgtgcataatgttagtgtaaattacttattaatacgtcaatactggtgtaagtttaaattaaaatttataaatactaatattaaattgtatcaatagctgtcaattaagtagctactactcatgtatagtgttttttttcctttccttcttc

SEQ ID NO: 191049 - DNA, 2491 bp, Cannabis indica
gagacaccgctaacacattttgattatgtcgttagactatacttttgatactgtatatgctatgtatgttttataactagattttaggatctcggtttataattattttataaaaaatatgttgcatgtttagtaaagttttaacactacaaaaaatcttatttttagtcacaacaaaacttgtgactaaaagtaaaagagttgtgactaattataaattattatttttatgttgtgactaaaaaaattcgtgactaaagatattagtcacaataattacaatttgttgcaactaattgtgtttttattcacaatatttgttgtgactaaaactaaattagtgacaacttgtatttacatactatgttatagtcacaagtaatattttgttgtgattaaaagttacattttgtcacaaaaaaattatattatgactaaaatattgttactaaaggtagcaatacttttttatagtattaattattacattttaaggacgattataaagatttttaggggcaacttttgccgcccctactactatcttttcttgtagtatgtatagtatcccacgtaaaaactatttgaggaattagttataagaagattatgagtaattacttcactttcattcaagtcattaccgagatagaatctcaagattcttaccatacacactcagctgatctttctttctatacaaatttcatattattattaatgcagtgactagtgagctaatgtatatataccatgtgtataacgttgttgtctcaagtataatatataaattaatgtaggatatttctcaaatatattccaagatatagacttatgtgtgtgagtgtgagtgtgagttggagggtaaaataatgttattgttgttgcatgcaatgcatgaggtagagtgttgtgtccatgcgttagatcgtgtaacacagcctctttccatgagcttacctcatgtactgcgggcccctcctctgctagctagtagcctagtactcctttgctaacgtggctctctcactctctcattatcttacatttatcagcggtggtgctcgatactttctataaataactcgtaatgattggttagtgatatttcttaaaatttattttcttaaattatataaaatccgatacttaattaaaccaatatgaatatgacactgaaaaactaccttttaccaattctttaataataatatctcctcaaaagaatattcaacttttatattgctataaataagaagccaaacatgactaccaattaattcatcttcagccgagacactaaaacaattaatatattattggtttcttggccagtcaatacttaaatatttcctatcaaatataatatattattatcttatttattttcttgccctaatatataataataatggtattaatgattgttaataattgggagaagactatgatggtgctttcaatgctccatgttattaccaaggagcacaacaaccaagttgtaatcttctcctcctacaataataagctggtggagaatgagggcgacgatgacgacgacgacgatgacgactgtgtcacagtagccccagcggcataaaacattaacaattaatgggactactgcatatggttctttcacacgtactcaatatatatatttatatataggtatattatattatcatgtgtagctagctgctgtgaaactgtatttgtagctagggtttatagagacgaggtgtttattaattatgggggtatataaataatatgaactagtgcagggtatttctctttattctctctttctggaatgagagaaagaaaattagcactaaaccctgatatggtgtatactatatatatcttcataaatataaaatgtaattttagtttttctttcgaataaataatgcagttttagtacttatacacattaatgactaatttccttaattggtacttatacaatatatatatatcaaaataaaaaagattacctaattattattcactaatatatataattacattcattcatctgctaaaaattgtgtagtatatttatgggattattactttaatttttagttttttatacacaataattgatttttctgcaaattaaaagctacaaagctaatttatgaattatattattaattagtaagtaccagaattacggcaattgaatttcattctaatgatgattttaaggagaaatttttatacgattgtgaagcaaaagtatatatatcaaattaagaagctctttggcatgtgccaaagggatttgaggaacatgatataggttcaaattcatgatatatacaaagtaatatataataatgtacttgtatttaattagggtacatatatagaatagtactcatcagtctccagcctaggatatattaactgactataaccctaatttagggtataactaattatgcatatggtgtgtttcctattaatttctttttta

SEQ ID NO: 191050 - DNA, 1516 bp, Cannabis indica
tttcatatctaaccactccatatatatatatgtttgtatacatatatattataggttaaaatatattgactttattgtctctcaaaacttggaagttagaatgagtttgtttaaccatccgcttaacgtgtcaaaacataactatccaagtcactatcagcctttatgatcacactcatacaaatgtatatatatatatataaatatctttaaccatcatctctctaatgatctctttatataattcggcactcttctttatattatatattatatatttgtatatatatgaagcagtcgtgtaataataagaactggattaagactaatattaatacaactatattaacttattattagtacattaacacatgattaataatgtccccacttggcttattatgatcttaataaaatattagtccttttttcttttattaattgtgattcagttctttttgtattttgcattgactgttaatagagacgtaattgcaataggaactattcaaagggaaaatcaactaggacttaattataaactccaaaaacgaataataattctaaaaaataaaaatatataaatggccacgtacgaacaactctaatagttaaactttcaaattttgcgttctaacaaatggagacatgcatggaccacattaatcaaaacacgcgcaatccttaactcattcatagtcgtattacagaggttaaattaaataaaataagcagtaaaaaaaaaaggacaaaacagatagatctaattttctagatttttttggtaaacaaaatatgttcttcccaaaattattattattatagtttttatatataaaaatattattatttgtgatgaagtgttggtgtggtgtatgtatatagccatgtgcaatggtagtttaataatttctagtacatatcttatcgtctctttcactttgcttttcctctaacttattaagaggactaaattttattagtggctccccactttttttttggtgttctctctcagctaaatcactaatttatttccaattcctaatccattttgatctatcaccaataaccaccatgattaggtaaaaaagtttagcatgtggaaatgtgcatcttttattacttttatagtagaaaataaaaaatatgcatgcgtgtttgttggattggatatggcatagaaattactcaacacactctgttaatttattttcctatacttatttaatcctcttaacttggagactattttaacaattacatttttttaaaaaaataaaaataaaaataaaactatataattaatctagagactatttctaactgaaattgcttaaatttatccaaatataaatttttttttaattaaatccaatccaattgtaatataatattaattactgatcatctaatccaatatttaaaattgatttctcgtcccaattatttgtgtatttcttctctttcatgaaaatagtactaaaaactacatatatttgtacgggattttttt

SEQ ID NO: 191051 - DNA, 2633 bp, Cannabis indica
gctcttaccggagacctttaaattaaaaaaatagaataaaaaataataataatatataattgaataatactaaataaagtaaacaaaatttgattatttctaaaaatatttatatataaattgttattaaaatgtaattatgtttatatatatatatatataaaaaaatgtaataattatcatttaaaaaattaaaacatatgtaattataccgatattaaattttcacacatattataatttataataaataaaatatatagctctctaaatagtttctaatattacaaaaatatgtattttttttagaaaggaatctagttgtgaggatatttttttggctgaatatataaatatatatttatattgtttgattaaattttcacacatatcataaaatataaactatataaaaaaaatattttttatcataataaaatttgtgactaaaaattaaaaaaattgtgattaattataaattattattctatatcgtgactaaaatatccgttacaaaaatcacaatttattatgaataagcatatttttagtaagaatatttgttatgactaaaactaaattagtaacaagttgtatctaaatcctatatatattttagtcacaagtattttttaataaaaaaaaattatattataactaaaaaattataattaaatattaaagcaatatatatatagggatatgattttgttctgttattgtactttcactgattgtaattcgtgatgtacggcagctgtcagatgagggagttatttgatctgacggctgagattgatctaggagtaattaagattaaaaagtagaaacgtaccctgacactcatttaatgtactctgagatccatctaatgtaccacagaatacattccgtgagagtacatcacgaacaaaatcatatccatatatattttgaaaatgaatctagttgtaaggatatttttgtttgctgaatatatttttttgtttttttattaatatttttggtgaatatttgagttgtgtataatagatatggacaataagggcatatgtagtagaggggtttgacacgtgtgaactatgataattgttctatctaaccacaaaaacaattcataacctaaccacaaaagtacaaagaaaacattaggggctttactttaacaggtttcatttcacaacacaatgtacacacgtgacctctatacacgtggaccaatcacaacaattagtggcttgactacacgatgtacacacgtgatgtcaaaacacacttaccaatttaaaacaattatttgttagtaggcgtaaaacaacaccaacatcatcatgtgtaaaggtcaccaaataataatattataataatatgaaaagtgaagaaaaaaatcatatcacaatcccaactgcaacacatattaaatatattattattggtataattaaatattaattattacttgagtactatttataaaaaatattgagcacaataccaatagtaattctccacattaatatatgttataactataagaaaattgttattttcagtgatacttttttagttataccataaatatttttgtgattaaatgtgacttttagtcacaataaaatttacttgtaactaaaatatagtatttaaatataagttgtcacaataaattgtaatttttatgactaatgtattatgactaatgtatttaatcaaaacataaaaataataatttataattaatcacaactattttacttttaattaaaaattttatcgtgaataaatgtaaaattttttataatgtattttttctactcttccaattacagcaacattttccaaatagtcaaagtagtcaacaatatgtttatatcagtgttaataaatgttattcaaacttctgttatatatatatgtcttttatggtttatatatgagtagctttcatatatgtacacacgataaagctaattaataatgtagggtgattatctatttatttttataaaaataatccaatatattataattatttaatattcatataaaattttaataaaatttagattatttttatattttacagtattaaaaataaaatttaatatgtatttatatataaaaaattactcgaataatacaatatttgattttgatatgtaaattattattcaaaatttttctaaaaagtttataaataattttaaataaatatacacaatcatataaataaattaaattaagaagctaaatctccaaacatatataaagtgtatcagaacaatatttttttaaaagagaatagattaatttctctaataatatacattaaattatggataacaatttgtaatatttaaatatttgtttacaaatttgaaaacattaattctaattttctaaacttgttgcaaaaaaaaaacaatgtatttttactgatagaatataagaaatctatcaattattcctgtattctatcaacaaatctatatactttaataaattttgtagtttttaaattttttttcaacatctagtctaatttaatttaattataatgatctaaatatataatattcaattatataattggattggatttgtttaatgtttatgatgtgatcaatgcatga

SEQ ID NO: 191052 - DNA, 2623 bp, Cannabis indica
aagattaaacaatcataagtgaattagcatggcataaacacagacatgcttgtattgcaaagacaagtgcagagacttaccgatatggcagtatagcaggcccgaacatcaatttctccaccatcatgcatcctgatgaatgcacccaacaatattaaaatttatactaattgacttatgattgtttaatgcatctcataaaaaccggtttagaagcattaaaaatgaatatttcacattaagtgacaatttctaatttcaaactacacagttagacatgatctcatacctgaagcccccacttggctgcttcatccgctgcaaaaacatgtacactgtacttctgaaaaatattaaaagacattgagtcaatcatttgaaaagggaaaaaagaaaattatatctgtaaaaagaagttcacaaaaaaaagtataaactgaccacctattaattgaagacaaagcttcatgaccgccaacagtaataagtgaattgacggcggcataagttgttgcaagatgtggcatctgaaagaaaactgattggaataaatattgacaccgccctcggtccaaatcgaaaaattaattactaatattatatttgtatatgtcaaatacagcttgataagtatcagctggtaagaatcaaatgctttccacacaccaaatgttaaacagttacaatttgtaaccaacacaagatataattttaaagactggctaagcgcctaaaccacctcgcctcatactagactagtttacttgcctgtcctggtccaccaccaaatccaccatcctggtcctgcaaagtagaataatacaaatgtataaaaacgaatcacctaaatccagatgtacgttttgcattacgaaaagcacaacaactaaatgagatgcaaatgtatttgcaaacatacctgacaacggccaagaaaatcaattgtattacgttctaattcagaatctagagactccccaagtaaagcaattgaatgcagaatccaataacacagccaaggtcgactaacaatatgacaaaaatattagaatatttctatattaagtataaaatcatttaattgacttttacgtgtatgaatatttcatattcattacgattgattctaaaccaattatttaataaatataaatattaaaatattctgataattaattgtagtacaaatacttatggaatatgtcacttataaaaacaagctcactactcattctgtctatgtttcatatcatttatataaatttctaacatgcctaatttattatgataacttcatttaggctctactagaaatttattctgataacaatttaacatggctgatttttaatgagaaaaaaatgggcaacaaagaggcatctcaaatacaaaaactatgtttccctctctcccattattattatcctcttttaaatggggcagtgctcaagtaatcaatgtaaagcttactcatagacaaagttgttgggcctcaagtagatgtaaacagttgttttttctgttacatattatgtttccttctgttgtgtttattccgtgtaactaaggtctgcatctactttacttacaaattttagtatcacaattttatgcaaacacatacaagaacaacatagtccccattaaaaactctaaactgaaacattgatcgtttaattatgtaaaaatttgaactttaacatatccattacatacaactaacaataaaagagagaaagtgagttacttggcatccaaaacgcagaaagagggaccgagatgtctcagacctccaaaaagatactccaaatgcttatcccgacgaagcttcagcctttaaacaaaaagaaaaattattattagtattgaaggaaatccccaaataaaataataatcatgacaattaaagttcataattagggatctacaattgggttttaacgttgcgagaagaattaacgaagtggtcatagatctgaaagacactgttctccaccatccactgctcgcgctccgtcacggttggcaccggaatctccgattccatattccgtttcaccaccgagttgcgaatcggagttagcgttgtttgactgtgctgaactgaacttacatcagttgttgatgttcaagaagaagaagatgattctattgggccgaagcagtataattgggcccaaagtcaacctccgtgggctgccttccctagatgggtattgagacccaattagaaggtccaaataattggtggcggctctgacgttgaccttttgccaccttcaccgaataattgctgactaaattccccaaattatgtattagtagattcttagcggaaaaaaagatattaggagttagattttttttaaaaaaaaaattatttctgcaatataatttctgaaaaaaaatattcaattctgctataattttttttggagcttgttcaacactttattaatgtgataattctaattgcttaataatttcttacataacttattaaattaaaatatatgagacttaatattaaattgcaccaataacaatatattatcgtacttagcatcttaatgtctcctttaatatttttcttgtaatttaatattaatgaagtaaccaatgt

SEQ ID NO: 191053 - DNA, 3657 bp, Cannabis indica
ccaaacacccttatcgttctctatttctctggttttttctctttttaataacaaaaatgcaatgagaaagatttcatagaagcatcagaatacaaccgttaatcaaactaatgaaatagaacattttatgttatagtacatcagccactatgatccacaactatggtatataaaccaccgagtaaatctcgaatagcccttctcctacatttctaataaaaacctctcaacataaaagaatcgattaaataaaaaacttgtcaactatttcctgaacctctacctctagttttttctttcttttttttttccctatttccttcttatgatctcattgtaatattttctcctatataaaacattgttaacttgatcaataatcagtgccaagcagaagccgagatcaagtttctatctttccacccaaagcatagcccatctttctctgccaatgtataatgctcagaataacacctcagaaggcttcttatgacagagttgacataagagctcaaagggtattgcttaaaacccgccatggtcaaccttgacttccattttcccaacagctcatgtcgttcaactctttccctgccttcacaagccaccacgttcactatgtccctcgccagacaatgctgctcaacactgatcctatactttgagtctcttggaagtgtcacgtctatggactcaaacatcgccaagtaaaagtccatagcctccacgaatctgtggaaaaaaaggtgttgtgttggtgttcgactcttgctccaccaaagtcacaacttttgggtagagagacttcaccattctcagaagcccgtctctaggattggtaatgtcaacactttcgtccggagtgtggtggagttggagtgggaagttaacagccaaggcctcgccaggccggatatcgagcatttctcgggttacatcaggtgcaaaaacaggcactgcgttgaactcaactgggattttgaagtcttgtgagatagccactagtctttttcccacagcctctagtccatcgcctctggcataatggtttacaggatcatctatgcctgtaattctcacgtgtggagggccatctggtctagccgccagagcttggagcagcgtcaaccattgtgtgccttgagctatctgaaagtcaacaatatgaattctatcttcgtttctacaagcttcagctatggctccattagctgccatgtaaccaaatttcaagtaaggacagatttcatagagaatttgcatataggaaagtaactctttgctttctggctctctgcatctgagtgctctgtatatgttggtccctgatgcctctttcctagccaccattccttcaaccatgtatgctccaaggcgctggattggctccccactaatggagacgatagcacgggcttttccgatttgtttgtcaaatgtttcgatatcattttcagccagagatttggcgcaggcaatcaggaggttcttcagattatccagggatggcaagccctgctgatgcaaagagtcttcctccattaatttgtgacgcttttcagttcgggcaacttcaacaggctgccttggccgagaggcaagaaatgtctggcgctgagttaggcctggctgttgtcctctcggcctctcagctttccatgactgttcagagggaccttccacatgcgaaggtttccgtctagttagccggtgttcatcaacatcatcgtcagggcccattaaagcagtctctagctcaagcaaagcgtgtttgaagttctggctagaatttgcattctgcaatagggacttcccacaaggatagaggcagtaactgttggtgtcaagtggagaattgcaaggaggagtactaactcccgatagattgttctccgtggagctgtactgctcttggctatcgctcaacgtggtgagggagttatctgaatcgaaattagtagaaaagggcgaagaaggcgagtttccaatgtcgaatttcagcgatccgagtagtctgttgggcaatgatggcacagttgtgggatgagaagttgtgtagggaagagccgcaccagttacactgataccaaatagctggtgggagtccatactatgatattggcatcagcagtatcacttgggacttaactttcaatatagtccttggcaagaatctgaaatgttagggaaaaggctcgttagaatatgcatgctttaaggctggctaatttaccaagcatcaaacccatatctcatcaatcaataacgataggaaggaaaattggaattaccattaaagtagtcaaggaaacaatcagcaaaactatggttgtgacctttaagattaaaatagtccagaaagaaaaaatagttttctttttttttttttacttgaaaggactatacatagataaaatgaaatttttttaataattttatgaagaaacctcggtgcctcggtcaaatataatatgacaaatttgatactacacaggccatgctttcaaatcaagaaaagaagggctttgaaaaccaggaaggttgaaaaatattaaggaattacataagcctgcaagataatcctatctgttctactaacatacacaaatacatgtataaatatattatatatttatgtggaataaattagtataatttagtcaaattatcaacaacccaatatatttttcttgaacctcaaataaacaaaatattaaactatccaaataatttttctccattttcttcagccccaaataaccaaccaaacaatcaaccccccacccctaaaaaaaggaaaaacaaattaaaaactttagccatagaaacactacaaaactataacgaaacgggcaataaaaaacaaatagagatgaaatctttaattagaaagtttcaacaacatcatacccgaaacttctcttttattttgatcttatgggcactagaaaactttctgggcttctcgaggtctctctgttgaagtttttcgagcctatttccctttgactatcgccaatctctagttcaagcctaagactttattcttctatcaaatcctgttgtaccaaattttccagagtttgcttttgaatttctgaccaacctcctttatatacggtaagagggggagagagagaaagagaaaagaaagagagttttgacggtcggtttacgaatgtaacggtaacgacaacccgtaacgttagttagaatgttgatgagtttatatgtacgtcgtactcgtagtgcagaattaacggaagttgacgggcgaaaacgttaacgaattccgaccatcttctcaatgccacacgttgtaacgttagtagaacattcttcgttttttccccctttgaacgaagttgttcagtgtccactttccttcacgcgctgctttacttacgtagatgtgacacaccaaactaaccaccaatgcactctcatcctctcacaaatattctcacgtgtctaactttatgccttatttccctttaatattagtgctactgttttcgataatacaaactttaaagtttttcaaaaatttaaagtgataatactcttccaacatatgattttaaatatatatacaaatataataaaaggttgtagttaatactcttcttaacgttaaaataaaataaaaactctaaa

SEQ ID NO: 191054 - DNA, 4019 bp, Cannabis indica
gttttttttttttttttggagagaactatgaaatttaatgttataaaaacatgaaaactaaaagtgaaatataaaacctaaaatattatctaatagggatggagctaggaagatttgtaaataggaggtcaaaatgtgaaaattaattttgagcgaagttcaattaatataggagctattaagaacagtcccaagagcttctctatagtagctaaggtggtaaaaatttaaagaattgtctaaaaaatgagctccaaatgatactctataattattctttaaaatagaataatgacttcacttctctagatataagttgtatttagtttcttcaaaaatattgtgcaaaatagaaataatttatgacttactttagtataatagaccaaccaacatgcaacacaatcaagaacaatatattaagagatcacaataactaagtaatgaattaaggtagtaaaatagaaaaagaataacactagatttaatgagtttgagccttgtgcaatgctatacatctcagtcaaaacaacaccaatcatatctttattgatattagtattatcaaggttacaaaaattctcacaaactctcaaagattacgagaaaatatttttctctctagtttagactctctctctcaccttacactatcacgattcttactcaagcaattatggtctctaaactcatacaaattacaaagattgatagttatttataaatttgtattgttgcccaaattagctctgaaactatcgtgatacatttacaccgccttaaatgttccagctcattattagcaacaataatccacgtcagcttgagaatgtgctttcgttacatacaatctggaagctttaatacggacaagctatccagatacatacaagcgctctttctagatgaacatctgtgattgataataggctattcaggagtacgtctccaagttgacaacaagctatccggaagacactacatcatggaaggcaagcttcacggaagaaccctttgaattggccacaactttactacaaagcttcccccagatgaatttctagctttccgtaacttctttccagagtaacactagcttctcgaaagacacaaattataaccataatcaacaaatgtccaccttggtttcaatgttgaagtttcttgacaaatcgttgttataaatactactgtcccttcaacccctccaagctcagctgactccaatcaacttcaagaactgctcacttaccacttgacactaccttggttatcatgtcgaaggattgtcttcagttagaactttggcaatcttcacattctttctccacaacctctcgtatgaaatgaagcttgatatcaatgtgcttagtgcgttcatggtgcacacaattcttggttaattgaattgcacttatcacaatgagcactaataaccttctagttgagtctcaattcttccattaacccagttaaccatagtgcttccttgatcgcttccatcaaggctatatattctactttagttgtcgatagtgccataaccttttgaaggttggctttccaactaatagttgttccaaacatagtaaacacatatttagtgaaagacttctagatatcaatacaccctacataatcagagtcaacataaccattgatcacattcaagtcttcattttggttattaatgccaaatattagtcccttctcattagttctcttcaaataacacggaatccatttcagggcttcacaatgctcattttcaagattttctaggaatctacttaccatgcttagtgcatgttatgtctggtctagtacagaccatgacatacatcaaggagccaacaacactagcatatggaacttttaatatttttgacttctcagtctcatcttcaggcatcgtgagtaacactaaatttaaagtgttgtgtaagtggagtactcactaccttagagttactcatttcaaagatctctagaacctttctaatgtagctcgtctgattcaagtgcaatagtctcttctaccttttccttcttatgtccatgcctaagatcttactagtcggacctaaatccttcatttcaaactttgtctttggttggagtttcaagtgcttgatctcctgtacactctcgatgataatcagaatatcatcacaacaacaaatatagtgtatctccatttcttgctctgaaatatgtacagggatcaaacttatttctcctcaaactagcttggtcacataatcaacaaacctcctattccactgtcttagagactatttcaaactatacataaacttctgcaacaagcacacccagtgctcctttccaacctcctcaaatccttccgattgcttcattagaattttttcttccaaatgtccatacaagaaggtcgtcttgacgtctaattattctagtttaaggtcttggcatgctacaagtgccaaaataattctaattgatctatgcttaacaactgaagacaatacctcttcacaaccaaccttactttatactgtgcttcttgtacacccaaaattccttctttctatttgcacaaccatttacatcggatgactttactgtcttctaacattggtattaagtctcaagtacagttcttcttcaaggaatacatcttcgacatagctccattccatttctttcaatctttgcttcttattgcttgtgcatagctggtaggctctttctgcacaatttgattagcaacatgaaatgtgaatgcaattagataaacatgtccatatctttctggagcctttacttatctccgtatcatgtctctagctagtttataattttccatattattgctcgtggaatcatcttcttcatcacttctgtgatctacatatgtttcagtctccactcttgccaagggctccacttcaagctcagttaagcatttgatatatgtgtgaatgttaagttataagtattattattgaataatttatattaaatattagaaaattctttatttatatatgaggctgtggcttgtagcagtataaagaactaagaccacttagctatgaataaaatagtcagcaacatattaaagttacagaatctttaatcagcggttgctactatggttcattgatgcccgttcttcagtgcaagtaaaattagaaatatccaattaatacctggttcatcatcattatttatttattatttttaaataaatattcattaatagtttattaatcatatgctcatgcattagtgaataatatgtcatacatagacatctcacacagttatattattatacatctcatagtagaaatatgatatataagattgtcgtatgtgtttatgtgtttactattttttgaaaccaaaatcatgtaaattggctaagattaatttagaattaacttagcaatttaaaattaacctattaatttaaaatagtttttaattatgaattaaagagttaattatgatgtaattattaagatggaaaatttatttataattttgaggcttttatcataaataaattaatcataattattaaagtggttaatatgtattaattctgggaattaataaaccaaacacattaacctaaaatagtgagcgggagaagaagtacatgtcaatgtaacctacgacctcccttattggttaacatcgagggagtatagactggtctcgagacaacttaaattttatcccttaaggaaggtatgtgtctatactgttgctcaaggttaatctcttgactaagataagaggaagtgatatattttagtttgacactgacccttaaggcggcgcactaagttaagttatgaaatctaaaataatgggttacactcacaaagtgcaattaagcttcatagtggttagtttttaacttggtcataaagcggtactttatattttaaaaaggaaacatgagatatttaggtttcaaagtaataaatatgagagtttccgcataggctcaataaaattgactc

SEQ ID NO: 191055 - DNA, 1322 bp, Cannabis indica
ggggcactttcatatcggtgagatagacgaactgcatcatccttgatggcatcaccagtcagcatccattcctcagcaatcaacacagaaggaagccgctcttgtccatcaacagaataagttgaaacatgatcctcttgaatgccagccattgcttcccaagcaactctttcagatggggacaatccagaactttttcttttccggtagacatcttttggggcaggcttgtctcctgtattccgtggaccccaagagaacgctctgcgagcctccttttgcaagttacttaagctgttagagaaggatgatctcacaggtgtgcctgttctagttttctgctttggtctcattcctgaaatagaaactctaggttctcttgtaggagagctaaaattgaatacaatcgctttagctgcatatgaaataattacactattgtctcgcaacgatggaaattctttaagaatctgcaaaattcagaatgtacaacaattacataaacataaaattaactaaatgagcattgacgttgaaatgtactgacgagtattttactatcaagtgacaggattctgataagccattggttaaattcacttatgtgagaaggaagaaatagaagcaggtgctgaggtgtgtgcaatgacgtgtcacaagacagagaaagtgtatcagtagcagcatgtatcagattcatctaagaagttatctaaccagcgcagctgattgcagttgcttcctcataagcaaaacctccaaaagcaaatgagggtgttcatgcaaggaagaacatctctgctgccaaggcaatggcaaggcagccagaacacgaagacccaatgcccatgagttcaaccgagaaacctcagtatcagagagatttccttctcttcgcttcagaaagaagtgaaccttcgaaaagtaggatagcaatgtttaagaaacatgataaatcaaacttaaagtgaacttaaattattcaggaaaaaaaaattactaatacagaattacttacaagaagttgctttgagcgaagattaggtaacagctgcattgcacccatggcaactggtaatgcatcgtctgagtcacgtaacgaagaaagaaagcgagaagcttctgctggacctccaccattaagaggatctgcagtgagaagtttaacaagctgccgaccctgtaactctctccgcaaatctattgataatcctgcactttcagctacatctaaggcagctgaaacagctcctttctcagctaatctaagtgccaagccctcaggatcttgcttacactcagcttccacctgaaataccaag

SEQ ID NO: 191056 - DNA, 1593 bp, Cannabis indica
catcctttaatatttctctaaaaataaacacactaacttctatgagagaagcaactttacttctgacataagagaaaacaaagaaagagagtctgctttcgttttgataaaaatgttagacataaacaaagtaaggtagcagttcctttcctagtgttataatttatataatataaatctgtgtacaagtggagtaaggttccatgacaatgtatcagacaatatttaaaagaagaaagaattgtaaattagaagtgtacaactttatatcttccatttggaagaaacttgattcgccacccgaattttaaatttgaagttgaagctttcgcctttataggccaagttgccttagcccgacttgagtctgagttgagttgagttaatcctctgggttataacatgtacatactcatctgttataacatgtacataataataatggaatgaatagcatgctatgcccaaattttctatgtacgctagaactttggatctaattggtgttgttggttaacttgagaaatagtggtagtggtaatagtagtaatggccgaggcaagcgtggaggccattgtgagcaacacgaggattgcagatccagtaaagacaccatctttgacaaggtaacactcaccctccaaccacccttttccgtatggctgccgcccactcatactggtggcactacccaacaatatcacactgattccaaagcttatcctacaccaccaccaccaccacccattaataataatttccaaaaacaaacaacaatcacatgttagtaaaaggaatttttattttatagaaagaaagagagagagagagatgattgaccaagaaataatcagaagaaaagttgaaaccatgggagttttggcatggaataagaagcaaagcagcaccactacaagattgccaatgatttgagcaacgcataggcaaattaaagcagcaattcccaaccgaaatgaatgagtctcaggcaaataacattgctttccgttcaacttgaggtcctttacctataaaaagaccaattcagattatttagttgaaatatacaagtagctgaaaggctgaatcgttattacataccttggctctctttaattcggcggctacgcatgaagctgcggaacataggccaagggagaagacaacacagagtactggcaacaacccgttttggcgtttttccatgggaacaagagagagaaagagagaagatcaacaaggtttcgcttgcagcttaatcaatgtagacaaaagatataaggaagggtttttgtagtagttgagactttgatctcaagagatgtttcattgctttaaagaagagatagatgtataccctatataatcttcttatttgggcatctttaatttggaatatatttgcaaaaatcaaaacacactcactttattttgaagtagtcaactaacttactcgctccttaatgcttttgttcgtcaattgccttgatggttcaaagaattttgctctgtttttaattttttttttgttttttttctttctaaacataaactttttcttcgaaacaattaatgatcaaacgaatgttgaac

SEQ ID NO: 191057 - DNA, 3496 bp, Cannabis indica
gaaccatttcttcttcttcttctttagaacgatgtgaaaagagtgattcgaagaagaacctctttggtctctctctggtctccttcaacagagtcatcatcggcactctacaattttgtatgtattattctttttaactcaaaaaaaattctcacaaacccaaaaaaaaaaaaacgccattgactgtaaataaactcgattcagctctttattgttcttatttttatttttattattatatttttgatataatataataataataatttaattagctttgttgattcgttgtcatttctcaatttttgtttttttttttaaattttgattttggattttcattttcgttttctccgtagtgacatcgaatcaatttgtttgttttggttttttagggtctttgtttgtttgatcagcgactggaataaaattttgaagaggaggaggaagaatccatggcggtggttgagaatgctggagtggaattggggaggaacgtggaggaggtagcggcggcggcggcggcgcgtggtggtggtggtggaggaggaggaggtggtggaggaaccaacgatcaggatcaaccgaagcacaatggtttgcatcagaacaacaatggtccgattctgaggcctcacgatcagaatcttttcatgaatgttgtgccggagttggggtttgatcatggcgcgaagatcgggggtcctcagtcgatgcagacagtgggagttgggtctgttcatcatcatcagcagcagcgatcgaacggtggggatttgcagatgaatggggatcaccatcatcatcatcatgatggtggggagagctttaatagagatatgagggaattgagggagcttttctcgaagcttaatcccatggcggaggagtttgtacctccttcacttgctaacaatcatggattaaacggtgggtttattaacaatgggtttggtctttttgcttaacaacaacaacaacaacggcaacagaaatgggaacgctaatggcttcaatgctcgacgggtattattaccatttaagtattattgttttgaaattaataacatgtaaaagtatgttttggtttctgggaacaggaaataagaacatgagatgttgagaactctacacgattttcttgctgtttgggtattgtagcttgtgattaggcgtccaaaatgttgtattgagtagaagttatactcatatgtaagcttgttcaagctatgaagtgtgttgggtaaagaagaaaccatgcttttatcatttatagctaatgtgaattggactgtattcttgagaatcaaattgaaaattttgttgatgggttttgttttctcagaggaatagccaaggaaaacggagaatgaacagcaggactagtatggcacaacgagaagatagaattcgtaaaactgtttatgtttctgacattgatcaacaggtttgccatttgcagcttttactttcagcgtttccattatgggtagtaattatttctttggtgtgtgaatgattaatttattggtaatttggacataggtcactgaagaacagcttgcggctctttttatcacttgtggacaggtaattggtctaatctaatgatatatggactgattacagttctgtgtttgcaccatttctcttagtctctgattgttctttcccctctgattgctgaaaaatgatatatgtcatagtagaagtactgtgtgtgtgattttaaatcagatttggaacagtttcccttatctgtttttcttccactgtgaatgtgaaggttgttgattgccgaatttgtggtgatccgaactcagtacttcgttttgccttcattgaattcactgatgaaggtaatatttaccttcaaacatcattactgacctgtcattgtgaaatagtctttagatcggctatgaatgctaggacattttgaccaagttcagttttatatctgattaagcagaaggcgcaaggactgctttgagtcttgcaggaacaatgcttggattttaccctgttagagtattgccgtctaagacagctatagcaccagttaacccaacattcttgccaagggtatagaaaaaaccttgttgttgactattttttttactctggaatgcacctgtcatttccatttaataatctatcaactgtgtactgtttttcattgcagagtgacgatgaacgagagatgtgcgcaagaaccatttattgtacaaatatcgacaaaaaggtgattttcttgtaatttatagttgaaaatggcctagcccaacctatggaatatcttacatgttttatttggtttttcttgtgtaggttgctcaagctgatgttaaactcttttttgaatcagtctgtggagaggttagtgcttttgccaatgctttctctttcttttataagtctaaaatccttgataccatttgtgagaggggctgcatttatatacatctattctaatgcaggtttatcgactaaggctgcttggggactatcatcattctactcgtattgcctttgtggagttcgtaatggtatctacctttttcaatattcctacattctatatatgtgtttgtgtataatgtcctctctttcccattacttttaactgctatatttaatgtaaaaattagggaaggtctattgtgacaagtggggctttcacacgacaattgttgtaataggaagctttattacctgattaaaaatttcattttccatgcccatgcatgtgcattgtcaaaaggaagcattaatttatttataccttatttttttggggtgaaaaggaaaccttactatccttgagggttagctttggtggtgaccctgtagtttgctcccatgaggtctgacccactgaccatatatgaagggaagtagcttgtagtgatcaactgaccacacacactcatcttttgtaatagattattgaatcaccaaattgcttcggtctttctttaggaccatttttccatccttggcacatgagaagatttttcatctcatttggatgtgaccttaccaaccactttttttggtatttacatggagatatgagcctccatatgtaactctaattgattgttgtttactcttttgcaagtctaaagctagactgtggtagaaaaggtccgtttgacttttaatttatatatatattaccaagcataattagtgtcacacaattgtagtcttggctaactaaagaaggatgagtcttttgtcccgtctttattactttttttttattgtttatttggttattattttctcatttttggagtgtgtaagggtgatgtttttgatgtcttttaattttttaattgttcgtttcattactattatttttggagtgcccgtgtgttcttgatgattatgcaatcatgtgtaagaattaggaacacatttaacttttcatatcttgcaagccattaaaacacattacaacttcatcattgcaaaaggttccataaaa

SEQ ID NO: 191058 - DNA, 2943 bp, Cannabis indica
caaatgtagacaaaaacagcgatcactaagtgtaatagcattaaaaaaggcaactaacctcttgccaccaaattgaatagcagcacaaatactactaaggcacactatcatagaaaaaaagaacaccataatctaattttaatgagctagaaaaacttcaaatcaacatatccaaaacacaattagttgcactacctacttcattggacaacactcaccaataggttatgcctgaaacaaaattctaccaataagattaaaaatttcaagccatctaagttttgaaacaactaatttgctcaatttaacctgttaaatctgtaactgactagtttgattgaacaggaagaagtagctagaatacataacaactcttagtctatctttccatgccaaccccacagcagaaaactagtcatcctcaaatgtaagttctaacccactagaacaagcacccattaatctcaaaacctgagctcagagcactgttctagcttgaaaaaataaaagcaactccacagtaaaaccttgctattttgtgtacatccaaagttcaaggtatttttctcttcaatcttagagagtctaatggaataactacatgcattggtttcaaattctgatacaaacctttacaaatatcacaacaattttataaaataagcaatctagcctttgaaatgagctcaaatttagggcaaaaacacaaaaactggatagtaagagaaacccttaccattctagtctagcggttgcgctcggctggcaatgggcgattgaaacctccacggcggttcatatactgccgaggctggcgcttagtcactggtctgataccactaacatcggctccaggaacatgcttccctttggtggaatcaaaccctacaggaatcccaagcttcttcatcatctcaatctcatcctcattaggaccttcatcctcctcaacctctcctccaccacctccgccgccattgacagcactctgctttaactgttccttcactatcccctcaacaaattcagacacagccgccttctgcctatccctctctttctcttcctcagcagtcgattcacgacgatgtcgctttctggaatcaggagacggtgtccggttgtggtgacggtggcgacgacggtgggagcggtcgtcgaccggggaacgtgagcgagaacgatcgggagagcgtgcgtggcgggatctgctacgctcgggtgtacgagaccttttgctgcggccaactcggtcccgatcgcgttcacggtcatccctatctcgccgccgttcccgttctcggtcacggtcacggtcacggtcgcggtctttgtcacgggttcggtcacggtcacggtcacggtcacggtctcggtcacggtcacccatttttagggtatgtgggaagaagagtgggaatgggactccatggcttaatgagaagaaggggtttttaaaccaaaattttcaaaatatatatattaatgtaaacgacgtcgtacttttccctccaaaaaacaaacgacgtcgtattattgctagttctttaaaaattattataattgtcttgggcgtttcacattttatgttgttttctatatcgtggtaggtttttttctttttaatgttttggagtactttagtcttatcccttgtcaattgatagtttgtaaagtcctattcggtgccttcatcattgatctcttattgagcatcaattttccttcctcttgaccattgttattgggctgctggttttggtttggtttcacctgaaactttcccagtgtgtctccattttattccacctgatttgaacctgttttaacttttaagtttgtacctacagggttagtatcttccatttctgcactagactttttattatataaacaagaaaaaatattttcttgaaatatatcatctatactatttatattttaaatctccctttttcctttacccaaagtcattagccttttactctttcaaggtaccttaagaaaacacactttaaagtcctaagttcaagtttttctatactctgatgtgcataagcagcacatccaaaaacttttaaatgagaaaggtctggagatttacttaactatttttcatcgagttttacctttagttgctcttgatggacgtctattaattaggtaaattgctgtcaaggcagcttctcctcaaaattcttgagataatcctgactgaagtagcatacatctcactttgttaagtatggtgtggttcattctttcaaccatccagttttgctttgatgaggtgttgaagaagagagggattaaatatggtggattgggcttatatatccatctatagcccatgtttatttggtgtgaagaaaagaattaagaaaaggatggatgtgtggacaccaaattcatgagggcccatcaaaattagtcttctctttggatggatggtaaaaaatgaacatacctttccttcctcttaatttaccaaacaacttctaagtatacatcaaatccatctactattttctatattccacactttatatacaatacattcttaccattttccattcaccataccaaattagactttctagatgtgtcttacatgttgttacatagtttcacatcaatagtgtgtgcaagatatagaaaaaaatttaatgggccatagaaaaaaaaattaatttttaggcctttagaaaaaaaataatagtattattcaaaatcaataaaaaataatatattttcaaaaggaaaaaaaatagagctcttaggttaggtgggccctaagcacactaagcacaggtctagcccgcctatatcagggtcgaccctgagtgtgtggaattaatattatttataagagtatggactatataaaggggataagttgaagaatactattttttgtatctattaatcaaaaataccctcata

SEQ ID NO: 191059 - DNA, 3459 bp, Cannabis indica
caacaaacaggggttaagtacggcataagcaagaagatgttttataacgcgtgaatggcttatttcatttccatctttcaacttattcaaagtacaaaaaaaataaaagactgttaaaactttcttttctcgttgctgtggtatatcgtctcgtgattaaatataaagatttttgaaaagataaacattaagaaaattatgtgagaaaacaaaaagattagaccagtcaaataaatatcaccaaaacttcctttagaagacatacttacattgatcaatttatcacctgttttctgtatacaaaagaactataaaaaagaaccaagtgaaatcatgtaaagtgaagcattaatgaaaaaggggaagaaaaaaaactatgatattatatttttttaagtaactgtagaacgataaggataaaatcaaacagctcatgtaacacaaatatgattataaaaaaaaatcatggtatcaacgggtacgtatccatttataaaaaatgtcaagaatgccatgattatatatatctaatcatgtaatttcatcgtgtctttcaaaattctagttgatttttcagactgacaaatgtctgtaagttgtaactctataaaactataaaacgatgtgaccgactggcagctgtaagttgtaactctgtaaacaatgtctcctgaaattttccaacaactttctaatcctcttatatgatgaactaattatcaaaacaagactcaagaaaagaaaaaattctaactatataggttcgagaattcctaaatgctggtcaaattcaaatatatttaaatgacagaacgtactttaaaattaatgaactgcgatcaatcacatacctgacacttgaagacaaaccggaaagggaaccacatcatttcatctctgccataaacttctcatactccgcatctgcaccgaaagctgtcttctctgctggaggaggaggaggtggaacagaggaatttgtggcccaaggaacatttccaatgctctgagattggtctgtattagaaccgggtaagggtgcgggaggagggggaggagtgctggtgtaataagatgaataaccataagaagctggaggggggtatgcaggttgaccattgggtggcattgttgctacagagttcccatacatattgcttggtaaagattgagaagcaccattttcggattgcacacctggagggtaactctgttgagcttcacttgtagtaggcggctgtggcggggcaccaggggggcctgcctgcattgatggaggatactgaacaccataaggggccataggttgaccatgcataggaggatacatatttgaaccaggaggaggtggcgggtaaccagcatatggagatggaacagggggtccccatggaactggagtaccagaatagctaggaggtggtgcatttcccaggggaccacctggtgcgaattgctgggatggataagcacccataggctgactagaaacaggaaatgcagatggtgctgatgccggtggtccaggaggcacagtaggctgtggaggcttaccagcaactctaacagcaatagttcggccctctagacgataaccattcatgctagttatcgcggtattggccatttgtacatcagagtatttcacaaagccataacccttgctcaatccggtaattcggtcctttataacctttgccataacaatatcaccaaaaggtgaaaacaaccggattaaagaatcatcatcaagagtaggtggcaagtatccaatatacaaattagtatcatcatattccttaggcttcatcacaggtgatgaccccaaacctggatgcgaagaaacagtaatagcaccactaacagcactgctattattgttagcccacggaggattacttcctgtactaccaggtccaattgctaaggtagcagtttgcttgatggcagactcgggaaccgtcccacctaactctgccaagaagttctggtactcatcatccatcttcttcccggttgtacccttcaccggacaatcaatagtcggatgaccaccatcaccacaaattttacaaagaacatcactcttaaaagttgaagtgcgcgaaggacaagcatattggcgatgacctggctcaccacacaatctacaatactcttcatcccttattgttccattcaaggctgcaagttccctaagctgctgcctcttatgctcattcaaaacctcatctacaggctgcaagagcttctcaaccatccccgccgcagcatcaagcgcatcttgtgtgtctgcctccaccaaaacatgcaaatcctcattctcagacggatcaggttttaaatctctcttctgctgcaacctaccctctttcaccgaacctttaccgcgaattactattttcgcaccggtttctttctccattctcttctgggtattacccctagggccaataatgagcccaataaaattataacccgggtattctttcatgggaatataaagcttcttctgaagcttgggtggcctataatctgccggtggtttaaaagccgggtttcgcttaataatctgagctataatttcctgtctctccttattcaatctctcacgagcacgatactctctagtattaatcctaattcccatattatcatatataggttcaggtgaaggagacctagccccttcaggacgatcatctaaaggcaaaccagaagacaacattctactaatctcaagaagtctactattcaaagcttgaatttcaggatcaaattcaatacctcccataaaatcaggcaactgaatcaccggcttcggatcatcatcagcccaacgagacttcctctttcgcggtccgctacctgaatcaccaccggcaccggaaccggcagcagcagccgtctggttatcaatctcaggctgcgggtcccatctactccgacgttttcgcttactcgtcgtttcttcctcaccaccagagcaatccctatcagtaccattaccagtacctgtaccactgtgcgcgaggccattctctaaaagcagagtcggcggtaaaggctttacggcggccggagcaggctcagtaggagcagcatcagcatcggcagtagcggtattgtccgcatcggcgacggaatcggtattggtcttttcaatggattggtctagggtttcaggtaagggaggttgagcaggaagattttcgtccaagaaacccatggcggtgaggtgtgttgtccccaaaatgttagtgaaagtaaagataaaccctaaaattgagatttggaaagaaagaaagaaagaaaacgaccaaaatcgaagacgaaagagagatattaataaaaatgtttggatctcaaaagtttaatattcacacgttatattctattctattatatacttccaagatcagcacgtgctaccttagtcacgtgtcttagattaataag

SEQ ID NO: 191060 - DNA, 4260 bp, Cannabis indica
aataaataatttgaataaaataaatctatatagtataaaccaagaataattgtaattaataagtaaattatctacttaaagtaattttcttaatgacataaattttcacttttacttaattaaaattattttgtataatttattttttaatttttttaatataattgataagaataagtgatattaaatattaaaatacgaaacaataattgtaaggggggtcataattgaaaagaaaggcaatagttaaaagaaggcttacacaatgtttagtaggagggagaagtgaagggatggaaataagaggtgggaggagataacaaatcctttgttttacaagagagatttaaggagagaaataaggggtgagagtatagtaaatccactccaatcccaatttagaatccctctaataatagaagcattggaactatctttcttcaattattgtaaattataaaaataccctcaacaaatattattaaaaataattataaggataaaatagtaactttaaaaattatagtaattatctattctacaatcactccatctttcctatcaaataacataaaaaaattattactctcctctccttctcttatattctccattcttcattgactctgaattaattttaggcttccttcttcctactaaacatagccttaagcctaagtgacctaccctagagtcttttatgtcatatgttcacaaaaatattggttggggaataaagacaactctagtaaaaattatgtacaaataataacttaataataagagtaatataaacattaaaattgcacatttttttacatacaacaatataacttttactataaattattatagataccatatgaatattattattgttaatattaattacacatgtaataattattaataataaaactaatttattcctaatactgtacttacataagcaactaattcattaaaatattagttaacgccaataattatgatatcataagacgatttttattagattgcgtaaatgttgtattaaaatctgttaaaaaataagttaatgttatatttggtttaaattttacaagtgtatttcaatacactagaagtaaaaaaaatatttaaatacaaagttgaaaaaattcaatgaaaacattaaatttttgttaaaagaatataaaaataaagtataaaatattattaattatattaatgagtgccaatctagtacgtaaaaaataatatttatttaggtgtcaaatttggtttggctatattttgttttaaatttgacataatttttaatatgtgttaaatttagaccatagtattatacaccacaattaaaatttaattttatgaatatgactaaaaaaatacatatacaatatatttattcattaaagatgattaaggagtgaagaattatttacctgagaagaaaaattttgaaaaggtgcaagttcactaggagtgagaagagtttcctttgtgacaagattaggataaaggctagtgaagggattcatcttgggttcaccaccatatatttgagacccagccagataaatataagttccacgcttaaagccaataccggctagaacaagagctgcttcttctggtgtcaatggacatctcccaagctttcgcaattctactggagaaataggcctgttacacatgtgatattgcatttttattattggtatatgatcaaagttcaaaaactagctagctaccttacaagcattataaaccataacttgagatcatgagaaaaagactagcaaaggaaagttgaaatacatactttgagttcttcaagcgctccataagcaatggaaaatggatttttctataggcttggagttctcttctttctctctctccaccgccaaagtcacagaaggagtaggcgaccatgtcaacttcaaatcttaaatgcaaggcaagatatttagaatggccacttactgtactactatcttctcttattttggtattgccaaatggtaggaagtttccaagcaattgtttgtccaacaaacttcttgcagcatcatattttcgaattcttctaactaatagtgagcctactttttgtatcttcggtgaaaacttcaaagcgtgaaaattacacttgcatctcagtttctgcgagtaatccaaatacattgtttatatcataaatgttagtcatgtttgatccatagtatcattataaattgaaacactacttaataacttcgatggttaagacaaaagatcgagtgagaaatataagaatcaaaaggagtataaagttaagctattgaacacaccatggcaaaaatgaggttccgtatatgttataagaacaactttaaacgtaggtaattaatttcacagtagtcgcatggttacatagtaggtttgttctgtgagattttttctacattataatgacgacattgcttatggtttttagctttagaagagtaaatgtagagagaaaattaatgaattaaacttcatcattcatgaacagaagttatagttggaacgtatagagctgacacaactacaaaagaatattttagcatcgttcaacgttgaaaactgatgcaaaaaaccacaacaaaattatttgtcagtttagaactaataacattttctgtctgtttaaaatgatatattcaatatttttgtcggtttataacagacgccacctagcgtcagttagaaaccgactcataaataagagaaaaaaatgtagatttcaatcaaggccatattcacacataaaaaccctatattttaactaatactataaacctaaacctaaaacacaattagccacttgcagcccatttcacactctctctctctcttgataatcaacaaccccaaccgtgcactgcctcctccgatcgtcctagtcgtatgcaacctccttcgatcatccaatcgtgcaccccttcttctgtctatatcctatcttgacaccacctctgcaacccactcgtcgacaagccaactggccatgaatggcttctccctaactccctcttctggacaccgtgttagcaccaccatagtaaattttctctttctctgctctccatttctttctctctcgtgaatgaaatattccttttgtacagttggggacaatgatgaagatgacaaccaccgtccattttttgggtttcgacctcacggcggtgactgttgtattttatattaggatttattttatattttctttgtacgtttatttgtgaagatctaaatatttatatatttgtgctttagatctgtaaaattaaaatgaacattaaaattggtatttgttttagatttgggtgtgacctcagtatgaataactgaattcgtttttttaatggttgtgtcggtacaaatctgacaagaatgctataaaatttgacttttacactattagcatctgctttcaacactagctaatttttcgtaccgactattgaaaattgacgcaaaacaatataatttgcatctacgatatatacgtcaattttaacaactgacgttaaaagaatttatgtcagttgcaaacccaccaaaaaatcatatttgtagtagtgtcaatggatcttatatacaattcagtaacgagtaacaaacttttacaagtttttaataatcgaaataacaaactctcacacacttgcaatctcactaactaactaactaacactctcactacgaaagttaatactccccctcaagatggagtgtagatgttcatcaaacccatattgtcctttagatattggaattgagtaggaaacaatgccttgtaaaaatgtttgcaatttattctttagttgatatgtgtgatgtcttgatttgtccctgtttaatcttttcacgaacaagatggaaatcaatttcgatatctttgttctttcttgaaaaatagggttagatgttatgtgctggctgtccgattatcacaatgaagtattacaggttccttgtgataaatctaaaattctttgagaatggaaagaagccaaacgatttccgaagttgtgttagccattactctatattcagcctctgctgatgatcttgaaacaatatgctcttttttgcgtttccatgaaattaatgatttttcaaggaacacacaaaaaccagttgttgatctccttatatttagacaagcagcccagtcagactcagtgtaagcttcttgcttgatctttgtctttgcagagaacaacaatccttgtccgg

SEQ ID NO: 191061 - DNA, 1410 bp, Cannabis indica
tttttggggtcctcatttgtaattattacattgaaatcatgacagtagtggattatgttttgggctgtatctctttctcttattctagattaatatgccttacttactttatctacatttttcaaagtcccttgtgggagttagttgagatggaccactcaaaaagacaaaaaggcaaaaggttttaaaataagaagagaagaaggtttccaagatgaaattcaagtgtgaaattaagattgattttgatataggttttgccttttgtctcggcaaaatggttggtcatagaatagaaaatgaaagaaaaaaaaagaaaaagaagaaaaatgtgtcacaatggcatgtttttagctacacatgatgatgagtggaaaatgttttctccagcatgctcaagtgcaaatcatttccctcttgaccccatcattttgtagaagagttttcttttttcttgctttatatatcctcattataatttaatcaatttttttttacttgtcatttcacacagaacagtcccagccatcacccacaagtaaattgatttggttaaaatatgtgtaaaacagttgaatagttaaaagagatatttgagctcaagctctctcaatagtaaaagaaactcaatcatacatacatgaatgaataaatctactttcactcttgtttgtccatatgcagacactactggatttgaactggaggccaacttcttctgattattttagtgtcacattcatgtactagagggaagcatttgtggggttctaacatccatgcttattagcataaacagaattaaaaaaagaaagaaaaaaaaaggttaatatatactatttttttatttaagaaagtcaccaaactttttacctgcattacactaaaaatataatcataagcaaaagataattaataaattttcataaagagaagatgaagccttcggttccattccatgtcaagataagaattatgctcatgccattttttttgagcacctttcccaattaaggtgaccacaaaaacttttcagttcccacctttcaaagtgacccaaatcatatatactacaaaacaagtatttttgtttttgttacaatagtatatgtatgtatgcaaatcttagcagtggattaagtagcaaatatgggaaagaaacagacataatgacatgtgcattatgcaatctgaatatttatatgtgtaggattatagtatgtactgtatatgcttttcatttattttggcactttccccttacgtcttggaaactaaatactatagtgaccttacatagctgtgaagagaaccaattcaattcaaacatggaatattagagcgtaatgacctactatggatctatatatttctatcaaataacaagaaccaaaatagtttattatccat

SEQ ID NO: 191062 - DNA, 2892 bp, Cannabis indica
gtatgacatttatgacattcactttctgtttatagaatatagattgtgaacctctgacatgagagacttaaactgtatgtattgtagatgacaagaagaagacagattgcttttttcgtagttatatactgaatgctttttatgtattgcagatgcaaggagaagataaggattgcttttttgtattatatattgagtgttcacggacaaggtcgcacatagtcttctgtacatcagtggctgctctgcgtcatctatcttctatcttgcgcatacttggtattgatgtttggacacttcatgcccagatgcagcagcgagctcgattaaggttcgcttcttgtttttgtctcagaacactatacacaaacatatattttttttaataatttgttgcaacattttgcttgacaactctaaacctttacgccagaggagcactctctgtaatttcttttgttgtagcctagtacctatttgcatagcctgacatgtactttctttatttttcttgtttcatattctgctcctcacatcatggattcaatgcaggcaatcgatcgttttagggcaaatgagcatggtatacttcttgcaactgatgtggcagctagaggcattgatattcctggtgtgagaactgttgttcactatcagctaccacattcagcggaagttagttaaactctgaatcttgtttatgctattttatggatcttctgtattcatacaccatatttaggtttttgcattattctgatgagctttttccataatctccctccttttttattaggtttatgttcatagaagtgggagaactgctagagcttccgctgatgggtgcagcattgccctgatttcaccgaaagaaacttcaaagtttgcttccttgtggaaatccttttctaaggtttttgtttgcagtggtttctttctgctctcattagctaaagtgccttaggaatttgagattaactctgtaaatcaatctcttctaaatcaaagactgtatagtttcaatcttaatatatatatatatctttgtgcctttaccacaggaaagtttccagcgttttcctttggagaattcatacatgcctcaggtcatgaaacgtttatctctagcacgacaaatagacaagattttacggaaaggctctaaggtatttattttggatttgaattacctcatccaattccttaattaattatcctacccattacagatctttgtgtgagtagcaaagtttttcctgatgtagctgcttccgaaacaggctcagtgttgtgtttgaatttttcgccaactgaacctaacttcgaattaattgatccatcattatttttcaacttattacatcttccttttcttcacatttcaggagaaggtacagaaaagctgggtcgagcgaaatgcagaagcaattgatttagtagtggacagtgacgagagtgaggaggaaagagtgaacaattctaagcaaaaaaaagttacatccgcaaatttaaacaagttgcagcaggttattttattatgaaacattactatttcttgtttgtgaagctaatcatttggtgtatatatttaagatttataaggaattgggattttctcagtatatttttctaattttaatctacaggagctaaatgatctcctctcacgaccgctacaaccaaagactttctcacatcgctacttggcaggggtaaccatctttaactttctttggaaacaacattatttaataatctcctaagtttttggcaaatataccgacacatacgatgcttgtctattttccaggccggtgtttcgcctcttctacaacatcaatttcaagaattagcgaagcagaaactaagtgttgtcaaaaccacaggaggacaaaacaaaaggaggaaaatggttgttataggtcagaattgtgtggaaccactccaggctcttcggaatgctggtcaagaggtattgttacgattattgctttcttattatgtgattgagtgacggcgattacactgcaaattacttgttaagatcaactgatgaagatgacaaagctattctattttcggattgtttagtctgaagtttgaacttttcatatttttcttcgttctctgttttgtaggtacacatggatgttaaaggaatggcacaaaaacgtaaaactacagaagaactgcggaaaaaaaggaaagatgagaagaaacgtaagctctttattttgagtttcgtaatcgtttaatatttagctatccttgctttctttttcgatattcaacggagaaactgatgcattttatttcgatgttcttttcgcttcaggtttgagagatcaaaggagaaaacagaagaagaagatgaaagggttgtaataaggtgaagtgttttgaaacataaaatagagtgagagagattcatcaaaatggtatttccaagcaaatatataatcacatcaaatcactggaaattttgcaaccattttgtatattattaaaattataaattttgatgctttaatttggtatttattcatttttactttaatttagtggaaaccatagatgtttgttgtataatttattttctcctttttcattgaagttcgataaataatttcaatataaagttctgttttttattggataaatacccgttttagttttgaaaattcagtttctttattttttgccaaatttactaaataaaacattctttccccatttttattatttagtgagctttttgatgaaaatctatattatataacttgagaagcttgtggtgtgacatttataaagcattgttattgttaccatcaatgatgttaaatactaaaatggccattctcattctatggatctttttcatttttaagtttc

SEQ ID NO: 191063 - DNA, 2975 bp, Cannabis indica
ctcaatttggaatatgcagacatttgtctatggtgatttgtaccggtatgacattgaaaagcaggaatggaagttaatttcgagtcctaatagtccacctccccgcagtgctcaccaagcaattgcttggaagaattatctctatatctttggtatacatgataaaaacataatattcgattttgaaatgatataagcattaggatatgtgtgaatcattatttttgcattgtgtggcattaggtggagagttcacatcaccaaatcaggagaggtttcatcactacaaggtgaatcctttcatacatttagttcattgtaaactggtttggatgtttgaacctagctatcaaaatgttttggggtaacgagtgactttgtattttggatctttaggacttttggatgcttgacctaaagacaaatcaatgggagcaacttaatttaaaagggtgtccaagtccgcggtcaggtcatcgaatggtaaatattaattctttttacctgacatttaaaatatctggatgtcttttgccagtaagtaattattatttatttatggcctttgttattttgttacaggtgctatacaagcacaagatcatcgtttttggcggcttctatgacactcttagagaagtgaggttgtttacagattttatctagtactttgttcttatcttagatggcctagtgttttttagtgtatgtatgccattataattttttatttttttaagttggtactgtcgtgaattcaattaggcaaccttaattgtaaatttgattgtcttcctcctccatgtgaataaaactatgcccctgctgaaactgggaactaaagaagaagttaaatgcagatttttgcaaacaatgactagtctagtagacttagattagaaagaaaaaaggaaaaaaaatgaagaagaatgattgaagatgcatgttttagttttatttttattttgcatggtcagttaaaagttggttattcatgacattgaattatcattgagcaaaggaattcacaaaattcagcgaatcagaagttcgtattcattcaacacatatttcaacaggagaatcatttttttgcttagaaatattcacttttaatgtttgtcattcctcgttttgaggttttatgcaatctcttagcttataatttttgctgtaaaggttttatcctacttgggtttggactttctacttctatttatagtaactgtattgctctgctgtatgagtggtagatgagattctgtactttacttttgcaggtattttaatgatttatatgtttttgatctggatcaattcaaggtacatataactcgattcttttacacgaagcaagcattgtcatttgctattgtattatggtttgtatgttaatgaaaagttttgttttgttggaattttagtggcaagaaataaagccaaaacctggagccatgtggccaagtgcccgaagtgcttttcagttttctgttttccaggacgaggtgagcacatacagatgctctttcattatattaggcagctacactacactttgctccaagtcttgtgtcgtgcacatacatacccgtttatgtttaacatgacctcgttgcttgctataacatccacaacaaatggttactatatttgcctctttcgacatgcagatttttctatatggtggttattccaaagaactttcatctgataagagtagctctgagaaaggaaatgtccattcagatatgtggtcccttgaccctaggacttgggaatggaacaaggttcgttgctaagagagaaaaaaatcaaaccttattatttagccatgcatttttttggtctcataattttgttgttttattgtattttcactaaaataaatggttcatatgtctggttgtctctattataatggaataggtaaagaaaatcgggatgcctcctggacctcgtgcagggttttccatgtgtgttcataagagacgagctgtgctatttggaggggtggtggacatggaagttgaaggttaactttatcttttatttttacctttttatcttatcgttttcacaatagtctaaaactaagcttttgcctgaatttctcttgtttattgtgctgtcttccttgcaggtgatgtgatgatgagcttgttcttgaatgaactctatggcttccaattagacaaccgacgttggtaatggttgaaactgttttaattattttccatgactttaaaatgatttgagttatttttcattaaaaaaaaactcattttgagtttacaaatacgaatttgttcatttacaaatacaggcattcctgtcaactctgagaatgataattttcttttcgtttcaggtatccattggagttacggaaggaaaagtcaacaacaaaaaaggtttgacaatgtgcatttatacatggatatctgataatttcagtttgaatagatagaataaaattgatcagtttatttggtttctgttgcacagctaaagaagatttctgaacaaaaatttaatgacgatgaagaacttgaaacaaatgacaaagatgagaaatctgagtatgatgaggcatgtaacatggaaatcaacattgaacagatgtcccagcatatgaacacaagcatggccgtcgatgaaaatggaatatcatctaaatctgacttaccagaggtttgttgtcctgtatgacatctcctaccttggtccttttagaaatatccttgaattgaattgtaaatttggtttgaactatttaggtagtgaagccctgtggacgcattaattcttgcatggtcgttggtcgagatactctatatttatatggaggcatgatggaggttaaagatcaggaaattacacttgatgatttgtattctctaaatctcagcaaacttgacgaatggaagtgcatcataccggtttgtaacagtcctttctgtaaacaaatgtcataa

SEQ ID NO: 191064 - DNA, 2072 bp, Cannabis indica
aaataactctataagcccataataagattggtgtaaaaagaaaaaacctccaaaatgaaaagagagagaaattatatctgaaacctattagggcagaacaatagtgttgttaagcattagtagtgttcaattatatcaggggctatcttcgtttttttttttttgaatacatatattatatagatattaattattatttttttgcatcaacataattctgattattagttttatttattatttttatgatatgatcttaataacataggcatgtatatataagaattggagaactgatcatattatatttttgtttaattaattatgcattaatttttatttttaattatatatattattatgaatatataaataggtgtgatcggataatttggtatggagagggattaaagcaagatatttacagtagaggggaatcaaaattgtcagatcataaacctgtgaaggcaatattttcagcagaagtttgtgtgttgaaaaatcttggaacattccatggtttttttctatcagaaaggtttgaacaaattaacaccaataatattgacattgatcacatatcttcccatgatgatcattttatatgtaataatattgataagtcaagtttgttttaaaccttttatatttttgtgtgtcctgaaaccttttctttttaaaacaaaaaattaaaacatattttttttctttcttttaaatcttctatatataatgtataatatcatgtgtaatgtgtataaactagagagataatgatgatgagtgtacagtgaagttggttataattgtttgaatatatttggcaatgcttataaatatatttatgtttttttatttctttttattcaaaatttattgtatatatcatattaattaatttaagtgtgattatttttttttttttttgagaaaaaagtgtaatatatttaaagctatataaatataatatatatacatatattggaaattgataagagaatccttaagatgttaaaataatattcttagtgcactttaatattagttcttacacaatctaatttaataaataagataaagaactgttaactaattagtaattacaatgtgagaatcatagacaaagccaagtgcacccaaaaaaaaggccttggcccctcccaaattttttattttttattaaaattatatattatttcatataattatactcgtaatatcttaaaaaaactacattttggccccttaatttatatttgacattttgccttagtgttggacaccttatataagatacctagtagcaatatatatatacatatattttgcatgcatatggactcatttacatgcccacttagaataccttagaatccttggtgttgtatactaactcccccatagatatatatatcgattgcaccttcaattatattaattaactatatatatatatatgtatgttaaagttataaatatacttgtattataatgagaatcacatgttaagagtttttattagttgagttttgggcttgtttttttttctagtgaaagcacttataaataatagttttctatatattttatggttatcttcttaattattctcagttgtcttactaacgatatgtagtagtaggtataggtaagaagctgttatgatatcacatatgtcaaattttgcaatatcttaatggttattaaattattatgtacgtgtgacatgcatttaatttgtcctgtgaaaaaattgaacaatttaattataattaagctctaattataaatgatataatataatatttaaatgatagtggatacaagaaccatatatatagcatatcggttagtggactgcccatatatatacatctttaaataaattttatataattttctttccataaaatagtttttctttattgtattatcaaagatatggtcttatatagttatataaacacaagtggaagaaataaatattagtgtaatttttcaccctttacactaccacagttttacaataagtatcattgcttataaattcaaaatgtttatgtggctgagtt

SEQ ID NO: 191065 - DNA, 858 bp, Cannabis indica
aaattaaataaaattaaataatagataacttgtaaactaatactttcttattttgataaaatttaaataggattaattttattaaaaattaaattaattacgatacttaatttaatttttttttttttttttgcaatttgttactaaataagattttcttaacaataatttatttttgcacttaaagtattaaaatacttgtagccaaactctctataatttaaaattattaaacaaattcttattaaaaaaataagaattttagagataattttagactcaagatttatttttatgttttgtttaaaatttaaaaatgaaacaaatgatagtttaaaatctaataaaaaaattgaaagagttaataaaataattataaaagtaaagataagttaattttttttcacgtgctctctctcctcctccttccctttttttcatatttattaaagaaaattttatataaaaatatatctttttttggttgttgaagattaaaaaataatttttatttttgaaaaactttaatatttttgctacaagcaaaactaaagatgagatcgaaaaaaagatcaccaatattaaacgatagcctttttagcaataagcaaatctaaaatgatagatattaaaccataatatacaatcaattaaaactattagccaactcaaacttatatcagttaataaaaatatatacaaatgtgcaattgtactttccttatatcaattaaggtcgtatcatataatcaagctttgttagatataggaaaaattgaaattggggcattttatttgcttctggaaaaatatgccttcaagtgtagctaccgcaatatttgaatatagattagtgag

SEQ ID NO: 191066 - DNA, 2842 bp, Cannabis indica
ttttttatcaatttttgttatgcatttgagatttgattctattcctattcttatattttcattcctcccaaccaaatgccaccttagtcttaaaaagagtgcttgttgtaataaattgaagggtgaaaaggtagcaggaaaacactgtaggctgcagagttatgaagatggtgtatgacagacaatggtattggtattggtattggtattaatataagattcaattcccaacttcccaatcacaaacccagttcagcaaacgatagcaggcagaaagaaaacttgcctagattcatccgtgggagccataacaatagcaactgattctggtaacataacctgaagatgtaaaagcaaaaactttaattaacagattactaaatgatatttaatacatattaaaaaagaatgacagaacagaaaatcaaatcagcaaagaacttggattgcttatccaaatatctcatcaataacataataacagtcgccttatttcacaaaaaactagaaaagtagattcttttaatataaattgaacattcctagtttccacaattctctatggccctacacacgtctccaagacttccaaataataatgtattaagacaagttaccacactagttatctgccgcattattgtcaaattaatgcagactcacacgcatacccaaacacgcacaaagcaaaaaagcaaaatgcaaagtgtaatatttcattactgctagtaaaaagtaaccatctcttttagtttatagtgagtaacaaaatacacaaactttttaactctcttttttactatcaaagtacacaaataaaccaaaaagaatttattacctggtatgagtaatgagtgtgcagatcaacagatgacataaaacatgtttgtgttggatgtgtctgaaaaatgaaaatcgagagagaaagagttaatacgcaaagaaacacagctgtgtaaataaataataatcacagaataatgatggaagatgactatgcaaattctgtagaattttccttaaaaaaaggagacactttaataagtgaaaactaacgagatgaccatactatatattattgtttttagtaatttcctcgaggagatcaaacattttgaaatccaatccaaagatcctcttcattcttacttgtgtcattgctcttattatatcaataatacaagtctctatctttgcctaaatataaaaagggaaaagggaaagagtctgcttcatcaggctttgtgtgcatataaaactaactacatatgaacatacatattacataatgtgtatctacctgtttacatgtatctatatatttattagagagagaataaataatataactttagttccactcgagcctaatgaaacttacatgaatccatccaagaggaaaaagacctaatctctcttgaacttcaaaaatttcttcctcgttcaatgtttcacactggaaaaaaaaatatatcagcttgtcaactatacatagagaaatgcacgaattcttataataacttgtaaacagagctttttgcataccactgtagacaaaataatttactcaacaatttttctctatactattagaattattgtaatttttagatatgatttattcaatgcagaaaaaatacatctactcacttcttatgagaataaaacaatagtaaggtttgaaggcttaaggctggaatgtggtcaaataggtacgtatctataacgaaaaagatgttgtagagggaaaaatattttcatacgtaaaagagcaaagcataaatttagatgtgaacattcttaccgaatcagaagttgactcttgcttaggaactattaatgtagtaatgtagaaaacattcttttgctgcaggcacagaaatatgagaatgtaagatccaaaagacattatttttgtgctcccaaaaccattatacttctatcaggaacagaatcatcctgagagtaaaatggggaaaaaaatagctgcttcttaccaatgaacctgcaagaataccacaagtctctaggttttttgctgtattcgctcgagctaatctcaagaagtcctccatcaaccttacaggctgtgaagtacacatataatcacaacggcaccaatagttagaagcaggatatatttgaaatgaaatagagaatgtcatgaagagcataaccatcacagtcaaaaataatatttttgtaagtgtataaagaaaatcaaggcttacaacatgtagctgtcgaaatgaattagaattgggtatcccatcttcagaaggttttgaaggaccaggtcttggatctgcaacttttgatggaggaataggtgcaatgttctgctgtacttgagcaagaactgggggtgggcatggttgatggatattactcagctgaaaaatatcctcgctcacttcattaaacagacgaggacgtaattcctcagttggatgcggccatcttccatcgtttaaagagagcactgcatccattgaagattgaattccacctgaattgtcatcttttactgccaaatcattttgtccagcctgattcagcctttttaacataggatgacaaaaagtagaacatgttacaagcagccacaaattgtacttgagaaaaccacacaataactaaagggtgttatctttggaatttttgttacacttctttgcttagaaatttgtaaaaaagacaacacatcaagcagaaagcaattaaaagcagataaactaaaggtaagaggttagtcagaaaatcctaaaccctcgaaatctataggaagtttactagcaagcgttaaatactgtactgctgggatactgaacctgtattggag

SEQ ID NO: 191067 - DNA, 2634 bp, Cannabis indica
ttttatttaagtcgggtctatattcggggtaagattcgggttcaggtcaaaggtcgggttcagcgatagggtcgttgggggggggaggtttggctcggtctctcggagtctaaaatattaattaataaaaaaattgtttaaaaaattatggaaagaaacttttttttattttaaaattttgatttttaattaaaaaattaaaaagtgaaaacagttttatagaacatattttttaaaaatatttttacttttttaattttaaaaacaaaaaactgattaaaaatatattaacaaacgctaccttttttaaaaaaaaaattttttaccttacattaatgaaaaataaagggaatttcatcacaagtatgttaaaagtataaaaatagaaatgaggctaaacgtatatatcacgagacgtatcgctcctcttggcgattattcactacaatacatctgtttcacttttatgcatgtggctaataatatgagcaattaaatcgtatagtcaattcaatcgatttaattgttcacctttattattattttctttatagtaaatgactagagagcacaaataattattcattgacaaattatgaagctcatattggaaaacattaaggctacctaagttaaaaagaaaaaaaaaaacgcgttcatcaatatttgcattaattgaatcgtggaaatgagcatttataatatgagctagagctcataaattaacttgtatgttacatatatagtagcattaattatttcaaggaaatgacttgaccaataaattattttgtataattaagacagatgaagagggatgatatatgaatatgatgtggtagtcgtaggtaggggacgttttcatgatttttcacataatagtattagtttttataaatagttcaacacctatctgaataatgttatcctaccctctcttctgctacgtcactatgactcaattaatccaattcatagacgtgaccatgcagcggtgaatgctgaattttgcagacccaatctactacacaccacacccactatctccatcattctctctacgtgtgattaaccctgcacatctatagtagtctttcttattatttttttttttgttcagaatacagctttctctatacctacaccgttttgttgcgtgatatagtttcacggaatgtattctacattccgtagtatattagatggtctcaggatacactagatggatctcaaaatatgttattattttttaaccttaattacccatagatcaatctcagctctcagatcaaataactcctcatttaacggctgttgtacatcacgaaatatattccgtaaaagtacatcaagagacaaaattgtgtcccatcaaatatattgtatatatatttatatgataattctgtattggtgtgagagtgagacggactggaaatacaacagatgtttataaaataaataaataattaatttagagtgagagttcaacaataatgtacattattcgattttttttttctctttttttttttaaaaaaaaaaatgtacaatacttcagattatatggagcttacttccgtacatgtaaatagaattgtaaataaaaatttatgtgtggaaggcacatatagagttacgtacttatatgtgtaacagtaacaaagatatgaatcgatttatgtatatatatatatataagaacagtgcgtagtgatataattgagggtgtgagtacgaaactgtggttttgtttacttgctgtttcgtcaaaatatgtatacatataaatatttatttattatgacgttaagctactattttcatcccttaaattaggggaatgggtttgatgtgtacttattttacactcgtacatgcctttacagatgatattttattcattttcattatagccaagaaaataagttaagggcgatgcaaggaaattattacatgtgacaactttttaattttgtggccgaataagattgccgtaaataccactttctttgtcaaacactgcttttttatttcgtagaacatacaataataataataaaaaagcattgtaattacatgcatttatgtatgtatatatacgtgttatattatttatgcataggatcagtcttttagaaattaattatttaactttatatcagaaattgctttactctcctccatacatctttttattacccttgtaataaagaaagcaaaatatttattttatacataaacattgttttaaaaagaatgaaactccaaaaataacacaaacaaatcaaagcatatttttaatactccttcatcttcttgtaaaaaaataaagtaattaaattgtatgtccgaattgtgagactagtttattatataataaacgtttatacacaaataaaaatatagtcgggatatataaaagtgtttcataaaatcaaagcctacaaaaaggtggtgtagccagggacagagtttcccgcaaagggggtctaaaacaacagtggctcagttccttagtcggccattaataaggagtggggccaatcgttacctaacaatgaaaaactgaaaaaaaaaaaacaaaaaaggaatagacataacatacatataataagtccaattttcttcttc

SEQ ID NO: 191068 - DNA, 1699 bp, Cannabis indica
gtaagttttctttattagctccttttcaaattgattcaaaattattgctttttctctttttcttctgaagggaagagaaaaaaaaaagcactgccaaattgtggggttatgtctttttcttggccaaaaacaaagatattagtctcataattcttcaaatcccatctaatctgtttactgataatatgtggtgtaggtgattcaaagaagacagaccatttggttgcactagatggagctaaagaaagacttcatttattcaaagcaaatttattagaagaaggctcttttgattctgccatcataggatgtgatggtgtttttcatacagcctctcctgcatttcttttagccactgatcctcaagtaaacatatgtctatatcctatatatgtttcagcctatataaatgtttggcaggtttacacaaacaatgacttttggttttttgcactacatattatcaggcagaaataataaaaccagcagtgaatggaacactgaatgttctgaggtcatgtgcaagagctccatctgtaaagagagtggttataacatcttcctttgcttcagttttactcaatggaagagaacttacctctgatgtggttgttgatgagacatggttttctgatcctattctttgtcagaatttgaaggtactcttgttatttcatgcttataatatcttttgtaatttagctgaacagtaaaaactttttctttcttaaagtttcccaggaaaccaattcaccttaattaccccataacagcctcaaaacctttaatctttcatttacgtattgagattgcatcaactcagtttacattatatttttattcctctgcagctttattatccactttcgaaaactctagcagaagaggctgcatggaaatttgcgaaagaaaatcagattgatttggtcactcttcatccagcattagcaattggtcctctcttgtcaccaattgttaatagtagtgtggagttgattatgaatcttgttaataacggtacagtttggtacttttcactccatacatttgtaaaaattgtaatcacattatgatatcatgatcattctactttgtttgtatatatatatatttgtaggagctcaaacttttccatgtagtgtttgtggatttgttgatgttagagatgttgcaaatgcacacattcaagcatttgaagttgcttcagctagtggaagatactctctagttggatgtgttgtacacatttctgatatttttaagatattgaaagatctctaccctgctttcagtgttcctgaaaagtaagctcacttaccatagataattatataattatattcacaatttaaatttcttattactaaatgtcacttcaagttacatctacaaacatttagttacaagttgttagtagaatatttttatagtatgaaattgcattgctttgtaattaatatatataatttaattttattactattattggtagaaatgaagatgaggctcaacctctaatgtcaaagtatcaagtatcagaattgaaagcaaagagtgtaggagtcaatttcatcccattggaagtgagcttgagagacactgtagaaagcctcaaggaaaaggggttcttcaatatctaatatctcattaacaagcctatatattttattagtttgattgtcgacttgtaattaataat

SEQ ID NO: 191069 - DNA, 3379 bp, Cannabis indica
ctagacaaattcacataataacaaatagaaaaacttactgactataaaatttatataataatttacataaaaattattagaataactcaaattataaattcatactaaaaaaaaaaaaaaaaaaactcaaattataaatcttttttaaaaaaattaataaataatacataaaatatttctcccatatatattacataaaaatgttaaaatagtcaattaattagttttttttttaaaaaaaaagggtcaactaattagttttagtgacttagaaaattagaaatattgtaaaaaaaatagtgtggtgcagagcataatataatggtactagaatttgttttaataataacaaattataagttcagatatcattttcaaggtttaaaaataatttaaaatcataagagtttttacataaatgctccttattgagttttatcttatttcacaattaaatctatctcttttaatttttatctcaaacaaacaaaaaaaaattcagtcaaattattgagttttatatacaataatgatttgaatctttaaggtttttctttcacaaaattcttatttttatatatgaataatataaatttgttggaaaaaagaaatatatgaccaataaaaatatagacctataatatttataaaatttggtgtttattttattttcataaaatctcaaaagtaattatgaaaatatacaacttaatagtcacttggaggagattttttctcataaagatttccttaatttagaaaaatatgtttttttaaggtggaaaatataaatttaaaattcattttaatagtctcacattcatttttcttaacttttggccaaaacatcaacctacttaaaaattaatttggtaaccacttgttttgcaattatttctatatttcttactcataccaaacattttgaaattttgatagaaaatataaagcaaactcaactaagaaggcaggaagtaaaaatcattttgtttataatttaaataaaaagagagaaaaaataatatgatcatataaatcgtaattttaaccaaagtgactagtatttctatgatatgacgtcttatgattagttagcgattctttataatctttattaaataaaaataaatgatactcaatattgaattatactaataacaatattacatcatcataagagtattagacactaccgataccttttaatatttcttcaaacttatgtaggccaataataagggagtctttatatttaggagagttttctatttttggcagttgtataattttttatttattattttttttttgtaagggcacttgtaagttgtataaattatagctcaatcaatttttctaccgatgatgtatattgtaattataaaataataagtttttttttattaaatttataaattttattaataatttattgtgccaaaaaaaaaagtttgaataacattttgcccaaacaatttatatatactagataatttcattaattgaggggacaataaatattataaaaaaacattaattagtgaaaaaaatatttgaataatttgggagggataatttcattagtaaaaagatattataaaaatgtggtgtggaatagagggacaatagaaaacaacccaaagaaacattgatgggatataaatgggaatctcttcactttatttcagtcacactcataatatttattcaatattattactcatattaatgttaattttaattagtagctatgaatgcaatataaattctacaaatcacccataattaagcaaagtgacacacacaagtgttttttttttatagatttcaatcaattcatgtcactattttctaatgaactctttgttattattattattgagaaaaaaaacattaatttattttgtaagttgattacaaagttaacctttacaaagaattatttatttaattttgaaagaaaaaataatatacttttaagtgatgcaaataatgaaaatgattatagccttttagccattgtttaataaggtttaatcaatgacattgtcatatatggctgaagaaagagattttagcataaattaatactcttttctttgacagttgagtccttaagaaaacaattaattgaatgattttgtttggattattctatacaatattgggaaagatatatttgaaggtgaacataacattttttttttaattattcataagtaaaaaaacttagaatttgttaaaaaataactaaaaataaggttactatttttaaaaatattgttatcagctgctctataatatttaaggtggcgttttttttttataaaaaattattaaatttaaataaatttaatttaatattaaattacactaatcgtatcttttagtaattcaatgaccaaattgctaaaaaacaaataaaaaaaatggaattggtcacattgtttaaaggagattatttataataataatatgtgtacacataaattatacaccaatatgagatacactgatataacaagtcattttttgacaggtgtcacttatcttaaaaaaatgagtttttaaaattacttctcatataaatgtgtgttaagtttgtgtgtaaattaggtgtgcactcattactggtatagatttaattttattttaaagtgttagattgaataaattttgcacatgaagcccactgtgatggctataaatggtgtcatttcatacaaatttttattagcccactttgctcaaaattcccactcttttgaatgagataatttttgtagacaaaacccatttcatataaccaaatggtgtcatttcacacagattttgatatagctttaatttgatctcaaagggtatggtcattattgcttatatgcatggccattgtaccctaatgagtaatgctagaggcacataaaagttacactattctttttacaattgtatttagttcttattatagataatcatataggagaattatattatttttaatatgttgagattaatttcatatgattgtgtgtataaattaaatgtgtcacaattattatttatagtctaattcactagagtaatgttattggggatcaaggtgcctaacattacttatattatgagatggtgtcttataattaattaataatttttattaaagtaaaataaatgggaccctcataatttttctttaaataaaaatgcaattttattaacttataaaatcatttaaaagaacactatttaaactactcaaattatgatcgtataattcaaataaatacaatcagtatttaaccacaaagctctagtcaaatagtgagtaacataattaacagatcgcttaatagaaattaaaaagacattattcaaa

SEQ ID NO: 191070 - DNA, 2851 bp, Cannabis indica
tctctttcttttgttttcttttctactttttaagtttaattgtttttccacagcaaacgttaaaatcaaaagtctccctaataaaacggtcgaaaacgggtgtccaccggctgtaggcggtgacacagaaattgcatttgtattgaattttgggtttcatttcatttgtagaattaataataataaaataataatgataataatctaaaactgcagtcaacttaaccttggtaagattttaaccccataactgacccaagttggtttatttaaagagagagaaagtaaggccagctgggttgtgaactgcttcactgaccttcccaactctcaaaccaaaactcctctctctctctttctttctttcttccttacaattctctttctcttccattgtggatgaacagtcgtagactatactgtcttcccaactagcttctaagaaactgattgagtaatgatgtagagagagaaatatttgtattgtgagagagagctatcttcattgttacttctttttttgggttattcttttttcgttgttaggtgtcaaaataaagaacaaaagaaaaaaaaacacatatatagtttaaattggattcgttttgtgagttactttttttttcttctttatcttttgatgggttcagaagttgaagatgtactgaaaaaagagaaagattggaaaatggagagagctaacacgttgttgtgtagtaacatcatcatcatacaccaaaatcactgtacaagctggtcttgtttcagacatgagactagctcttcttcttcacccattgcttgcttaaagtgaaaaaaagaaacacaaaaacaaaatcccagctttaaaaaagacccactgaaaatatattaaggatcttaaaataaaagaaaagtaaaaaaagtacaagagcttttgatctataataagatctatttgctcagaagtttttgttattattttcttctcagtcatcatgaagaggcttagcagcgatgattctctaggtgctctaatgtccgtctgcccaactacaggttcataacaaagaatcctattattacttcgtttacttttttttttcttcatattcttttcaatacatgaatagaacccttttaattattattattatttttgttcactttgcctagtactagtacaagtttttatcttttttgcttcctgttgtggaacttttcatatattcatctctgttttttctttctctgggtttttaatttttttctgttttgagtgtactactttagaacgtaattcagtaaaaactaagatcccatttcactaatttacttttttttttttggtttcttttagaggaacatagcccgagtagcaaccatatttatggtagagaattcaggtccatgttggacggtttagacgaagaaggttgtgtagaagaatctgggcatgtctccgaaaagaagagaaggttaagcgttgaccaagtcaaagctttagagaagaactttgaggttgagaataagcttgaaccagagagaaaagttaagcttgcccaagaacttggtctccaaccaagacaagtagccgtttggttccaaaaccgcagagctaggtggaaaacaaagcaattggaaagagattatggccatcttaaagcaaattacgatgccttgaagctgagctatgacactcttaaacatgataatgaatcccttgttaaagaggtaccattatttattattactttacacacactacatatatgtgtcaatttatactttgttgtttaatggatctgaatttttacatttatacagataagggaattgaaatccaaactccaagatgaaaagtcagagagcaacaatctgtcggtgaaagaagagctagtacttatacataatattggaccaacagagtcggagaacaaacaagctgttcctcatcctgatcatcatcatcatcatcatcataatcatgttcttccatctgaggagtgtaaagaactaaactttgagagcttaaacgacactaataatggtgtcgttttagaggtctcctccatgttccctgatttcaacaaagacggttcttctgatagtgactccagtgcaattctcaacgacgacataaacctcaatagtaataataataacagcagttgcagccccaatgccgccatttcttcaactgcccttctccaaactccggctgcttcggcttcggcttccctcaacttcaactgctcttcatcttctaataataataataataattcctccaactgctttcagttccagaaagcggcgtcgtttcagcctcagtttgtgaagattgaagagcacaatttctttgccgaggaagcctgtaacttcttctccgacgaccaagctcccacccttcaatggtactgctccgatcagtggtaattaaagtatatttttcatttaaacaataaaaataaaattaaaagaagaaaaaattcccaagtgaagtgattatagctagactccggaaagagcgtcttctccgagagagaaagcagagtaatggattttcgtttgaaattcacggggtgctattactccattgttgaaagtgaaagctcggtgagctgaaaagaaaaaaagatgagactttggagaaacccattatagtacggagaagtccaaactggatcagaagagagagaaagtgacagagagaaagagagagagaggggttcacgtggggtggaggagggttcggtggaaggtgacgaccaaggtttttcacctagccaaccgtgtgcgggaatatgattagctcctaattaaaggttcatctgtaaaaaaaaaaaaaaaacgaaaaagaaaaataaag

SEQ ID NO: 191071 - DNA, 3398 bp, Cannabis indica
aagattaattaggaataattcgatcagattcagtcagatccactatggtaggagtgggacgagtgcgagtaccatcgagtaatccttcaaacggggaaaatttcacgacctaataacaaaatgataactcttcaaaatattaaatatatttactggtgaatataaattatattactgattaaaaattaagtatgatactccaacaatttcctttaagaaaatgcaatattttaataataaattttaacaatcgtttactctacaattaattaatttaatctcaatgtttttgttctagtatttatagtatagtctatagcttcatttttttttttttttttctttttagctataaactacaaatttaaaatttgaattatacatgcacttgaaatgattgaatacttgggttagaaatgacacgtctccaactcaagctttgttgaagtaatgttgagagaggatatatgttggcgttgctaaggatataatacaatgattttaaacttaccctcacattgatactgtctggtaaagtattgtttaattaattaaggtattctctgatgaaacacaatactgttactgtctttaatcttaaatgttcagtttattttaggatgaaatgatcatcattaatcccacataagtaacctcgaaatagtaattcaagaccttgcaaaacaagcaaagtcccctaattatgaaaaggtttcatacgtgaagcttctaattatgactaaactaatttaaagaaaggaaaacccaagaaatgtcgtctctgacactaatataactaattattaattacgtacaccataataaaaaaaaaatctaattagggaaaatgatgctaccacgttttagtagtatttttgatatggatgagtagtacttgaattgaaactggtatatgaaatctttgtctttacgttcttgtacttgggggaaagtcccaacctcagttgagcctaagataggagagttgggtccactcaatttgagttgtgaaagtgtttcaaaaacccaaaaacctttttttagaacttgaaaaaaggttacctatcatagagcctatacattgtagagtagtagtcattgtaatatgtattagtattttgattttaatagtcctttcagcacatgattggccaactaagcaaaatcaaaagaccaaaccaaaatcaatgtttccattctatcaaatttctaaattcattgcatagttattactaattagttaatcccaaacaaatgtaacaataaatgttcatccttatcaatgcaaaaaagccagactccaagatagtcaaactacgactatttctttttccttatacttcttcatctcgtttacacttttctctgttttcctcactttctcggttactttatccaaactttctaaaacttgtaaaaataccaaattgaaatttattgtgattaatgcaaattttgaccaacactcagattttttttttgtcccttctacaattttgaattttgtttatgaaaatagtagaaataattgtagctagtgttgagaataatgtatgtacaataatacacacagatattataaatatattacgtactacgtacctccctatagttaagtctaacttttgatcatattagttaatgtagtgctataggtactagtactatactaaatactaaatactaattaatgtgatcccctaacattacttcaattttactttctctttagcctttaccatctcacttttcaaatttgaaagtttcaaaataacaaagcgctagaaagtaaaaaccaatcttaggtttgtttgcaagttagatatgatggaagcttttgaggattaactagtaatatttagtatattaaataatcatgatgctttcttaatcataggcgtctttttaaaaaaaattgtaaaagacaagagagcatgacgaaagcataggctctcctaaaaaacatattaaccctttcacgttcttcgagcaaaacactttctgaaaaatactatttaattttacttttaaaagataaataaaaaattatacatttggtcacagtagttagtgtttgaatcagatgagacatacttataattagggcgaaaatacttgtttagtattttatcgagatttagccgttctctcaaacgtctctttctgacaaatgagtgagctagctatatatataaatatataaaagaaagaaaaaaaaatactattattattattttggtttttgagtaagtcaccagaggggtataaacgtcattttaagatattcaaacttagtacagtaacatgcaacttatatgtataacgtgttcattcatatgattaggttttacatggaaataacttataaaaccaaagggctgttgttgtggttgtggagttaaaaaagaaaataaaagatggtaaaaaacataagggcagagatggaatgaaagaattgtcgacgggaaccaatgggtcacggagtcccaaaaaaggtgcatgtggatgatgtatggcttaagcaaataggataataatgaataatgattcagtcaaaaagaaaggctcaaatacccaaattgccctttataatgaagatttgtagtggagcacgtgaggcatttgtatgatatgatgcaagcaaaggtagacccacacaagtcccaatagacccgacccatcaatcaaatcgaaagccctaatcattgctaatatcaaattttatccaaactccatacacaggcacatacccaatgcatgtaaatgtatcatgggatatcattcaatttcaacatggggcttaacttcaccacactagtcttcttcccaaattatagtgccactgccatcttctttcttaaaaaaaatataatatttaatgtattttaggtttctatatttagacttaatttatacatcttctggaaaaacatatattacaatttttttttttattattatagtgtttgatatgtttataatattgttattttaaatttttaagaattttcgaataatttatagtactgaaattatatttaaaattttttgagagcgtatggtaaactaaaatatatcaaaaattctatttttagtattataaattattcagaatttttttaaaatttataacaaatgacgctaataaaaaaaatattctactatgaaatttcaaacgtaaaaaattaactaaaaaattattattaacatttctcgataaataaatacattacattctcgctcctagtgcaaatcttttatgttttctcctttttttctttctttccctatttattaacgtttaataaaattgttttgtagaagagttttgaacatttccaatcatatgctctaaacaataaacactaaaatagagagtactaaacatgttaatgtgg

SEQ ID NO: 191072 - DNA, 997 bp, Cannabis indica
ttattttttttgggtgtgtgggtgagcaaagcctgtattataagagcaatggaatggaataattatttctggaaaataattggaagttgacctccaacataatatatgttgttttaacgaattatgaattaggcttaagcactaaaatgtatgttgttttctcattcagatgtatagcagtggcaacccaacaaacatggctaatcccattaaagatgctagcgttcaggttgatatccagacaatgattggaaggttgacattgtatgaaaccaccctttgtgaaacactccagtgggataagctcaattatgatgttaatctagaccgggacactattgattatttgtcttcatataataagaatgatatccagttaatctgttgccaagctgattcaaatacaagatggctaatccctgatgtggttcaaaataaattcattcagtcccttgactgggacattggcatggatgataacatgaagataacttttacttgggtcctatctagggacagaccaaaaggcaaggaagtggtgagaaatacatggattgttgatgaacctaatcttccagaacgaacagatgttcaaaaagttctcaatggctccttgaacagctttaggataaataatgtctatccaagattctttcgtgtcactggctctggtgacatcagactcttggaattagaggttggttatgcatagaaactacctttcatcatttgctttatcttaagttttttgagcttcacatctacgttgtttgatctaaaatgaattttgtaaaagcagttggtgatatttcataatatgaatgacattaatgatattaaagaactacttggtaaaaagaatattagataaaaactgtaagaatctttggtttgcacaaaaaattgatttaatttgaagttctatgataatattggatttttatcataattaagcatatttttcattgaagaactgatatatagtggtattttacag

SEQ ID NO: 191073 - DNA, 1441 bp, Cannabis indica
gggctttattttttcatgtgacacatgtcataaatcaaggtgttacgtttggtagttgtgtcacaagatcttcagacaccagaacacagttctatcttggcccataacatttccaatcaaatatggcccattatctatacatgtaggccaccgccacaattaaaacaattttcttttttttttctagacaaaaattacaacaatattacatagtaaatatttatttatttatattttcaatttttttttgaataatgaagataatctaatctgtatgtatgcatgtgaaagaggaagatgaagagaaaggggtggcatgtgaaggcggtgaattagcacgtgactgaccaacggtcggttcaggtaatcgtggcagtgaccgttggagcatttaattttctctttttatttttttaatattagttatttctttaactacaaaaaaaaaaatattagttatttctttcctcattttcaactttattattagaagaaacgactttataagaatatttttcatattcaattgttatggttggcctttctttctttcattaatttcctactttctaaaaaatagtaaataattataataatttcttttcttttttgaaaggaataaaactcaaaagtacaataataattgattttatttattattatgaagatatttgcatccaaaagccaccacaactaatttgcttcttccacaatatataataaataaaagataagattatagggttacttcattttatagctagtcaaggtcatattatttcagtataataaatgatatggaattattttaataatatatattatcatgtaacgtatataacatgcattattaaagtacgtagaaaattaataccacgtacgtgtacttcgattatattaacttttgcttttaaaacatgttttgatatttttctttctaggtggagtcttaattttactatgattatgtattattacaataaactggtaaacaatcaatcgttgtttcgtatagattataattttaaatacatcgaacgtaattaataattaagcttgtcttgtgatatacttattactaatcgattcttcacagtattacttcaatattttgtaattgaataaattttatgttttgtgtaatttataaaaaatatacattattactacaatattttcaattcattcattttttttattaaaatttcttttaagaaaaaaaaaatacataaaagggcttgcactgtccaccttctcttaatatatacacatattttttaagaaaaaagtaaaataatgtatttttaaaaaataaatttatgttacatattttttttttctgtacctctcattcatattatatatagtcaattactcaaaatggcatggatttatattgtcaaggaaaaaaaaaggtaacataaatttatattgtcataaa

SEQ ID NO: 191074 - DNA, 2670 bp, Cannabis indica
cctataattatttatattaatataaattacgaaagtgattaagacataaacttcttaacggattaattgggagtgtaaccattacaaaaagagtaatatatagcctattattattgctttgctaatggcttttcatgcaatataggcaatatttatcattagtattgctttcttagagtagttattttttatttttgcatatgacacataaaacggttgagaaaagcttcaattttatgtttttttttttgtacaatgaaagattcaagattaattaattggactgtcacttgtataattcggcggatttaattatataaaataaagttacgtactttgaaaacttaattttaatgaaccaaattactggactcaagaatccaccttttttggataataatgaaaggaacatacttggattagtttttttaattaatagatgaaatgttaaatatatcatacattaagaaacaatttaatattacataaccaactcaatagtttttacatgattaagatggtagtactatagtcttctttcatgtaaaactctcaaatttaagcttaaacttcctttgacctataatctacttatgaacagagtcttagactaaaatattacatcaaatgaaaaacacacaaaaagtattatttatttacagaaaatatacacagggttcttaaatccattgttggttgggactaaaattctgtctttatttatttttacattgattttccaaatattatgtccacaatccaagtatctacaataaaataaagatactggtgtttaatcatgtggattaattgtttatttttttactatttacacaatagaatgcctcgtaaaataactagaaactatacacattgtacccattgttgggatcaaattgcaccttcattcactaaaattaaaatatgaacatttcttacagaatgagctgtttttctttgctgggttatcaaaacctcaatctttttgtaaatgagaatcatggcaacttttcagtacttcaaattatactttcctcaaacattttcagcctctgtgtgatcactaataataagtggttgttttccaatgctggtttcagatgggagtttcactttcccagtggaatagatcagaaaacgttggcatatgaatacaaggtcaaagaacatagaaatctgcaatagtttaataaattttcattttgaacaaaaatagagaaatatgttatcatagaaaatagtttagaaaagtggtcataccaaggatagaagtattttccctatatttccagtgaagtttacccaagaatctgaaaaaggtgacataatttcaaataaattatcattgaactattcattaaatggggattaaaataaaaaatgaaggtaatattattactttgatctaaggattgtacaatcatttagtgcaaaattttgcaactccaccagaaaatcacatagaacataaccaatactaaacccctcagtgcttttacctccttgaagttcatgaatacctataaatttatataaacacatatatatttggtttataatgaaagctctaaactattagaggccaaaatgtataatcataaagacaggcttatctgacctgaggtgtatatttgattactgtcatacaaacttgaattatgctgaaacataatgaaacaataatatggactaattcagaatgcaaactttttttggtcaagatactcccattgaattatgcttaagatatatacttgaaaaatacatcttacttgaatatagagattaaccaaagccaagattgggtttggagagcaataaaaaagcaaaccccagcaaataaccacacagcagagactattagaagagcaatcttggagatggtttggtctcctctctgtataaagacattacacatcatcaacaagaaaaaaaaaaaggatagacattaatttttggctgattagtcataattttcaatattactcaacatgtgagatgagactacagtacagtatagaacaaaacaaacttacttcatagattgatatttggaataagagaattattgttaagagtgtaacatgtatagagagagccacatcattagctgccacaggtatcatctgccacaacaaaaattacaattaaaatataagacagatgttgtttaatttaaaaagtggtatttttgcataaattccataattactggtgaaaatgtaaaattcaggaaaaaagaagaaaaagaatatcttttttagtactaaagtagtaaataaacaaacatatacctggccgaagccatatttctggaaatactggttttggacagtggaactaaagtaaagagtggcgttgtagatgagataagatgtgtgctttgttaagtttagcactataaaatcaaagttcaacccaacaacactacaccaaaaacaaaaaaaaatcaccaaatttagaaatttttattaaaggagaagaatttatgaactgggtttaatctaaaaaaaaagaaaaagttgacctttttcgacgaaaatttaagatgacttgtggatagaaacagagtgaccaacagagaaaagcaatccaacccaaagcttcgtatgttatctccatcggtatcgtattccacgaacccattattattatttcttcttctacttt

SEQ ID NO: 191075 - DNA, 3139 bp, Cannabis indica
gttttgagtgagagagagagagaaagatttgtatgaacaacaaaaaacataacacaattatgtttgttgttgttgttgtttgtcaatgtcaatctcatttttgtgtcaatgtcaatgtgtgtttaggtaagtaaaacactaaaaacaccatcaccatcaccaccaccacccttaataaaaacaaatgaatccatatttgtatgtaataatgccaatgctgcttttcaattcatttcactcactcaatctctagtttccttcctatccctctattgatcatcttatttacactgcacaaatctcaaacctctaccctctaacctctgcctttaattttttatttgatttgatttcatgatgattttgattatgattcatcaatggctgtttcttttactgagaatccatcaagtatgtcactgctctctgaatcatccacttgaagttctttgaacatagccatcacttgaatcatggtgggacgccttaacggcctatcatccaagcactcgaaagcaatccttagataatggcaaagctcagactcacctgaactactctctttcaacaactcactgtcaagtatctcattgcttctcttctctttatgaagttgttttgcccaaccaacaaggttgttgtcatcaccaaactcgaaagggtctattggctttttccccgaaagaagctcgagaagtatgacaccatagctgtacacatcccctttagttgtgcaccgaaagctttggtaatactctgggggaacatatcctggtgttccagctaaggtgctcacactgagatgagtgtcgagagcattcaccaatcttgccataccgaaatctgatactcttgcttcgaaattctcatcaagaagtacattgcttgatttcatgtcgcggtggatgatatgaggtatgcaactgtggtgaaggaatgccagccctcttgctgatcctatggcgattttctttcgtgctgaccaaccgagttttgttgagcctactcccttaggctgctcatgaagaacacattctaagctaccccatttcatgtattcatacacaagaagcctctcttcaccaatcttacaataacccaacaaaggaactagatttcggtgcttaatctttccaatggtttccatttccgccatgaactctctgtctccttgtcctgttacctgaataagcttcttgattgcaacaacacacccgtctttgagctgcgctttgtaaacctcgccaaaaccaccagaaccaatcaaactatcagcactgaaaccgtttgtagcttcgagtagatgagcaaaagtaagcttgcgtaatggcttctcaaatgtggctatgttgatgcttagaggctcaggaacactggaaagtttccagctgctgctacccgaggttggcaggctttctatgtatttctctctttgttgctccttctgctggtgcagcctcactcggtatagagctagtgttagtatgagaatgcatatcacaaagaatgcaatgccaattatcatcccagcagccatagattgccttcttcctctgctgttcaaagctgatccgcggggtagtgatccacaaggcggtaatggaaggccgcaaagaccagaattgttctcatatcttgatgctgggaatgtggtgagctgacctcctgagggaatggcaccactcaggttgttgttagagacatctaagtcactgagaaatgatagagtagctaatgaccccggaacatatccatcaaggttgttgtgagagaggtctagaactcctactgctctcaaatctccaaagctgtctggaatcttgccactgaacttgttgtgtcctaaattcaagacttggagatagttcatataaccgagtttcgctggaatagttccagacaaagaattataagaaagatcaagataaatcatgcttccattattggagaaagtataaacagtcatgccagagtaaattctagttgaggggcaagagtgaaccatgggagagttttctagtctctcaggccgaacaccctcgaattcaactagtcctccggctcccctgcaggctgttccaccctcatttctcacaaatgcaaattgcttgccagaaacaataccgggaaccactaggccagcctggttagcaagctcggcggggacagtgccagagagttgattgctgttcaaatcgagccaaatgaggctgcgacaatcgccaagctcgtgaggaatctgccccgagagcaaattatcccccatttgaaagattgcaaggttgacaagacttccaatcccactaggaatttcaccagtaaaccggttgctcgaaagtgatatccaaatcatgtttgtgcagttggcaatggactgtggaatggtaccactcaagagattgttgttgagaattagcatctgtatgttccctccaataatgcaaatcccttcagggatcccaccactgagattattagcccacatgatcaagtcagaaagatttggtaacctccaaatatctatgggaatttcaccactcaaattgttgaaactgagatcaattgttcttaacatattgcattttccaagctcaactggcacagttcctgacaaaaagttgtctgaaagaagtatcttttccaaggtagaagaggaggaggagcagaatccttcaggaatggttccaataaagccattagagcttaaatcaagcacttgaagttgagtacagttggtgagagacagtggaactgtaccagttaagttattgaatggcaaatagagatacctcagattctgaagattactaatcacagtaacaatgaaatcaccagagaattgattgttcccaaggtttaaacttgtcaatgaagaacatgttccaaaactcaaaggcaactcacctaagagattgtttgctgagagatctagttcctgaagagtcccacaaagctttcctagctcagaaggtatttcaccataaaaatcatttccaccccaacgacagtattctctaagttcttcataacttccaagctaccaactggaatttctgaggaaagttcattgtgtgagaggtcaaagttgtttgaaagaagctagacagttgctgagtgtagacaggaaactctgcaccag

SEQ ID NO: 191076 - DNA, 1270 bp, Cannabis indica
acacagaaagcatgatacctgtatcaaaattcaagtcaaaacctagttgttattaggatttctaattcatgttctctcattaaatgaattgatcttaccataaatcacatgaatcacaagcaattgattgatcaagattggaatctccctcggcggtgactgatccacttcgaattttgcaaccatctccatccaagcagataactgcctaaaagtgatttaagtaaataagtacttgatgttagatgatatcaccttaaagaggaaatcagattacagcctagcgaaaataagcttcgccaagtttcagaatcaaattgacaattaggtttaaatatcattagtaaacagaataaaaattcaactactgaagtaaagagttcattaatatgtaaaacctagaaataaagattcagcatataaaaaaaggcttaaaaagattaagaagataattacattttcatcaatgtaataggacggaaaagagagagtgttattcttcccttcgatggaccagtcatcatctctgcataaatcactacataaaattagtctatgataaaaagtaaaacctaaagtcggtcagttataacattattacaatttatgaacaaaaatcacatttgaactgccagagaaatcataaagtagtgataacaatgttaaaacttgcaaatacaatgccagcatcatgcaaacagaaatgataggagacaagtcttcaaattaagaacaagtgatagtcacaatagtacctagaataagagtcgtcgtcaactttgctgctcccaatagtatcgtataccttcacattcaaatctcattttcttaaaccacaacttcaagtaactcacagatagcaagataatctgtttatctttcttatatggatataaaatatcaaatactcacaggaacacaagtgatcaattgaaactcattttgacaaagagggcaaaggtttgtgattgtagcccaattatcaatgcatacaaaacagaacctgaaaagtccatcaaccaagtcaggtagttcaaccaaaatttcatcaaaaaacaataacatatgtaagttactagacttaagttttaggtttttaacagcatcctaatgcattacaaaatcaaccaaaggcttccactaaactcaactccatgagaagagaaaatcataagatacagaagttcaatttttacactcaacaaaacccacataagtttcataaacacttgaacagagacttgaaaccctagaaaattaactacagttt

SEQ ID NO: 191077 - DNA, 2237 bp, Cannabis indica
tatactaaaatattttatatttatatatatactcataaaaacgaatactacatttaattttacataaaaatattatataaaagacaatttaatataatactatattatacaatacagtataatatgatgtaccaaacgaactttaaatggctattatacgactgaggtttttctatcagttgaaagatataaaaaaaaattaaggtagagttaaatatatttgatagaaaaatatttttggtatcgtgtataaacataaatatatatatagatttttatttatttattttttaatttagcaattaaattattcataaaaataaaagtttctcatttattattggcaattaaattaaaatttaataatttaatatttttaaaattatattttttaattattattttaagcagggtcggccttaaatataggcgggctagatccgtgcctacggcccattcatttcgggggtcaaaaataaaaaaataaaaaaaattaattagatttttattaaaataaaattaagtatattataaacaataaataattatagttataacttacttataacatattatacaatgtcatgagtttgaaatctcgtaatactctttttaaatttttgctaatcctccagctctcacaatatattttggtcatatatagacataattattttgcataaaatataggggaaaggcttacaaatgctattagtactagctagattattataattattttacataaaaattatctagtatatttcttttttcttaaaacaaaattttaatgttggaaaaaacccgtaatgctacatgaaatgacattttggataaccctgtttgaaagatgaagataaagatatccattattacataattagtgggtcccagtcccacccaaaagatattacaacattattgaatattatgtccagttaatatttacatgttttattactttattcaatatgtttgaaaagtgtgaatgccttatataagatatgctttattttgtttagtttctaagtctaaaaaaagattcatttagaaaatgattggtaaaggtgttcgtgaattggatcactgcacaaatacaatctaattttttttggtctaatttggttgtggcttgtgattaaatgccactatatatcatatgcttggcaatttgctattcagtacctgttcaaaaatacttaatgcaatacaaatgattcatataacttactattaatttatatatatagaatatttgaattgaaattcgacatgaacttaaactaattaacctatttttacatattttagttatagacatagtttagtggttctatatttttcctcacaaagaaaaaatctcaaattctcccaatgtcacaaaaaaaaaataataataataaaataaataaaataccgtggacatttttttgtgtgtaattgctagctatcaaagttataacatagaacaaagattttaacattttgatgatgaaaaatttctattacattttaaagtttgattactataaaatacatatatctatacctaattaaattttttaaatacaaaatattttattgcaaggggttaaacaatatacttaattaatattttatgtttttttaaacaaacaaaacagcccattgtaatggataatttttatttttaataaaaagttactgaatattaaaaaaaaaaaatacttcatagtagatattaataattgagttctctccctcttcttttttttttttttttttttaaaaaaaaaaagttactcttaattgaaaaaataaataattgaaagttcaaattcgaatatacatattttttttttgaacaaattcgaatatacatatagatgtaataattgtaaattatatcaatcaaaactatattatgtttaaagatttaccaattttaaacaactttttctataatatcgcttaaaaaaacattattacaaattttatcttcaattatatatattgtgtgattgtagtatttatttaatatgggtgaagctaatctagatgtataaaatattatacacacaagggtggaatttatatcaatatatattatataaaatgtgtatacaaatacatgtagatttttaaatatctttacggactagtttaaaaaaaatttaaagatttcattatttctttaattatattgcttttcgtatgtatataacctaacatagtattttttatacatcacactaaac

SEQ ID NO: 191078 - DNA, 1646 bp, Cannabis indica
aaaagtttcttagccatatgatgagtatggacattacaagatcttggctgaaaacttgaaaaaatattagggaagcgagacaaagagtcattaatgtcattaactatgtctgaaaaagctgaaaaatctttctttttgctcttcactctgtctatcagctgcttcgagtcagtgacgaccttagcaagaggcattcgaacattgcagcaccaaagcaatgctgattacattgccagagcctctgctattgtagaagttgctcttgctgccataggtaccgaaagaccagcgaccatgttctccttccaatccttaattatcaccccaagcccaattttaccactcttagaattgatagctgcatcagtaaacaattgataaaaacacctcatttacttgattgtcttgctccaagctgtgggagttgttcgtttaattacagtccaccctcttggactgggcatccatatactccacaatataagtattgatccagttcactacatcaacaacagacatgttagttctcccaaaaagtttgttgttcctgtttttccaaatagcctataatgtacacaataatagcataaaatcatccttatttaaagtagaaaaatcaattaaaataaagtcttgaatatctttatgtttatagtgaaaataaaagtggttaagggaagaaattttccaaacctgtctcgctctggaacaatctaggagagtatgcgttactgtttcaaaaggacaattacaagatgaacatgaaggagtaggtatgatttcttttgaaaaaagattggaagcagtagggcgaatatgataaaaggccatccaatcaaagatcttaagtttagggggaagacataaattctaaaacttcttccaccaatatttattaaaactaataggaggaagagagatagtgttaacaagatagtaagctgatttcacagtaaacacacctgaagaatcccctttctaaatctgactatcattcttgtccaaccccaaaataggaacctagagaatactagaaacaatatcactatcaaaataactagtaagtcgattcaaataccaatggccattttgattaataaaaaagttaactctatcagaactgatagagggcatatgattgtctttataactaacatatctgatatttggaacccagaaatcctctaccgtacagatggagctaccattactaactttccagataagtccgtccttaagaagattcctaccccaaaacctgtccttaagaagtctagataagcccgtccttaagaagattcctacctcaaagcaaataaaagatctaactaatatttataaattggttattagatatttatatttgaatttaaattctgattcaaatcaaattagatattttctttttattttaataaaaaattaatagaatttatttatacactatgtataggatcataaattaacaactagaatatattagaaaataagagaaaatcaaatgtcagttgtagagaaaatagaattagatttctaactcttattctctccctctctctctctccatgcaacactctctctctctctctctctctctctctctctctctctctctctctctctctctctctctctctctctctctc

SEQ ID NO: 191079 - DNA, 1559 bp, Cannabis indica
ggtttccacatgcatgaacatatcttgaagttggcctgctgatgtcacctaccaatcgtataacttcattgctatcattcttcttgtacggtaagtatttgtttttttttaagagtaattattttttttttattaaaaattaatactctcattgtatgttataaggaaaagatgttaaaatttatgttatatattgttactgataagtttagcttttactagtatagataaatatttttgtgttgtatgtttgcagaaaagaaagtatgacgccgatgaagattttatcaacaacatcagtaagtagtagagattgtgaaggcgagtttacctatagagaagagagaaatttgaatggagtcttaggtaaaagttgagaaatatgtactaaaaattaataaaaaaaacatttgaagaagaatagtgtactctactatttttttttttttgaaagatagaaagttcattcaacaccaaagaaaacatggggcaacagggggtgcaccctccccttgaaagtgtttagcatcttggctaaaccatcgacatagacgttaacattcctactgatgtaaattaaacgacaactggaaaaagacttaaacaactctaaaatccaaagggacacacccttgaacctccaatcaggaggcaaagccattaaaattgcctgagtttcagcctccatagccgagagcgattctttcttaaacgactttacttcccacttagcattgattctgttgatcaaaagaacggccagaccagccatattactgtcccatgaagtatcagtgatcatgtaaaacccaggaaataccaaattagaaggcagagtatccttccaattaaactgcactaaattgtgagtatcctagtgagtgagggaaaattcattgtgcttattctgcactctacatttagagatgcaaaattgcttctataaactagatcttcattttacatgagttttatagggttgattccttaaaatttgaagaatcctttaaaataaagcacttattaagacattttgtccaagctcaaacataccacatattgacaacaagtgaaaagcagttttgcaacatattaagtgcaaaaccagtaccaattacaaagtttctcgttgtaataagaagagacattgagataaaaaaaaaatcattgctttccatgtgcattgttaaatcagataagcctcagtagttagttccattagcagtgttcttgactgttctcgtatgaacccctccaatggttgaaatgcctccatactcataaaatgaatatgggactgtgtccaagaaagaatgcaccaaaacaaacacagggggaaggacctgtttggtaataactaccttcacaagaagcaccatacatgtcatcttatcttcaactattcttcaagaccaaaactcactcctcattccaatactcactactcattccaataaccaattcaatatagagaacgaaggagtgagcattgcaaaaatggagtgagcatattggtcaataggaatagtatattacaaaggagtgaacaaataatttgg

SEQ ID NO: 191080 - DNA, 4307 bp, Cannabis indica
gcagctgagcctaagagttggagtattgtttctatctataaaaagtagaaaaaaacagtcaagtttaaatcttaagattcaaagaatacatataaagaacaagagaaccagttagttaaagacttcatctagctaacctctgaaaaggccagcaatcccaatcctgttgctgcagcaaggccaatggtaacagacaaatcacctgagcctccctgcacattaaaatcgtgtgtgttgacatgtaagaaattggtcactagcccatcgaaaataatcctgtcatatcggaaattgagatacatactccaatggcatcactaattgcttctgtgaaatttccaaaatccaaactcagtgctttctttggtgctatccatggaagattgctattctgcaaaagaacaatccataatgtgaaccactttgtttactatacataataaacttgtacgttagaagttgctgatgacagaaacataggagagggaaggaagtgcagaccacccatcctcggggtccttccgcgccatcttttatggcataagcagctttgaacccatttacagtgaccaactcagcaactagttcagagttcccatcgaatctggcttccgtcagaaatgcatcagcaattacttacacacattagctttaaaaataacagtgtcttattcagagattactatatttgctatgaaattcagtaagtgttcaaacagaggaaaaaaaagtaataaaacgaatcaagcctatggtaagagttataatctgattctcagtagacattgactcagggttctacttcttcactgatatgaatgagaaccagagaatatcctatgaacatgttcaaccgattgatcgtgcactacaccagtaaattgaacatgggaaaattttctaagcaataacttaaaagaaatttttaaatccatacaaaatttggtgatcatcacatttaaactcaaaatatcccttttcttattacattgtaaactaactcaatatagctgatgacataaagtgaagtaaactagaaaaattaagtttaaaatcttacttgtcgaggacaaacaatgtggtattttctggttccttgaacttcaaagagagcttctttaagaaacctggtttatcttctcctttgtacacaatagacactgacttctttcccaaacctctgatgtctggactgcccacttgcctagactcagcaggtggtcttatgtcaagcaactgtgcattgggatcatcacccaattttgcataagcatttcttgcagactcaactccccatggcttagacttgccaaaaagctgagacaaaaccaatggaaccgccaaaatggcgaccccaccagctataatggctgggttttcagttgcaaaactaatggcactatctataaccccagtctcacctgaggagccatccccaacagtctgctgtaatgcttcttcatatgtcaaagctttagcaagcccagagttgagtacagaagagagtataaccaaacctccatggattttctttgggaaacactcctgaagagccgaagggttggtgttaaaactagaagaatttgagaatttgaagaaagatgggatttttctgggttcttgtttcctgtcgctgagaactgctgatatgggtgttaagcctgctgcattgagggcctccatggcataattctgtctcaaagcttgtttatgaggctcttagagaagtaaaaggataaactttatccaccatgaaacactaggattctaatgccaggctaaagttccttagagagccttagcttcagaaattagtcttggaaggcttctttagtgtgaggaaggtgctgacaaggaatgggatgagaggcttaagccattcagtgcttgacatgtggcaattgatgatgataagttgctgatttgtaaggccttcggtggcaatgagtattatagattaaagttgtcttacagattgtgtggttgagaaaaagtctgccgaagtttttagaaattacaacacacaagaaaaatggaagctgctagtacatgtcctgtacagagtacagtaagtagtacaagaagagtctaaaatgccctttattttactataccagccatgcttatcttcataaacatgattaaaaaagaagaaaaaatggtttagtgacccaaaataaagcaataatattttgtttttatgtgatttttctttttgttttcctcttatcacttcaaaaacattaccaataaattagcaccttttttttgtctgaccaattaattagcacttgctaaacttacaatttttattgcaaaaggttagttatatgtatatatggcataacggcaaatattgctgcggtcattaaaacataaactcttattgaaaattttactcttgttagtgtctcaatatttactacaaaataattctaagaggcatttgtggtagtgctcagcaccataataactaagctaagtcttctgtgataatctaatgatgtggactggagctcatccgaatgattgtattgattaggctgacttagagaagatcaaaaaaataatcaagaccttgcccaatttcccagattgagatgccacatccccactttcgagcttcctccagccgcacagaaatggacaacaatgatggatagaatacggcatggttgatgtggttgtcatcagggtaaaagaacaagtgttcttcactcctctcttcccactgcaaaacgggtctgtgcttcttcagcaacgatagataatcacttccagttatagctccaccaccaccaccaccaccttcacctgcaataggaatgcatgattcataaattgaaaggcagcacaaaaatatagaaaagaaagacatattcaagaagcctcagattgatggaagggacaaacctcttgaaacaatgaagtcatttccgtagaaattgatcccaagaaatatcttgtgggatagatgtcgtacaccgttgctggtgctgccaaggagtaactccattgtggcagaaatccacttaagaggtgcattaggacctggattttgcgggcctgagaagtcatacgtcataagtgagaatccatccacagcatcatccaggttcttaagatctctgggtccaaaatcatattcttggagtgtctctgaacgcggtggacctataacgtatatcaactgtaatgaccgcttattggttcgctctgaattaacagcatgcattgcatttccaagctgttttataaacttcagtgcctaggcttacaaaacaaaaaattaacgagtaacattaacaacaagcaaagagagaaagaaagagaggggaacaggaggaaacaaagtcgagcactcactgagttcctcatgcttggatcattcaaaataccataagcagcccaccttgaccaagattctagcacaatcccatcatagcccatttccctaatcataaaaaggattggtgacatttaggagttggattgtttgatctcaaggaaaggaacgaaaactgagaaaagctaaatacaaggttacatggaccaatacgtcattgatatacacagtcataacaagtaatgaaaagaaaagtagagtatcatcccaggagaattgatttatcaattaccaataattaattggtatttctattgggctaacaataattatacttgtaaaatattaaaacaagaacgcaaatactaaaattaacaattgaaaagaaagaaacaaatttaataatcaattcaatgaatgtaggacgagggcaattaatttcgtcatcttttcactctgttattttatcaacacaattttaattattcttcttcttaatgtgatggaaattttaaaaataaaaatctatattcggactaggatatataaatttcaacctatatagtatctgaatctcgtccatgacttcacagttggatgtgttggtatctgaattttctcaacatcatctgttgagtttggacaatgcccagtaccaatatgcatacaatcaagcttttgtggcacacctcaggatggatacaagtcagctgcctccttttcctccaccatattttggtcagtcaccacctgaggtggatgataatgccagcccgtccggttgaatcttttggttaaggaaaatgtttttagtaagtttaggggaggaaatttatttttttattatatatattcggtcggttgtgtgttttagttttagcttttaggtgtgtcattgtgtttagtttgttgtttgaatcaagtcgacaattattaaatgatgagcctaaaactaaattat

SEQ ID NO: 191081 - DNA, 3196 bp, Cannabis indica
caacaggttcgttacaatttcatttcttaagagtaaagattgcttctttgacgctaactaagttagtggctgttgatgagtgaaaattgcgtttgaagtgtttgatgaatgtcctagctgacataaatgaagaacaatggagtgaatttgactttagtgcctttcttcaagttaatgaattagactctgtatctttactttatatgcttagtagtttcttttcaaaacctaatttgatcaaaactttaagtatttgctgccttatttaacttacctttcatcttgctcaggcatcaaaggatcaggctagttttggttcagatggaacactaattaaggtgagtttatagaagaagaacaattagcatgtcctctacactgatatgatatcctgttattagtactttagtttgatttaaataagtagttttttgttaggccttaatattagtctcactagtatatctcattagagttttgaaggctgagagttttcaagtccttagtggctgtgtgtgttcagtgtttctaaatttgtgtcttcttattttgttggctagttaggattatctgttagtctagcctatcatgcaatcttgaatggaatgaataattgttcgattagtgtctgttggatgtcatttgtagatccactattagtggccttgaaactggagaatgctacataactgcatcattacaagaacatgattaggtggtttctattcactaaggttggaacctctaatttcctatgtaaatctcagtttggatttagttatcagcagaagtttagtttggtaaatgtaaagttgaaatgggtgaaagatgctacacttgatgatgttgtgacttttgataaggatctcaaagcagcttctactcttgttacccttatatcctcttcacctcagcgtaaacttcctatttatcacctcgtctgtcatcgtggacaactcggtctccccattgatctcaagctctcaaccttcattaggagatacccttccatttttctcgagtcacatgttctcgacactggtggaactcgagtcccttgcttcagcttaactcgggaagctcaagaattacacgaagaagaactacatgtgctcgagctgaatcagagtgatcttctcactaggctacgcaaactcttcatgcttacaagaaacttgagccttcctttacaaaccatagaccagttgagatgggactttggcttgccatatgattaccgccttactttcattcctcgtcaccttgacatgttctcttttgttaagcttcctgataaacgagatggcttgaagcataagatatgggacgatgaactcgctgtgtctgaactggttaggaattctgcttcacaacaaatagaagaagacatgaagagtggctgcttagcctttccaattggattcactagaggttttgggctcaagagaaaatgcatggaatggttaaaagagtggcagagtttgccatacacttccccatacatcgacacatcccatttggatccacgaactgatgtgtccgagaaaagggttgttggagtctttcacgagcttctccacctcaccctgcaaaagaagaccgaacgcaagaatgtgagcaatctccgaaagccactagccttacctcaaaagtttactagagcttttgagcgccatccgggcatattttacatatcaaagaagtgtgacactcaaactgtgattctcagggaagcttatgatggtggcaagctcttgcatagacatagacaccccttactcgaaatcagggaaaaatttgcaggcatgcttagagaagggctactagatagaagtaagggtttgtacaagaaaagtagaagagttgttgtggaagaagatgacccaacaaaacatggatcaagttctgagttggagtttgacattgacactcatgagcactattcatcaaagttgaacaatcaaagttgttagatgacaaattagataattgcaaaatcttgtgctacagaatcaatgtttaacgaactctgtttgtagtagtaattgagttgagtagatttatgttaatgatgataaattgcagcagaatttgctttgattagattagtttttcacttccaaataactctaatattgttttgtttgtttccatccccttctccactcccaatcaatatgatattacatacaaacttaactcttaactcttaaatatcctttttaccaatttctcttgtatgcatataagtgttttcgtctagtgctgcaaatatacggattggatatttcgacacgtcataatactgcaaattagcatggcaattacatgaaaaaaataatgaatttaagtacgacacgacatgataaatctaaaggcacagtacataaacacgaataaactaagtcaaaaacacgatacattacaaattcctataataataataataataataataataataataataataataataatacatttgtatttattaataaatattcaaactctaattaattttatatataattatgggtaaaatattattgaagaattatataaaaataatagaaaaggcctaaatttgagctcatataagaaaatgagctaacctatttatgaaaaatgggtcagagcgagtaaagtatgacacgaaatcgagcatagcacgaaaatataagtttacaggtcatgttggatctatcctttaaaatattggcacaacacgacacgatctatattattgcggacttttcaaaatatggaccgagttaacccgacacgtgtatatttatagctatatttttgttagtagtgtaatgttatgtcaagcattctcttttgacataataaggtgtttgacattatactgacgtcatgttttataatttacttaacagttttccttattatttatattaaattaaaatgtgtgagactgaaatacaatcattaatgataccattactctaaatcaaaatattaatttatacatgcatgccctatatgacattaaaacaaaaacaaaaattgttcaaattcaatcaatgcatgtattggtatattttttttcagtaaattataacgtgaatatcatacatctaatttctaaggatagcaacaagcctaaactgaaattaattactacaatttattacacatgcttgttttgttctttctttcttttttattt

SEQ ID NO: 191082 - DNA, 2247 bp, Cannabis indica
tcttctttcttcttctttctgttctttgtgccaaaaaaaagatgtgggcaagtgcagaaggaggagctccagaggtcactctcgagacttcaatgggtgctttcacaatcgaggtaaattaatgcttttcacttggtttggttcatcacaaaatacaacatacctaaactgaacacaccaatgcctccttacctttccctcaaaatcattatataacaatgtcagtttcaattttggtttatgtagctctattacaaacattcccccagaacttgcagaaacttccttgagctttctcgtagaggctattacgacaatgtcaaattccaccgaattatcaaggtttttttttttcttttctcttatatgtatatatatatatatgcttagtaaattagggattttcttaattagattttgtgcttacggagcctgtttgttgacttgtatttggtaggattttatagtgcaaggtggggatcccacgggaacaggaagaggtggggaatctatttatgggtaatgcattttactactgtggttgatattctttatcaatttcttatgctatggatgatctttctgctatccttatgggatgtgggtatttcttttggggtttttgatttatgcaggtttgttaactcttgtttcttttgtatggatttatcactgcaatttcagttcaaagtttgaggatgaaataaaacctgagctgaagcatactggagctggaattttatccatggctaatgctggtcccaatactaatggaagtcaattcttcattacacttgctccttgcccttctttggatggtaatttgtttctatcttgttacttacagatttatctaatgaatatattttggataattgatgaaatgaaacatatcgactttttttgtgtttggctggttcaacatgcatcttttacactttttgttgtgtggtcatgatgtttgtctttgaactaaatactgatgaccattatttgtgaatttccaaactgatcatattttgcaatgttttgttgtgcactacaacgaagttgaaatgaaaaaagtaggctttttatttttgagagattttgaatctgctagtagtccgagaatttggatggagcaaagttttaccgtcattattttcaaagctattaacattttgcaacaatgaggagcttcagaagttagttattttcaaagctataaaaattttacattatttgagattcaagtagtattgtagagtgcccacaggaaatagtttttgaagtcatggccgaaaatataaacaaaaccagcggttttcaatttgctttttcaattggtctttatgactacagattttaccagaagatatatcatgctacattgcttctaatgagttatccaatattgctgcatctttcaggaaaacacacaatatttggaagagtatgtaaagggatggaaatcatcaaaagacttggaagtgtccaaactgataatactgataggtatgttttctctcatactcctattgagtttgatttggatttaatgttttgctataaagtgatataatcgtaaaaaaatcatgctttccaccaaagatcttaacgttctcatagatgccacaaaaatctagtgttcatataaattgcttccaatcacctattttctactattttggtctaaattaattcaaaaaaacaagtttcgcccatagtcagattagttttgaccataaccgaagctgccacttccttaatattgtttcaagataaaatcacatgagaacatgagagtagttttgtgaaagaagctaccacttctattatttttgtgatatttctatgttcatgttttttggtgaaaagataagtattcataacccaattaccccataagttgcagagaaatttaatttataattcttgtagtactcgtgactagttcatttttcacagaaaaccaattgtaatatgatctaacgaactagttgtgtttttttcttaaacatttcagacccgttcaagaagtaaagattctaaggacgtcagtcaaagattagggacatgtaactgttatcaaccttcattacctgcttctgaaacattccagcttctgggttctgttccttgaacaattttgttttatgttaaaaaccttgtaatgtgtttgctttttagttcttagtcgtagtattgtgttaatataggaaaagggaaatttatccccatgaccctctgtttcattaaattaaa

SEQ ID NO: 191083 - DNA, 7008 bp, Cannabis indica
aaaaataaaaaataaaaagaaaccaactgatacagatccaaaatcgggcacatacatttacttatatatgaatgtgttttttttttttacaataattggtttgaattcttaaatgataaaaaattagtgtaaagtatgatatttattgtaatcataaacatagtctaatggtacttccgtataaaaaaaaaacttattatatctctacagaatatgtaataaaggaatgataatcgtagtaaaaatagtataggctatagatataatattccacgactccatgtaatgaagcaaaataaatttttttttcatgaaagtgagagaaaataatccttaaaccaatgatgatactaatctaataataagtgatcgaaaaaagaataaaagaattaacttaactcaaatcaacttatttcaaacttcgattgtagtttgatttagagccaagtatctccacctctccttctccacataatcggcgtccaaaaaccttgaaacaaaaccccaaagcctgaaaatatcatcaaaattggtgatcagcccaatactagccataactacagaaacaatcccacatcgctcgcgtttattatctctacacttgttcacaacaaaactcatcttctctagccccatttccctctcttcatcaaccttatcatcaaaccaaaaattctgaagaactccacagctcaaagaaatgttgttacggtcagcaagcttctgaaccagggtcgggtcaaccttctctcctttccagtcaaacacattgaatgccaggctgggtcctctgttgtatccgattttggggccatagattctgatcaaggaatgcccatcttctgaattgggatgtttcaatctactcaatgcattcactagccaattgattaagattcttgctctggtgcttatcaaaactagtcccaatgaatctgcatgatctaaacccctacactcaccatcatcattatcatcatcaatttccgacaatttcgattttaaagaagcatcttttcttaatgggttttctacaaggctcactatgccgacagttgaggcccgtgtcgagtcttctaggatcgaacaagttgttttcttgacaaacaaacacccgaacccagatgggttttccccaaatactttgaagaatgagcatattagaaaatctggttggaacagagagagccctaaggtttccatgtctttgggtcctaaagcacaagcgtcgagcaaaacatgccaaccattctctctagcaatactcatccattgatatgagtatcgagagccagtcattctcgattgaagtgggaaaacgaacaaccccttgttgtttttattacctctcattaataacatcttccttagttgtttggtttggagtttcatatggggccaggagaattcggccgagttaactcgggcaccttttccttttgagctttcaaccatggattccactgcctcgcttttgtaatcgtacacagtgagaagatttcgattggtctgaaaagggtatgaatctgcaaggagtttgaaagcagaggactgattggatgtgaataccatgaagtaatcatcttctgaaacgttcataaaagccatgattctctttcttaatttgacttctagctcttgttcttggctcaacacggctctgctaattaccatctgtgatttcaagctcaatggtttgtaacagatatcaaagaagtgggattcataaaattccgataacataggagtatgactcgaagaggaagccatagtaggatcaaaacgacgtcgttgttgttgtgaatatgagaaaaggccaattccaatgtaatcaagacaagcatgggtctgtagatggttatattcatgggatcgaagttgatcagttcggtgagtttgagagtagtgaggaaaagctttaatgaagtaagaaaacgattcctttaaaccaggaagagactcgtggtttgtgaaatatggagtaatgttgggtagagaagaaagtgctgccatggtgaaatggtactgagatgttgaggcagtagtcatggtcgagcttgaactggctggtgatttaggagattgaacgaaacttggtgccctgcaacagccatggaagcaagcttctgaggtttcaccagtgcaaggcgagctcattttcttgttcccttctttcttttaactttactcccaacttatttattatgaatgtgaaaagactaaagagtgttgtccaaaatatggtatcttataaatggtggccttttactaaataattagctgtttttttttatattaaatattaaataaaaatgtaaaatacaatattaaattacattaataatgtggtatagatttttggttgactgccatttataacacaatattaattagttgaagatactgtttgggtttgtgtttttagtttgcctatttttgctaattatgctcaatgagcattatttgtatgtagtagattatgtctaatttactaattaatagaatttctatttattttagaagaaaaaaaaaatgtggtgtagcttagtagttttatgctttttttttctgaaaaaaaaggtccaaagttcaaatccttcccatttccaaataaaaaataaaaaaaatgacatcaataataaaatgaatatgaataaatcatttatttatttatttatttattttgctaaacccacaactcatttattatgaatatcaatatagcactttttcttcttattatattttattttattgtattgtgtatttttgcattggtgttcggatgaacccattcaaaaataagatgtcctggtcaaccgggggttgaggacaggttgcattcaagggcttcacattatctttctattaattatatgggtcatcaaagaagtaactaaggaaagtaagaatgtgatatggatatatttttagtatttttatattaaatagttaagtttaattctcagttgtaaataaatacttaagtttaatttttagcagtaataatacttaagttatgattcagaaacttttgtaaatacctaactgttaagtattaagtaaattgccacgtgacaattcctgattggtccaagtcattaaatttttattttcttaccaataaaaaaaataacacgtggataatgacttaatatttaacagttaggtacctacagagtttcaaaaatataacttaagtattattatcgccaaaaattaaatttaggtatttatttgcaactgggagttaaacttaggtatttatgccgcaaattactctttaaattaatgtttattattggaataaaaaagaatgtcacaaaagaatgtcatagatctttaatatcttctctttcttcccattagaatattttagaacaaaaagtactaaaaataatgtgaaagaaaaataaaataaaataatatatttttaaacgatgtgaaagtttctgacactcttagagtatgataggcacaagaagttcaaaggtataaagtgaatatcattgtaacgaaatttattataaagagccatgaaactttaaagaactttaattattacatttaagccaacttgtggccttcgccagggagaccctctctccccttatctatttatttgggcgattgagatcttatctagacttcttgaaaatgtcttgggaaatggtagtatcaggggcattaacatttcccatggtggacctattctgtcccatatattttttacgaatgacttaatcttggtggaaagggcccctctggcaaaagctaaaggctactggaattgcctggagaagttttgttcttggtcaaggaaacaggttaataaacttaaatcttccattttttagtaggaataccccaaataacctgaaacaaggaatttgtgatacattgggtattggaggaccagaaggaaatgttaattatttggggctccccttattttgatgtagacaaaaggatggtaatttcaattttgttgtagagaacctcatctcaaaattgcaaggatggaaggcaaaaatcctttcgaaagtggggcatgctactttgatcaaatatatgggtctgtccttgcctatgtatgtgatgcaaaccactaagctctcaagtagacttgtctctaggattgatggtttagtgcgtgacatctggtggggttttgagaaagggaacggatgactctagttgaatgtctgggataaaatttgcctcccaaaatccaaaggtggacttggttttcgcaaaaccaagtagatgaatatggccttccttgttaagtgggggtggaacttattgtgtgggagttagactctgtgctgtaaaattctgagtgcaaaatatctaaaaggaaaggagtttctgaattgtaagttcaagaactgtgattctaggttttagaagaatgtggtcaaagctagtaagattttgagagaaggagcttgtaatgtggtgaatgatggcagggatactaatatttgggaggatccatgggtacctcatggtaaatctttctaccctaagtccagtgggcacccagagtttggtctgagaaaggtggccgacctcctgactgccacaagtgattgggacattcagaaactgaattgcttctttgatagagatactatttctgctatcctaaaagggagaagaccctctggtcaaggaaaagataaataaatcttgacaaaagagtgtaacgggatcttctcatgcaagtcggcctatcttactcaagcattagatagagctccacagtgtgaggttgtcccctctacgtggaataagctctagaatagtaaaatcttagagaggcataagatcctttggtggtgtattttttccaaggccctttcgataaggactattcttagtaagggattaaaggttgaggatgttacatgccctttctgttgggtggaagaggaatctctaaagcagttttttcttaaatgcaatctggctttctatttatggaatctttaccgtgggtatctttgcagtggtcaattcaggaatccgtatgtagtacttggtcaaatttatttggagtctcaataacaggggcatcaacattaacgaggtctttatctatgcttctgttgttgttgatactatacggtgagcctgaaattaaaaggtacataagcataagatggttaacttgaattagtgttttgactctatttgatattcttatgcttaattacgagctactctaatccccactccttctcctatctgggtggaggattggcgtcctcttcctcctgattggatcaaactgaactgtgatgtcaaagtgatatcagaacgctcgtgtatagcagttgttgatagaaaccatttggatgaggtcatctgggtgagcacgatggacttggatttttcagatgctctttgtggagaggcgagaacttgttacttggcgattgatttggcaaagctcaaaggttacaagttcatcattatggagaacaactcaaagatagtaattaactctctcaatcgcaaggagatgtgctggaagattgtaaactattcctctttttgccttaagcttttcactgatctttttggctgtgttttttcttgtatttcctgttcttgtaattttattgtccataatatggtaaagtaggcatttacccataaacaatataataacttgcgtgtaaattccaacaaacttattttgtaatgaccttgagatctaatgtttgatcatatatatagtaaattaataatattacgactgtaagatttatttttattttttgatcacaatgagccattataaaatagatggttgagcattttattgttgttgatcaatatattttcttacattattttttgcttttattttgtatgaaaagtatttatcgaactttgccaaatattttatcgaaattttttgtagtaggcaaagtcattttggtagattatttatttatttcggtattcaagagagctttttagctttttttttttatggttgtatacgttgtagttatttaagactaagaaatttttttaaaaaaaaattgaattcagaaaattaagcattataaactactcataattttttgaaaatttacatgtgatcctaagtagctatattgtatgccatcatgaaagaaaagaaaattagattaaaaaactgtcttggatgccgaaacaagtagaggatctacaaaaacataaggtacattgtacttacccatatttttttaaccataacaaaattgataatcagacctctcgcccttcactaaacgagcccgaccatcgcaagcccatctcaattctaaaatcgttttagtttaacctttacctatcgccaaatctcctagggaaggagaaaatagtgaatgggtaaggaggatgaagaaagaaaaaataaaacaaaaaaaaaagttaaagtaaaaaatttatttattttatatttagttttaatttaaactactttgtaatataaaatctgatattttgacacctattagatggtgtggacattataaaattatatagaccactcacaaacgaatatctaatattacatttaatatctaatagtgaagtactaaccgctgttactaaatattgacgttatatattttaccacaagaaaaacttaaaagcattgaagtgctacaaagttgacaattttggtacttttaccacaaattactctctctatgtataaattgtcgctaaaatttaatttaatgtatctcgtcaagtttattatacaccatcaatagcgtcatactatccattcacttattttctttagtgttattaaaacacgattgaatatgaaataatatgaatttgagaatgatataatgttacaaattagcatgacatgatacgaaaaatatttatttaaacacaacataaaatgataaattcaaagacacaacgcgtattaagcagattaacctgaaagtatgatgtgttaaaaagcttaaattttaataataataataa

SEQ ID NO: 191084 - DNA, 1312 bp, Cannabis indica
gctaatgatagtgttcatcgtagctatggttagttatagaagataatatttgaagaattttcgatatttgaatattttacaatgttcaaattagggttttaagccgtttgtatgcttgctaatttatttattttatacttgtgaaaaatgattttcttgaaatattattcattttgacacggcaaattattatacaaattctaaagagtatttgttatgacttcaaaggatgctgatataattttttcttttagaaaaaaacatattttaagtacctcagttaaggatcgttccttaggacactacaaaaaatgagacttttaccaatgcattttttgtatttttgggaggttgaaacaacggggtaataggagaagcaatgaccataatggatttttgatgcttcttagagagaaacagtatggaggaaattggttgggagtggtagccatcgtcaatggcatttcaacacagtcacacagagagatatagagaaaggttggagagagagatctgagagaaatttaaggattttagaggttggggaactgagatctctagtgcaattaggaacgtcatgctattttcgttctagatatccttagtattaggcatgacataattttgttcccgatataatcgttcctaataatgctcgtaaaagtgatttttgtcagggcattacattaatgcgctgacaaaagtcatttttaccagcgcacttttgcgttgataatttttttttaagggaaactgcttatagggcttgctatatgcccgcgcaaatatgagctgccctggtaaaaatatgttttgccagcataaatatgcgttgataaaactatgacccttttaccatcacagattgcgaaatgcactgtgaaaattgactttttgccagcacagttatgacctgcgctgataaaagtaacatttcttgtatagtatttactaataagttagtgaatgaaaaataataatattcaattttggtacctcttacaatatacaaatcaacatctatcctctacaaatataagatattatattatttgaatggaagtagtactcactacaaaaaagcaactatttttagtaatcaaaaaagaaaaaaataacaactattttagtgataattatttttattagtcataacataaattttttgtgactttttttttttgaataatgatgaatttattaaatcaaatcatccaaaaccaaagatgtaattaccataggtaaagcatccccagacaaagtacaatcagcctcagaaagagaagatcgcgcaagaacatgtgcaacctta

SEQ ID NO: 191085 - DNA, 3078 bp, Cannabis indica
atttcttatatactttatccctataaacttcaatttaattacattttaaaatattaaagcttaacatttaaaactacatgtaaatattttatttttgtgtaattattaaactaataccaggatgtttagggtaagttcatattttattggcgggacttattttggttcaaatatttattctccatttcaagagtgagtcctttgtctaaatttcaatagacaactcactcttcttttaagataataaattggtttgcatcttgtaagatagtcaataaattgttttgcatgcccataaattaaataacatattcgatgaaaaaaaaaattatctctgtatttgctattttcattctttattctgacactttcacttttttctttaaaaaaataataatatgaaatgttatataaataaattaaaaaaaaatgttagcgatataaattgtgtgtatttaaattagtgttacatctaattaatcccttgctgactgctgttcttgttaaccctgctaatttaacactcatttgtaattttttcgtaagctagtgttacatacaagtcattataaaaccaaggaaacaaaacttttaacttggcaacacctaagaactagaagagtttaaccaagcatcttcttcactttaatggaaagagcttattagtcaatcacatcaatcttacattgaaaaaaaaataaaaaaaaaataaaaactggcagagtcaattgaaaatcaaattactccacacatattgactcgagcagtttctcactggcttcacccacttccacattctccattttcaaccggcgacgcatagcctggcttgtccttccggcagcagcataagtccttattaatgattcgaacacctccacctctaaggtatctacaacctttttcaaaatctccacaaaaccttcggcgccatctacatctttctcttgctcaaaattctgcattaaggtattgacaatttcatcagatggaatccactttttgccatttcctctgccagtggaaatcgcattggtgacacagtcaactgccgatttaaaatctccattcttcaaataataatcgaaaaagatctcccaggttttcacattgggtttggcccctctttggcgggcatgctcctgcaactccaaagccttgtctagtagcccttctttagcataagctccaataatagtatttgcaatacgaatatcgtaagttgagcaccatgattcccattccctgaaacacttctctgcaccaggtagatcattcaaattaaccaacacttgaatcatgttcaggtaacttacatttgcagttttaggaaacgccaatcttaaagatcgccatatacgataaacttcaagaagatttcctgttcgaccatataatgtaattagaaattgaaaagcagaaagatccttgtgcgagtttttcttctccaattccttgagtgcagtttctgccttcttaaacaggccagcattaacataaattgatgctaagttgctatatgtggtccaatcactgacagctcggccatctctcttcatctcatcaataaccctttcaaccccagagatgtcattgacaacagcatgagctcgcatccagatattatatgaaaatgtatccagcataacactactagccttcatttcttgtacaatggcagaaattttttccggcttcccagttttttcataaagggtcattaagctattataaggcattgaacttagaggaagactgagttccttcatcttctccataagagcttcagcttcgtcagtcattaattccttgcagtaacagttgagtaatgcaccataacacagatggttcttagaagattcaggaagatcaatgaaataagtttctgcagcaggaatccccctagatttagcaatcaaatcaagatgaatagcctgatcactgattgtcttgttcgttccccttttcgccatagcttctgagagctgttgaataaataagtttgtaaagcacaaaacttcatgaggagctaagcaaagggtctcatacatttcatatttttccaccaaataaattacttctataacaaaaccaaaagccaaataaatcctcattgcaaaagcaaaaagtaatgtagacacagatacattgatcagacaaaacagtacatggacttcagcagcttaaccttacacaacaatgtgcattcagtttaaagatcccaccaaacgttttttattaaaaaaaatccctgcctaaccctacaatatttggggaccaagaaactatagcaattgccatgtaatcaagaggaactcgaacttagactcttgagagcatactgccttaccatttgaattacccctcttcggtaaggatcccaccaaacatagttttcacaattcaaattttaggcacgaagatggtaaacactattgtttttggacttaaaaatttcatggtggtgtgtacatgaatatttttattgtacaccctaattctcaacaacaatacagtattggaaaaaatgtagaatataatccttgaattgcatctgaaccaaaaactagtactgcaaacaaactgtaaaataatcaattggttcactccctaaagaaacaacaacaaggaatagtccatgtcagataacaaatcaaaaacaattacatagtgtgtgcacatatacagacactcctagtataaaataaaacatgtctttatcatgccaagcgtcatattcatacatagtttgagttccaattcaaataacataaacccttatacaaatatgaaaatatgcatgtgtgtaaatctagtgactactaacaagttctgaaagatacgtactttgatagcggggctgtaaaggtttcgatctcgaagcttcttgagtgtatcatcaacctcccatttgaacactcgctttcggctcttgaggaactgattgagttgctgacgaacactcatttccgaacttccatctttgaagagtttcttgtacagagcttcgtccaaatacttgggagaacgctttgtcacgctcctgctgcgcccgaatagctgaaacgccatttctct

SEQ ID NO: 191086 - DNA, 3440 bp, Cannabis indica
atgaagatggatgctagggagtggggtgaaggatgttagaagtgatttctttgttaagagagaccagaatcccatgtttagcatttcgtttagctatgacaaggataggtggtagtggattaaagaaagcttgagcatttattataccaaaagtgcctatagtttcctccaagaactcaagggtgggtatggtacaaatgctaactcaagctttaggtgaggtccaatcaatgtgtttggcatactctttgtctcaagaatctaactttcacaatcatagttgactgcaatttgcttagaggtgcctacaattagatggtttaggacagttccctgggtggtgaaatggatcttggatcatggcttgctgatatttttgacaaaggatgaaaggaaaagatagttgaacttactttcttgtgtttgagcaatatggaaggctcgtaatgagaggcatggcaacaacaatctccgaccgcagaagaagtggtttcattggcaaatgtctgccttcaacaaaggttgaatgctcaaactagcataacaacactattaatatctacaacttggcctgatgaaaggaaaggccattggagtaagccccaaatcaacataatgaaggttaacatagatgcatcaacaattgataaagaaggaaggtttggctacaagatggttgtgtgcaatcatataaaaagattacaagaggccaagagtttttgcaagacaagaagaatgatacaaggagtggtcaagctataggtatctaggaaggtttgagtggttgacctaaggtttatctaggccatgtgtagttcttttagtattgtctaatcttttggcttaatgatttcatattgtaaggctttgttgtctagttcaaatgatgtttcaatagtttttgttaaacagcctgccaacaaagttgctcatcttgcaagagcttcttgttcaaactcagatttgcactattagaaagtaatactctctatgtgatgttatccatatttatggatgatatcccttcttaatcacgattctcattttattcaaaaaagcaaataattgaaaattaagaaaaagtggagatggttgagaggataagtgaacagactttgggaaaggtggttaattggaaggaaatattttagaaaaagaaaaaatggatttcaacaacatgaagggatattccaaaagtgagaccctttgatagtgggagtctatctatggaagtctacgaattagaccctagacttgatatttgtggaaatctatgaattgaggaacagtcgtggatattctagagtgagtctcttattatgagcctaccactctcatatctcaatttcctaaagccatatgtaataacttgaattactaggataaactaggatatctccaatgagtactaaccaacaaagagctatgattttagattgcgagataagggcaatggtaagatttacatattgttttaatgaaaaagggagaaagaaatggactcatgataagggcaaaggaagaggccagattgtaacggcaaatgcaacctcaggtagaacatgggctgattctacaccaccaagattgggaaaacaacattactagattggttcttcaatagacattaggccaagcaattacatttctagttgaagagagcacatagagccacaatgtcatttccactctcctcccaaacatccccacctttggagctacttgttgaacccgaaaaggtactaaatgttagactaaacacattagatggtttggccacattagaggtccccgtccaatggagattcctaaatcattttaaagcaaccttgggaggactaagatatgattaacaatcatttttctaaggttcaacttaaggacaaggtgaaagtgtggaatggggatattgttacttccaattcacgttcacctattccaagcatccaaggtagtaaaggatttaaagttttattgctgagttgctctaaaaggcagctgagtgttttagttttaagtgttgaggtgctatgtgttaattgagctgtcatttacctttgttactactgggtggctatataggtgacttgttaggcatagcctataaataaaatagaccttacctgggatagggtattgattggtttagtgattgtttagagtaagaaattactctgtggggttccaagtttctcaaataacttggattttgcaactagccttttggctttgatcaataaattcctttcatcattctttcaaagaactaagttgtctatcatgcttgagctttgagaaatgttttaatcccgccaagtaggacaactctggttcctttgataccaaaaagaaaataactcacttttcagtaatgaagctccccttgcctcccaccaaacacaggattagagaaaggaggcatagagagttggcaccaaacatctgcaatgggcatgtgtttgggccacctataacaaatctcttaaacataacttagaccaccaaataagctaaagaaactcactttaagagaacaatgtataactatactaggtgctcatatctgcaattctaaaaaaaataaaaattactgctcaaacagcatatcaaataatcaaacttcttttttccaaatgaattaccaaaatcaacttgcatcgaacaaaaattaccccaaaacgcgcttctcctcataaattttggatagaacaccgccctcttcaccatcaccgcaaccaagaaatctccttccttgaacagtactagcatggcaagaaatcgggttcggagtaaaaacaccctctcgactgcggcccaccaatggagtttcgataccgctaaagcaccgaagctgatgccatttccgtgactgcccaccgttctcagcgagcctaaccaggtgtgttataccgtttctgcgtgatacaaaggatcctatgaccttcgaataagacgaaaatggcggcatttcaagtaccaatttccaacgatataacccaaaataaacaatgaatcaaaacgcaactaacttcgtaagaaaagaagaacagattaaggattggttggctgtaaatccagggtttggttgggacggaaaagaatagggattttgagctgaagaagaagttttgaaattgaatttaggcgccgcgaattaacaaatttggtgttgaaagaagtattaggacagcaggaccgggatcgaaggatatggtagccgataatttggtacagataaaaaaaaaatgggaagaggggaaagagaagagagcggaattgaatttaattaaataaataaaatgacatttttcctttgtctccaagaaaaaataaagaaatatggcacttttacgaaacaatattttttaatgcaaacgacgtgaccaccttgaattttccaacaacacgtgtccatcattatttttaaggttttttttttt

SEQ ID NO: 191087 - DNA, 2422 bp, Cannabis indica
attagagtcttgtcaacacatataatggtgcatacatgtgatatatgaaactcatcatacattaatatgatcatatgaggtaaaaatgcatctacattcttattgacaatttacaaactgaaattgaaaataagaccaagctacaggtcattgaagtaacaacaattagcattgggcatgttaggaccctaactctacccctctcatgtacacaacaggcactattttatacataactacataaaaaaacatacacttaccagcttcgagacaactgaaaccccaatgatgatgagaggaatatggtcctgtggagcacaattgaattctacaaagcattttaaagttacaacaactaataatacaacagaacacaaatagtcctttctacaaataaatattagctaattcttcctgtatgatcaattaatgtaccaacttgttctccacatagagcttttgagatgtttccaggctctaagaggttaaacacgacaactgtgcataagagaaagtaattgaactttgtcatttcattaacttaattttataatcaaatatatataaattaataagcacaaattatactaaccgggaatcctgttgtcttcacagtacgtcagtgccatggcatccatcgatgtggcacctctggcaaccaactctctgaaagtgatgtgctcaaatgtaaaattattatcttgagaggtgcagtcatagacaccatcaacattggtacctttgagaactgcctcggcatgaactgaggatttaacagtaataccatgttaagttcaagaaaataagtaagtctatctcgtcactctgcgagttgagagaactgtgataaaaagattaggaaaaactatagtctcagtaaataaaggctacaaacagaaggtcgaaaaatcaagaccgatccatactttccaaagatcggaaagctgcagcagtgtctgttgaaaagagtggatttcctgtggaagcaccaatgccagcaaatattacaactctccctttctcaagatgcctgattgcccgctgtcggttgtaaggttcagcaacctcgtgcattgaaactgcagtttggacacgagtttgaactcccatcttttctattgctgactgaagtaataccgagttcatcacagtagccatcatactggtagatatgagagaatcaacatgattcggtaatgactattatataaagaaaaaaaaaatcatatatttcaagttcattgggattagagtacgcaaaattacagataatcaaatgacaatccaataagattacatcaatctcataaatcagatcatcaaacattcacatccctagtcataactcaatataacttgcttaccaaaagaaaaaactctatatgacttgaaatacatgacaaatatatgacataacaattcaaagatatatacaatcgtaaaacttgataattctacttacccaatttgataggctgtagttctatctaaacctgttgtatttacccatgtatctccgcaaaagaagttactgccaccaaccacaatagccacctgaggtataaaaaaaaaacataatgtagtttgttaatgctgaaaggacagcaaacaggttacatgattaaaaaatatatgcagatttcagtacctgcacgccaacacgagcagccattgcaacttctctagcaatcaacatgaccacctaccaattgaaaggaaaaacaatttgcttttactgcagagaattaggaaaagaaaattacaaataatgcctacgcttccaaacaaacctttgggtcaatattatttggtgcagcaccggcaagagcagcaccactaattttcaagactactctacgccatctaggattcattgttgccttgggcttcacatgaactatctgtccagcagaactgcctgttgtcaaagcatatctgccaatacaacagatgagtaagccaaagaattcaactttaatttgaagggagttcttaagtaactttgcaaaacccatcttcactccaataaaacaaataaccataaagattaaaaaactacaacagcaattatagcactacaaataaagaggaatagccaatataatgagcacgaaacaaaacctaagaaaaatgaaaattaaacaatagcctaaacagcctgagtttataaggaagcaatcatactaaggaagtgtatacaataaggtaataccaagacacatggatgaattccaaagaccaatctggtacaccccccattaccaagtattgtccttttaaataaaaccagctagttggactcggaagaacaaaagttggatttgattcaatctgaaaaaaccaataaaagaatgtaaaaataaaaaataacaaaaaccagctagttggacttggaacataagttggatttgattcaatctga

SEQ ID NO: 191088 - DNA, 1504 bp, Cannabis indica
gccatgatttccatgtaccgttttattatcaatttactgccaccaacaaaaaggtcaaagactccctcatatattgtcaattacaactactcatactcgacagaataactaattcattcaatatccactcaaatacctatttcctctaattacatgaaatagtatcacaaatacctattccctctattatataatcgttttttgatgaatacaactaatacaacctattagttacataaaatatttatttgtatgtataaaaaaacattttattttacatttttttttgttaataaaactagaaaaaatataattaaggatgttctttatatctaaacttggaaaaggacctattgttcctggtggcgcaacaaccaatgcagtaaataatagtgatcacaacaagaatacaactattaatgatagcaaaatgcctccattccttcctgatgttggacaaaactccagccttgcatgacttgcagttgtagcacagcaaattttgttggttgctccatgtcttgcaatcaatgtccggtaccgccggccctgccttaggaacctcccaaaacgtgaagtttacaagctggaatccgcaataggatggcggcttacaacaacccgactgcattatttaatttaattagaaagaaaataatacacattggaaaattggaaagaaataatataaaaaatgcatacattatataggtggtaataatttaaaaatagtaatatcattttacaatatgcacaaaacttaataaataaaaccaaacattcaaaatttgattaataatataatgtatattaattgttaattttattatatattataacctgaataggagagagattctcttcgtaaaatttagcctgagtttgataaacattgccaggatgacaaacatgagcctcaattaaacaacttcgaatatcagcccaattattgtcattgaccacataattctgcaaccaatgagagaaatccccaaggcgatactccttgtagccgcgaccagagatggcttgtccaagacctttgtttgtgatgaggagagcaaacaccgtgaaaccaatgagacccaaaatcatcaaaaatatcaccaataggtatatgtacaaaattgcgttgatcccccaccatgccccaaccaaccccaaaagtgacaccatgagaaagaatgtccccagaataagcagcatgttctctattgccttcttgcaatcagtcccattgtggacacgtaggtagatcgcgacgctaatagccgcaacaccagcaagtagggtgcatagattaaggagccccactatggagttgcttagccgaaacattatattaaatatttggagatgtgagaatatcgtttgtatatattcgggctaaaaaaaacaagacaaaagaaatgataatgctagaaaacaaccaagaaatctaagagtatattgttaggaagaggggtaaaaatgtttaaaatagagagagagagagagagagagg

SEQ ID NO: 191089 - DNA, 2858 bp, Cannabis indica
ttgcaacgaagatggggctcttttcgttgcagccgagctgaatgttgatctttctcatttcgagaaagatcactttactccaactcctgagtttaatcgttttcttattccctacataaacgagtctctcccaatccacgaacgccctatttgtcttgtacaacttaccaaattaagttgtggcggtctaagcctagggtttaccacctcacatgtcttggtggatggactaagcggcgccaatttcatgaccgagtgggctcgagtcgcacaaggcttgccgttacaaaaggtaccttttttttgacaaaaaggcctttggagttggatcaaattgttgtggttcaaacccgctacagtttgatcactcaaacgacttttgtagtatgccgtttttgttgaaacaacctagcgccgaagagcttaagaagatggaaacaacagtgttcatgttaaagcttacaaaagaacaagtccagaaacttaagaacaaggcgaataatgatcacaacggtcaaatgataaaaaaatcatcatcgcgaccttacacgtgttacgaggccttaacatctcatatttggagatgttcgattaaggcaagaaagcacttaaacgaacaactcacagcttgtctcgtggcaattgactctcgtcaacgtcttcaacctccgttaccaatttcttactttggtaacggagctctcaacgtaatggcgagctgtaaagcgggagagttattatctcaaccgttaagttacggagcgagtaaaatacgctccgtaattgatatggttacaaacaattatatattgtcagcaactgagtttctaaaaggtgaacaagatttgaccaagtttcaatactcttataaatcttcaactaatggaggtgggaaatatattgggaatcctattatgagtgtgacaaattggatgaacttgtcgtttgagggtattgattttggttggggaaaagagatccattttgggcctggttatgatgaaattgatggtggtgttttgatacttaggaataaatgtagtgatcatgaaaatgtgtctctattgattttcatttgtcttcttgtggaacatgttcaacctttcaagaaatacttttatgatgacctttaattgatattatatatagtgttatttattttaattgtggttgttgtttcgaaacaaaataaataaattgttaagtatattattataattgtgtgttgtttttctactgtattaattaatatttaatcctattacaagtaaataatataattcaatgaagaagtactagatcgaatattaaaaaactaataaacgttgactaataagaagcaacattaaggtatgaaaccaaaaaaaaagaaaaagaaagaaaattctttaagtaataaaaataatggttttttttttgtttcatttttacattttaaaatagtttttttttttttttgaagaaatttcaaatataaaccccataataactaacggagcaacttaaatcgcaaccaaaatccacatatacataaaaactactaaagtaaccaccggagcaactcataccataaatttaagaaaaaaatagtatatggagtaaataaataaataaagaaaaatgattatttttagaaatacacaaaaataacaataaaaaatgcaaaaatacgactgtaaattttaaatatttttatagtttttaagatttttttttatcaagaaaaaattgcttcattaatcacaaacaattacaaccaacaatccaatcaaaacaaagggaccactaccgacttactttcaaatcctctctatgtatactctctcataatctttcaatttttttatttttatttttgaagtattgtaatctatacaagacaactctcttcacttcatttacaattgctctaaccgaataagaataatagttgtatatgcatctattcctattgatccataagctataaatcacagcagccaaaatagcaacattaatcctttgcttcctgctcgttgacttccaggcttgccaacctcgccatctttcaaaatctgtaggccaatacctgctgccaagccactcaaaaaccaggtctgcaactcttctcgacagacaacaactaaagaaaagatgctgctgagaatcatctgtcaaaccgcacacatgacactctttagtatctaactcaatgtaaaattgctcgagcttatcacgagtcaagagttgaatgttcacaacttgccaaagcatgaaccgatgcttgggcacgttcaaagaactccacatgctactgttgtagtggaactgctgctgaggaattaagctgttatacaaccagtttgttctaaacttcccacctgctccagctaccattatgtccttgttcgagaacttatccttcaagcgacataatttgttccaataccaacttgaatcaagcttaagatcataggaccaaatgaaagtattctttaaatacacattattgatccattcacccatagaatatttcttttggctaaaatggcccaaatgtatttagcaagaatagcttgattctatttgattccatctttgaatcccaaactcccatatatttttgggagacacactttttccaagaagccacatgtatcttgcttctatatatttccatttagaccccaaagaaaacctctgcaaagcttttcaatctcatttgtaatacggtgcaaaagtatgaatatgctcatccagtaattacgaagtccaagtaatactgaatgaatcaattgagctctacctgcaaaggatagatgtctacttccccaagtgaaaagtctctacttaatattctttatgattcctccacaatc

SEQ ID NO: 191090 - DNA, 3971 bp, Cannabis indica
aagagtaagagtgccctatatttatatgggtggacattttgagacaacttttggtaaaaagatttgcatgggttcttttgggtaggtaacttggtgatgagtagctctgagtggttagtgtgctgaagaagttatagacgatatcataataatcttgtaatctgaaagggcatgtgtttcactgaattctgatctctgacttcttttagaaaaagcatatatttatgtattgtatattcttggacaccaagcatggcttttaggctttagcagatccgcgtggattatatctgcatataggatttcaactacttaatgttttaagctactttgggaccccttcaagaacattttgtgctaaattaaacaaggatattctatgatgattttcttttaaagtcactgaacatgattgttgaatcttaagatagctcttcatgaagtcataagataatataatatctgttaattaatactctccatataattgttaattgttaagtgaccaaatttgatgtggttattaaatctaggataactcttttcgtctttttgtcgttgaagttataagattatattacataacaaacaatatcttttatttgtaagcaattgtgtcgcttcacataacaatgacaataataaaactatacttgtggagatcgccaccacctgattcctttgctcttgcgatcgatgcatcactagttgttgggagggggtttgtcgcgttaggtggggtgatcagggatggggcgggggtggtctggctgtcttgggcagccggtgtgttgggagagtttacttgtaagcggcggaactatttattagattggaattgacttttgcgcatcaattttagtttattatctctattattaatagtgattctgctgctgttggttagataaataacccgcatagaaatgctgcttttcattatatttttttagatattaattttttaatagctgctattggtgttggttctttcacaacttgtgaatggcgttgtccatatactaacaacctcaccttatataaatcgatgcttgtccacgatttatgagtttgtctatagcagcaaatttatcttaataaaatgtaatttttctttggtgcattgttattttttttaaaacttacaatgatattcttcatatataacaagccctcattctgccctaaaatcatttcagtcttgaaatttatagaatactaaagaatttttttaaggttatttatattaaagtgtcagagtattttattctttatttattttaaaattaaatccccacatatttggaaatgtctgttagttggcagagcagaaaaaatacatgaaaaaatagaaactaaataattagcatataaagataagctcaaagcccaaataaaatataatagtagaaagtgtttatatgtaatatctattaatttatttactctaaacccagtatattcatatattgcataaatattttatcattgtgatgaaatatcacataaacaggaaacaaccatataattttgttattttggattacagctgatcttatcattacatctaacttgcaaggactgttttgaatgtttaaggttaaatttatttggctaggtgatttgcacaacaactggcaaaaatcatcctcaaattttcatggttttcaagttatacaaatctgtgaagttaataattataaaaaaatcatgatgaaacatttgaatagacaatggtgaagaaagcaaagaataatcttctagaatggcaatttcaatgcaaaacaaatctgccaattttttcaggtcagttgggccaatacttttatttattttttttcacttaggtgctaattaatatcaattagctattactttaattcatgttatgaattagcttttcttagtgattatatatatagccaacaaatgaagacaacatcattttcccctaagaaaaaagagaacactccaccaaaaagtatgactgtctttcacttgatttgcccacctgtcaattcctacctctttgaccatgaaaaaacaatacagtttgattattttatattttacttggtatatagggtaattgtcttgtgtattaactttttttctccttatggaaatacaaaacaataatgctatgaacaaaatcagtgtctttcatggaatttaattcgatttttttattaaagtgtttacatatacattacattctacaatttgaaattcagaaatccccacccttccaagccacttaaaattcgatctcatatatgtatatgcattttgttcttttcatgctgtcataagtacaaaacatatacactttttatatatatatatagagagagagagagagagaaacagagccggtttatttattcagatcaaaacaaaaggaaaaaccaacctcattctagatgacctgacccaatatgacatcagacaaaactcctctttctctctctttctctataatacttgtacatacatgatatataattacagagcataaataatcaccctaaactcacaaaagtcacaaaccactctcaactttctggtccattttccaagtgaaaaacaaatgagctctgatccaaattttcacttgccttgagaggcaccaaccaaatgcattttgactcttgctcctcattgactctccccattttcacagctcagacacccaggtgaaaactagctcaaacacccataaaacaactaacagctcccttttattcctctttctttctctctttctctgttcaactttcttatagaagtccttttctttggattatatcaacagatcaaaacagaaacaacatctcctctcatgcatcatctcttagttatcattatcatcatgaaacagatcatgggtacattaagaaagatattaatgggttgtttctctctcctactattggtgatgataatgattttagtgtttgagaattcatcaacttctgctgatgggtatacagaatttcaaagcttcaaaaaagggtctccctcagaatatgatattagtcctcttcaatccaatacaccaggagaaaacacatatggagataacactgattctactcttgttgatgaaaagagaagaattcacactggtcctaatcctttgcataatagataagtttttataaataacaaacatgatttcccttcattcattttcaagttatgagttcttttatcttctttaatatttttgttcaattatttagtattttttttttctttttttgtttagaattacttatatataagatggctgattattcataactatcagtgtgtaaatgtccatatgaatgttttaaggcaatgatgcaattgcccatgtaagaaagtttttggtctttgaggatattggtgaaatattgttgagttttttttattttttttaataaataaattttgaagtttttgtacatgtctttgtacatagaaagaaaaatgttaccatatagatagattggtaacatatatggagttgttgaagtatgactctttgagaagggtttgttatggttggtaatggttaattaacattactcttaagaattaaggtgttaattgagagtacagctgtgtttttattcctttaattatgattcaattttaattattacttttcctgatcttataggaataaatctattccacataatcatttatccagagtttggtccatgtagatgacataacattttgaagttttggtgctattttaatttttagctgctgatctatgactccacatatatattcatttaaaaattgcacacaagtcaagatgaataaagcatacttataaaaattaaagtgatgtattgttaattgttatatatttgaaggaaaatcgccattaatattaatttgtctcactttaatatctatgtaagaaaaaaaggataattttacaaatacaataaaaaaaaaaaaaaaaa

SEQ ID NO: 191091 - DNA, 4067 bp, Cannabis indica
tgaacaaaatgttgtagacattgtcattagtgtagatgtagtcattccttcttagagaaatatgtaagagttaaaattatgtttggaagttagatttcggtgaggaaagaaagaggtaagaataataatgtacaaaaaagaaagtgttgaaaaaaaaaaaatcaagttctcaaggtgaaataattgtatgggaaataaagttattcaataaattttttcataaaaatttgatattattttttaatttttcatactttttttggtaacattttttacttaattttttcatgtctgcataaaaaatctaacttccaaacataagtcacgcaaagttctaatggtttccttcatataccactcagattgaattccaccaaaagaagcagaatgcccttaccttgagcacatagtttaacaatgtaaaattactactaattcatgcctgctgcaacctgcaaatattgttttaagacacagaatttgaaaccttcttcctttgctggaattgtgagaattaaatgactactgaggttaacacatagtacaaggaatcccctgaaaaaacagtgcaaagaacaaaaatgtgggacctattttcattcaaccatgtgaaaacgtaagaagcaaaaactatgaaagttaacttgtgggaaatggaaaaagtaataggatgagacaaaaactggccttatgtttatctttctttactcagaactgtctcacattttcagtaatataaatatatgtacatagaactgtgctacactaatcgagttccctttatagtcaggtccgccaaatatgtaaatctcaaatttgtgagagaaatcaagcaaaaagaaagaaagaaaaacagtaaaatacttgaacacctgaacttgaagtacagtcttagttgtgcagcagttttttaaacaaactttctgcagcctatcttaaaatctacgtacaccttctcattcttgccaaaggcaaaacttttatgttgtaataactaataggtactaatactacaccatattccttcttttatctctaaaatcagtagttatcttttgccagaaacaaatgatgacaatccaatgaaaatacaacctttggaaaagcagcgagaggaagagagataccatgtgaagaattaaacatgatttataattttggatacaaaaaagtaaagaaaaaactataactactattttgatctaagctgatagaagtcaggatgcatagagtggaaaacccattcacaaaatatccttagtttgtttggaagatctttttttcttctttcttttccctaagctcatggagtcaacttgaaacacaaattatgtagtctctgagttcgttgaccaaatgagctgacttgccattctttcttcctccttctgtgcttgattggcatttagatttaagccatcttcttggtcaaaggtgaactgtgattgtaatgtactgcatcttctgtttaatcactaacagttttctccgaagccattattacagaagatgttgattacaatttatttatgaagatccaaaaacatctgatagttcttttatttagcttctgtcacatttgccttcaaaacttgactgaagttgattgtagctgtgacaaaaagaacaatgtcactatgtatccatacaatcaacaaggccaggacaggtagccaaacaacacaggaataactcccatgtcacaaaggagttttacgtgctctcctcgaaagaatgagagcgagaaagagctgccggatttgactgtaaaacctgatcagcatccaatgaacgtgaattggcatctgatttgggttgaaaggctttaaagataccacctcttatgataggtgtattcttatcaggtttaatacccaacgtagaccatatagaactttttgcagcctcatctgggtcgtcaatcctcaatgtctttggtacccaaaggcgctgccctgttttttcttctgcctgcatatttgtatctcttgaatgtttccccaagattgctgagctattacttgaagagttagtgttgactgtggaagatgaaggtggcatattaccactgtatctattaattggctgagtccagttttgggtgtcccagtttggcatgtaaccccaatatgaggcagggagaaatggaaatggggtatttggtgctgaaaaaccgggaatcgacaccatgggcaaggtacctacattagaaggattgggattgctgtcattttgtccgaccatcataacactccaaccagggttccaaggataagcccattgtggaacaggataacactgcattggatgtctatggtcagcactgtcgtcttctcttctaaaacaactgctattttgtgaagaatgggcattcaaggaattgctggacaaggataggtcctccgaactatctccaaatgcagcagattctatttcacttttcttatggtcttcgatattaagcttggtttccatagattcacacaaaggagtctctgaactaaattttaacccttctgccatcccattgtcaagtctggctgaggcaggaaatctattggatggtggagactgatcgctggtagcattattgatgtcttcttgtgtaactactgctgctgaatcatttgttgtttcttgatgtaactgtgaagatgaatgcttattcctacggcgtccagcacccacaggtacatttctaattgttcccccggctgtccaatatctttggcagttcttgcaaaaatgcctaggttgattaacattgtaattattaaagtagcaaaactttgttcccaagctgttacagcgaggacacggaagaatcttgtctggccttttcaaaatcttctctttgctacttcggtcactttcactcctttggtattctacagggttacagtttacttcattctcctggacatgattttggtaactatttcctttaccctctgagtctgaaaaactatcatgctcacaacacctttctccggtatcctccacttctgcttttgttgcttcttctctacattcgtcctgaaaatttaagaactcattgttttctaaatatcattctgccccaaaagattctgtctgcttgatatgttagactaagcatacttggtatttcaacttcaataacagcatcaactacaaattgggaatgtccaaaaatgacaaaataaagcatttacagcatagaagctacccatgtccctaatttaaccagacatttcttaacagaaaaaagtggcactacttagtggaaaaaggttctaatgcttaaattgtccaagcaaacttcgaccaagttcagcaaacatcatcacacattgccattgcaggtctgaaccagtggcttaggaattaattccttggcttttgagctgtaaatttgttctcattcttgtgcacctaatcagccactgttctacaagtttcaggcgctaatataaaagtacaaactaaaatcttaacacccactaaggataaaattataattagcaacacttacaaaccctatttaatctcactaaaaaaaaatgcatccagtgtaatgtgaacatgacttgaacttgaatgggctctcatcacaaaaaatagttacagcaaattaatttgaattgctaataagcagaagctcttgagcaaataaacactttgaaaccccagattccaaaaaaaaaaagaacaaaagtagtaaaataacgaaaaaaaatggttttaggtgttgagcaatcaaataatcagaacatataaaatcttagataataagtcaaattggtattgagaaggaaatggaaaaaaataactgaagaggtgattggtaccatgaattgagattgagaaagcggagagtcgtcggagtgggaggtctcagaagaagagttggaaggcggtaagggaatattggttccgaagagcttaatggcgggatctgtgagctgagattgagagagtgacattgcttttgcttgctttcacttcaggttaacacttttgctttttccacaaaaaggctctaatggaacagagaatgaaaagaccactttttatttttaattatt

SEQ ID NO: 191092 - DNA, 4725 bp, Cannabis indica
taactatataaaagtggcaataacttttggacttttacatattaaattacttatttatcctcgttttattcccctaaaaaatcttttgtagtttagataaattacattattttaataaatatgcaagaaagagacttttctttttaaggtgtcatgtccaaaatgaagactgaataattaaagtgagcacattccattcattggcataatatatatacctgatgtacacttgacaattgacaccagatgaccagaacttaaataatactcataacacacatcttggtcagaataagccagaataaagatcagttaatctagcatccggctctacacaaattggaaaagtgtctctagagaatgaaagaaaacaacgaacgaacacatacctgtatgtgaaggctcagccaagctttctctaaactggatgctagcactccagcactcacaaagccctctaccaaaataataaaagaataataatgtcttagaatgtattagatactgccacgtataaatcaataatcctggaatgaaggtttaagaaaagagtaataatgtgcacacataaatcacacacaaacttgatacacacttatgtgtggcaagtaaattttaacaagtgggaaacaccttaaataaagatgatcggttgaaattacttgtcacataagtgtgtgggtgtgatttatgtgtgcacatatcattactcttaagagaaatataccattttgccaaacttgtatgccattgtatccaaccgctattacacaaggaatagatttatatgggtctgaattaaattgatggaaggatacttttttgttccataaatgggaaaagataaataagaaacaagtaaaatcgaacaatgcatctgatgccaactagcccttaatagcaaaagcttttgttagacacagataaatataaggaaaataggagaaagcacacatcaacacaaaagaacaaacgttttaaccattttgaagccttcttctcttttgtttggctgaaagaatgtgatttttgaaatatagacaataaagtcaattatataatttatcatcatccatgatcagaaaatgaatagactaaactaagaaaaagcgtctacaacttcctacgataaatattaattttaaggttctccactaaacaatattactgagaaccacaaatagagagaaagattgttcaccagaatcagtagcataaaagataaaaggaattttgcttattaatcaagctttgtatagaaggatacatattgcagaaaactgtgcagcatcattacttccttcagagaaatgtaatagaatgcaatacttctgtaccgactctaccacctgtacacaacattaatgaagtgtaagaataactgagcaattttacatgtaaatatacacccacgcagaccaggaagaacacgtgtacctttaaatcattccatgtagttttttccaaactgtttgactcagcatcttcacctaataatgagttagaaaataattaaaaaagtaaaaataaagcatacaaggtacaactaagaatcagactaaaagagatcaattaattcgagcatctttatataaatcataagcactcatgaaagaaatgattcgagcatcctttatataaatcaaagcactcgctaaagaagtagaatacaaatcaagtgcatttatttatgcatatgcatgacaatgaaaaacatcacccaatggtgttatttacccaaacaattaatggtaattatatccacaattctccaagtatttattcaaccatttaatagaattacttagtttaatattacctcttttctgcaaagaatataacatccttacagattaaaacatcatgaaagtgtttttaacagctttttatgttatatgcatgtcattaatacaagactataactataagctagatgctaatgatgcatatcgttaacatacaacagcagaagccaaaactttctcataaaaagaagcaaaatagatataaatacatcgacttgattataatttatatgtatgtatatatataaaaataatgtccatttgtttctgtattgagcaaactgaacatggaattaacaaatcgtccaaatgcacattaattagcatttagttgtactaagaatccctctaaaaatacatatacatatatataggaaaatctttggtgagcattagttttgcttttagtgtaaagacatttcttatttttgatatataaagaaattataaactaaaagaatttatatgatgatttacattataattatactaggcatcctgcttgttttcgaaaaattctgaaaaatttagagtgccgaaaataagattcaaactattttattttacgcaggcgcaacagactattttgaactttattttcgacactgtaaaacattcaaaatttttcgaaaacaaacaagatgcatttacaactacaatctacaacatcatataaaaaaattgagatataacttcttaaagtaggaaaaataaaaaacgtccctacagtaggagcaaaagtaatgccccaaactaagaagcaccctatacatgtataaacaaataactatgtcgatacatgtataattattcagtaatttaccacatcatttctccatttataagaatgaattataatatacgagcagcaccaaccaaatggaattggatgttaaattttatgactccagaagaaaaaacataatcattacagaaaattgaatacctgaaatgaaaacaacaaatagtttcctctgcttcttggcttcagcaattgcagcaactatggagcctttgtaagtgatagaagatagcgattgttccatctgattgagcatcagtcaaagttataataaccacacacacacacacaaaaaacacaagtgaaaacaaaaaacagatgatccaaacaaaaaccatttaatttctcacaaatttagtacaacactaactcgaacgggtgaccaaacaaaatgcaataagaatgtactatagaatattattcagtattgaaattagaaatgtatacacaatttggactgagaatgaattaccaacactatttagaagcttaaaggacctattttttcatctcttttcttttcctttgtatggccaagtttctaatatcatcacatgaaattctgaaatacagggccaaattcaccaactgtttagatcaccatagctagcaatcactctgtgacataggccatgtttgaaattaataatggacaaaatttcttgtgttcagatttagatttttacagagaattttccttttcctcaatgtttttgattgtctcatcactaaaacctaaaatcggaatgtagcataagcaacggacattgaaaaaagaaaagaacagctcagaagtggttatctacatgaatataaatctatctatataatatgtatatatctctttcctattaaataagtgcctatgtaacagaatttgttgtgcttttaacatatttttttcttttcaaaaaagtgttaacttaaacagaaacttttaatcactaaaacaatacaattagaacagttgtagcgaaaaaaattgtttcaacttttcaaaacaatatgtattagtttagaatatacagtggagcgttttcttatgcataaagtataagaataattgtgtatgttgttaaaactaaatttgcttcattaagtcaaaagacttattacaagcttaatatatcttcatccacacagaagcaacaaaatctaatcatataaaacaaaaatttcaaagtgaaatcattttctgcatacaaagggaaatcagtatttatcactatgaatagtttaaagacccattcatacacaccctccctcttctaaacactgagagagatatactccaactctttctctttctctttcgtttatacaaaaattattaatttctaaattggaaagatggttggtgcgttggttgtattgtattctcattcacttttttttatttccttctagacactaaaaaaaaatccaggagacttattaagcttgtagaaaaaggtaacaattttttcacatataagatttaacattcatcaataacaaaaaaaaaaaaaaaaaaaaaaaaaaaaaaaaaaagacttaattcttgtaattaaatgagtcatattcatcaatttataacattcaaattagattttctttattatttctctcagtaattaattaagagtgtgtttgtaaatcactcttgactcacagataaggtatgtatgattcccgaaccttaacaaaaaggattgagctccgctcatcccttgatctctgcctaactgggactaggctagtttcagtgtttggttcctgacttgatgagagtcacaaggctttaaagaaggtagaggaaatttgtttggtttttatgctttgaccttgctcatatatcaaggctgagtctaactaactctttatgtctattactaagtcgtgtaattaataaggtaataattacgcatactaataattacactatattttaaaatataaatacaaaacgtgtttggatacgaagtagtaattatatataaatttctaagtagtaattatatataaatttctaatgtcttgtttgacaaaataattagtaattacataagggtaatatttttcataatcaatatttaaaatgaaaagtttttagtcattaaagtcaattctcatgggtca

SEQ ID NO: 191093 - DNA, 1730 bp, Cannabis indica
atcagacttctataaatatctaaaagggtattggtataaaggtatagagctttttacttcaattggaaaaaaaatacagtctttgaatcattcgtcaaatattgtcaaaaatataatttttttccacctctattcaactaagattaacatagattggatctataatcaaaagggtcgtgtttgtatataacgatgattaattttggataaaacataagaatatacgaactcctacagtccagagtacgcattttcttggcttaaatagaaacagattcaatagagaaaaacacagaccaatatgaattttaaaaaattgaattacctgaagaacaaatatccgaagtagaagaacccaagctcacaaattcatcgtccgaagaaaaagagctcgatctcgagcagccatctccacgagaagcatcagatcgccggtgtgtcgccggaattctaacaggcggcggaggtggcaccataggaaacaaaaacttctcataatcagaggaacccagatcgcccttttcgacgatatcctctttgagagcggactcggcctctgaaaacccgtttctccttaagaacttcaacactgagtcgacatcggagaccgccatggatatcagaacaacagggagaaagaagagttgggttggagactagaagagaagttggaagaagagggagagtgaagaatatgccatggttcaaggcttgcatgcttctttaggcctctttatctctatctctctctactgtgtgatacagaagctaaaagaagagaaggtggtcgtgtcttaccaactttgaaaagtgagaggtctttggtttggggtttttaggggttttggctatggtgggacccttttaccgttctattgcatacgtacacgtggattatggtcccacttttgtaaaataaaaaaaataattactttaattttttaattagttgttgattaacttgatttgtgggaccatgtctttctaagtaagtttattcaatctcgatttagataaattgacagttgtgagattatattgtgtagtacgatcctggccgttcatttcatttcttttttttttcttaaataaaacaagaagagcattctatacggcccgtgttcttctattctaacctagtaactcatataaacacatgttgttgtactattataaagtttaattccacttgaaataaaatgaataatcatatgttaattaatactaataatttagcatgacttgataattagaagaatgaaaatatagataattaataatgcaataaatattcaatttttatgtaataaataccggggtgtgcaccacttcttgtctttatttttttttctttcttttaatgtaatataatgaaatttttaagggtgtgtttcgtgacattattattagttgatatgatttttccttatctttttcgcattatcaattttcatttgcacatgggacaacttcgtggccaatcaatcgctatataattaattttaaataatatttatgatgcattttcaaacttaattaattgaatttaattaaataatattgcaagttagagtatttgtccatactcttgtttggctggcgttcatataaataaataaaccaaataatgttatatatttttgttttttcttcctttttaagtagattaaatttttaagtatagatccttcaaactaagataaccaaaaaacttgaatatgaaaatatgc

SEQ ID NO: 191094 - DNA, 3286 bp, Cannabis indica
aatgagtgttgactagacaccaccactctactccacggccaaaccagccacgtgggcttgataatctctttattgaatccgagtttcaatctgtacaacaatggagactaactccaatctttctctctctacagtggtacaaagtatttttttctataacactcttgttatttacaattgttaggaatagaatgaattggagtagtgagaggtagagccttatatacactagggtaactatgaaaaaccctaaagtttcgagtaccaactgtcataaccgaatttcaaatattcagttatgatgtccaattcatagccgagttgtcttaagagcatttgaccaatacttaacacacatgttggtctagaaactaatgtttattttgttttctacttaggattaatacataaaagtacttagtatcatttgaaattcgaattagagacctatttatgatacaatcaatgtcttgtatgcttttttcagttcatttaagtttttttaccttttcttcaatgtttgttttatgtgtagaatttcgatgcaaacaaatttacttttgttgattctaacatccacatttcaagtcattggcacggttttgattgtatacgaagctttctaagcgcgccgcagctacagaagttgagaggatcatgttttggatttcttttagatttagataaatctcttaaaccatcaaacatgattatccactctctcttacttcatcaagagtgcaactctaatataaatgagcttcagttgagttttggtcaccacaaagcaaagtttggtattgctgagtttggtttcataacgggtttgaattgcaatgaatttccaccagattttgatgtcattgactgccctactaatcgattactgaacaagtactttcctaacaaagaattcattaaaagaaacgagttggcagaattccttatgaaaaccaatattgatgatgatgacgatgctgttaaattgacaaaggtttttattgtgcaaaacattttagaaagtaagcgcggtgataggtatattgacaattttgttctgagattggttgatgatgaacaactatttgaaaactatccttggggccgccgttctttcaatgcaacgattggtaatctttctactgctgtgaattgtcgaaaaacggggtatgagttatgtggctttcctttagcttttcaagtttggggttttgaagttcttccgaagttaggctcattgtttgcaactaaggttggtagtaacattcctaaaattttaaactggaagttgaccaagacggcccgcctccatacaatatggagaaaagttttcaaagatccggcggtgtgtattcctatcttgtctatgttttctttttcttttttctttttttgatattatttttctatgtatacaggttgtttatgcccctttagctctctttaatgccagaaggacaccacctgattttagtagtccaacaatgaataatgatgaagatattgtttcactaaaggtgcttttctattataaatactcaaaattttgagtttgtaagctaaatactcaatgtttgtaaaattgtaagtttctttcagtttcgtcaatacagactgttttgaatttattaaaagaagatttgaaattaactaatactacatgttttcgtctgaacctattaatctaaaattcgggttttataagtgtcttatttaagacaatagcagagtctttattgacgaaactggagaaaaattacagttttataaaaattgagtacttattcttttatgccgcttacaaactgacaactttgtgtactatttactctttcttaattatatttccatatggtttacaaatttgtaaaattattgtatatttcacctcatatattttatcaggatttaatgaaagagaatggtgaaatcaagaaagagaatgctgaaatgaggaaagagcatggtgaattaagaaagaaaatagatgagcttaatcacaaaattacagaacttagtggattaaagatggatttcgaaaaaattaaggatcttgttatgtcattagtggataaagatgctgtaaagaaggaaacatgtggagaaggagagaaggataaacataacaatttgttatctggtgaaattgttcctcattcaccagtgattttacaggtataaactttgaatctatattaatgttacatagcaaagatagattttcatttgtttttggataaatattatttttgattctgcgttttgaaaaaattaccgattggatattctgttttattaaatgataaattgaatcttatgttttaaaatggtacaaaatagtattttaaaaaatttaataacaactcgattggatacataatattgcatatctttgtgctataaattatcttcaagttgggtatattaaaagaaaatatcagagtttaaggtattattttgtacctattttaaaaaaatacaaggtttaatttatcatttaacaaaataaagggttcagtcaataacttttactcatttttcatatgcaggattttggattcaggtgtagaaattcgtcaaatgaaagaaagattgcatttgcagaacaagaaagcgaacgatattctagcaattgataagcaagtccaagaaatgggacatggattgttttgatgatgaaattccaagcttattccagcaatggataagcaagtacatgaaatgagatctagaaagaaacatgggttgtgttgatggtgatattccaagcttcttctttttctttttttgaacttcatccaaagaagtttgtttatatatatatatgctaattgtatgtattaagtgcttgttatgtagtactttctttgtggtagctacctaatcagattgttctttcatttgctgcttgaaatgtaccacacccaatttggagtgtgtaattaggatactaaaaagtaggggtgataattcttgtttgcaaattgtattcgtgtcgagacatatacaataggtatatgctcgatttgaacacgaaaattatattttgtttaaacatgtcaactaatgacacgcttatgatatattcaacatgattatgattcatttatgacttgttaaagtactaaaataattttaaataggccattaacatgtttgttttgtgttagtcatgtcaatctgaacacgatccaaattcgcttactctcgtataatttttgaattgtgttatcgtatctgacttgttttgccgaccctaatggaaagactctttttaagttttgaa

SEQ ID NO: 191095 - DNA, 5386 bp, Cannabis indica
ttattttttagttcctgagttaaagtgagtaatttgtgcattattatttgtgatgtcagctctatctggaattaagaaaagggtgtgaaatttataataaacttttctcgaaaaattagtcagaagattgaagtttaacaaactttctttcattcaagaaacacagataatgagataaactttttttattaaagtttaaagccaaatatactcagaaaaaaaaaagtttaaaagccaaatatttgtgttttggaaaaatacaaatgggaccaccattacaacttaaactcacgtgaagtatatttctcttcatctcttcatcttctccacattcactctcagttacaggacttccattaatggagagaaagctagtacaggtctccgaccaagaggtccgcatagacttcgcactcaactgcaaatgccgcgctaacgtccgccttacctccctatgcgccacctctccagttgcattcaaaatccagacctcttccccacaaaaattcatggttaatcccccaacaggactcatccctcccttatcctacgccactttccaagtcattctcaagcctcaaacccaactccctcactcttatcctcgctctccttccgaccgcttcctcatcaagaccgctctcttccccgcctctgcatctccgtcaccgccgccaaatcccgactccgtcaactcctggttctcttccaggccaaatttatccactcaagaccataagcttaaggtcgcgtttgttggccccgttctcctccgccgcgccgtctccctcggtgactgcgacgccgccaggaacttgatcaagcggcagaaatctgtgttggccggattctcggccaaggagtctgagtcgatcctacgagtcgcgaccgagttggctgatccggaaggaatggtgaacttgcttctcgattccgggttgaagattggagcgacggaggttttggaagaagaggaggcgaactctcgtggagtggattccaagtgggcgagtaaaggctgggatgagttacacgtggcggcgtcgtttgatcgtgcggaggaggttttggacttggtgagagggaggggatctggttcgttgaattgcgtagataaggagggaaggactcctctgcatgtggctgtagctaagggacatatcaagtgtacgcgggtgttggtggaatccggtgcggataaggacgctaggagccgtgatggccgcacggctttatatagagcagcggctaatggtgaccgttcgatggtaggcatgctgatccaaatgggtgcggaccccactattcgaaatgatcgtggacgttcggcccttgatgttgctcgagataagagacacgtaagtagatactaccgacaaagacagttatagttagttattcgagaactgttgaaaaagatgaaacttgaaagccactaccttctcctctttttaacactttctaagtttgtaacttaagaaagagtaatgatatccacctaaaatataacattacaaaaagttgtgttaatcaatcagttttttttgaaaaaaaactaataataatcaatcaattttatatcaaaaataaggtttactgttttaaaaatcaccatcactttagttgacttataaaggcttctcacttgaaaaacaatgcagagtgaagtggtggaagttttggagaggggagaggaagtgttaatggctgcaaggcggggcgacacagagtgccttgaattgctattgaaaaccggcgcaatcataaactatcgtgatttgtatggtctgacagctcttcacgttgctgccatgaaaggccataaggatgtgcttgcaatgcttgttgaatttggtggggacttggattcccgggatgatgaagggcattctccgctgcattcggcagttgtaggcggaagtttagaggcagttgttatgttggtacgtaaaggagctcatgtggatgttgagaacaatagcaaggtcacgcctctgtatatggcaacaactatggggcaacgggaaattgcagagtttctcattagcaaaggagcttcctccgagctttctcttactactttaaatctatggtatggaaaatttaatggccttcttccctcgtaatttccactagtaaaataatgatctttaaaatatataggaatttggtagttgttgctgaattattacagaaagaactatgacaaattgaaagatattaccaaaaataagaaagaggaaaataaagaaattatgaagatatattaattatagtaatttgaagtaaaattatttcaactataggatatcaattataagcggtaaacaaaaataggtgctaggggttctatcgtccttgtataaattacacttgcactggacccatataaacctgggagtgggacaaagatttttcagtgaaaatgatcagtcatacccctttaactacttggacgccagaaacccttcttacaaacaagaaactgattttgatgaagggttaaggaccagtgaagtgattccaaaattggcttaagctttttgatcgtgtctgttgtgtcttgaaccagtagatatccacctggtctcaatatgcgatcaatctccgcaacaatttctaccatgtcacatctgggaagaaacaaaggaaaacaaaagcagactttaaaaccaacccaactaaagaaatgtaataagactaagatttgcatttaatttttatatcagagtggcaagaaaaaggtatccaaataccttcgcgtaaggtttcccaagagatagctggaatgtagtagatcgtatgttcgaggataggtattgaaagactcacaccagtcatgatatactccaactaaccctctgtcataaattatagacaatgtatctggcatatcaatagggacaacattcattacccatactggttgatcaataagagctgcaccaaaactgagaaaaaacaaaacttaaaattagtttatagctttagtttttattatttgcagattcaagattgaaagaaaaagaggatggaggggaaacggggtaatgatggaaaataatagatttaagctaaatgattgaatagattaccccccataaccagcattcatgtccataacattccgcacacttgaccattgaatagaaagaccttttaaataaaaatctgaaactagtccagaccaatgcttggtgtccttgtagaactcttgcaccgcatcttgttcagttgataagcttataggttcactcttgagcctcttgggccaaggctcaggccagctgaatatgttacccatgctatcgactggaagtggagacagacaactgcttaggggcacgtacctgtcacacagtgtaatctaataagaagtgtgtagaaaaatgaattctttaaggccataatcacacaccatctaatctacaataagaagacaatcagtgaaaagtagcagcagcacattttatatgattgttagatattttatggaagcataccatgaattgtttttcctattttcattgtcacagataggtggattcttttctttgcgtttctcatagcaagtattggagacaggcttttggaatatgacaatcccaattcttgacgtatcagaaagggtcttagcaacaaccttccaacacagagagctcgtcagattcaccatagctgcaagaaaaacaagtacatatatctttatcagctttagtctatttttttgtaactttccaggtattaaattaatactgatatgtaagtatctcactgatcagatcacgcattaagataggtttcagctaacaaacctttccatttattctgatgggtttcgtctttacgatacactggtgtcgctgaccacacaaagaacccgccaggcctaagaatcctattgagttccatcaatggttttccacctaatcatacccaaccacactagtcaaaactaaaacatgaaaaaggttgaatgaattgaaaagaacttgggagtcaaaacaaagtaccatcagcatcccagtgaactctgcatcgtgcacaatgaagtaaatcaaaagcattgtctgggaaagtcagtttttgagttccaatgactgaaagaatagcaggtattccccgttcaagagcaaactgtatctgagcttcgtgttcatcctttggggcaaatgacatggtaagaacatttttatccagcaaagctccgccgaagctagcaacaccacacccaacatctaaaataaccctcacgtgctttccccatttaattaggggcaaagtctaaagcacaacaaacacaattacaatcattatacgtaaaatatattttataacaaataaggtaatataagcctgcttaagtttctcaagaaatgaatccactgattgggaattaggaaccataaaagcattcaaataatagtttatttgttcgtttctgtcaccttctctatgaactgaatgtagttatcaactccttgcttgaactgggtaccaccaccagggaaaacaaagtaatctcctgatttgcgaacccagttttgatccttcttgtactcaacaagctttgaatgtggaacattatcataccaaatctgaaattaaaaaatatatacatcaaaattagtaacaaacgattcaaaaccatgaattatgagtcgagtttttctatacatatagacatatgtaaaagcttaccgaagtatcaatctcaccatgtccctgctcttaggccatgaaactggcatcttataccctttgggaagaggcgacaaacaccttggactaggatttggacaatgccgctccctatgctccatgtgcctcctggacttcaaggccttgatcaccttgtaattgtccaaacaaggtatgtaatcgacggcctcgggatctcgacagagcttccattcgaaacccccatcgtcagaagaagtagtggtagcgttatcccggagaaatccgacatcttcgttgttcggcggaggcgggacaaaaggtgttactgaatcgggaagcttgaaggattgttgtacggacggaggaggagggtgagaagatgagccggagacagggagtgaaacaaggggtcgggattgagtatcgggatagaggaagagagggtattggattgtgttggtgaagagtaggaagatgacgcagaagaggagaacagagagtgcgaaaatgaatgggtattttctctcttggaagagattgtggactgagattgccatttctttttctttattttcctgaaatgagtggtgtcgtcaattatacggaaaacgacatttattaaataaatcagctgaccaaatattggaagaaactagatctgtattgaattcctctgtaattataaatagagagagagagagag

SEQ ID NO: 191096 - DNA, 2771 bp, Cannabis indica
gagcaagcaagaacgaaggcgtgatcatgacagagattgagaaagagatcttttaaaccagaacaagaggagaataggggataggatgatgcacgaaaatagagaaaatggtgtggatgatagctcccaggaaagggtaaacgatgaagagaaggacgaatgaaatagtttataagaaggaaggcatataacagtgagttgtaatctgtagtgaacaatttaattttcatatatagtggacaattttggtgatacctggcattaacaatttaattttgatatgtagtgaataattttatttatttaagttgataaaaaaagatagaatcattagatattgcgtcctttatcgttgtgcagagaattttcaataatatttaaacatcttagcattgagtaacttgaggtccctgaccacaataatgtgttttctcatctttgcgaaaatttgtctttgagatttggctacaaggtatgacactgacactaaggacttgattttttttattagtctaaatgttcttttattgctactttgggcataatttgatgtaatttaggtgcgaattcttttttggattgaaaaggcgaacaatttgcgaatttcctggtattgatgtagtttggcatgctatgttgtatgtggtcctgtatgatcattctttagagtgttaagtgatactccattgtgtagccactagctgattgtgactctactctctattctataaatgtgttaagactatctaatttaccatttacttctatggagcccttggatacatatgccttaaggatgcaaaaaactacctatggaaaatctaaaggactgtggaagacgcttacagagggaatttggagtgatgcatttgatggacttggaatgtccctgttattgacttggaaccctgctatttatgtgtgttgtttttagcattcttcaagcttagaagataagaattcagtagattatttaatttaactttcaaagttttagtattttcatgtgttatctataacttaacactatttaatcaaagagaaactaggtggagattggatattgattcataaattatcttcagtatacagtttttgatcatctaaaacaaaaaaatccagggaaaatctggataaatgggacaagggttcatctcctgaagcttcttctgcatttttcaacatttgtgttaggtgcactctccaagagtgttgctacctttcaatcttctaagtgtaacatgttttaatcataatcataagtacagttcataagtacttctaatattaccaattttttagtattattaataataatgtgtacatcataagtttatatatacaattatagcatttttaacaagtctatttttataaaacaaataataaaaaataatttacaattagttactgaatttttttaataaaaaaatcactaaaacttaaataaaactaatatttacgtggctcgccacgtaactttcatctagtatattataatatatatttaggtacatgtagatatatgtttttttaaatatattatattgtgttaaaaaaaaaaaaacttaagagagtcgtgaccttgacaatatggaccattaattaattagttaattcataatctatatagtaattaaattaggtatatttatatattctgtagagaataattaattaactaaaaaattcattcaacaaagtacaaaatccacaatttctgtatctaaatcaaatcaatatatagtattttctccaccaaatacaataatgaataaaaatattataaaacgaaaagtcttataattaattattttataccactcttaatttctagtaacttattttatttaacttattatatataataagttatatattttttgttttatttgcctactgattttctaagaaattaccagaaaaatgtcaagaaacttcatgtaattaaattatataaactcataaactataataacaaaaataactgatatttcaattagaatatccttaaaaatgaataattattacttcgataagagcaaaatttgaactagtactagatcatcagcagcctcctcagattgtgattgatttatatttatatatatttatctaaatcaaaaaattccaaagcttttggaaagttaatcaagctgtattgagtcaaaatatgtcaactagatgagctgaccaaaattctataattaggtatatacatctctctcccccctctctatatataaattatagtagaaaattccagtagttcactcttaaaagaatattctggtagacttcttgatttgttttggtattaaaaaagattttaattttttttttttgagataattacgtaaggtatcatttttattataaaaaataaacaatttttaacgtttacggagttttttaaatatatttttacggtttttcatacaacacgaaaataacaaaaaaattagataaattaatatgaaaataacatcaaaacaataacaaaaaataacacgcagataataaaaaattaacaacaaattaacaagggtacaacatatataataagaccatattttccgtaaataaaatcaaaaaaattgtaaaaatatttataattccataaaatcgtatttttgtaatttttttttgtatttttgtgtattttctaaataatcttttttttttatcataattgcttacatcattaattttaaaaggtataaaataaacttgcccatatatattgaaaagtatagaatcattgttatata

SEQ ID NO: 191097 - DNA, 1758 bp, Cannabis indica
atcaatagatatatatatatatataaatatgaaatacatccaatgaaaagaaccgattcaattacattcattggatgttgaatcgattggatgactgaaattaagttagatcgaatggtaaaatctaacattaaatatataattagattagatcggatctacatagacctaaaaatattggatgtggtgtattaaacacccctaactatatataataatgtaatagtatttttgtagctaatatcatgtgattaatttgagactcacaattttaaaaaaatgttgtattattgaatctagtattctagtgcacataccattaatatactttttaacttcacattttgcttaactgaaagtctcaattttatagtattaacaacttattaagacataaattgaatttaaaaaagtgataaacatgttgatgagttcatatattagcttataattgttttaaattatgggactttaattgttttggaacctctaacaagcatttattagtgcaaaacctagctcttcccaccctatatctatttctaattgcttcaataataaggtgtttggattttatttatatctatgttaccataggtttgttaaagaaaaaatataccagacaaaacctaactttacctctccctacacattatttaatggaaggaaaatatataaatatgtaatgttattttataatataatatatagattacattgtgtcaaatatatattattatgtgaataataatatttagtaaataaattatatgttctataatttattttaaatttattatttgtaacatgaaaacgagttacaactagttacttatttgtaattttttttggttgatcacaaaataattgtaataaaaagagttgttacacaaatttattgtgagattccaacctatatttatatggttgtttggaatcggattaatattaatttgttagaaaatatttgtttttggtttggtggaagtgagatttataaaactccaaaattagtgttgctgaaattacacaaggcaatatgttgcctaaagtagttgttggacaaaaaaaggtcttgaatgtttggtgttcggtcctaatttttgtgcaacccccaaaccacctatttaatctattttacacctaattaagagcccatatagacatgggtgtatgatatttaattttcaagtgtgatcatcattaacactatatttagaggtctaaagtgctctttttgtgacatgaagttttctatttataaaaatacttttatagaaaatccttaaggcgtgataattcctaaacctatttgctagacttcccttagtgtttagagatagggaaaataaacttttggaaaaaaaaatttataccttgttcaagctatggcgatccccactaatctacactcaagtttatgagtgagcgatcatattcttcttcatgttagcttataacatatattatcatatattgtgttatattcatcttttacctttcttatatatatattggaattggttagatggttaacgttaatacaataaaattagtaaagactaatatatgagatatgtataacctaatgacataagttaaaagaccaaaatacattaagagaatgtttactttaatcttgtattataaaacgtgttggaactttctcttcggtcccaaaatatagttttgagtaatctaagtcacacgtgaagttttgggtgaattggatgtgtcaaatgcatgttttggagaaaa

SEQ ID NO: 191098 - DNA, 1881 bp, Cannabis indica
aatgaaaaaaaacacttacatagacaatatttcaacatatgctaagaaacatgccaagattattacttgttgtattatgttaatttactttttgttcatgatatatagatacttggtgttttcaattgggaaggatgcaatcccatgcctcctgaattttggattctcccttccaatctctttccaataaacccaggttattattaactaacaagtttttcatctttcattgcaaaacaaaatcaattacttattatagcttctccattaaaatatataaaatgaaaatcatggattatttaattactattataaatctatacgatttattcccactttttttttggtcttgattaatttttcatgcagctaaaatgtggtgttactgtcgaacggtttatttgcccatgtcatatttatatggaaaaagatttagtggtccaatcacacctcttattctacagttgagagaagaactatttactcaaccttatgatgaaataaattggaagaaagtacgccatttttgtgctaaagtgagtgaaagtaacaattatgttcatatattcatggataattaatgttgtattaacattgctcactatgttcatattttcatagtttgatcagatacataacagatattatatatatttttatgtaggaagatttatattattctcatccatgggtacaagagtttttttgggatagtttgtacatgtgtaccgagcctcttcttaatcgatggcccttaaacaaattgattagagagaaagctctacaagtaacaatggaacatgtccattacgaggatgaaaatagtcgatatattacaattggttgtgtagaaaaggtacttaatattaaataatgaagagtataatattctttttcccttacaaaaaataatgtataaatacagattttatacatatacatatatatatataactcaattgttaaatttaacgtgtcaaaaatagaatatacatttttttaaaatagtcaaaaataatatacaaacatgtataacattctttgttattttttatttttttaatttaatcattaggtgattagcttggatgtaatagtatttgtcacataaatccattagtcaattttcagaaataattattttaacattaattcatctggaacattcataggtcttatttatgctttcgtgttgggttgaaaatccaaatggagattattttaaaaaacatcttgctaggatcccagactatctatgggttgctgaagatggaatgaaaatgcaggtaattaaattatataatcgttttttcttattatgttctttatacttttcatttttttaaaattaaaatatagattaacatctattgcatttacatatatagagatgaatgtgctttaaattagttaatattgtaggctaattcatgatataatatacattttattagttcaatgatttttagcaaaaaaaattacaatttattgtaaaatcaattaattacaaaaaagtggataacaatttgtaacaattctatagttagtttgtattaagtttttatttaatcactaaattttatataaaaaaaataatttgtaaatttgacttacaaaaaactatatgcaggttacaatttgtaattacaattatgctcctttcaaatttttggttattttttttttctttctaaaattttagacattttggaaagtttctcttcattgtatgtcaaagttaattaatataaatatgttatctgaatatttttaagaaagtttgggatgcctcctttacttatattatacataatcatataaaaaaaaaattaacttatccacatgtatcaaaaatatatatttaatttttgatacaattat

SEQ ID NO: 191099 - DNA, 1838 bp, Cannabis indica
tttttcttaacttataaaggttacattgtaataaaagtgttaaactataactaaagtgtttttatcaaaaacgaaagatacaagagcatggtgtatttgtttatattttagcccaattttaaaaaacaaaaatgaagctataatgatagtgtaagaggtttactaaatttagtagattaaatttggtacaaaagtgaaatttattctacaattaacgttattttttttactcatttactattaattaatattttttgttaattaaaacctttttaatattttatttaattattttatataattttaataaaaaaaattgaagacaataatgactttggatgttaatattcaccttatgcattaaaatataattataaaattgaggccaaatataatataatcatatttttttgagttaactttgctataaaatttgacgaagatggtctaactaatgtcatagaaatggtaatgtaatccgctttaaatagtatttatcatttgtcatttgtcaatagtctaataaatcttcatttaatttccaaaactatacaataaaagttatgtattttttaacattgttattggataatagtatttcatatttttttataagtgtcacattatatttaattagcgatattctttaaaaattatttttttgaaactatacgagactcactacttaatattactagaacaataaaacttatgtggtccaatattaccattaggcaaaccattggtgcagcaccaccaaaataatatcttgccatgagttaaaaaattagtgtaattacactaatgatatgtttttttttttaacaaatgataataatatgatacttgttattgtgtatctatcttttaacatttccttaattttatcaatccatgtgtctatgcagttaatattttcttgtatttaatctaaaaatataattaataattaaatgaagtttaatggtagttaattaattaattaaaagataaaaaagtgttattaattaatcacctcaataagctcagggctcccataatcttgaattataccagcaagttgagcactatccacactgtacggaagattcccaaaataaagcttcgtattctcaccactcgccgcggctgccggctcggcttcctccacagattcggcggcgtcagctccctcaacctcaccggcttcatcagccacctcatcggcggtcacggcagccacctcgtcctgagccacggcggcgatcaccctcataagtcgccacttgtaaccgaaagagacgccgccgatgggcgccgaatcgacggcggcggagtgggaatgggagaacgcggcggcggagaagcgggaggaaggagagatgattttgaggttgaagagattggagcggtggcattggagagtggtgtggattgatggagagaaggaagaggccacggcagcggcggcggcggtggcggtggcggtggctgcagccatgttttgattattttggtgagtttaataatttggggatataataataatggttcatggtggtatagaagagaaaaaggaagtatgggtttatgggtgttgaagctgacgtggccacttttttgtccaatcaaaattcgaggagatatgttatgggataaggtacctaaatttaattattacatagtaagatgacgtagtaatttatgaattccttttagttttttttttatattattcttacgaaatttaacacaaaaactcttatagcagttaaagaagcaactaaaatttatatagcaatttacatagaaactatcgaaacaacctaaactgtaattgaaaaaaaaaaattaaaaat

SEQ ID NO: 191100 - DNA, 995 bp, Cannabis indica
tccccgttggtcgagttgctgacttgaccttcttgttggtgagttgtattgccacatggcactgattttgtcgacataagcaattccacgtcaggtggacaaaaattagaataacagtagtggtgtagaatcagtttcacatgccttgttcttttgcaagagtgttagaagagtttagaaaggtataatttactatccctatttatctcattcaaatactatttcttttcatgaaattatttttaatattttttctaacatgagcaaagaggatatggaatttttctttgtatatccaagtttgtttggcataacaggaacaaggagataaaaaaaactagactccgaatcaggcccatgccatcatcaagcttgctaacagcttcttggccgaattcagagcagcttccactgcctaaagtttaacaccaccttctatcaatctcgatgccacagtcacttggacaccaccaccacaaggtttctcaaagatcaacacatatgcagcaacttcaaagaaccaacttaaagctagtttacggggaatcatttacaataatgaaggaggcgtcatagcagcagtagcctttccccatgaaggaggtggagatgctgcaattcttaaagcaaaatcacttcttaaatctctcctttggtgtatcaaagaggggctcccactgcatcaggttgaaactgactagcagtctccgatgttattactgttaataaagaagacttctcactctttggagatctaatttcaaaaattaaaaatgttttgtctcactttctcaatgtcttggtcaatcatgtaaagcgttccgctaatacatttgctcataagctagtaaagttgactttgaggatagacgaagtttcactttgaattggagatgaatcttgcaattttactgctctcctttcctcttagggcaccctttctctcacaaaagaaaagaagcaaagttatcaaaaaaaaaaaaaagcaaagtgat

SEQ ID NO: 191101 - DNA, 2297 bp, Cannabis indica
tcttttcttttatttttttattaatagggtacaagatagaagtgttcataaatgttttatttttttatttctttttagggtcccaattattggtaaaataaaataatttttctcattctatcatattttatatttaatacacattaaggctccatcccatccttcttcccaacaaattttgttttgttataataaattgcagcaattatttcatcaatttaagtttttccagttatccatatataattttaattaagctcttaaactcacttagtttcagtaatatttattaatgtgttaagccttattaggctaagacaaactatagcttttttcctttgactaattcaaaatttgataatcttttttgagattatgttaataataaggacaaatcagacagaactgtcccaaaaaccaatagaagccaagaagatctgacttccatgatggaaacctttattttctatataaatatttataatattaatgaaaaattttaaaatgcacccatttaaaatagatacactaatacatttatttattttagtatctgaaataattttttaattttatcatgatctgtacgttatagttatttaagatattttataaaattttgagaaatcgaaaaaatttcacactaaaaattaggttcaagcagagtattgcatgcgtgactattttattttatatgcgtgtgaagtagactgtttgaacactactttctatcttataagttattccaaattttttaaaattttataggatatcttaaataactataacgtacacgaatatgaaaaaaaaaaaaaaaaaaaaccttaagactaaaaaatttttctagatactaaaataaataaaatatgtatcagtgtattccttttaagggctgtattataaaatcaccctatattaatatattacaatttgattaactacccacttcaagaccaaccaattcataaagaaatataagataatattgttagccaaaacttctaatctcaaatctccttctagaaattcgaattaactacccattaaacaatttgaaatgtgtaacacacttgtttttatttataaaaagtttagtgagacataattgtaatttgcctttgaaatattttgttagaggcagttaataatgttgatttaaaaaggtaatgaattgaataaaattgtttgtggggctaaaaaagaagttattaaaactcatacaatacattacaatatagaccacttttaataaattgaaatgaaattgaggccaccttttctacatttgtctctctttgtcatcaactctatttatgacacaaaatataactctgctatgcttttagcatcaataaatatggctcttaattatctcacaactggtctaagaataccactcatccactcaacacaaattttaacttgttaccatgagaaaatatataacacgagccaggcttttttttaggtcatttttaacaagacactaaaaattattcccactatattacaattatttttttattttaataaggctaattaggatttttacactcaaactttgacatgtaccaaatcatgtcctttgaacttttaaggtcgttaaaaatacccctttaactattgagattgtttaatttaaggacttttgtctaattttagtaaaaaaagtctaacacggatgaaagttcaggggacatgatttagtatatgtcaaagtttgagggacataatttagtagatttcaaaatctcgagagcataattttgtacataaacaatcattgaaatggtaaaattgaatgaaattaaacaaaagtccttaaatctagtaatctcaatagttcaggagaaatttttaacggcaaaaaaaattcaagaacatgatatggtacatgttaaagtttgtagggtaaaaatcctaattagccttttaataattaaataatagttaaataattaaattttatttaatatatatataataaaaaatatacatttttatgtaatttataatactgtaaaaaatttaatgtattattaattttaacactaaatttaagttttaatattattacaaactatccatcaattttgagagaactagatgagacatatttttattttaattatattataatactataactaactttattattcattattattaaattacaactatgtaataaagaaaacaaaagtagatggtaatgaccatggcgttatatattattattattattattattattattattattattattattattattattattattattattatta

SEQ ID NO: 191102 - DNA, 968 bp, Cannabis indica
agatacaaaagttttaataaagatatataattatttatatttatatggatataggacatacattttccttcaatatttctttgaaatccaacatattattattagttatctgattgaattgataggattcttttaatttggtcagcactagactttgaagacaatattcacgtggaactcttgttgacttattagtattttatcaattgtagaatcaaatctcttcagcttaattcttaaaagttttcatctctatctcaaatcctaatatagttagtggatatgtctttatcttcaagactcttcgatatgttttctctttcaaatttatctagtcacacacaaacatgataaatattgctacaaattgtatcgatgagttatagattgacgccattactatagcaactaccacaaatattgcatgaggcatgataaacttgaatacttgtacatgtctaacaaaaagcattttccattactagctagatagaccacacaccaaggcatatttatagatatttaattaatcatttattagtcttattggaaaattcgaggaaaaacatatacaaagaattaagaaatgactgatcatgggaccactattctcaagcattataatttcgatatttgtctatattatcttttcatcatggtttgtggtatttttctcttctaactaggaacccactagaagagtctctaatgcttaacctaatcgcatgattaattttattatctgtacaattacttcttttgtatgttgtacattgtaattgtaagcaatcatcaatttatttatttatttaattgactttttgaaaaagacaattgtttttattaaaatttgataaccaaattaataaatatatgtgcaagtcaaagtcaacgttttgtttttcttttcatattctgtgaaattcaaataatctcttttttttgtttgctgaaccaatctaattcat

SEQ ID NO: 191103 - DNA, 2394 bp, Cannabis indica
caatcaagataaatgttgatgcatcgactttcgaacaagaggacaaatatggcttcggtattgttgctcgtaatcaccatggcaaccttataactgccctcgctaactgttatggaggtaactttgctgctgaagtcattgaagtcatggcaatcaaagagggactcagttgggtaaaaggccaaggaacgggtaataattgagatagacagcttgttatcagtgcaagctatacgcagtcagtaaaaaatgttttcaatttttggtttgattgttgcggattacaaagctctactcactacattacctaatgttcagttactgtttattaaacgatcagcgaatcgggtgacacattacgttgttaggaacttccgtttcaatactggttgtagcatttctgtttttcatgttacaaaagacttaaaaaatcttatgtattcggaatgctaattatttcaatgaagttgatatttcaatttttttttaaaaaaaaaagaagtaatttagaaataatattttattttattgataattaatattatatattacagccaatgccatcatcccattcttaaattaccccacgccaacgcgtgatttcctctcatcaaacttcttcttcattattcttttttgccaattctcattttacttcttcatccttttcatgcagcttacatgtactttgaaaaagcttctaatataaagtgagacaaaaaaaaaatagatatattaattaactacaagatttgggcaatataatataatttgatattcatcatggtatataataaattaaatattttagggtaaaaatgaaaagctatttacatgactcatgagtgagtgaatgagttaggtgatcactgttgtactctctacaaaaaatttctattcattttggagatcgataagaagaagattctaacacattatttgtgatcattgctttctattgttaactaggctaattatataaatatatgtacatatttattgaaaaaaattatgaggcaccccagaaaatcagagtgtttgatgtattcgtattttctatatttagatagctttaattttaatatgtcaagatgcaccaattagcataatccaagagagtagagtttaaggtcgttgttataacattatttaagtttgcaatgtcatttgtcaagtatatatcatcaactttgaaatatcactttgtaatatttatatgagtttcttttttaaaaaataaaaataaaatcttataataatggaatctacaggacatgagattgagacatttctctctctttcttgtcactcccataaatcttactttgaaatatataattttagaaagaagtcatggccatgcatgaatatgactattgtacctcttttacctttaatatatatttataaatatagcaccattatatatataaacattttaattttgaattgaaactgactatagctcttgctgttggagctatctcacattgaatttgtctacttatagagaaacacctctattattaacattgaattattcccataatagtgactagcagtgatggtgggtcaatgaattttcacattgaattttctacttctggcattgtataataccatacagtataatctatttgttctctaatgattttttcttccctttcaatgaacccaaaacttcatttaacctatatatatatatttatattaatattacttgtactctgtctcaggacacattctacagttgtgcacagcacagagataaatatatagaacatttcaattttcaaccacaaaacaaagtatatattatttgaatctaaacagttatagttatagctatagtacgtagtaatagtactactagtactatctgcaagctcaagatgcagttagttttgttttgttggaaagttagagttagtacttagtaataacacatcatcaaagattcaaacattcccaaaactttagctatggttaattgtagtacctaatctaattgaagccgtggcattaaaaaaaaatgttaataatatgtgaagaaaatgatccccaatctctccatccaagttggtgaaagtctaaaaaaaaaggtggggtcgtgagagaatgatgaaaaattgaagatactagagaatatgatttttgagtgactgaaaaaagtttggatagataggagagagtgggacatatatattggtaggacatggtctcacattctttctgcagaaaaagacactgtttatatcttacagtcttaactagtgtttgacttcacagtcaccttttttgtatttatatttcaattttttcattacctcttaaacaattatgaatgctactggttttctctaaaaataaataagaggaattatattattattc

SEQ ID NO: 191104 - DNA, 1145 bp, Cannabis indica
gtgccttataacactgctcaaactaaaatagagatgtcacaattcaacataacatttaacaacaaaatcattgaaaacatatacaatgaatgtgcccaaaatggtcatttcacatattttaggttgttttgcctttatgatccttaaaagcaacctcatagtgagttgtaacaacactaactttctgttggaacaatctccatactttgcctgcatttgacggccaacttgcaattttgtaaattcacaaggtcaaatgagtaattttcctaaccaaagtgtacatttcaagaaaaaagaatataaaaaacgatatttctgatgaagggaggctttaaatgtaaataaaataaatttccgaggctatttttgtaatttcataccaagaattaattgctacccaatgtcctcctaatgagagggcctcatttctatctaacaagtgcaacttacgaaaccttacattttggtgtaattaaattacaaaattgtcctcaaaatcacttaaaattacaataataaccttcattgttgttgtcgttgtcatataatgtcacctctaaaatctcaccaattgtgaaataaattgaaataataaacaacaaaatacagcaacgacaccaaaaatgcagtctttgtgagtagtcagcatttaaatctgaaaataataaaatagtaaataagtaaaataagatatatgattagttgaattactaatcacataattgacttggaatttgacaaatattttaattaaaaaaaaataataagaatgctatgacctttccccataaataaaatgcttgtgaagtatggtagcatgccttttccaaaaaaataaataaataaataaataaaaaaaatggcatagcttacaaaatatattttttaagaaaatacaatctcaattataattcaaaatacaaatatatgaatatctaattgtttagatatggtcatattaaataagtatgttgtatgtaggaattaagaaaggttatctttaaaaaggaaaaaaaaaaaaaagaaagtctatctaattgcacttaaaaagttacttttcttttagcgacaaccttataatatattttttttagggtaaataccattttagaccctgtgttttgcaaaagttacagattgga

SEQ ID NO: 191105 - DNA, 2208 bp, Cannabis indica
aaaagacttttgggtgttgaatttattcccaatcaattctactttattttacttttatttataaattaaaaagctatagatctcatggtatactctctttctttttctctctctctcacaatcatagtaataaataattaatcataattaattataataataagatttgaacaaaagagaacagtcagaccatgtgattgcttaaattaataagcactattttatatatatattcgaaaatgttaatgtctggacaaaatacgtacttaacaccggttgtgataataactataactaaagttgacaaaatatagtgtaagattatttgagctttcaatattaacaataataatttaaattaatttaattttatatccaattacaacaagtctagtctacattgttatccagatagtaaacgacctgatcaggttgctttatttgatcttactttaataatttctgattattaaatgagtattgtattaattagttacactaatcaatagcttaaaataataatcctatgcgtaatcaactttatctactaagacaatgacattgatgatctggttattagttcctttttttcattttattctcttagcttggattggaagaatttatgtacacatgtaattgaagttgttttcatatacaaaaatgttttttttatatatatatataatagatatacaagttgcatttgcatgcatttatatattataaaatatgactaaataatgagactaactaatagtttctcaaaaaaaaaaaaaaaaagaatgagaggaaatttcctggagtttcagaataatgaaaatgagaccaaaactccattcaaaccctttgaattaaataattaatttcaaatgccatagccaagttgagttccattttattctttctttgattaaaaagaaaagaactacgcatatataatatcaaacaataaatttataactattaatattacacactaaattaatttttagctagctatatagcattgtcagtttaaattaattttaaggaatatatatataaattatagttttgatttctaatttgatcaaagcattattaggatgatgatttggaggttggttatttttctggtacttttactaccgccgccggcagcggcggcggtggcgaccgtggagttaccaattgagaaagagttcgggccattcaaccaatcttactacaacttcttctctgtactaactccggccaccataagcaacggcgctcttcaagtgactcccgactcggccggaaacttcaccttggccaaccgcgccggtcgaatcttcttcaaccaatcattcaagctctgggatgagtcttccaacaaggtggcctctttcaacacttcatttctgtttaacatgtttcgggtcaacgggtccaagactcccggagagggtttggcctttcttatagctcccaataacgttgaccttcctcccggaagtagcggtcagtacctgggtttgaccaacgccaccactgacggcaatcccagcaacaaaatcgtcgccgttgagctcgacacagtcaagcagagcttcgacccggatgataaccatttgggtctcaatataaactcagtcaagtctatcaagaccgtcaagctctccgatttcggcattgagattgttcccgtcggtacccgtttacatatggtctggattcaatacgacggcgtttcgaaacggctcagcgttttcctggccgagcagaaacaggaaccagacttgagtttcgtgatccaacccagacccagtaaacccctcttgacggctgatctagaccttagtaaggtcgtcaaccaaaattcctacctgggtttcgccgcatccaccggggactcgtatcagcttaattgcgtgctgagatggaatctaacggtggagaagctaccgggttatgatgatctgattagcggagaagggaatcgaggacagaagatcggagtagcagtggggctgggggtggccggagtggtgattctggtggtgggattaatgggtttgtcttagttacatatatcggcggaagaaggcggcgtcggatccggcgattttgggggctctgaagagccttccgggggactccaagggagttcaagtttcagtgagctgaaaaaagcaacgaataatttgatgagaaacgtaaatgggtcaagggggttttggtgta

SEQ ID NO: 191106 - DNA, 1106 bp, Cannabis indica
aatataatattttattttttttctagtaatttctgacatcatcacttctaaacttagtccaatattattagtaacatattggcatcatagtcccacttcattaattaacatatcatttattttaataataaatatttcaatcaacttgcacttcttcataatttccaaaaaaaaaaaaaaaacttggtgctaaaactttggatcaatattgtaattaatcattattggcatgcagcacttctactggtatatcacttaaaattaatagccaaacttaataacacattgcagtcactaaattagacaacaaggtaaataatcgtgtcacaaaaatattaccatgaatattagtaaatattatcaccaccgcacattttcattattcacagaataatcataatactttatgaacaatgccaaatacactacaaaaatatgtggagaagagcattttgtttttcttcgaaatagtttttgaaatattctgtggtgagcagtagtttgtttgggtgctataaatatttatataattatatatgtaatttgaccatatatataaatacacaagaatatagatttatacatagatacagagaggacagatggagattgttgttggggtgtgcaattatatccaagggaatgattctttctccgtcattttcactttttcttttcttattctatatcgaattgagagtataattaaataaaggtattagagaaaaaattataacacccaaaattataaactaacactaataacagtaaaaacttgtaaagtcgaaattggcatgtatcttatttatttattttgagaaaataaccttaaaaaatactactaaagagccactagctctaatgagtggagagctaggaaaaatcattaatgcatgacattaggcaaaggtttcaaataccagaaaaataattaggccagattgtgcttgcaataaccggtaaaacaaacttaactaaataaatccgttaaaacaataatgaaaacttacaacattgaaatgagagcataaaattaaattctaatatcatcaagaattaagctaaaaaaatctaaagctaacgaattattaaatttataaagtaaa

SEQ ID NO: 191107 - DNA, 5098 bp, Cannabis indica
atctgccctaacttagtaataaaataaataaacaagatacatagatacacgccaatagacattcaacaaaatcaagctccaaaaacttctgaaggttgagtgcaaggagaactctccatacataatttggtagagataatttcaaggagaaacatacatacaaagttgttataattttattacagacaagaaaggttaaagagacatttcttaaggactgcaatgtgcaaatctaccatatgatatcgctaaatatacagcccaataaagctaacaaacagaacataagaagccattcaatataaaaatctaaactccacaaccatttataatttgaatacagaatctatgaagtgctcaatataaatatattgccagtacagcaaacattaatatgaacataaagtttcaaaattgttggaaagactcgaagtgaacattaacctcaacaaatttttgcacaaggattgtaataatattcccattattatttaatttatttaatttttgtaaaagagaaagaagctacttgtcttagtacatgaagtactattcagcttctagtacatgaagtactattcagcttctcttaactctcctaaccacattaaaatcccctcatgaacgcaatgaatcacagcatattgaactcagccctgccaattcatcccaaaaaatctgatctaagtatgtaagaacatggctcatagaccctcgagaaccaccaagggtctctgccttcaacttgaatcaaagttcatagagtcaataaccatgatacttttagtatcccaaaccatcaaagcacctcccaatcttccatttgttgggataagaatccaagctttaaaacgagaccaccaaatatctgaattaactttttctgacttttttcatgatttatgtttaaagtcaaattttttaattccctactcttctttctcacttccttgtctttaacccccttctctatatctggctcatcaatagatactattttcatccccaactccaccatagtagccactatattatgccaagaagagttgctaagtttagaatcccccctatcacctccaccacaaccactaccttcttcatttgatgggattttttgttgttgtactggctcttctcccgtcgtagtacctttctaccactcctttttttcgcctctcttggtttcaccactttatctttttgaagccacaatatttttatgtcacagagaatatcttcccgtactccactatcttcttcctcttcaaactctccctcctcaaaattatcactgttagagctatattctgctatttcctcaagccttggatcattaatttcttccatccgctccataagaaactccccttgtaaattgattatcaccttatctatatgttggcagatcgctctccgtttccttgtgtcaaccttcagtttcaccggtgacattaccctcatttgaaacatcctcctctgattgaaaaagcactgaagccttttcttctcttttttgtacatcgaaatctttccaggacaagattattgcttcattgaaatgttgtcactgcttgggtcgaatggacctgagcctcttctccaaaaattcataaatttgttgttgtggcgacatccttttttgcaaggcctgatcatttttaaggcaatccacctttccataattacggtttatcaaattcattctgactaaagccccttcagcatgaaatcattctctaaatcctggggccaaaattatactcttgggcccagaagataagttattcatttggctcttagatacatctttaattaagttaagagcatatgtagttgggcttcccctgctccgacccaacaagctaattgagctccaattggactttgactctaaagtattattaatccacgtgttcgtaggatgaatgagaatcctaaattcaggagccttatcaacatgcacatcactcaaatccttattcatgttcgagagattcaaaggtgatccttatactccaatccaagaacctctgcaatcaaccttcatatctcttctctgatgttcccaactccattggatgaatgacactactgtactggcccctggcacgttcaactcttgaatactgatcaactcatctctttccacctcatctttgcaccaaataattgatctatcattaaagagttgactaacttccaactttctttccaattctctcgataagttataaaaaataggactccatgccacgtgactattgtctctcattataattactaccaacttccaatttctaggacaagatttagctcgcatatattcatgaaattttggttgagttagcctttttgctgggaattgattgtttggtttgaagctcggattgattgctgggtataattctcttcattctatatcaccattgctttgaaaagtagccttctctttgtttttcaggggtccggccttttggtttctcacatcacaaactccccccttgttgtgcgccctgctccccgtttaaccacgttaacgcatgaaaggttgtttcttccttccccgtcaatcttcctatcttgcaacagaaccatgttgtcattgagcctctttgtcttccttcttagtagcactctaagacaattcttcaaaatccttccattccttagcatgcctttcttctggaacaatcaccatcttcatcttatttatcctcaagactgaaagtttgagaaaatgtccctttgcattcttaaaacattccaggaaaaattgttagagttgttcctaaaagacctctttaaattaatcctttgctgccctttctcttttctgcaactcctccaagacttccataatccaaactgctgcatcgattgatacaacaatctcaaaacatgagagtttgattctctaacaattttgactgatcctccatctcattttaatgtaatcatgaacactttgtgttcagttctgaaactctagtacctttttggtccaagtttcccctcattttcatactgttttttataaccaaaaccagtggggtaatggccagatttcttcccaagaccagtgggatcatggtgcaatacatggcaagaagggccatggaaactcctagcatgcatgatgtctcaaaaataggagagagaagagagcatttttttttattgtaaacaaagacagaagaaaagaaggcataaaccaataatttatcattacactcacatatttcaggaaatatcacaaaattccatgtcagatgataaacagaaagtgagacttattaagaatcattctaaatacatgggcacataaacttagaagtattgtcaaaaaatctattaaacttgccaatgatttttgttacttctgggggagggagatgtagcttctttagagttgtttagcagttctcacttttagtcacctacaatttagatggtcttgattgtcagtcagctttttttaccagtaatatgcttgacttgctttttactttactacaaggcatcacaaaatccttaatttactttactcaatgataaaataaaacaaaatacatatatatttcgcagttactctcttgttgagcttagctcacatatatcgagggcctattattatgccaacagtagttaagttaagggaaaagcatagcatcaaaattccattacagagttcatccttccacgtacacaggaaatttcatagcctgagacacgtaccagctgatttcatagagagattttagcaccttcgcaattaatctacatctaatacacagattgaattcttttccatgtgtagttttaggcttgttacacagtttacaaagatgtatttaaacaaacaaaaaaaaagtacacattccatgacaattaatgactaaaaacactagtatcaatcatcacaaatgaaaatctaacaaagaaggtgcttaacatagttttaaaaataggaaagatgaacgtttgtacccataaaactaaaagtattacacttggcataccaagagaaagctaaacaaacttcgtatttgtcatcccacagacactgattttcaaaggctttctttttgtagcagtataactatgtatgaactgaattaaactatatggcatgagcacttgcacaattaccattagaaacagaatcaagtaagttatacttttacagtaatgattcctcataaactttacatcaaaggcaaagcaagatgcataggaaaatgaaaagagaaaaaaacctgacactgaggacaatccttcagaagaaacctcaccacgatcaacttcctgttggcttttgttgagaaaagggaagaatcagatttttaacaaaatacaacacaactgcccgtaaacaattatgtgggtatataaacacacagtacagataccctgtaatttgcagataagcaagagagttgtgcagaaaattagttgggcattcatctaaatcaatgtcaatcatctaattcaataaattctcaagcttttcatgtcaagttacaacaatatcaaattttcattactttatcacagaaccccaatattgtaaaccgaacaaaattaacgcaacaactataagtccgtgtagtgctctccacaattctcatagaagccagaagacggcaatttagatcactcaaaataaattctcaaatcatttacacccttcacaaatccaaacgaaatcgaaactgaaaaagaaagataaaggagagaagcaaaacctgaaacaagttgagagaagaggaacctcagtggaagatttatggtagatgagcgaagaagaaatcatcctctgcggaattcgattccgagaagtgttgagaggagaagagcgggacaggtggtgggctattgtggaactgcaaagacctaagctaaggtcacactctcgtaggtgcagagagacacgagagcagccgccgccgccggtagccaacatttgcggtggaacaactcggcaatggttgaattgaaccgaaaacgggtttagctaaaaacccactttcacgtagttagttgttagacatatgtgtggtacttttggccacatcatatgcactcaaatcaaaatgtt

SEQ ID NO: 191108 - DNA, 2265 bp, Cannabis indica
gtatgactttgttgtaaaactttttaagtatgctaatatatatgtaaaaaaaaaagacactttggagcacggggaactaaaggttcatctcctacttttttcttaaattctcttcatgtgtatattcttagtacttgtgattgttatgtgttatgttttgtatgtcgcaacttaaattgagacccacttactttcattttcattatatatttttgagcaaaaaataatgtaagaatggcccctttggatctcgagctatatatatcctatatatgccgttcaaattgtatataatccaaaatgaccatatcgaataggggtcaacatatagaactttggttttccatataaaaaatataaaataaaaaacaagaaagaaagaaaagaaaataaaaggtcaacatgtccaaagaaataagaggagagagagggggttgaaaaagttgaattcttgtttagaattaagagaagaaatctttgacagaaacccataaaaaaaagaataaaaacaaacatgtattcttgtttagttttagaataagcaaaaaaagaaatctttattgacagagaaacccattaaaaaagctcaactaagaaactaaacaaaaagtgggaaatctttaataaatcatggcatctacctactatatatactatgtctatatatgtgtgtttttcttaattgtgctttatgtataagtaactatatgataaataatgctgtattcaacttgcattgagaaaaggaaaaaaaaaaattaaccaaaaaagaatataatagaactggtcaaggtgaaggaggtactcgttttctagtccgtacggaacgcaaggagattattattattttctcatcccaacctcaaaactatattatttttccctaaagaaacgaagttgttggtacataattttcggctgtcccaacctcacacacatataaacacattcaaacattaattcaaagccgtgttcattatttacccaaaaataatcatttatatttatataaatattcaattaattatggtaacaccgacttaattatacgatcgatgacacaaccaataatgctaatgagtgttctctaattaattagctcttgttaataattcatatatggtatttattatcataataattaatttgcatcatagccctttgtttcgatcgtttgatcattttccaattgcatggaccatgcatatatctctatctatttgggtggttgtcatctcaatatatagtcattacaacccccaccttaattattaactgaattctgagttacaatcaaatgaaatattgatttttatttatagcacatacatttataggcataattatatattttggattttctgggagttaggtacaggtgtcaacatatcacgaagccaactatgcatatgcaagtgttgttcgtataataataatgtattgatgaggtttgtaggtaatcctagtaataaattaattagttattattatttttcttatttctctcaaaccaaacactttgcatttagatatattgaagaattattaatagagaatatatgaatttcatatataatgagtactattccactaccgtcattcacaacatatatagttatatatatatggaggacagaccattaggtccattaccaaccacaaaagccactaatgcccttttacagcctccactttatatttattgttactttctcattccatataataaccagtttttgttaattacagtaatgatcgaaatgaatgtgaatttatttctagcccaaagttttcaattatcttagctaggtagtggaaaagtttaattattattatttcttcatttattttttcagaaggggggagctggtgatcataatcatgaaattacagtactgaacatttaatggaagatcatgatgataattgaaaatgatcaagattcaagatcaatcatggggccacacgcatatatatatatatatacttatatttatatatatatatatatccatgaaaacatcgaaagctatttttgcttgacttaccaaatatagtgacatcaaaattgttgacattcttttcgttttttgtaacccaccatatatactagcaatttgtcttgcatttctactcatttgtcaattaattcttttattttattataaatcaatcgtggataaagcatttttctattgctttttatttataaaattggtacaaaatactatatttggtaaaatttctacaattttacttttaaat

SEQ ID NO: 191109 - DNA, 1885 bp, Cannabis indica
cacatcaaaggtgttaacacactgaatgtctccggtttgaacctgagcgacgccaattttaaattcaacatttttgcttttatctctaatcttaccttatattctaatagaggaacataatagcttttgagagtggtaacattccacaataaatattcaaaaacaaaccacgaattagatggttacttatatgactagacccttataaagatgtatacaaagttttgccagatcaagataacctctacctctagatatggtaaaagatattcagtattttgaattttctcctttgataaagctcgtatcaaaatgactacaacatcctctattcaaaaacggaaaaatcagaggcacccttttttacacattcaattccactacatgactggttgaaaaagaacaaagtttagagaaataagcttcaagttcttggtgtgtcatcttaagcaggaagcttattaattgtgtaagcagcaacgctagtatcggaaatagttgtatcactgctgctgctagaatcacttttctctatgatgttggtcaactgagggctgtcttgaatggatatagagagcttcgtgtttgggctcacagggttgacccgagaggggatggctgttgttggtggacatcgagcagaatctgtagcagcagatgaagctgcgatggctgggagaggtgggaaaaccttcacaagcttcttggcacctctatgcatatggcgagcacaatatttctgatcagggataacatcccgtctgcatcgccacttcttcccatctgttctcctacacctccccggttcaagttctatgccatttctatagtcagtgtgtaagccattgcttcttaggactgaaagagtaacaaacacaaaatataaatgtctaaagtcataataaaggctgaaaaatatttaataaaaggcttttaatcgcttacaatgctaccttgtagatgaagaacacttctgggagagaaacccaaaccctgtgacatattactgctagcatttgtgttattgcttcttcctactgagccaaaatacttgtcactaacaactttcccggcattcccagcactcatgttacttttagtaattgcagcaatgttagtagtagtaatacatggagcagtaacattagtaacccttttcgtactaaagctactagagggagtagcattaccatggctaacactagtgatatttgaggacaaggtggtcataagttgaagaccaacagagactggaatgtttgaacttgatttttgtagcgattggctaactgatttctcaggtgttttggtaattgaaagagaagtaccgatttcagcaacttccacaagctttcttgaacgttgacggcctctgtgcatgtgctgctcacagtatttttgatcaagaactacatttttactgcatctccatttcttcccatcagttcttctgcaccttcctggttcaggatccaccatgtttttgcagtaaaacccttgtgggctgaatcctgtaactgaaaatattataacaaatgaaaagaaataagaacaacaatcaataagcaaattcggtttcaatttctgacatgctttttagcctttcacacagggcagacacaaactattctcagagataaggtagttctgttgaaacaaatggcaagatttaatttattctccgccagaagcaatttacagaaacaagatgcaagtaagtaatattttgaatgatttagtaccttataattcttttttctggtacgaaaaacactttcagctaaaactaatatagagctatttcaattcccaaaagcattaaaaaagacaaagcaaaataccattttcatgcacaaattcagagaaaagagacatggcttaaaag

SEQ ID NO: 191110 - DNA, 1577 bp, Cannabis indica
gaatgatattgggagacggacagactgtttggtacatttgcatgaaaatggtcgatatatatagggccaatctcacgaactcgatcaaataaatagtgatggactctaatttcattagatggagactattatgtgggctcggtaggcccaattaatgttgtcattgtagagcccagccattaggctctccttattgatagggatatacgaaggcttgtttattattgctgtaactgtaaacatgtggtaggatgatgagttacattaatgttgaatctcaaatcaaacatatcatgtactgctgaatccagccattgccattgtctaacatataattaaaaagtttgcaattcatttacaatataatcaatattatatcatttatatgatgaacaatttttattattattctaaattatctatataccttttctttatatctattatttaccaataaatgaaaaaaaaaagaaattgtaatgatattaatttctatttgagtgtagaggagtggtatcacctatttactaataacctaagtttctagtaataaaacatattatcaatacaatacgctacttatttttattatcatttaaaaaaacatctataataacaatatcattatttactattcttaatcattacatcaaattactgcttttattattttgtagtacactaaatcatgcattcatgccggccttgagggtaggcaagttaactgtacactccaacgttgagagttttgacattgtaaaaaaaaaattattatatagataaaatattatatatttagaaaatataacaaattttatttagtgtagtggtaaaaaaaattaactttaagcaatttgatttagccttaggtaattaaaagccaccaaaatgattaacactaagtgaccatcactctactataggtttcgtttgcaacttgatcagttttcctattggaaaaattacttgtaaaaagagatagagagagcgaaaatcttctcttaatttttttaaaaaatgtttttctttttaatttttttattttgttctttctgaaatttaggttctctcacttatgtatatagatttaaattgaaacaagtagaaatgctttgggcagtttaagctgccagagattacatgaggaggcaaattgttattggtggaatttattatgttttaattaaataagtaatatggaaaattactaaccatgagcattgagcactaatagcactgatgatcaaataagaaggatagttttgatagaagaaaacaaaaatccatgttgcaaaacagatctatatttaaatctgtgaccttgtaattttaggaggatgaattacttttaactgtatatttatgtcggcttaccaatattggcttcgccatttgtgtttacaaagacaaattctctacttcatttcaaaaaggtaatgctggatcctgccctgaatcatacctctccaaataagtccaaatccaaatacaatgaaccaaattttaactagtaattgggacccaaatggttcccagttcacacttcatatctactttgcctttctctctctctctct

SEQ ID NO: 191111 - DNA, 1852 bp, Cannabis indica
gagtggtctctcaagctctgcaggtttttacacatactgcaggcaacaaaactgaactggtaagccacagacatatatatttatttaagggttaatttcacagatgcacaaaaataataaaaaaaaacaacaaaaatacggtttcacggaatttagacatttttatgatttttttaattttatttacataaaatacggtctttttatgttgaaattttgttcatttgttgttatttttttgttatatgtatgttattttttgttgttattttaatgttatttttatattgttttcttattctttagatgtaaaaatgtaaataattaaaaaaaaaaaatagtatgtgataattattctttatttaatcatatattttgtcaggtaataataacaagcagcaataaacctccgaacacaagggcaattcggtcattacacatgcacacagcaaaagcacccttatcatcagttctctcacattaaaaaacaaaaaacaaaaagttaaaaaaaaccacagcacccgggtctataaaagaagaagaaaaaaaagcatattttacacatcccatcctttgttagtaaaaaagaaaaaaagaaaagaagaaaactttcaccaaaaatggctttttcttcttcttcttcttcttctctctctgtgttgctcaccaccacctttctcctactaacactctcccacgcctacgacattctcacccttgtcaataactgcccattcaccgtctggccggcgatccagcccaacgccggtcatcccgtcctcgagcgaggcggtttcgctctcaactccctaacccaccactccttcccggccccgacccaacactggtcgggccgaatctgggcacgtactggctgcacttacgccaacaaccgcttcacctgcgccaccggagactgcggcggtagaatcgaatgcaacggcgccggcggcaaacccccggcgactctagcacagttcagtctccaccacggccacaatgccgcactttcgtcttacggagtgagcctcgtcgacggttataacgtgggaatgaccattacgccccacgagggaagaggggtttgccctgttgtgggttgccgtgctgatctgctcgcctcgtgtcctgaaccgttgaagctaaagtcacatgcgggtcatgttgtaggatgtaaaagtgcctgtgaggctttcaatacagacgagttttgttgtaggaaccattacaatagtccccagacgtgtagggcttcgcactattctcagttctttaagcattcttgcccagccacgtttacttacgctcatgatagcccttctctcatgcacgattgctcttcgccacgtgagcttaaggtcattttctgtcattagctaagtagaggtagaggataatgtgcttggttggttgtcccaacttcaaacccctttttattttaaaataaaatttggaaatattttaaagtaacaaaaaaaaatggaaatatggggttgcagtttgtagttttattatgatggtttggtaatatcttgggtttcttttttaggatgtgtagggaaaatgggaaatttgaaatgaaacttgtctaatgttctgttgtgcatggataaatgtaattgcttattcccttttctttgttttaatgtttattttgtagttaaatgatctgagtgattatatgagttactaccactattttacaaaagtaatatactttgcaatgtctaccaacttaattgcctattttggcatattcctcttatatctttataattatttaatacattttataaattgttttaataacaaaaaaaaatgtatcggcatatctttttatttttttttaaaa

SEQ ID NO: 191112 - DNA, 2168 bp, Cannabis indica
gagaggatatgtgtttacctgatgagagactaacatcttcttcttctagttttctccaataaagtatggacttttacataattatcatgagaaagagagggataaggaaagaaggagaacgtaataagaatcgaaaggttccatacccaaatgggtttttggagaaaagagagaaaaaaaatatcagaagaagatgaagaaagagagaaggatatggagagagagtgagtgaaagagagagagagaaagagaaaaaaaaagtagtagaaatgcacgcaatggtgcgcgtggtctcactcgaggcttcaacccacccacatcatcatctattctcttctctgttcatttttattacctttctgtctctttctcacactctctctctctctatatatatatatattatgtgtatgtacaaaagagtctttctttgggattcccttgtttctttctctctctttctctcgacttagatttctgatttaaggtggactagtcagacatgctgcgacagtttcgactgcaaaaagctaatctaaagcttctcccattggttttctcaaatatcttcctctctcactctctctctctctcttcaaaacaaactatttactctgtccaaaacagatcatataactctatttcattctataattactcactatgaatagtgtcctatattattgtactgtttgtaaattagtaaaagatacacaaacaactctcaactttttatgtcattgagttgtaccatttaatttaaattattataacatgttaccagttaccaccacacaatatattatgttacttgttttaataaaataataagcataataatataatgatgatattatttgtgaataaataggttggttactttctatttttttttttttttggttattttgttaaatgtgttacatatgtgttggtgtgatgtgtggtactaaatataatcctatctctggttgatggaaattatgagagagttgatgctagattctatgtaattaaatacaagtagggccatatgtcaaatttataatttggctaacaggttgtcatacttatttttataaattatataaatattggcctctttctctcacaattgttttttatttcttatacttattagaatcaagttgtggactttattgtttctctcttctttcttaccaacttttttttatttatttatttattatttttttaagtttattttaacttttgcttttctaaagggatccaagatagtatggaataagttttaatggatatatttatagctattttttttatttttatttcatttatgtgttgaatcattattggaaagaagatatgattattgaaagattacttttttatatatatttttatcattgggtttgattttgcaactttatatttaattattgtatatatttatgggtaatggtgttattttgagttattcgtattagtttcttttcttttcaattcatttattttcacctgtgtttatatttagatttatcagtgaaataacagaaaattgacacatgtctaattgattacttaaatattaatttcaacaccataccattaaaattttttaaaaaaaaataaaaaaaataatatatgaagttaattttcaatttttttttttccatttttcatttatatatacacatagcacacatatttatataatttataatattttatttatttgtgtattataaatatagtaaattaacatcttgccaaataacctcctccattccttaatttatcccctttatcatcccccaccaggcatcttcatagacttgcaatttttctttgaattttattgcagttcaacatctttgttgctcttaggatgttataattgtaagatgtatgagttcatctcaaaaccaattgactgtgaggagtagctcatgcatcttatgtgccgtatgtaattttcatacattgtcgaacataggaaaaagataggacaatacaagtgggacatggacatcgattgggagagacacattaactgggattttaattcaccaagtttgggtagcaaagtttccatggtcatggaagacctaaaactatggtgttactggcatctcacaaggctcatttttctctgtcgctggacactactacgttgtgatgatgat

SEQ ID NO: 191113 - DNA, 1814 bp, Cannabis indica
aaaatagagttcaaacatctatttttacacgctgataaaataaaagagtctctcgtgcaataaattgtttgaaccctatttttagcatgataaatttatctgaatctcttaaaattttacagttattaaataattacaacgtaaacgagcataaaattaaactaaaaaattctctcaaataccgagtgcatcgatgaaccctttttaaagggtgtgtaattgtagaattgttttaatattttataggtctatattattatatttcaattcatattattatttttacttggagaaatatctatatgaaatttaaaattaaaagtatatgcattaaccaaaatgaaaaagaccctcgtacccatccaaacaagtaggagacaataattgaaaatagcatgatgatatttgatatgtttaattaaataaagtataatttaaatttgttttgttagctcctaaactaaaattaacttaataaatatatgcatggtttatcaagtccagcttaaatctttttattaatttattatttgaaaaaaaaataatgcatctatgatgattagttttatgaataattgtaatgaagaagaaaaatattctaattaaatgattcttgatcaagactttattttttgaagatgttagcaaacattaacttgtgacaaataaaaggatattatgtacttaaaaagatttttggcccttcacaagcacaaaggttcatctaatataaatattaggtgtgatacttagtattcataaattgtatttgtattgtattatgttgagacttagatattataataaatattaaactcaaacctaacttattttttaatcgtatcaaaaaattaaactcaaactccagtcatttataaacagattgacctgatcagacctatttatataaaaaaaatcatgtttgattttgataaacttattaatatattaataagagtttaacatgtttacaacccttttattacacatttatcaataatttaatatatttatatcttatttaacaaaataaataaataatatttacatgtcgtaaatataagtgtatagttttaaataaatcattatagtgtcatttttgttgttgttaggcaaatcaatttgaaaatgataaacctatttattctatatagattcaggttccgagctgtgttatgcgttttgtccattttttccaccattttaaatacattacaaaattttccaacaattagtcattattcattagtattaaactaatcaaatgtattttgtgattaattattaaatattcattgagttactttcaaagttgtacatatttttgtttttatgttatatgtaattaaaacaaaatgtgattggtatcaagaatttttatatattttatttgcctatttaaaataaacatgtttttttttcttccctagattctttatatatatttaaacatgttaaataaagtttgtcttgagcttaataaatatatattttttaaaaactaaggttgtatgaatctttatctttatgaattaatttaaggctgctaaatcaaaaccatgtccactattgccatcaatattaacattattataatttattagagtattggacggccctagccaatgctctatttcacaagattaatgctctaagtatcaatattatagagttgtgaactaatttgaaaaattagggtttgtctcgtttttaaatttatagttatttttttctcagtccgatttgattagagttgtgttttattattgtgatttgatttttgctactatggttagtcttgtctctgtgatatg

SEQ ID NO: 191114 - DNA, 4682 bp, Cannabis indica
atttggtactctagacttatgacgcggtgacacaaagggcgcgaggggttggtttacgaatcttctggaagtgttgcggagcgttaaaactcgtagtttaaagaaaaagaaaaatcaaaacttaaaattagaattgaaacgaaccgaaccttgtagaagctgtggaattggaaacaatggcgaacactgtgcgacgaagcctcctgatcaacggagctggagttcatcgatcatggaagagatggttctcctccgatgccttagtcgatttgaagcccggtgaggtcgctgtgatttctggaatccctgaagaacatcttcgaagaagggtataactttcattatccatacactaagaaatttatgtctttatttcttttgtttatagaatctgttttcattgatctcttgtgggctttaatatacagtcttgttattgattgatttatgtatttctgtttttagagagtagagtaatataattcgatacgtgacatttgccaggttataatttactcacctgcccgtacagctacccaacaaggttctggaaaagttgggaaatggaaaattaattttctgtctacgcacaagtatgattgaatgccattaccatctatataattattttgcataagaaattttatcctattattgataaaactcatgatctcaattttatacttatgctataattataacatggtaccatattagctctgtaattagagttatgtagctatgactaggagacaaccttcttcttttatgggtgataaagaaaatcttcttgttttgtggtttaacactattaataatagtttggtgtgtgtaggatcacataacatgacataaaaaagtaaaacgaaaatgagctagctgttcatttaaattacgtcattacactctccaaattctcactctctcaatcctcatgagaattgaaagaattgaatgtgattgcgttagcattattttttaacaattaattattaaacaatattactttttatgtaattactaactttttatattaaatatgaaaataaaattcttatgtaaatattattagatagattttttattttaaaatagaatgtataggttgtatattactgtcctaataattacattacatagtaatcgaacatgccatacgataatggataagtaattagatttatgttgcagcgctggattccttattaatatttgttgtggcttacccataacaatgggggaatttatatatcatgtaagtgcagaacaactatcgagttcatcaagagataatccagcttagatagcaaatgagcgagcaaacgaggttaggaattattgaattagtaatcaaacatatgaactgcgtgacaatgcgttgccttatgggaaagcacaagctactcgctttctatacaattgcgagtagattaattgatgccaaaataggcatttagtagattaattgatgcaacagttgagctagcagtttagtctggcatcgtaatggtcttctatttgcttttaataggtcaacccaaaaccaaaaaaagatttaataacacttgagctccaaattagacattaggcaatatttgctgaactactataaattttatagattttgtgttgttttccagagcttgttaatattggctactgtggttgagaaatgttcaggtgggaaaatccgttgatgggttggacctccaccggcgatccatatgccaatgtgggagaagcgggtctaacttttgacactgaagaagctgccaaggcctttgctgagaaatatggttggcagtacgaggtaggaacttgctccttctcctccaactgggtgtattctgtcatattaagtgtttgaccctgttacaaataattacagtacattatcatatcataaaattgattatctttaattactttttaatacaaaagctagttgttgttgtttcacataactgataatatgttttaatactggagcaggtcaaaaagcgtcataccccacttttaaaggtatgcactcttcatctttcctctttcctctctctcaatacacttcacaacttcaaccagaatatgtaaatgacttgatatttcatgtctttaaccctattgtcacaattacttttgatattagaggacaaagtagtaggataacttggcactaaattttttgtctccaaattttgagtcatttctacgtcaaataagcttgcagatttttgcatcatgatagtggtatcacctacaattatctcagttttattttgttgttttctgatgttgacctttggaattctatgcagcctaaatcatatgcagacaacttcaaatggaaggggccaccgccgcagggtgtagagtaatgtattttcgtggtgtgaaatgtatcaaatatcatgttactgtcctataattaacaagtcatgttacaatggctttagtaaataatcgtgcatgaacagaacataataatttataatactagactagatttcaaacttacattcttttgataataaaaaaacagctaataaaactatatatactcgatgttgagagttgagacgtacaattacaatgtagatgagctgcatttttctaactaaactactatgtagaatacctatattatatatttacagtacagagttcaaacattacaacttgattgagatgcctctctggtgtggatatggaacctccaagtgaagacgtagtcttttggctcgcatgatattctgataacatcacagaaagcgttaactgagttcttattcccatcactcccccattctatcctcacccagcaagagaacccatctgaagaaaaaggcacagctgtgtcggagaactgaagagccacctctccgccgattctcttgcatgagccgcctccgagtccgagccgtccctcagtattggtcaccatggaatcgagccacgagcattcgggctgaccaactaactccttgtaagcagaatttgccatcctaactttgttgttggaatctgttatcacaactggcagggcctcggactcgacctccgcttcaacttcctctggattctttggagcttgagctccaaaggattgggtaaggtcctcgcatatggaccgcacgcatatgctggaccccaccggcctaacgggttgtggtgaaatgacattggtggtggggctggttggaatcctctgcagctgtttcaaaagatctttctcttcaggaacttcagctatggtattcaagtctattactgggttatcctcaccacaagcttttatccaatcatgctttgaaataactggggtcgaaggtgggtgacatgggaggagaggcagtgtaaccaaactggtagtgggtttctgatccaagatgtggggtatggacagctgggaaagcccatgagtgaagccttgcaagatgtttttggcctggaaagccacatggctagtaggtggagtttgcccgaatgcgtgggtcctttggcgcttaagagtaatggatggtgataaagcagctctacctctcttcctggttctggtgggccgagcctgcaattgtggccagagatttcgcaggtaaggggattggctaatcttctgtgatgtagtattactggatggcggcgtggtggtggtggtggtggtggtcgtttcacttgtgggactcgatggtgtctctggctttggagctataggcctgtaccttgacataatctcagccgttttagctgtattagcataagggttgagggtcttgatcatggtggcgactagtgatatatttttttttcttttaaaaggaaaagtaagaaaaacagtagagtgctcctcctcttttgctatatcttttttattttattatttgtttggcaacaaagggagagagtactctggaaataactttgtcatgtaacagagaaagacatgggagaagtaggaggagagtttagagtgggaggtgttgaggaggttatggagaagggagaagtattgacggtgggaaatgaccaatggaagctgggcaaacatgaagcagaggttatatgagaaaatgacacttggactaagcacggtgggtacgtgtttgttaatgttagaaatagatgacatgtgggaattgtcaccacaagtgggtccatgcaagcttacacatataacatgactattgaatagttattcaagttttgacaactgagccccaacctcaaacacacacactcactccatccacgccctaccactcactaaaacgctgacacgtcaattttttctttttatacattctaacacctgacgctttatttatatcatatattattttttttttaaaaaaaaaatatatttatattttgataaaaaaatttatacttttttttttatttttttatttatttaaactttattcttttttttttatatttttttattttttcaatatttttttttattagcttgatttttttttttcttttttcttttttattgtttagcttggtttgattgttttttctttttaatttctcttttatctttttcttttcctaattttctttttcttctcttttttttttttaattttgttttttacattattttttttataatatatgataaatatatatattttttatatttttttttaacattttttttaactctacaaaaa

SEQ ID NO: 191115 - DNA, 2203 bp, Cannabis indica
agcatatatttttgatgatcgccaaaattttattatcaaaaaatctccatatagagatgatttagtcccacacgttactgtattaattcccttttaaaataataataataataataatattaataataatgtcattttctttttttcctttcgaatcaaaaataatgtcattttccatacccatgaatctcccctaatccgaaaacgaaccaattatttgcaaataaagtctcccataacctattttttttagatcattacatcaatattaaaaataaataaataaataaaatctcacatcaacacagaaaaaatttccgttttctaaatatttctgggcaataaaaatatttaattacgtgtttgtgactcaaaagagaatagtaacagattagtagtggtggtagtggtccgactcagctacgtggaatctacgtgtcatgtgatgatatcaatctgacacgtggcaaccatggagatcctttctcttctctatttatagagagcacctacactccttttcttctcaacgtggattgccctaattaactctcatccatttcttcttcctctcttctcttaatacatttctcttctctttatacaaccccaaaaaaaaaaacccccaattttgtcacagaaatattcttaaatttatcatacattattccgttgattaatttttttaattcaaattctttggcggagccgttgagagattttccgggaaaatgaaggacagcgtgcaaaaccctttgcttttgaaatccttgaaccacatctctcttgtgtgtagatcactcgaggaatccattgatttttaccagaatattcttggctttgttcctattcggagacccggatcattcgattttgacggtgcatggtaattaattaatttaattaaatcatgttaatatacatataatgcacttaataaaactcaaaaaaattataaattgaaattttagaggctttatttttattttcatcaattattttgatttaagcatatttgtattactgtttttatatataggctatttggtcatggaattggaatacatcttttgcagtctgagaatccggaaagcatgacgaagaagagtgaaattaatcccaaggataatcatatttccttccaggtaattaattaattattaaattactgaatttaatacataattaccctttactcattgaaattttcttagttgtgtaatatattttgtttcttttaattttgtcatgtacaataaagtagttttgagcacgtcttgataatgatgatctttatttgtaaataaattggattaattgtatttagtatcggacatatatataattccaaaatagtcagctttatttttttaaaacgtacgtatttaagttgacaacaggttggatgaatcatgaaaacattgatatgtgataagagaaaactgacaaatttgagctgtcaactctcaaacgtaacaatatatttttttaggttgcaagtctacactgagtatctattttatttaagaatacttttgaattaatttagtatatagtactgaaaaaaatgttggagttttatttttgccaaaattgtcacattaaattctttctttgtattggctaacagtcaattattcaacaacaacaaaatatttttatacacttgctcaagcaaacgccaggtgttttgagaaacagaaatggagccccaatttgaatatggggtctcatttaataattttttagagaatatagctatattcattacttaattaattgttgtttttgaatgggcagtgcgagagtatgggagcagtggagaaaaagctcacagaaatgggaataaagtacgtgagagccaaggtagaagaaggtggaatctatgtgtttcagttattttttcacgacccagatgggttcatgatcgaaatttgtgactgtgacaatcttccagtcatcccattagccggggagatggctcggtcatgctcccgtatcaacctccagatcttgggccagcagaccctgcaaccacagccagtcgtacaactcttcagtggcaccacaaaacactgaataaaattaattaattattattattattattattattactcgtctttgtttaattctactgtgctctcactcgtgatctgtcacgactcaaattgtttgagccgattgtgtgagtgagtgagtg

SEQ ID NO: 191116 - DNA, 1050 bp, Cannabis indica
aaagaaaatcccagaactgtaatagtttcagggaattataatacagaacaaaacacaagtagtcaacgttaattatcatctgatgtaacaaacaaaacgacatacccgaccgtaccgaccagtgggatcggtttcgacataaccgctgcagtctgcttcgtcttcatgatcatgtccaagtccaacaacaagctgttttttcttgtacatgttattctcttttgttcttccaatgttttttttttttttggaggggttgttttaaactcgaaaagaaaaaaaaaggtttaattaattaataaaggaaaagtgatgatgattaatttaaattaattaatccaaggcttttccctcgtgattttcataagagattacaccgaagaagaagaaggagaagaagagagttgagtaatcaatcctcgtcatcatcagcattatcataatccaattccaaagaaacgatgtcgtattattcagtatcagtatcaacaacaacaatgtaactgttttttgtgttttgcgacttttctcaatcccaaacgacaaccaaaacactcgaaaacgacaactgattatactatcttattttaaaacaagtgaccaaaagaaattgaagttaaactagttgtcaatgaattgaggaacttgtggggacaatttgggaaatgagaggtttttatttcgaggtgttactgttacggaacttgaagaatctttggctgcgtgaaccatttgtggataggtataagagtgagcattaattaaaacagagaagacaaaaaaacaaaaaattacacgaaaagattttattttaagttaaggtggctggagtttaattttatttttaaatagtattaagaagtaattaattgtaaggagataaagaaatgaagggaaccgtatggaaatggtaccatacaatatgattacgtataataaaatggggtatcaaagaatggaatggagtggagcccatgatggtatacaggtggcggcaccttaattctttagagtttgagcttgttgtcattgtgtgttccaattacgtat

SEQ ID NO: 191117 - DNA, 2158 bp, Cannabis indica
tcctagctacataggaaaatttaattacttaaccccaaactactagttaatttaattattaatttctcatcaagattatgtgtagtacgtaagtcatgagcatgaacagtaatatgtataattcatcttatatatgtataaatattgctggattggtctatatagcgagctcatatatacggtcctttagtacaatattattcccactacaaattaattataattatttttatttaattttttttttgtaagttaagcaaaaattttattgccaccaaacaacattttacaacaatatacaaggtataacaatggaagctatactcaagctaactaactaaatgaaattttctatattagttttttgttttttaaaaagagaaagtttaaaataaatttctcttttgattttatttacaagaaaatttacaatataattttgtgcattctataatgtattatttttagcatcccaatgttatacaccaaagcattaaggacaactacataaatttttcttttccttttaggctgattgcatcttttcacccacttcaaccaagtcattagctcatttcactgaacatttagcccaattaaattgaagatttccacctgaatttgtttactgtaattgcatttaatgaacaaatgatgatgagtctctaaattcgaatcacagaataaacaattcacctcatcaatgcaaccaaaacggtgcaaatgatctctgatttgaagtttattccagcaagcacgtcaagtaataaatttgtgttttggataacttggtctactctaaataaaggaaaactatttcctttcacttctatctctcagcaacattttgaaagcagattcttgttatactgaaattcaagttagcaaagtctgattcttctatcttgcttctaatggtattttttatctttactatttttctccaatactagttggagaaatttggagcctcatatagctccacatgcatattgctcgaaccccttttacctacaaattgtcctcttattagcaatgtcccaaacatattactcaaagctagcacatttcattgctctcaatattttggaagtcaaggtcatcatcttctttagctttacaaattaaattcccatcaatataggacaagctttacccgaatcagtagtaccctttcaaatatagaccgtacaaataccattaattttcttaagaatatacttaggtagatgatgatgatgatgatgatgatgatgatgattattattattattactgtaatatggacatttcatttcgttaatatacttgattacgctcccccatctatatccctagaaccaaaaataaataagttgtaaacgtcaattttgttgtaagttatatgatagtgcaaaaagcgtgccagcctaggatataggaaaagttctgatcgttaattttcctggtaagtgtaacgggttggttttagcatatatgtataaaccaaaattccgaaaaatactaattacgggcactttaagggtgttaaatacttaatgaaatattacatggtgcatttcaatattcaactctacacattttaatttgataaatatatattaaaaattactaatcaattataaaacactatattaataaaatatttaacactttaaaatactaaataacaattctaaaaagtataaattatatatatatacataattgagtcctagctagtgtaccatccaatatatacatgtatacatatttatatggatactgacataagatgatgggataaaattaatgatcagtacacatatatacctggttgggagcacgagtattcctagctttttccacgttatatgtaagataattgttaatatttatattaacatatagttgtacaatagaagcgtcagcgttaagcaacgaaaaagagaaaagttaaagtacgtatataaaatagtttgttaatttatacttttcattatcttagttttttcaaaaaaaaataatgtaacatataataaaaaaattaataacactaaagtttaatttagatagcacatctcaactagctagctagctaggtgcaatatacatgaattaacttttgtagtatagtgtatgtcaccacagtcctaaattttgtttttttttttttttt

SEQ ID NO: 191118 - DNA, 1106 bp, Cannabis indica
gtttttattttttaatttttttgaatatgaatcaaaattttgaaaaataaacaaattacttttctctccacacttaaaaaaaatcaaaaaaaatcaaaataaaaattactaaatgcatttttattttttgtttttaaattacaaaataaaaatagttatgaaatacatttttaaataaaaattaaataacaaattattttaatttttattttttattttaaaaaaattgaaaaaactttaaagaaactcaccctattttaatgatattaattattaaaatactttttaatagaatacatagtgtattacaaaatacatgaaaaaaaatttgaaatatataaccacatattgtaatatttatgagcttagattgtattgtgataaagtcagagttaaattaatgtcgatgtttgagttaaaatttggatttggattttgagtaggtgccaaagtacagaatttgaggcccaagccagagtccaaggtttgaggactaggctaggtgcaaggccgagtctggggttctaaggtccatggccaaggcctcgacccaaggttagggttgggactaaagtgatcaacatcggagcgggatcatcaagatggcgctgaaagctaagcacaatatcatcgcctcaggtaggagggacctccaggatgccaaagaggaaaatcacgaactcatcgtgaagctcaagtctctagaagagctacaccagactgacttggagacaacagccaatatcactgttggactcaaggagcttcgtgaattctgggagcaaacttgaaaggaggccgccaaggctacgagggaggctatactggctccaatcacttgcaaacattgtgagaagcacttcaaagacagggtgtacatgtgttggaaatctaatatgttcgaaccttgtctccactactttcatgaacttaactcggttttggggaaagaacaagaagctggaagctgccttagctgagcgaaggggtccccgtttacctccacgagtcgattgattaattaaacccctctcttttttttcctttttcttttttttttatatattttgcttatttcctcccccctcaagacaatatatatattt

SEQ ID NO: 191119 - DNA, 1140 bp, Cannabis indica
gggcagccaccatttttgaaagcatatggaaagcacgaaatactctctgccatgaagggactaaaacgcccatccatataactattaaagggattaattgccgacttgaagaaattgagtgggtagacaacaatgcaaattctgcattcactgaatccatcggctctcctcccccccgagggtggatcatgtgcaactcagacatttcgataggcaagacacaatctgcaggcgctgtaatctttcgccaagaggataacaaaattgtgaagatagtcactttcatatcgaattattgtgacccactccctggtgaacttcaagcaatttgtgaaggggcagcctcggcaagactactgggatacaagaatgtgatttttctcagtgactcggcagcagcggtggattcgatccggaatgctcgttcgaacctcagtaaactccaccacaatcttcgagatctaattacaaaccttgttgaggctgctagtgctttgagcaactgggagacccactggactccccgccagcataacggtgtggcccatgctttggctcgctgggcaaatcataacaaccattttggtgtgtttgatttggccgattttgatggctccctgtaatcgtggattgcagacggctgtgttagtgaacttcggtagttttggttagttatttagttagcttgttttttagttgtgtccttctccttctcctttctgttctcttgtttgtttcagccttgggtttgtgttttttcttctgttctggtttttctttctggtgttgttttgcttggctgttatgcaactaatcaaaaaaaaaaaatgtgtgctaaattttgctcacactaaaaattgtgtcaaatttaacacaaaagataccataaacaaattttagcccaataaataccatcattttaattactacttagacactcattaatacatttatcaattgaaaaagtttttttatttttaattcttattttaatctcaaattttgcaacaatataaaaataaagttagtcatgaagaaaataaaataaactaattgtattatacattttcaataaacatcaattacttttgactgttttttttagctattttgctctttgtgtattgaagcacaattata

SEQ ID NO: 191120 - DNA, 2030 bp, Cannabis indica
cataaaacccaacatggttttggtagtttcttttttcaagacaactgggatcgaattggaaatgatgtttgtgaagctatctcctcctccttcctttaatcaggtaacctcctaaaagaaataaattctacagtcataaccctaatccctaaaatcaaatgccttgataaggtgagtgattttaggcctatatcaagttgtaatgtgctttataaggttgctaccaaacttatttgctctagacttaaaaatatccttcctaatctaggatctctaaatcaggggggattcattaaaggtagatatattgcacataacattatgatatgtcaggatttgattaggaattatggaaggacatcatgatgtcttccctacattttagttcccagtaggcctctgtaatactccaaaaaagcagcagtaattttattttgatcatcaattctctccccatagcattagtaatcaaaaaattttttattctgaattcttttatcccttatgctcgaattgaacaatgctgtattagagtcaccatttttaatacaattgatcttggatttttgttgcaagaaagaaatgtatgcattatgaagctctgcataattatcccttgcatccagctcttgttgttgaagctcaagattggtgggatctctttgagtattcttttgacattccaacaacctttatttggctctcatctcagtagcttggatatcacagaatccttgcttgttgattgttttctagacaggtttaagagctttcatctttgaaactacttgaaacattttggatcccctcacaatttggccccatacagtttccaactacttcttgaactgaagatgactaaaccacatcctaaaatacttaaaaggtttcctaccactagggatattaggatacacagtaagtaaagcatgaatgtggtcaaacacacctttgtttagaaaaattgcttcagcattagggtatccattcaaccaactattgtttgccatcactctatcgattttagaatagatcctgttttcacccttctgtttgttgttccaggtgaaaaaacttccaccaaatttgatatcttcaagcttacaagctatagtacagtccttaaaagatgaaggattatacctaacccgagctccaattctttcacctctttcaaatatgtcattaaatcccctagaaccatccatggttcatttgtattcaactcctttaattctttccataacatgcttctcccctcttcattgttaaccccataaacaaaagaaacaaagaacttgttcctcttgtccatagtagaaacataaagatgaacaacttgactcgagcaaaaaatgatattcaccataaagcttaatggattccacacaacaattattctccctcctttacgccaagctatattagttgtaaaacaccaattggaaaacatcttaacatataagggctccaagatttagagccttaactctcgtctcaaggagaccaacaagacccacattattcttagcaataaattgccttacttcattttacttatgtggattgttgattcctcgaacgttccaacttattattttatccattcagaaaaggagcttgttcccctcctcctttatttccctcattaacactaccttccttctgttgtgccacctgctcccctttctcttcttttgcttctaaagtagtaaatgaatttgacatctgagcttctattgtttgtgttggagttttgggtctctagcctttaacaacaggcttgaaatcttcagcatcctaatgttcccctgcatttctattcccttgtttactcttatctttaatggtccattcttatttttcccctctttcctcctacaatcttcaattgaatgtcccattctgttgtaatgtttgcaagtaatagatttccattcacagttaacaatgactgaaacctcactcccaattcattctcaaagtaaatcaaacctggaaactcatgttcaattgaaactgttgggttt

SEQ ID NO: 191121 - DNA, 2178 bp, Cannabis indica
aaaaaaaaagattaataatactcaaactagaaataatgacctctgaaagccacaaaaagattccctaatgtagaaaatctttgcaatccaatttttttaccttgctgctctaaagcgtgaagtaattgaataaactgggctgagctgtccccggccctagagaaattaagaaaagactcttttccaatggcttgtttgatgatagcatcaagagaatcatttccctcctctggtttcatcacatctagggtattagcggccttgagttttgcaattggcatctgagcgtcctgaaagtagagattcaagtgcaaaacaaatactcaagaaaagccaacatagctcattaacgaaacgactggctggaaaaatgaaacaaaaaacagatgctaacacattatacatgtgcagcagcacattagtgaaaaagagacaatcacgtaactctgttaatgtttcataatccagaaatctactgatcaaaacttaatataacaaaaattggctatatcatattaaaattagttttcactatcagaagaacaaaaggcaaaagggcctccttttctcctttcaactggtcttctcccctcccagctaaagaggctactccaagcacccataatttacaataattgcaaaattagataagaaactaatacgggttgaatatacataaacacatatatattggtatcaatattatatatacacctagcaaaacacagatccactaaaaggaatctagcatagccaaaatctgaaaaggagcactacaaatgttggtttaaagaaaaataaataaataagcacaacattttctccaataaatttaggaaaaaaacattgagggatttcgcaagcaaatagtattcagttaccaattagtgccgagaaatagttaataaagatgattaaaaatgcataattttcatacatcacattaaataataatcaaaacgtaaacccaaaaatctgttcaggtgaaaataaatagaagaatacagagaaaatgaaaatttgagaatgtttcctttccatccaccaaacaaaaagtaaataaaaaatccaatgaactaaacagaacagaacacaagtatttagctaagttcctcaattgaaataattaataacataaaaataaattaactttatcacatcgcttaatacactgaacagtttcgagagtaaccaaaactgaggaacataacaaaagaatacaaagctagtcaaggttacgaaacgcgtgatccgccatcgatataacataaccatataaattcaaacctaaaaaaatgagaaagcaaaagaagaagtacaatacttgagagaggtgatctgttcacgtaccagtagatggaatagaagagtgagcgatcggttgttagagagagagatagactaatcgtaagcgatctacgggattcaatggtcgccgtgaagatatgagtagtcgccggaactgagaatcgggaaaaatgcgggaagggagaaaaaacggccgagaaaggaaaaggaagaatggagaagagagtttagagagagtttgtgtattattatgttatgttgttgtatatatgaaagttcgtacagagaaaaaatataaaggcgagaaattgaaatggaagatggaaccctctgtactaagttaatataaatataaattgttgtacgcgctgatggggcgcgtgacactctgtttatggatatgggaagatgggctttaggcttgtttatgtagttgggctttcactgtatccggacttatgttgaggattacacacatgggaattttttacattttatacctattttactttacttgttctaatttttaccttcattttcgtattctttaagatatatccacttttataaatgatattatcattagaccccttaagttaatataaattatatgttagacttaaatagagagtgaaggtatattaagcaactcacttataaaactagatatatttttaagaaaatataatataagagtatttttgattaatagatacaaaaaagtatttctcaacttatcccaattttacgagggaagtttataataatatgttgctttttcatctaatttataataataacgtactgtttttaagtgctatgtcagctaaatttgatatttgatgacgtttttttgttctattttttttt

SEQ ID NO: 191122 - DNA, 5460 bp, Cannabis indica
ggaatagacgagatggcaagacgaccaaactgattatggccaaaagttcacttggccacattatgagccataaaattacaagttctagcagtaatacaaactaaaaaaataaggaatagttctcaatttcctatctaggatctaagccgttgaaggagttgattaccactttaaaatcgctttccaccaggataaagttgtggccttgtccttagccacttcaagagccagacaaacagcagcaacctcaccacataaagcatctgaaaaatccaactttgtgtatgcacccaaagcaccttacttagtctctagcaacatgttcattttaaaaaccttctacatgaaataagatcgttcaaaccttctacatgttcattttagtatattaacatttgtggtatgaatatgttcaacttccaatttatgggtgcagaaagttgatattgaaagatgggcatgcatgaatggtgaaatggaaccatgggatatgaatcatattccagccttgggctatacagcaacaggccaaatttcctaaagagggtggtgatcataagtaaatgaagtctcatctcttttgtgctctgccgcggtttgcttggctcttgaagtggcaaaggacataattttatcctgatagaaagcaagtgatcaaactcgctcaacgggaagttgaaaactatttcttattttgtaatagaatcatttcttgctttattagttgtttattttgtattactatcagatgagtgttttcccataatcgctttgggtgccttgatgtagcatctatacctatgaacattttgtgtaatgatcaagaggtctaacatttttgattaatgaacattgctttttaataataaatttgttttgttattatattttcatttaatacagccaatgaaagtaggggaggttgggtatgcatcaaattagagaggtttgatgtaattgaattaaagaagaataaaacaaaacaagataaagcaaaactgataatttttgaatgagaagataaacttttaagtgtttagacattgaattagagtttatgtcaagctgtcaaaaaatgacccaactcaaaaaagaaatttcccaaaactttgatgtaaaaaatttccaactgtctcatgagtcttacaaaatcctaactttgtctaaaaaccaaaaaggaatcaaattgttgatgagaagattagtcaaacaaactgaatcccatatcatcatcactctcttcctttggctcttcctgcacatacaaaatcaaaaaaacaaaacccataagagagcaagccaaataagtagagctacttacattgaaaccaaaccgaactaataataccatgctcatatcaaattgactaagtcaaaaagaaactgtttttgatgaaacaaacgtggtcatttctagttagtcccagctgggattgaaccccaaaactttactcactcactcatagacaaccacttgagctcaacctcaagtagagacttgcattgaaaccaaacgaaactaataacaaggagttcatgcaaattgactaaacatccatgccaagtcaaaaagaaaccattattgataaaacaaagttggtcatttctagttagtcccagctagatttgagcccaaaatccctactcactcacacagacaaccacttgagctcaacctaaagtggcagtggcagtggcagtcaaaaggctactattgtagtcaaccaacatcccaataaccataacaataacaatggacctaagactaaacagaattcaagtaatttctatgtctaaagtgtataaaagtcttaatagattgaaaatacattcatggggttgagttatatagttggccaatcatgaaataaaaaagataagagcaaaatcagataatgggcaatgatatgcgtaccttcttcttctcctcaactgccgcagcagcaggagcagcagaacctgcagaaggagcagccatggtagcaggaccagcagctccaccagatccagcattcaaaacaaggtcatcaatgcttttcttctcagccaacttagcaaaaaggcctggccagtagggttcaatttctacattcccagctttcaccaaagttgcaatcttctcagacttttaagttcacaaaacgtaaatttatcaagaaatgatcaaacaacaaaataaaacaagaccaaatctaaatcacaagttcaataaaatcaagatctgggcattgcaggaataagttgaaaatgaataaaaacattgactttgatcgtaatgagattgaataagaaatgggtcttacagtgattgggattgaatcatcatggagaatcaaagtggcgtaagtgcaagcaagctcactggccattgttgtactgaaaagagaggaattgaaaccctaaacttttgaagcggcagctttgacctctggattgacacagcgaagggtttttagggcaaaatatacggattgtatatataggtggagatggctagggtttttgattttgatttaattaggaattagaatagtgggaaagaggagagagaagaagttgaagaagcagttacagagctttggtatatagtgggccttaattatcagtacacgaaaacccaagcccagtataaaagctaaggcccaagcccaaacaattctaacctcacctattaccactacttgccttaattccttttcttctattatattttagggaaacttacaaaaatactgtaatttgggttaatttttacaaaaatactgccacacggaaattttttcaaaaatattgtgtttttataaaacaccagtaaaacacaaagcagaacaactcaaaataacagtaaaacactagtaaaacaccagtagaacaccagtaaaaacttaacacagtatactgcagtatgaaacttataaaaaaatacagtaaaaaggtaaaaaataccgcatgacagtatttttgtaagaaaatggcaaaagttagtataccatgtaaatttcccatattttattatctctaaccagactttatctatattttattttatgtcgactaaagtgttgatgtaactaataataatacgtcattgttgcataagagcatctttaataggtatttattgtagtggtcttgtcacatacatatataatatggtctaattttttttgaccaattttatgtgaagtgttgtagacaatgatcatatgatatttttttttattagatttttttttacctaaaaaatcattaatttaacacatggtggacaacttttagagttatcaaccattagagtgtttttgtaagaaaaatgtgacaaattttatgtgattgagaaagaaaataaaaaatatatttttttaaataatgtatgtattttaacacctataaaggttgcccccattagaaatgctattagtatataatattttagtatacataatattatataaaaatataacatataataatataatttaagatttttttatttttatactttaaagtaatttttttacattattacagaaatttacatagcatttagcaactaacaaagcaacctaaatcacaactaaaatctatatagtaacacacataaaacttactagaccaacgaaccaccgaaacaacccaaaccataaattaaaacaaaaaaaaaaattaaaaataacattacagagctattagatagtgggccttaattaccgtccacaaaagcccaagcccagtataaaacaggcccaagcccatattaattctaacgccacctgtctgtcattcagttaactacagtttatatcaccgcaaacggttccagattctctcttgtctctcacttttttcggctgttccagaaaaccctagctctctcgagttctgcagctacttctcatcctgactgtgctctcacttgagaaaaggctcgccaattcttcaatcggttccaggaatctccgattcggtgcggcggtgtttctcaattctcgctcatttatgtatgtcttggtctagggttttggttacgagtttgaattgcagtttcttgttatatttgctagttaattaagctgggatttcgagttcttgattcatcgaaaagatttatttatttattttattgttaaatcttatggaattaaatatgagcgtttgaacgtgtgagaaattcttgaaggcagtggttaatagtgaatgaaaatagttatagcaaattattttttgttggcgtgatcttcatctttttcttttacaccattagtaaaagaaattgaattttgtaatgatctgttgacatttgccattttatattgttaatgagtagacaagaacttggcaagaagaaaacattggccacttttcatggccaaaatgttccaaattttttcacttgtaggaattactcttacatagcaccctttattaatttgaattagggaaacaataggtaccaagcaaggagtgtttagcataagaaaaagtctcaattaacttaggcaacttttgattagaggtaataaaatgggatggaatggaaacaattttcattccatttctttgtttagttgcattttaaagtattgtagtgacacaatgtcattcattccaatggaatgatttgccatcatttttctagtatgtctattccattttgaaatggaaggaaataccatttcatcgcaagattgagtaaaaactaaaaaaaaaattgttgtgcattttttttttttcatttcttgttcctgtattttcattcttaccaaccaaatataccttttattaactacattcatgtgtaagtttttaagaccaatgctgcttgcctggtcttgtaaatgcttgaatggttatgcaaaattggaaatgaactactagtttcagtattttctttgttgattttcactcatattgtaaatgtatttgctgagagattaaaaacgtgataattccagtcctgatccttgacataacttcattctagagatcctacgggatttttaaacagtttttccagttccagtgttgtttttcaatgctgataaagagggttgagtaaggtaggcacatgcatgaaatatatgtccaatattgcctgatctcatgacacggatgtttctttatgatagatgacaagcgcttggacaaatatgagcattgcaatcatacataggggtatagagagggatggggagattcaatgtggagttatgggtgttagtttttataattggagattcttgctcttgctcactctcagaagatctatacatacatctgctaatattctggagaggatgaggagatcaaattttatttcaatatatttattgctttggagcatcttggagcaaatgagcaatggagcttgtggagcacggctcacctcgaggattgctctcttggtttgcttcattgttttgtttttgctttacttttggtagcatcaacaaaagagta

SEQ ID NO: 191123 - DNA, 2756 bp, Cannabis indica
aaatagtaagaaaaaaaagaagaaaaaaaaaaaaaaggttagtatttcatatttggcatggaaagaattgtatagaaaaaaaaagttgattcaacaaaaattttcatatctaatataaaaggttgagttttttattttattttccaattttttcccctactttttccttttatcttttccgatcaacttccaaacatagtctatgtgaatttgttatatagctagaacatgagattttcaacaaattgctctggcaattgctgtagtttcaaagaaggcaaagcctaggtgaaactttatttttcctatgccgtaaattatgttcttttgattatgctgtgaggtttatatttttcctgctcccttttctccacctaatgtcaattaatacaatcagaaggttttttttttcctaagacttcatacaaatttgtgggattaactactctacgctttctgtagccaaggggaacaagatggcaggcagagaaaaaacgaagtacagcagagaaaaatgtgagtttgagtgttcttcagcaatatttttctggcagtttgaaggatgctgcaaaaagtattggaggtaggaattccttgccctatgctcttttctttactggttaaacaaaaataaataaataaactattatgctattgtggctatattacttttgtttagacagtcatgaaagtgtggttgatactcctatactagaatgaagtttattttgagattttagaatatttttaaagttagaaagagaggaagagacaagagagggtcagggattcaaaatctcaacacttatgtggtgtttggtgtaaaaacttcatttggtgggttttagttgaggttaatggaatctaaaattcagtatttaaagagagtactccaaaattatacttaaaagtgagacccacttaattataagccttccactaaaatgatatcaaacatatgtttggttttgcattcccaaaatcctaaaccctcccataacaaaatcttattaaggtttcgtaacttctatataatagaattattttaatctatttgaaatgaattttagaattgaattggatatgtcctgtgctatggcagtttgccctactacgctgaaaagaatttgcagacaacatgggatctcaagatggccatctcgtaagataaacaaggtaaaccgttcattaaagaagatacaaactgtacttgattctgttcaaggagttgagggaggtttgaagtttgatccaactaccggggggcttgtggcagcaggctcaataagccaagaatatgagtcacaaaagaaaattgcatctctgcagaacttagatccttcattcaccgtcaaattagaggaggatgagtgttatacagatggagtcaatttaaattcttataagataaggaaacccaatatcattgctccaactaattctaataaagactctaagattgcaatcgaagctggatcaaaaccaattagtggaactttttctgaaaaaatttcccttggttcttatcctgcaacagaaggcatgacatcgagtcacagcaagtgtagttcaaaatttgagaattctgatgcacgccatgtctctcggaattcaagctctatagctgtgggtgatgagatggatacatcagaggatggagaagacgacgagcttcttcaacataaccagcctgcttcttcaagtatgacagactcatcaaatggctgtggttcgctgttgcatggcagttcatcaagctctcaaagctttgaagagcgtaagcatcccaaaggaaaggcgagttgtgctgacagctattctaaaataattgtgaaagctacttacaaagaagatactgtccggttcaagtttgacacatctgcagggtgttatcaactgtacgaagaagttgcaaagcggttcaagttgcacacaggggccttccaactcaagtatttagacgacgaagaagaatgggtgatgttagtgagtgacatggatttacaagaatgtttggagatattagatgatgttggaacccgaagtgtgaagtttcaagttcgggatatgccttgtgttgtgggtagttctggtagcagcaattgtttcttgccaggaggcacataataaacagtaaaaagtctaaagaaaggggattttcatttttcaatttgttttttacttggggttctgctatgtaggttttactccattatgggtgaagtaattttcaacaaaggcaagaggagcattctgtattttaaggattagacttttttcttcccggagtcttgtaattcaccatcaaccaatcatgagatggacacaacgatggaattagcttatattggaagaaaatgaccattttggaatgaaggtatttatcttacctgatcagttgttactagagttttaaagggtagttgaagttgaagccattatccatatgaatctccattctttttggcgtaattagctatactcatatcaagaagaagggcatgctgccccaagctagtctatgtatatataccttgtatcataaagaaaataaagcttcgtagcttgagctgtttatttttcttgtttagcggtaatgcagtggtcaataaaattatcaggtggaattcaatggcttgtggaaatagtttagcatgcttgaaatttgtaaacattcaaatctttggatcccgctcatgttaaaatttgcactctgctgtttgtaatttagtacaaatgcctagaggacattcctc

SEQ ID NO: 191124 - DNA, 3768 bp, Cannabis indica
aataataatgaaaatagagcattctttcactttattcttcaacttttgacattaacatggtatcaaagcttgtatcgtcttcataatggagcagacctcaacaatcaacaatggaagttcgtcgattcctcctggttcgtctcaacaaactggtttacctcacaatactactaaccttcctaaaactaatcttgtctctttctttcacacactctctattcgactcgatgagttcaactacctgccatggaagcatcaagttcttgcaaccattaatatcgatgtgcaaacagactgagcctagaattcaaagattgggagcaacaaaacaacaattttgtgtcatggcttctctcatacatgtttgataaagtgctcacaagaatggtatgatctgattctgtagctcaaatttaggtcaatcttcgagaatattacacttctctacatcatgccaagatcggtcaatataaaactcagcttcacaacacgaaaataaagtcttcgttgagttattttcttctcaagatgaagagtatcattgatactcttgcatctataggtctcccaactacatcacaagatcacattgaagcgatcttcaatggtttaccatcagagtacaatgttttcattacttctgtcaacaccagaacgaatgcatatagtgttgctaagattgaggcactattaatggctcaagaagttcaattggacaaagctgtaaaagaacttgatattgctaaagctgaagctaatttggctttgaccaagaatcaaacaggtcgaggacagtacacacaacctttttctccatattcttctggatttggttttatgtccaaaatcaatggtgcaacctttcctatgttgtagtccacccaacctggtcactttgtccctgcatccaaaggttttgggccaccatcaagaggtcaatttggcaatttcagaggaggtttctctcgtggtcgtggccttaatacagtttggggtcaaaaactacaatgtcaactatgtcacaagcttggacacactgtgcaataatgttttaaccgctttgacaagtcatttttagggcctgaatcctttcggaatattgatgggaatgccaacatagctgagatgcaggcctactatgctacactaaaagtggtcaatgatcctaattggtacccagattcaagagctacacatcaccttactcccaatgaacagaatttggcttctagcagtacctataatggtgattagtagattcacatgggtaatggagtaggtctgagtattcaaaacattggccattcttcatttacttccccttatcactctcataatcttgttcttaacaatttactgcatgttcctgatataaccaaaaaccttcttagtgtgtctcaatttgtccaagataatgggggtttcattgaatttcacctctttcactgtcttgtcaaggatcatgttactttgaagactttgcttgttgggaagcttgacaaatgtcgctaccaatttgattcaaatcaactcaactttctcaacactcacaagcaatcctctttgcctcaatccaccaacatcaagtctactcttgatagcactcaatgtaattcaagtatcttgtctgaacacaatagtatttttttgtggcataaaagacatggccacccttactctagaattgttcagcaagtactttactcttgtaatatcaaactcaacaataaaaataatgaatcttttactcaactttacactgcctgtttccttgggaagcttcacaaacctccattccccacatccattattgtccacactcagtcattgcaattgctgcattctaatttatggggtcctgcccctatcagttcttcatttaggtatagatactgtattagttttgttgatactttctctaggcacacatggatatacatgttaaaagccaaaaatgaggccctatctacattcattacctttaaaaatcaagttgaacttcaactaggcttacccatcaagcaaatacaatctgattggaaagcagaataccaatcattcacccactttttgcaacaatctagtattgaacacaaagtctcttaccctcacacacatgaacaaaatggagttatggagaggaaacatatgcacatagttgagagtggattaactcttcttgctcaggctagtacgcctcttaaattctgggatgaggcttacatgtcttctgtatttctcatcgacagaatgccccctccacttctcaacaacttctatcctttaaaagttttgtttaatgtcaaacttgattactcttccctcaaggtgtttgattgcttatgttattcaaatcttagaccatataacaaggtcaaacttcaatataggtctcaaccatgcacctttatggggtatagcctagctcacaaaggctataaatgtctctcaaattatggaagagtgtatatttctaaagatgtcctatttgatgagcttgttttttccctttccatcacaatacacacaaaatcctacttctaattcaagctcacaatcgcctacatctgttattcccaaaaggatatacctattctattttctcttcctagctttaaccaatccatgcaacctgttcctcaggctcctaatcaacctcttaccaatgttttgaataccagtaacactgttgtccagacacaaactaatgttaacaatgcagatgctcacatagaagttgtagcaactggtggctcctcgaatcaggaacctgttgcttctctacatactcagcctcagctttctgcaaccaattttgatattgagtatggtgcacttgctccaggtcaagttctagttgttgttcctgcaccagaatctattgttgcactatgtgatctcactattaatcagcctactcagactaagtggtgatcctatttttaacaatcatcctatgaaataagaggcaagtcaggtatcaaaaagccaaaggttctaatggcctctctcactccagcttcagtcaaacgtgctttaaaaaatgctaaatggtttgctgttgtggctgatgaaaataataccttgaagaaaaataaaacctatactctggttaatctacccctcaacagagaacctataggttgcaaatgggtgttttgagtaaaagaaaatgctaatggttatgtggataggctcaaggctaggctcgtagccaaatgatatcatcaacaagctggatatgacttttatgaaacattcagcctgtggtaaaacttgtcaccataagagtggttctcaccattgttctatctaaaggctaaattgtaaggcaactagatgtcaataatgccttccttaatggggatcttaatgaagacatttacatggttcaaatatgtgcctcgtgttttgtatgactcaatgagtcaagaatcacaacgaaggccaaaatctaatcttttctatcaagaagtcacatattatacattcaaaaattgtcatgaggatcaatataccaataagattactaacttacgtgagaatcaagaagttttaaagcttaaaaagcttgaaacttgttaatggcaggtacaaagaagagatatccaaggagagaagatgagacgtatgtatagaagatcaaagatctaaaagcattccatgcaaaagccaatacttagctagacaaggctactcaacagagactactacagacaagacgagagcttgaaattccctatcagaccagatgttcgaacagggact

SEQ ID NO: 191125 - DNA, 3120 bp, Cannabis indica
taacaataataataataaatgtaacacttacaacttcactgctaaaagggtgaattagctaggttcatgaattgtgtatctaaaatggagttagtagaagaaaaaagaaaagacaaattctttattatttttggttcaatattaatggacaaagtttctgactgtttaggtacaccaaaacatcgccctctaattcgaagctggtagcatccgaggggacttataagaacatcatcttcatgagaagataatctaattaatacaattttttaataaacgggatcaaatatatttaaattaatatacacactatatatataataattaatactcaatagctagagcaatataatatttggtaaaaagtatatattttattagtttttatataatttgtttataaatatggttttttttcaaaaagttattttgtagaaaaataaaaaaaaaatatcgaaaaagataatgagactggattcaattcagcatttttaatcaacctcacaacaatattcactaacaaaaacattttatcacatatacaagtattcctatttatccacaaatagtaaattgttgcagccatagaccaaaacaaacatgagtgaacgctttgcttgagagaaccaatccagaaaaacgagtaattaaacttaaaaggccacgaagtgcaaccaagtcaagtatgcactccccgcaccacctgttgagagaaactacacgtgttgatgactcttagaaatttgttcacaaacagaacatatgtggtccgttatgtatctggtttatttgactacaataatttatggaatataaagtataaataatatatgttaaataaacaatttattttaaattcaaaaactcttttttattttcattttgaattacgttatatatatttttttaatcaacatgagtatataatgagtccccacactactaaaaaggcattagcgagtcggttttaatattagctaggaactgatgccattattactgacgttaaatgatcatatagttatagcgttgtttcttgacatcacaacttgagactattctcaaacgacgggaatcaatataaaaataatttccaccacttttgtcgtcagtttgttacacgagcccaaatctaagataccatttccataaattacttgagaaacaaaaactcactatgccattttcacatattcataaacaaaattaaaaattatttcacatatccaaacccaaaaaaaaatacaatcataaattaattatttacataaaagaaatacatgtgaacataaaaaaaaaatacattcagagagattaatcatgggacgtctcccgattattccacttgcttaaaaagagattagaaatgaagagaaatagattttaaaccctcaaagaagatggagagggagataaaaaaaaaatgtaacttaatcgattgggttggggccttcatcgaaggtgggatgcgaaggggctagtggctggggaaggccgagcagcggagattagtgattctcagatgtgtaattaagatccaatattaaaatgcatcaaaaatattttatcattttttttttttgttagtgtttaacatcttataatctctttatcattttctcaattataatagtatatccactcgagagaatttacaatattacccttccttagaaaaataaagttgaccttatctttgtaaacattttcctatatacacaattaagatttcatcaaatctcttttgaaatagcattacatattttttaagatgtatatttttttttctgaaaataatacaagagagaatacatataaaatatatatgtgtcatggctcatgagtcatgtgtacagctttcacacacgaactcaataaacaaagaaaactttttcatgttacgttgcgtactaaactacatgcattaaataataaatttatatatatagaacatattattatatatgtttttaaaatccaacacagggacaaactacagctaataatgagctcaaaatgcagaccaaaagaatccaagatatagatgtgattatactcgagctaggataactctttatcacgtatttaatacatagtgtaattaatttactagtgaatagtgatcagtaaaacttagatatcttaaaataacaaaaacaatataaattaaaaaaaataaagttacatcatccgtacagttactatttagtaataaattatcgcagcggtatatatacaaagaacctcgcctttgcagccataattaaaatgatatttaattttttaggttaattaattgggttaaccatgtctgagggaatgaaacaaggcagctcagagttataatatatgatggtacctaaaaattgcagctgcatgctggtgttccatgtgcgccatttgtcgaacattgtgataatgtgtataattatatatatttgtatacaaagcatatgatcatattcttgagtttgagtgccatggatgtggataatgataataatattgtcaactaatctaattaattacttaattcctgcaggctagtttgctcgtgatcagctttagcatattccaaggctgcctaattaataaggctagatcactatgtgaccactagtttaataactaattaagtacattttctataaacaatccgggccctttttgtcaaacttttaggtgagatttagtaacaaaaatttaaaaatttttatttttttttaatttttaatcataaaaataaaatagaattttgttttttaaatgttatttttgaaaaacaaaaataatttccgtgctaaatattttttttttttaaaattttaaaatcaaaaaactaaaagtgtgtttctatagattttattttttatatttttattaaagtcgggtctggggtcttgggagttgggttttgtgtttgaggtttgtcttcgggactggggccagggtccgagttcagattcaggtctgagtccaagtcagtgaatagagtttaggtgttaagattttaatgctcatataaaacctcatgtttcttatatgttattatttatcaataagctaaatagaaatatatttatttaattaaatgtattctttatatgtttattttcacga

SEQ ID NO: 191126 - DNA, 4545 bp, Cannabis indica
taagaatgatgcttttaacgtctttaaaacatgaaagaatgtggttgaaaacttaacagggaaaaggattaaaaatcgtagaatgaataatagtttagaattttataatgagatatttgacaagttttatgcaaacaagggaattaacaagcacaagatagttaataccaaacctcaacataatggggttgctgaaaggatggacagagcacttttcgaaaagtttagatgtatgttgctaagttcaggattgtcaaaaggattttgggggagaagttgttatgacagatgcacatctggtaaacataattcaagtgaaatcaacttcaaaacactgaggaaatgtggtcaggtaagattccaaatctatctcatttgagaactttaggttgtagtgcttatatacatcaaaatatagttcaacattaacctagatcaaacaagtgcatctttctaggataacctccaagggtgaagggttataggttatgggatagatctagaaatggaatcaagataataattagcagggatgtcatatgcaatgaatatatagttttcttgtagtactaaccaaaatgtaggtaacaaagggaaagaaattagcactaaagcaggaaaggaaaaccaaaaccagtccaatgttcagatggaacatgtactagaggctagaaagacaaatcacactgatcaagtggaacaaggagaccgtgcaactcaggtggaacctcattttatggacacaatagcctaagaagaaggagaatattaccctgagcaaccagatatggaaaactgccaacttgcttgaaataggaaaaggagagcgcctaaactaactaacaaattgagccttgaatgtcttggatgacatcattgcctatgctttccattctgctatagaaactaccaagaaagaatcagattcttatgaagcaggtataagaggtccagatgcaaggaaacggggtttgaaaatggatgagaagatgttatctttgaagaaaacaaaacttggattgtagtgacaagaccagaaggaaatccattgtgctaaataaatggatattcaagcacaaggaagataggaatcagatcagttataaagctagattagtggccaaaggattctctcgaagagatggagtgaattttaatgagatattttcccaaatgtcaagtataatataaggataatgctggccattattgtttaatatgacctagagcttgaacaaatggattttaaaatagcattctcgcatggtgagttggaagaggagatctacatggaacaaccaagaggttatgaagaaaactttgttatggaaatggtgtgcaaactacagaaaaatctgtatggcttgaaacaatcacctaggcaatggaacaagaggtttgacaatttcatgatcaaccaagcgttcaagaggagatttcataacacttgcttgtatttcagagggtatagaattgaagaagctgagcatttattgctctacgttgatgatatgttgttgatcagcaaagagaaagccaacattgagaacctgaagaaaattatgggaatagaatttgacatgaaagacttgggaaatgctagaagaattttgggaatggacattaaaagaaatagaaaggaaggaaagctgactctcagttaagaaagctacatcagaaaagtgatagagaagttctctatggttggttctaaacctacaaagcaacctatgacaagccaataccaagtcttagagaagcaatgtccaagtacagagaaagcgaagaccgagatgaataaagttccctatgttgctgcacttggctctgtcatgtatatgatggtgtggaccaagtctgatttagctcgtagcataatttgcttgagcagatacatgagtaattcagggagagatcactggttagctatgaaatcgttactaagatacctagttggtacaactaaagaatgtttggtatatgaaagaaggaaaggaaaagtcactatagaaggggttagtgactctaattatgctgttgatagggactctaggaagtcgacttcaacattttagttccttatatgtgggaattgtgttagctggagatcttagcttcaagaaggaaaaaggatcttcccaaaaattgatagggtcctagcaaatcctagctggcttgatgagttccctaatgtagaggctctctttttaaatgaaggtatttttgattatactcctgctctgcttaccatctatcctatttagttatttggtataaatccttttgaatatttcaagatgtgggcttcacatcttgaatacaatacaatggccaaagatgtttagtagctagcaaactgttacagggaccagaatgtatcaggtcatatccaagtttaaggctctcaaaagtgtcttcaaagagatgatcaatacagaaggatttctgatatccaagctgctaaatacatgctaaggagattccggtgaaatgtcacaataaactacatcttgatcccatttctgggaaaattctcagggagatcaactataatgtactaacacttatccccaaaactaaatgccctaatacagtaagtgaatttaagcttatagcatgctgcaatttgatctacaaaatagctaccaaggtgatttgctcaaggctcatatacatactgcctaaactgctggctcaaaatcaaggtggttttgttaagggcaggtttatagcacataacataatgatttgtcatgatcaagttcgacattatggaaggaaatcaacaaaagttagttgcatgatcaagttaatctgcaaaaagcttatgatacaattgaatggaattttatagaataaatggttagggctttactctttcctgacaaattcatcaccttggtgatgaattgtgtgaggacccctaagctttctcccatgttcaatggaacgattcatggattctttgaatcaaagcatggtttgaggtaaggtgatcccatatcttgttataggagtgaagtacctatcaagggtaatgaacagaattggcagcaaggcagtgaaagatgtgaaatgttgaagccgaatcaccttagcttcgcgaatgatgtcttgttattttataagggtgattatagaatcattatcctattgttacaagggctaaaactcttttctagcacattaggtctatagcctaacaaaactatatctgttgtatattgtagtaacatggcagatcagtggttacaaagaattattgatgcatctagtttcactaagcagaacactccattcaagtatttaggaattcccatctgtgccaagtgaataacaagtcaaaaatgcaatgttttggctaaaaaatgacatctcaaatcatatcatggagcaccaaaaacttgtcatttgtaggaaaggttgttccctcaactcagttctccttactatccactcatactggagccagataatgaagctcccaaaaaaagtgatcaatgcatgaaatcaaagcaatatgtagtgcttacttatggagaggtcaatacataacgcaaggggcagggttagttgctttgggagacagtatgccaagctaaatcagagggatgagctggcttcaagaaaatagatgaatggaacaatgggtcatagccaataaggaagataacctatgggttaggtggattcatactgtctactcaaagaggaagattggtgggattacaatgctccaatccatgggagttggtattggaaacagattgtggttgccaaggaacaacttaaaaacttgattaattgacatacaccaattcatagttaataggtatcataactcctctagatacaaattgttgtgcaccacacaaaacagagcaacatggagtaatgaagtctggtaaagattaaacacacccaaacataactttatattgtggttctcagtacaaaacaaactgagatctatagacaagctccacaaatttcatgtgattgatgactctacttgtttgttctatactctcagcatgaagaaacaattgatcatctattttttacatgttcattctcattgaattgtcttcaggaggtgaaaacttggctgcaatggggagcatgaacaatagagttgttaaggttgttgaggtggattgaaagagcaagtttgagtaagttcgggaaaaaaaagttcttgctcctgtaacagtagggcttgtgtatttcgtatggtatgcaaggaatgacaaattatggaacaattgagaacaagtagatctagttgtactattaattggtgaaaacattaagcataggataactatattttggccaaaaaaatcaatatagtggataaagaatagtttcatacattgtaaaacatacaaaaaaaaaaaaaactgtatagatatacttaatttgaggttttcagttgaagatgctcttaggttaaattgttttttttagagtaatgatattttttgatttatcaaaaaataaaattggatgtgtgtcaaatctaagatggcgtttggtaacact

SEQ ID NO: 191127 - DNA, 1222 bp, Cannabis indica
aaaaaaaaatcagcatagcctataaagttattaaattttgtatgaaagtcacaataaatttctttcacttgtaaactaaatatcgtcatttgtgttctctttttcattgaaacaaatcaaatttagaaaagtatttattataggatgaattatagttgtctatttattagcgtgtaaagttagatgatacaccaccctatgatgagttataggtatggctatatagtattatgcgatacgaatatttgcctcttgattgaatcaaacccttatcacatcgatatgcacacttcattataataattattattcatgcagttatatcggtctagctaccaataaaatgtctattttttgatagaaaaaaaaatatctaagttttagtcaatcataatgaaatccacgtgaagcaagcagtacttgttattaagcccaattatgttttttttttcggtttattaagataagcccaattaagttatgagtgtgatgaccttcgagatagaattttcgtacactcatatacaaagggatccctttattcttttaagtaacttcatgcttcaacatcacaactataagaatgaattaattaatgaatgaaagcaattcatttcaaatcaaactatttttcaaatatgatgcatttttttcccaactacttgctttaatatatagataaagtaccaatatagattataaaccttggtgtatgtaattgacagatatagttttgtccaactaacatgcattagtagtttcaattttcaactagagatggaggtttcttaaccactattattggtatttttcaaacaacattattagctaaaatcgtgaatttgaaacatctgaaaagtaaaaaaagaaatataaactcttcactttatcctcataccccaacacattagtctttataaaaagccaaaatgtgaatgaagaagcacatcagtttgaataaataacgcgtggggttggttgttttattgttggtttgttgggaataaatgaagctaatattagatattattcaaagtaaaattaaaagttgaagctaaaataatacagcagctagaaactttaaaatattttaagtacatgttctaaaactacttaattagagtacaaatatatataataattgcctttgaaaatagccagcaattaatatttatatatatattttgatcttggtttggtaccatatgtgccaatgcaaacc

SEQ ID NO: 191128 - DNA, 1728 bp, Cannabis indica
atttaaatatgtatctaacattaaacatggtaccttgtagcaatgttattttaaaaataatcacaataaaaaaatttattagcaaaatatcctatttggtcactcaaattaccaaaagttacgctatgctactataaaaagacttatgattgtgttgcaactataaatgtaagaatattataatgttgaaaattgaatatagttatcttgctaatttaacatttttacgttattgttaataacatttttttgttgtagttatatctaatgttatcttagtaaggtatagtgttgttccatctatgcgttgtggcatttgatttggaaactcttgtttgtttcttggtttcttgaattggtgtttacttagttctctcttgcataaaattattcttttttaataatagattgccacacttgaaataatgcaaaatcatttcctttatcaatatttttttctccttttctttaaataattttctcttgttattaagctacaaaaaaacagatttacttcaagtttttgaaagtagatgttcaataattataacagttaacaaggagaaagtcaaagagtgagaaaaaggttcaacaagtgcaacacatcatgaatctaaacaacattatactttgtctaattatattttcaaatgactaaatcagcaaatataagtagcaaaaacatgcacatactgatcctattctccttctccaatgtgattaaaattacatacaacacttgtttgttatgctactggctcgatgttcatcactaaaattatcttcaacacaaggaaatgccatggagcagaaaattagtctgaaggggcaaagagaacatcacatcatttgcagtaacgatcggccttcttcttaacacggtcgtctagtgcatcctcaatggacttcaccttcgctttaggatcgtaactgaatttcttggcttcaacagggaacagctcgtcatacttcatgcgcttcgctgcatcaattgtgtactcgcttgctccacctgaaccatccacagcagcagcagaagtcgctacatcgttgggctcagagccatccacattttgagcatctagcttaacttttttctttttcttattcttagtcttgctaatgggtttgctccgagtagctaaatctcctcctttgaaagttagcctatttcctttcaccttctcatatggctctgacatatttatcgaaatagctagctagttaagacactacaagcaaggtgactgttgtgttgggtactctgtaatcacacagattagtgaaataagcttagtatcaatatcatagttcatataacaacataacaacttctgtcctcaccacttaaaaaaaagaatcgaaaataagttttaactgaaagaaaatatggtgcaaacaacaaaaacagagaagtttaatgacttaaaacgacagctaaagatgctctgcatcaaattcaacaccagtataaaacttgaaatgtacacaattaacctcctctagtactatcccactcagaaaatttgattctcactaaaaaaaacacaatctgtacaactaagactgattgggctctttcaaaaaaaaaaggaccatgattgccccaattcacagaatctataggtggaaagcaaatagggtggaaaaagaaccacagccactgaaagaaattttgggatttaacattcaaatttcaaacagtagacttaacattttcaatcatta

SEQ ID NO: 191129 - DNA, 2220 bp, Cannabis indica
ggactgcggagtcgtcgtatcctgacccaggagattgtggatgtatcaaaagagaaggaagggggcttatggctttaaagatggatatgaataaggcctatgatcgtatggaatggcgtttccttgagaaagttcttcagttggtttcagtccgacgatcactagtttactaatgtgctacgtgacttcggtgtcttatgccatcctactaaatggcagacctttgcataaattgtcccggggagagggcttcgccaaggggattcgctatccccttatctattcttgatatgtaatgaagttctgtctcggctcatcttccaagagcaatcgtaagggtacaattcatggtattcgggtgtctcggatgcgcctgaggtctcccatctcatgttcgcggacgatactattctcttttgcagagccaatacctctgaagtggaaactttaatgcagtgcattggaaaatatgaagattggtccggccaaatgtgtagcagacagaaatcgagtctccttgtgtccaagaattgtcaaccgggtttgaaagccgccattcaaaggatactgggggttggaaacattcaatctaatgaaaggcatctgggcaacccattcttatttggtcgcagtaaaagaagggatttcaactttattaaattaagaatgtgtgaaaggctggaaggttggagacttaagcatctatccaagattggtaggatgacttttattaactctgttgccctttctatgccctcttactctatgtcgacattcaaaattccaaggctttcttgtatggaattggactccattgttaggagattttggtggattggatcggttgattccaaccgttttcttgctgttaagtcttggaatgctctctatcagcccaagcaaagagggggtcttggttttcgtcggtttgaggatatcaatgactctttactctcaaaactggcttggcagcttgcttctaaagagatcgcccttggtgtcatgctatgaaagccaaatatttccccagggagtctttctgaagtgtctcgggaaaaaattcagatagctttgtgtggaaaggaattttaaatgctagagacattgtggctaatggttcttgctcgattatcgttaacggggaaagcatcgacatttggtggaaactgtggattctatggatgaattatggtgaatttcgagcagtcatggagaatgttagaaccattgcccccgggttaacttgcgtggccgacttattgtaccgcagatcgagaagttggaacattagttatcttcagtttctctttgggaatgtgttgggtgaggaaattggtaaactttagattgtaaagaatggagaagatgattttatagtttggaagaattccaaattggggaacttctctgttaaaggggcctattgggacgctcaacttcacaggttcggggatgcgaatcatctttggggctggatttggaatgccaaggtccatcctcatgtcagcatgatgctatggcgagtctgtgccaaagctctgcctactggggacatcttcaatcaaccgaatcacaacaactgttgcttctgtggtgcctctctcgagagtcctatggacttgtttgctaggggctcctttgccaatgccttatggtttggctgccccttccctgtgcgaatagataccatacaaatgacaatgtagcaggtatcctccgaaagttgtgtgaaggagtcgacgaggatttacaatgtaaaatgctttgctgttatgcagttctgttcgacaccatttggaataccaggaacagaatcattcatgataacgatgtggtttggagtgtagatcaggcacgaagagagatccacaagaggtatcttgaattttcctctgtctttccttcgcgtccttcgggtccaggggaagtttctgatacgaatgtaagtctccatatctctaccaatttggtgctttgttgtggatggttctttctccaatggcaggtatgggtgtggtgctttggcctttcgaaacgattcatcagactagttcttttgttcctcctatggtgcttgcggcagtgctttggctgcagaattggaagccattcttttcggtatcaagtgggcgttggacactggttgggatagagtctcgatcacgtccgattttatgcaattggttaatgctttccgagtcaagaagcctcttgattggc

SEQ ID NO: 191130 - DNA, 3605 bp, Cannabis indica
ctttttgcattgtcagatccaaactttagctgggtgatttcatttaaggagtttgcacaccctaaggtggagagtctctctgcaatgatcactgtaggaccaccatttttcattgcaactgcaatgtttggttttgtacttcagatgagttctttggtggtggagaaagaactaaaacttcgacaggtacactaactcagccaaacaataatcatcagataaataattatcacttttaatctagtattcttcttatcttgcaggcaatgacaatgatgggtctttatgattcggcttacttgctgtcatgtctcacatgggaaggaattcttacatttttatcttcattactcattcttctctttggcaacattttcaaatttgactttttcttgaacatagttctgctgttatatttcttgtgttcttcctattccagatcaatatggtgagatttttctctctgattatcagtctttcttcttattcatggttcctttctatactgttccataagtctcattgatactaattaacattcgataacagctcggctttgccttcatgttatctgtctttgtaagcgactcgtcagcagctccatctattggtttcacaatattcattatctccacggttaaccaggcacggtctcatttcctcccaatacaacttttcatgagtacactagtaacaaaacacttcattttgtctctgcagctacttggaccgatccaaatcccctacaatagaagaatatctaaaccttttcgagtcttttggtcactcttcccacctaatcttttcaacaaagctgtatatctgcttgctgatgcaacttccacgcctcaagatatcgggatcagctggagcagacaagcagaatgtgcaccaaatgataatgagtgtgtcataacaattgtatgagactaaattcaaagcttaaactccaaatcttggcaacggctcttttcttaactgttactcacatcttctttcatttgctttgcagagtgatattcgtacctggtttgtaactacatttgttgtctggcttggtttggcaatttactttgataacattatcccaaatgaatatggagtacggaaatctgctttttactttttaaaacctcattattggacaggaaaagctggcaaaaaacatgaaggtaactgtggtattcagctagtaccagttctagtaggctggtttttagagcttatgcttttatattccttttctcttcgtagaaggcgtcatttgtagttgcgtggatttacctccatcagaggagcagattcctgcatatgataaggatgtccttgaagaggagaacatcataaaacaacaagttggtaagagtggaaataaaaaagttgctgttcaaatccgtggccttgtaaggacttatccagggtcagcgaaacttagctgttttaaatgcaaaagaactccacctttccatgctctaaaggtacacaaaacatgtttaactgttgagtggtgtggatggaaacactatttcagcatacaactgcgttaaaaggaaggaaaaaaatgattgcttcttgctctcacttttttaatcatgataaaagttgttcttttaccatgctttcataaaaggagatgcctattatgagttgtgtatttttgggctttttcattgtatttcatttgttaatgtcaaaagaaggatagtaatgtttggcttatgaaatacaacattcagggcttatggatgaaccttgcaaggaatcagttgttttgtctgattggaaccagtggggcagggaagacctcagtaatcaactgtttgactggaataactccatgtacgagtggtgatggtaatatatgcatataatgtttgtgtcaatcagtcaaaactagtattggtaaaaaaaaaatgtatctaactcttttacatctgtgaactgcctcaacagcattaatatatggaaattccatacaaagctcttctggtatgtccagaatccgaaaaatagttggagtctgtccccaggttatagctttcttctatccctggaaattttctttgtcatatgcatagttcaaagtttaagtttcacataaattatctgaaatctgagtctaacccttctttttgtttatttccatttgtagtttgacattctttgggatgaactatctgcagaagagcacctccatattttttcaagtattaagggcatgcccccagcttcaatacaatctgtatgtacttaatgcacaaataaattttgtccaaaagaaagaaaaaaaacacaaaaagaaagttctttcacatgaacctttttaagtccaagagtataatgcctagttcaagtgcctgctactgatatgaaaaacaacaggttatacaaaattctttagaggatgtaagacttaccgaggcagccaaagtgagagcaggcagttacagtggaggaatgagacgtcgcctcagcattgcaatatcctttatcggtgatccaaaattggtcatcttagacgaacctgtactacctacacacattaaacaagctctttaaatcttcctttaataaaatgttttcaaagttacttgacctgtacgttatctgatttcctaattgatctgcagacaactggtattgatccgataacaagacgacatgtatggaacatcatacagaaagcaaagagaaagcgtgcaattttattaacaacacactcaatggaagaagctgacattttaagtgacaggataggaataatggctaatggcagattaagatgtataggaagctcagctgtattgaagtcaagatttggaaacggttccattgttcatgtgagtttcaaaaaaagctctggtagaaaaattccacctcatactagagatgtggttgatacaactcgacaacaccgtgaggctgtgaagctgttcttcaaaagggtaatttgaataagttaatggtttgatttgaactttgatcttaattttaccgtaatgaaaggtcggcttctaaatgggatttttcttttgtgacagcatttagatgttcaaccaaaagaagagaacaactcctctttgacttttgccattcctcgtaatagagagatgctttttccggtaagcatacactcttctaatatgtttcttctagctagaaaagaaaaagtgaaaaaaattgaagattgtctaaaaatgatttgaggttaaacgcatgattatgcatcatggacttaataatgtggacataaatttaaaaaacacattgtgcacgtggatgattgaagaggccacattattaattctgcatattggtattgtgttccaatccaacacaggattgttttactcagctccaagatagacaaaataaaattcagaatagcagactttggtatcagttttacaagcctagaagaagttttcttaagtattgctcgacaggcagagttagagaccgccatagctgaaggaagattagttactatcactttaacatccggactatcacttgaggtaagcaacctctctctttcaccaaagaaaacatacagctacaatcaaagaacactttcataatttgattattctaactcagatacc

SEQ ID NO: 191131 - DNA, 4099 bp, Cannabis indica
acacgtgctgcctatcttttcttctcgttttttaacctttttgcttccctgcatggaatctccaccaactacaacacaaacaagagagagaaatagagagagagagagaaaaaaacaggaaagggggcaaagataaaagagaagaatgagtcacggtttcagcttcgattgttcttcacaggctcgttcatcgccatcattagcgactcattcttcaaaactttgatttttcatttttgtatgaacccatatatttttcttttatttctttatcttcgagtacatccattttgtgggggctaagagtacttgggaatggaattttgagggtcccttttgtgtgggtcggatctcgtacttaacaaaaactgtcacatctgaacacttggatcctcatttgatcatctcattttgccagaaagcaaggaacttcatgatccattcaccagtttatcgatctggctgtctttgagtttcctctgcttattcacaccatttaggtatttacagctggtaaaaagatcatggaatgtagcactctaccagacttcaggtaaggaatcgtttttgtttttgtttatttttctgtactgggtatctctggttgtgagtgctaacattacatcaatcatcaaagcaacaacaaaagaaaaaaagaaaattctaagcagagagtagtccacgatgaaagtgaaactatttcaatgttttatgtggtgacaattcaccgtctagaacaaaaaagaagcaaagagttgaagttaatattatacactaaagatttcatctttgtttttctttttcattagtgtgagaatgaaccacaaagattcagagtctgaagctgggaagcagcctggttatgttctcagggagaaccccaagaaaagtcggcgttttgctgactcaagtggtggtggtggtggtgttttgttgaaggaattaaatgtatgcaaagaatgtggtaaagggtttcaatcgatgaaagctctatgtggtcatatggcttctcactctgataaagagaagttggtgattaaccaaaagtttgaacagtatttgggcactaacgagaagcccaaactgataatggatagtcactcggataccgagacctctggcccgatgcagaacagggtgtcaaagagaattaggtacaagactcttgatgtttactcttatctggggaatgcttgttcttctgtttcaggaatcgagcaagaacagcaagaggtggctataagcttgatgttgctgtctagagattctggccataaaggaggtttgaactcggttggagaatcttcagataacaattcagtggttttagaggctaaatcctcttcaattgatatgatgatgatcagtggtaagaaggttctgagttcttcaatctccaatttggatgagtttgtgggaacgaagagagcaagtgatggggagttgaaatcttccaagtatgtcagtgcttctgaaaattctgattctgggtatttcagaaatggacctaagaaaatcgaatcggatgtttcagttgatgggtttctgagaaatggtgattttaagaagctggaatcacgatctgggtttggaaagaacttgctcgatgaagacgctaaagatcaagtggaaagaggttctttgaaatatgagttgagaaagagaaccagaaatggtctctacacacctgaatcattaatgaaagcttgcaagaatgaagctaactggtcctcctccaatggtcaaatctgtacaagtaatggtcaaaagaacaaatacgagtgtttgacttgtaagaagaccttccattctcatcgagctcttgggggacacagagccaatcatagtaagatcaacggctgctctgaatcaatttgtgagagtggagaaaacagcatagcgatggccatcagcccaattcaaatagctaatactaagaagaagctcattgagaatggtaccagaaaaactcaaattaaagaatatttccctgaaagaaaaccaatttcaaagaagagcaaaggacatgagtgccccatatgcttcagaatttttaagtccggccaagctttgggtggccacaagaggtcccattttgttggaggccgcgagaccaatgctatggtgatcaggcaagaacctcttgacccggagccagagcccgagcctgagcctgtgaccgaggttacagttctgttcgatcttaatttaccagctacagaggaagacacaaatgaagatgttggattcgtggcatggtaagttgaagaagaccacaagcatgaatttctttctctatttatttatttcattaatctaattaaatcttactcagagttatgctgtcattgtttcttaatgaatgtatagaggcaactcttttttgcttttcttcaagaatatcttaaatgagatgatgtttttcttcttgttcgtgatagccaaaacaaattgtttctcttcagcctttatttgttttacatgatttctttcattcatgtatcatataactagatccttcgtttcttattagaatccatttatgtttattattccattggaactgtcgttttcatcttgctatgttaactgcaaaaggacagttttcaacaaccaaaaaaagtggagttagcagaaagagagaaacaataatagtttcaagttttctgataacaagctttttagttctttttgtaactattcagaaggtgataactagaaccaatttccactgctcaaagtgtgttgtttataaaagaatcaaggaccacactttagagggaaatatggaaaagtgcatcttaatgagggaagtttccttttgaagttacatgcgccaattcaatttgtattcattatcatattatatgtattattattgtagtacagagtatatagttgctttgaacacatcagcaattactgtttattcacttctaaatcatttatctttgaaataaacagtgtttttttcctcaacaagatatgattcccatcatgcatttctggctaatattattctctaccacagttcaaaagaaaaggatcaaccttttggctgtgtcctcttttccctttaaacaatatttataaacttcagatgctgagttcttttccattgaaaagaaaatgaactggttttattattattatattttgaaaaaaataagaaatacctgtttttttatttctactaattagtacatccttttcatagtaggggaatacacaaattgtagttgggcaatcttaaatttgaaggtagagtagagataagtagtttgtagaatcatgaggaatcaaagtcaaagtcagattcacttctaattattagtagaagaaaaatggagctcgatggttgttgtaagaagcacctactttgaagcataacagatcatgatcttattgttatgttctggatatttatgtccaatttttacaagggtcggtttgagtatttacttgaatcctttattctcatcatcttttgtgtctgtatttgttcttagtatccccagttggtgagcgtttagtggaccacttttttcctttttggtaccaatagggagggataatcagcttccatcaatcaaattgattggagtatccatttgttggcccggatatacattcataaaatgatagttgtcatcactaataatgatcatttctagtgcagtatataatcatcttgggctgggtgacccaatccatatttcttctgcattttaaaatgagaattggtaaacgactttcattaaaacctttaatatcactattagtgtaatttaatataagtctcaaataatttaatttaatcactattaaagggtatcactaactatgaagcgtggcctgtagataatattaaacactacaaataatcaaatagttatactaaatattagaatataaatgcttactaaaatactcaaatttctaagttaggttttacaataaattaatgtatagttctaattttatattttctaatagttatagctatgtaattttattattataggtatatttgagtttttatatttattgtatgtgtttttttttagtttttcgtagtcgtgtcgtatagtatttaaac

SEQ ID NO: 191132 - DNA, 712 bp, Cannabis indica
tatactggagttatatggtacgtactgccatatatttgataaatagaaccccttcgattttacttaaagataaaacttcgtatgaaattcttcaccacaaaccccctatgtatgaccatttgaggaattttgggtgtttggcctatgcttcaaacattgttcactcccataagttctctccaagatcaaaagcatgtgtctttattggctaccctgaacatatgaaggcttatactttacttgacatggctactaataatatttttcattgcagagatgtttttttctatgaaactatatatcctatgctcaacagatctcaccaagatgatatcgacaagttcttttcatcctccatttcccgtccatttatttctgaacagcataccaacacctctgctgaaaccagcaacactgctaacaccagcaataatgctgaaaccagcaacaacacaccaacaggtgattattttcgacctgacagcagcaccaatgctgcgaatgacaacacacaacccctcaacaccagcagtcttcaacaaccagctgatgtgcatcacacgaaatctggcaggccatcacacaagccaaaacatttagaacaatacatgtgtgacttcctacaggtccctgcctcaacatctcaccccctcacaaattcactggcttataccaggttttccaaaaccttcagagctgctatacttgctgc

SEQ ID NO: 191133 - DNA, 1508 bp, Cannabis indica
atttgggagctctatttctgcttgtcatctgcctatgtgtttagggtgcatttggttataggtaatggaatggaatttccattccatttttttttactggttgcattttaaagtattggaatgtcatttcaatagaataactgttttctgtcatttcggtggaatagctattccctttcaaaatgggtggacatgccattccaatgcaagatgaataaaatttataatgtttttatttattttgtatatgtatattaaatttaattccattctattcctattctaattcccatttttattcttattcctgtgctttaattcattcctacttaacataccaagttattttgtcttcatttttgtttataaaataatataggaaacaatgccacctctttctctttctcattcccccttgctcaactcccatgaaaaatataagcacatgtcatagttgcaggtcagtttatggagtttcatttgttttgtttttgtgtgactctgctgatttattgttattctgtgaaatggagattgtgcttataattactgttacttttctctttatactaatagaagtcttcattccttatgtctaatagatttaaaattccaaggtttattcgttattgagtccttgacttgattctttgtaggattaattgatatacatgttttcaaaaggtagtctttctatgcattccactaacttcactttatgtgtaggtatctatgagaaatttgcaaatgcgttttcaaaagctgtccaaaatatgaaagttggtgatggttttagtgatgatgtggtccaggtaggtgattaaaatgtttaatttttttggttatcctattgttatccagattgtgtaaattgttcctaggtatcaaattcaatgttgatctacccgtattcttttggatggtgatattaatactcaaatgttcttattaaatattaaagtaagacagctcgggttcaaatgctggcaactattagtcatagacctggtcatggtaattgctgcattgatttttttagtcttgagggattcaacgcttattttttcctttatggcattactagggagacaaggatcattgttgtaatattatttcgtgcacacttcattttatttgcttcactatggtgtcatcttatgcacccacattttgaagaaatggtactacttttgagaagtagccaaacttgttaggacatgggttccttctcaatagcttaattaactgagaggatgttatattcacttaggtagaacttactccctaaaacactagcctatgataggagggtgccaagtagttataaaccaccaaccagtcccatagtggatatgtgcgattctaaaattaaaccaaccattcccatagttgatgtgcgattctaacacacctcccattagattgatgtccatgggcttatccattagttgtctcttccacggtattggtcccacttgaggtttttggctctgatacaccaaccaacc

SEQ ID NO: 191134 - DNA, 6364 bp, Cannabis indica
agaggaggttctcaaatttctgacaagattgggaagctactgctgttcaaagagttttaaaattaacaaacacaatagaaacacatgtggttttggttaaataaatatatttatatcaattaaaaattgcatataattgaaaagcctaacccaaatgtattaatacagctaaatggatgaaaccaagaaaatgggatacataacctacaaagttaagggttaagaatccatgaattttgaattaaataagtgagccgcccttcaattcactcttggccaaaaaatacagcaggaatgttacttgcttgactttaaggcttttagtggcagtcacctggtttgctatttaatgaactttgataatgtaatacccaaacccactgcgtcctcaaaactgtcaaaaacatgcatcaattgaagcctcactctgatctaaaatgccattctacctgcaagcctgctttctgatatccttctatcaatggcagcatcaattgagctcatctgaaacataaatccacatcaggaaatgataagcagtggctttaagacatataacatgaggcaatccagatatatatatacaatatcgatcttgttcctatgctagagatgccaaactagtgaaagaagctgacctgggccaagttgaatcactgttcggtcataaaataaatagcaatcatgctatgaatgagcaaaaatctgtcaggtttgattatgttttacttccaatcaaacccccatgcttcatttaaagttgagtattgggaaaatgaataacaagaaatacattcaaattttacatgagctactatgttatgtactgagtacaaagcttaggtaaaagaatgctcgggtagatattgcagggaagcccatcaaacaacataatcactaacagaaaagtagcatgaatacctacttgaatcttttggtgcccacaagattggttggcattgcgtagaaacaggatcatgacaatttaaaatgtaacagcatgcctatcaaccaattaggttggtagcaaaaagatggacaacttaatgcttttttttttttgctaagtgtgttctttcattttcttttaattttaaaaataagtaaaaatataaatccatacatcagtacctctataacaggaaacaatgtgtaaacaactgaatctgaaaacatgaaacataaaagcctacccatgtggttagagcaatccaaactccattaaatgaagaggtagtatcacttacctggctagtttcatcatgcacctgatacttgcttaaagacattcttctttcctcctgcaaatattgcagtcacgcattgtaacaagttagcaagaataaccagaaaaaaaaatacagttaaaataaaaaattttaataaagtagaaaaacctaccatggacatagcttcatcatcccaaaccaaatagacctcattagtggctggctgggttgcagaggttttatttgtaatgacaggaggaggtccaattgaaggaccaccagtatttggacccgaggcatacgagtgtgaattgattaactcacctatagcaaaaagtgaacaaaggattaataaacaaaggaccaacttcacaatatcatgtacaatgaaatccagctcttcatggcagagccattaaaggcatggatattacattagtcaggaactgatttatgtcggaccagacaaagattggctcaaagccaaccaaaacaaatttcgccaagcccagccttctcggtgtttcatcttcttagctagaacaactactgcgaagcatagataatacaaatataaacaaaaaaaggtcggtgctagttgatacttttagtcattagggagaataccttgcatcctatcactaacacaaagctccatctagcaaaaacagttcatgatgaactccataagttggaagcccagccttctcagccagtccttgacttcgtgcaaattatgttattaccagttttaattactgtaattttagttattataaataatgtttcttaaatagcatgttctctaaactggtttaaatgaaggttaatctcaatgtcagccaaaggtgcatgttcaggggcctgaactacttcaaataatcctcatgtgtagaattggagcccaaagttaaacttatttcttagaaatataatctaaatctaatttacagtttatttttacatccatttctaaactaaaacttccacaaaatctatcgaaagcaatatgatcaatatgataggttaatggaaagcaagaaaaaaaacatatcatttcagtgagacaatacttagtctaaggatcagaatgcttggaaatatggaagctactagtcagataagtgttcaaacctgaatgtgcatctaacaaggctctattatctactgttgagcctggagggatgcttgttgaaagcacctgagtagaaaatgtcaaattttgggcaggtaaattgttattgccaccaacaggaaataagggctgtgatacagtaataggaggagctgatgtgggcattccaggagtcatctgcacaggctggagtgaaggtggtgcagatgatggcataggaggcctcacattctgtactggaaacaatggctgctgagcataccccaccaatggagcagactgaggcattgaaactgctggagattgtggataccaatgctggatacgatgaggattaggccaagcattaggaggcactggtactgaagagttgtacctggcaccatagaaaaataaatttcttttgttaagactaaatgtcaaatgaacaagtaaactgtagggaaagctatatgttatgctactacaggaaagcatagtgataatatacacaaatttgttcagcaactagctccattaaaaacaaaaaacctcttaaaacatacatacattggtggcatcgcccctaaagcaggttgaggaggatatgcaatgcccattgatgcaggcactattgaacccaacggtgttgataaaacatccccttttgccacttttgatggagcatcctcatctgcaagaaatttacgatcagtgagattttgttcaatcatatgccagctgcttccgttctgcgtgacaagctcttagacactgaaagcccaacttgcaacactattaattctagtatttttctatattcaacaagagaagagatgttaaagcagtattgcaaggagggaagaaagttggttactgaaaaccaataccaaagctcacttaatcaaagaggtatgaaataacttggttgtcaatttccagatgaattaagggtttcataacttaaaaattgttttcaatttttaaaaatagaaaatagcttttcaaaactaataggggtcgtttggccaaattttttaaaatctgagttttaaaaaactaaaaaacagaagacatcaaaatgtaattttcaattttcaaaaacaattttttttgtctaacatattatattttacattttcgctcacatacctagacccagacccgggacctgggacctcagaccccgaactcaggaccccggaccccggaccgaggtcccttggacccgaaccccgaccccgaacttagactcggaccccaaacctggaccctgaacccagaacccaaaccaagatccgaactcggacctagaccccatacccaaacctcggaccccaaccctgaacctgaacccggtcccggacttggactccagacccgaatccccagaccccgacccgaacctcgaactcgaacctgagacccggaccaagtccccggacttggacccagaccaagtctagatccgagccgagttcgagtctgggtttggggtctgggaccaggtgcgggtctgggttcgggtctaagattcaatcccaagttggatgtgttcatgtcatggtatggtgtaaactattgattttttttagtaaaaaaaaatctgaaaagagttttagaaaaacttgagtcaaacaccattaaatttttaaaatgataaaaaaaaaactattttttgttctcacttttaaaacacaaaaatttaaaaactgaaaatacagccaaacagcctcttaccttcttcaccataatgtgcagccaagacgtcatcaggaattccttgcataccatatatttcaatttctgtagattctctccctgattttgcattgggaaccctggattgtcaaaacaaatgaacaatggtcaatgatatagatatatattacataaaaagaaaaactataagatacatttagaccactacgcacacaacccccaaccaaatgaggtagtctcaactggaaactgtaacaatcagaattttaaaaagaaaaagaaataaggaaagaaaaacataaaagagcttaaggtgaaggccctagaaaatattatggcattagggatcaaaatatactatcaccattcttgtggcgtcatccattgcatatttatttacttcaaagtattatttagatgaaggcatctttggaatgcctcctaaaataacccagcaaacaagtaaatatccttgggcctgtagttacgcaaacattgggagctttgaactctccacattgagagagaaaaaataaagccaagcgcagggaaatcatattgaaattaaataaggaaagtcatgcaaggataataataatattcataatactaatgcatatgcatatgcctcatgataattgtcagataaacattacgaaaaagattgatctgtcccaaacaaaaccctgaactaaacttgctagcctcccgaataatcagacgccctttgctcacacaccccaagggctatcatatcacacaaataacattctagacaccaaaatattcttatattaaccgtttccacagtcttattgcctttgccgctattctatggaatcaataaatcaatactacatcattcgagtataatcagccatacatactacatcaaaattcaaaatgacaatcaatcaaaacttatataaaaaacaaagaaaattgattggagaaagaatgatatgcacacaataataataataataataacaggaaaggatgatgacccttatgagactatctaagaaacgataattacaaacaacatcatattaccgttcccccaattcccaaaatgttataagaaaggtaatcttaaagtcttaaaccacacaaacaaacaaagaaattatcagcagggagtcagattgtccatccatgaataaattgagatacaagaaacaatttaaccaataaccctttaaaattgaactgaacaacttaataggaattattgtttaggcatacccagttattatcacacacacgttacagtatagtcccagaacaaaacaaacaaatagaaaaagaaatttcataaaacccatcactgtttcagtgatccgtgcttgtaccagaattttatgtatccccgaataaaatccagcataaggaaaatctcaaactcaattagagatcttatcttcttttgtagttttaagtttaacgatcccgacatcaatcaatttaccaaaatcatttgtttataaatatttaatcttttaacctaacatatacatatacatatccatacataaactcataatagaaaaagaaaaagaaaaatcacaacaacaacttgtattaatggaaaggtaatatgaggaagttgttaggagaaaagccaggaaaacccaaaggaaattagatatttagaagaaaaagaaatactccaacccctaatcaaatcagtaactactttatacacttcttaaagatgcatactcatgttgctacccagttaatttattttgtcccataaatcctccgtgacttcaagaacatgttatattaaaacctgaagaactattttccattgttttctctattgcctaaactccccctcttttctgtggaacctataaagcaaattctatgataaaaattgtttcgttatctagagaatgaatgaaatttcataacttgatgagatcacatttaaaaatacgaaaaattgaatagaagaagaagaagaaaatacgaacttggtgacgctctccttgtggacctggaggacgtgaatggccataccactggcagtagagagtttcttgtgacagacatgacacttaaagtgcttagctttctggtgctgaaccaatatcttctcgtcgtcgaactctctatcgcagtagtagcaccacaccttcgaggcaaccctcttcttcttctttcccattaaggccttctaaaactcgctagggttaccgattgttgactccgatggccctctcttcctcctttgctttgggttttcggattcctattatttattctctctctatttctagtttttttt

SEQ ID NO: 191135 - DNA, 2081 bp, Cannabis indica
aaaaaaaaaaaaaacttaagggaaaggggttatgcattgtgttttattaaactcaataattattgcaatttattatttttatcaatagagatataagtatcttaatgttttgtagtgattgcctggcaaatgattgccatgcttgacataaaatttcttttgatgattactgtgtattttttaatttttatatttgtggaaggctttaacattcaatttgagtaggtatatgttgacattagttcattgcaagtgtatgattggactaaattatactttcattgtgttcggtgtgatcatgaagaactgaattctgagcattatttattgcaggcctaatagtcataggacaatctcatagggtcatcattagtgattatttgtagcccattcaacatcttttcagctcaatctacatcaatttatggtgttatttacatggaacatactattgtttagtgatcaatttgctgtgtggaagatgctctgtattccgaatacaaaaattaaccgaaaataaacaaagtaaaagttcattttaaaagataattatgtttccttttttgaactgctgcatatctaattcccacactattgatttatattgcttcttctttgtaatacagagattataaatacaattattgcttgatgactaattaagttgatattttgctgaagaaaaactatctctaaatgacaaaataatgaaacattttcattggattaagaattgaaaaccaagcacttgctactggtgcaaatagtattgccaattaagtatgaaataatgcattttttttgtttgtttgacttattttggtattttttttccttctaaatatttgtcattatccattttttcttctcaatatacttattcaattatttatttatttgtatgattttcattgacagtggatgctgcaccaacaaattagatgccacttaaacattcaggttagcttcaaatcctatatatgatgtttctccatgacattttttaccacataatattgataaaagagagtgtaaagcataacccctttttctttttggagtaatttcttaaggcctaactagttttgtatattattttcaaatgggaaaatctggttcattagcatttgacttttggataagagctctctctctctactctatatatccatctaatctatctattagattaggtgaactacacgtggaaaactactggtggtcacaatcaagacttttattttatttttcaccctgaaaatcagccattatagctctgctttgttataatgcctttgactggtctaagttttattgtaaattttattcattcttctctcacgccaagtcaattttccctaacaaactgaaggtgacaatcaataaaatcttggtcttggcttagagttctaggcaagtgttgggggttgggtcaagttataataataacattatataattatctggtgtgtttatgtgtaggaatattggataattagagtcttggggtattcattttttaaatattatcacttataacaatgcccatatctttgtattgttgtttataaaaaggtctatgcatgtttctatagacataaagaaatgggcttttctttttgtttttgttcttcttgattttgtcattgaaatatctattattatatattgattcaaatcttttatatttgacttgtgaggacttgaaaattttaggtacacaagctaagctaaccttgtacataggaaaatagaggatggaaaaaccttgaacaatcctatttaatatatattatggaataagaataacaagagtttcatgccacctaatgtaatataagaccaaagataaagttagtgccccattatgggtggaataaaagtatattataaaagaataaatttaggataatcataccccttttagttttgttctttttctttagtaaatgttcctaaagccatgggaacaaaccccatttgatcatcatcatcatcatcatcatcataatcatcatcatcctattcaaccaaatttgtctcattctatcttttatgcaaacctcattgttcaaccacca

SEQ ID NO: 191136 - DNA, 3032 bp, Cannabis indica
tgcatttctagcaactatttccactgataacacaactcctactactatacatgctgctacaccagaccctgttcaaactatacagccaccatatcatgactcccaaatcaacactcaccctatgcagacaagagccaagtcaagaatttgaaaacccaaagtattgatggcatctctcactccgaaatctattattgctgcattacaacatcaaaaatggttctctggtatgggctgtgaattcacagccttgaaaagaaacaatacttcgattttggtggatttacctcccaataggatttcaaatgttagtcagtacaaagccagattagttgccaaaggatttcattagcaacatggctttgatttcaatgaaacattcagtcatgttgttaagcatattaccattagagttatgttaactcttgtagtgataaaagattggccaataagacaattggatgttaataatgtatttttaaatggagatttacatgaggagatttatatggttcaatcaccaagtttcattgatgaagaacatccaaacaaagtttgcaaacttaacaaagccatgtatgaattgaaataagaacccaaggcttggtttgaaaaattatcctctactctcatcaatttgggatttcggatttcaatcagccaaatcaaatcattcattgtttgttcaagtcactgcctcaagctaccagtatatccttgtctatgttgatgacatcttaatcattggatccaacagtgatcaagtctcatctctcattgcatctctcagcttcccctttgcactaaaagatcttggtatcttatcttttttcttgggcattcaggtttgtcctaccactaaaggtgttattttgtctcaacaaaaataccttcaagacctcatttgcaaagctgagctacaaggtgtaaagccacaaagcactccaataaacaatggcttcattagtcaaattatgggagtgatccttttgaagatccctctgcttacagatcacttgttggggcccttcaatatgctacaataacaaggccagacatagcatttagtgtcaataagatttgttaattcatgcaaagtcctttacaatctcacttggctatcaaaagtataatcagatatcttgctggcacacttgactatggcctacacataaagaatgctccacatatgaatctcgaagcctactgtgatgtagattaggatgttgatcctgatgacagatggtccacaactggctactgcatcttctggggtgacaatctcattagttggaaatccaagaagcaaaatacaatatctcgttcatcaatagaagtagagttttcaaacatttcttttgtggtgactgaaataagttggctcaagtcattacttactaagatgtatctcccacttgtctcttcttctctcatggtgtgacattctcagcacatcatgttggctacaaatcttgttcttcatgctcgcacgaaacacgtagagattgatctctatttcgtccgagataaagcgattcaaaaggaaattaatgtgcaacatgttcctgccaatcaccaactagttgattctcttactaagcctatctccaattttcaatttcattttttttgagacaaacttagtgttatgtgctccaccacactaagtttgagggggccagttaaggtaaatgaaccagctgagctggcatagttgttgttaggcttagttttttgttagagtaattaggctggttgttggtcaagatatctttctcttgatttgtaactactttgtttttctgtgtataaacctctaaaacacctttggcttaatcaatatatagttttatctctttctctatcgttctttaactctaacagagttctttagtattagtctatacgattattttagagaggccgagtacagattaatgagatcagctatattgtatgtgtaatgaccgtatacttagaatacggattagtaagacaattagcactaattaattatattttatgattatatatgaatatttgactatgagcactactaaaaaattagcttttcctaccagtttataagtgtcttttgtactatttcctaacaattcctaaaactgttaactatgtgggtgtcataaaaatatgaaaccgtaaaagacagtttataactgttgaaaaaatcattttaaatgacaattaataattgttggaaaaagtcattttaagtgacggtttataattgttaagaaaaattaaatgactatttataactattagcaaaaatattatgtagatttaaaaaatcattattttgtgttacaataataatatgatataaataaatttattctttataaagaatatattagattttattattgaagaaacctaaaaaggattaatctaattaaactttttcttcatcactctcagagctcttgcccatgtgttgagaataaccaagaacattatatacaatacatattctaatagttcacactattccttatgtgtggtgaaagatctgaaagattacggtgtgagttcttcattatcatctgaggatataacttacgaaaagaaacaaggatatcttgataggcttcaagaggtaaattttctttttgtctatttattttagatttaatgtatatatggtgatcctgaggatgtggtaagataataatcaaaaaatatattctgatgcgtacctaatttagtacaacaaaaccaacatactaagccatgaaatgagaagtacaaatagtattgctaaagcaattgaagaattcaaacgtaaggaatgtcgtacccttgagagcacttatggcaaccaaacccaaaactgtctgaataaaatcgagaactaattaaatcatcaagactctggtgagaaaaagaatgtaagccaacaaaagggaatggggaaatgctagagttccatgtgcttctcgctgaccaggatttcaccattagacattttgagttcttctaggttattctcaacacatgggcaagagctc

SEQ ID NO: 191137 - DNA, 954 bp, Cannabis indica
gaaaaaataactagctttgaattataaaataaaaaaattcctaatcaacaatgggatgaaattaactaaaagatttaattttttattttttgtttgattattgttataggaaaacgacaagtacgaatgttgagtgttcacaaatgacaatattttacgctggccaagtcctaacttttaacgatctgccggttgataaagcgaacgaagtgttggcattggctagaaaaggatgctcttcaagctcaaacttaattaataataataactcttctgctgcttctgttactactctaaatttcaaggagaaacatactgactcttccaatattataattaatattaatgagtctcctgctgacactgatgaagtctccaattccaatttggtcattaaaaacaaaacttcagttgttcccattattcccaagtctaataaaaaattcccaactcttgaaccaattcaagaaagtaacgctgaagccgccgctaatggatctggtaattatatatcctttaatttcttaatcaattctaatatcttgattaatgaattaattatctttttcttttttatacagacttgccaattgccagaagaaactcactccatcggttcttggagaagagaaaagacaggtacgttttaagtactcttcttaatagtttttttaattattattattttcttaataaaatcaatttttttaattaattataaatttttagggtggcagcaaaagcaccataccaagtgaataataatcgcccagttaatatggcttccccaaaaccagctgatgaaggaaatcaatggaggagtacgagtgctagtgaaggtgaatgttcagagcaattagaactcaagttataataactgtgacttgccagagagatttgagctcattcatcatttgttaatcttagatcctatatatatataattgtatattt

SEQ ID NO: 191138 - DNA, 2205 bp, Cannabis indica
ggtttatatatgcttaaattgaccccctttttgtttttattaaaaatttcgtttgtcaaattcttctctcaagtaacaagaatttctttgttaagtatgtaaaaatggtgtcttttacctaatagatttcactatcaccattgctagggtttatatatgcttaaatcaattgacttcctttgtgaatttattagggtttttttttcttttctattttcgtttgaacagtaaaaatggaaccagatgtgattgaatttctctgttgagctaagtaagtaaaaatggtgtcttttacctaatagatttcactatcaccattgttagggtttatatatgcttaaattgactcccttttgtgaaatttattaaagattgttttttttttctcttcggtttgaaccgtaagaatggaaccagaggtgattgaagccgagttggtattgccaactcacctgagttttaagcgagttcaaatgtatgagaagtacccaaaaggtcaatcaagaggtagacattggaaacacttaaggcagatcattcaagctgaaaattaccagaattttccaccagatgaacccaattgttagtaaatttcttttctttcatgattgcatgagttgatttgggagaaatttaggatttttttgtttgtgtagcaaaatgccttatatgtttgaaactacattattgaagatgagctgagaagtttaaggttgattagttttcttaattggttctttgtgataaaaagtaaagagggttttgttcttccttattcttcatatagaaaatttatgaatgattcgattagaataattgcaatatatttgtttgattgaaagagtttctatattgtttatagaatacattaattcactagaatctaatacaatagaatttcgataatgaaattattgtagatcactgtctccttttggtatgtctttgtactgtttaaggtaaatctagttgaccattgttgttaggaacttactaatactatgttatcctttgtgttctataaagctgtttctaagttttgagttgttggtgttatctattttcagatgtcaatattgagtctcctccctctatgcatccttgcaaaaaaatttagtgacataactggatatgaggtacctctctttctctctctctttacacactaatcggctacacactgattatgttgttctcctcgaaatattgccattgttatcggttgtagtttcagttgtcatattgacagattttagaacacaagtcaattgtttggccatttcatatacatcttttaatggaaaatctacttagagttgaggattctaatccaagatttaaaaaggtttacgaagtttatcaaaaaatgtatgaatactatgtttgaataccccacattacttcaactggattgataaatgatttgctaaatgtttgtatgtactcttttagttgtaatttctaatttgtaagcaactctttcttgcttattatggtactaacacaatttaaactaaaacactactttttatgaaatgatgcgattagtgatactttttatacaccatgcaggcaccttattccgatccaagaactaatcttcgttacgcgaatgctgaggttttcaagctcattcgatcgttgcctaatgaatatgtgcagaggtatcttgctcagaggaatgctgctgtggttttgaagtaaaatttggccttatcggttatctttataacctattttattgtggtctttatatgcttctctaatttttctattaccaaaactttttattctttttccttttgcaaaatcattacctttgaaatggggtgatttggagattaggggatttgggcattttagatattagagagaaaatttgagttaaaatgtatgcgagaattaatgagagatgatgtagtgaatgacaatgaatttcaaaatgtatggagagattgcttgaatataaatgtaaatatagatggctttttttgttattttattattatttagaaaacaaattaaaatgtatctgaatctttttctttgcaaaaataaaaaaggtgttcataaaataaccaatccaatccgcaaagtgtgaatttttacacttgtgcggattggattggattggaaaattctaaaatctacacttgtgcggattggatgttgattaataaccgattcaattcaattcacacatat

SEQ ID NO: 191139 - DNA, 1369 bp, Cannabis indica
tttacgtacgatataaactataaaaataatacaaaaattaaattaaaataaaaaaagtttaaagtaagagtagaaattttttcttatattgtatgtattttttatattttttttaaaatttttgatctattatataaatttttctataattaatctaaatattttgttttaaaaaatatataaacatttcttttttttttctgattaatttcttaaatatatattttacctaataaaaccagctgtctcaactcaattaatcaaaacctctccttaattaatttctccaagcctataatccagcaacatagagtgacggtggcaaagtcaaaaattcaacattaattattattattattattattattattattattattattataaataagcattttcttgctaattatatatattttatgttcttatcttttaaacttttaaggttcatttcacgttcccaattttgcaatttattttattttattttttattttcaaagtcttctgcccaaaaatttactattttttaaaatagaaattattatgtatggaatgtttttcatttttaataagaaaatcttgatgttatagtcaaaaaaaacagtattaagtttggaactatataccatagcaaaggtatgttaataatcataacagtgcaattttttgtacagattaattaatactgtgtcattatttatttttttgaagttacgtaaaatttcaaacacttgaacatatatatacatatataaatatataattttttttcttatttttgttttgtcatgtgggctgtgataaaagaagaaagtaatactattcaataataatcaatatatgtctccatcactataatttgtactgatatatttgagagtgtaaccattcaataatccaaaaatatacatatgaatgaaccaataattatatatagttttgtatatatctacagcatttagttttggtggctataataattgagagacaccatttattgtgtcaactgtaaattattgttgagaaaaaataaaataaaaaaccttattcaatgtttaataaaaggtcaaatatatatatattaattgttaccagctatcataaactataggtagaaggttttacccactcatatagcatataaaattgaccaataatcttaggctctaaaactttgaaacaattcaaaataagatgctagggatttttaagattattaggtactagtagttagtggctaatatttcttataaaattaaccaataattttacaattagttagtaatatttttttaaaattataattttaaattatatgggatctgatgtgaagaattagtgctcacgatgcagagagttttcacagt

SEQ ID NO: 191140 - DNA, 1725 bp, Cannabis indica
gtggatggaagaatatgtttgaacaccagtggttagaataatttcttctaccaattataactttatagaatgcttaaaatcccttcacgcaccaaacatggccaaaataaataaatatgaaacaataataaagatatctaaaaaggcttaagacacttttgaatgcatgaatgacacataatattctatgcagaaagagaatatgtacaccaataattttacctcaatttgttgaagtttagcttcaaagagcttttccctgtcttcctcctacaaaacagaagggtgttaatgtggaaataatataataacacaagctgacctcagaccataatgtttaatgaaatatatccaactaaaggaaaaatcatcctaccttgagagtccggccatcaggagcaggatgagcaagaacaaagacgcgatctataaacaatcacaggttctttgcccaaacttttccagggaacctatggtttaaagcaacaaaaagttaatcgggaaaatgcacgctagttgcaattaaatattaaggaataacacttcacacaacttcaatagcctttagaatacagtcaagaatgcaagcaataaaaggcctgaaatatttagaaccagcagtcactcacaaaggaacaaatggagaaaatctataaaatcattacgttccaaaacctcataaattctacctgttctttagcccaacaaagcaaacacctagggtcatcctgtctagtgaggaacctaatataaatacttttttataacaaaactacttgtatcactaaataaagtttgcatgatacaagtgaatggtagaaaaaactacgaaaaaatcctgcaaactataagcagaaatgcatataaaatttcaaaaggacaaatatctcaactgatctgagaatattcttaaattccttcacattatgaacccataatgcaacattcagtttaactatcccattaacctttctaaatcattcacacccttttcaaaaattctcataacctctaaatcattcacctgctcttcgaaaactcttaaattcctttccaactataataccccataaaatagctggctgctattgttacctgccacaaaatttgtttgtagttcctacctttcaaccacaacaaaaacacttccacacatggtgctggaatacaccaactcaaatcaaaggtctccaatagtttatagcatatttgtattgaacttgttacttgtacaatatatgaataaatgtttaacaatctatgtactatggttttcctccgccacaagtgaggctttaataagatcgggggagacctaccatgtggtctccttctcttattttttaaaaaaaaaaaaaactacacaccaatctggggatattgacatgtaaagccttttcttttgtaggacatcatgaacattcactttccaccataacacttgccagcaaaaacttttctttaggaggtacagtcattttccaaagtgaccaggaagtctacaactgcctcgttgtccttatgttatcaaaataagttttgcaagtgaatgattcagaattatcctccaatcaaacctcaatcttccaacaatttcatcttatacttccaacctctccagcaactgaataagctctgacatttctttgtcattaagattattaggtcactgattccaacttacattatctccatcaccttcgtgaaagtcaaagatgcaactgt

SEQ ID NO: 191141 - DNA, 2889 bp, Cannabis indica
ttttaaaaaaaaaaaactaatatgtaagattattatcgatgcaaatctaataattatgatataaatatatatattgaaaaggtaattaaagaaaaatatgtgtaccttaatatgagtgttgtaatattttagtaatttcattgttcaaattatctctaacataaataaagaatttcaatgtttgacatgattctagcatttatagttaaatttgacaatgcctaatttcttcatgaatcaccaaatcatcaactaagaaaaatggtaagtgacttagccaatgtagtaagggacgtgtactacattttggacgatattagtaattacatatgcatcaatgtgataaactatctaatctatttttgaattataatttataactttaactagtatgatagatttatcaataatttcagcgactatgagatctaattctatcttttatataaacaataattttcaaaaagaaaaaaaaaagaaataagaaaaaaaggccaaagtgtacttcatattctcaacttctctcgtataagattcgatccggcttaagtaagctctttcaaggattttaccgagtgttcgagtaaaaagtataagcaaaaactacgcgaaatgttacttttaacttgtttccataaattttttgaatcattttgtatctcactaatttcttctatggttgaacaatctgctcttcaggcataaaacacggtgaagaaccgagaaactaaaatttcaagttcgaaaaagaaaaatcaagtactacttagaactctaatccaatctcaaaacaaaattatttcctattaagaatcacctggaccaaagttcattctcaagtctaaagaatgtaattttctttaacagttaaatgtagacattatatcatattatatgtattaagtatagcataaaaatgttccaagaatgatgcaagtgaaatgaatcttgaattccttcaatttaccgatgaacagaaatctctacggcatgaaaatatggacgacagcattccaataatcagccaactgaaaatcgaaaagatcatcagttaatcaacttaatttaatgtgttatagttagtatgagcatagttatttgaggctaaattatagaagtagtaactagacctgagctaggatagctttcccggtttgaccttcaatgactaaacccgctgtaaggccaatcatagcccatgctccattgattgcttcgatttggcgttgcctctgtaatcaaaacaacacaaaattcattactttttgagttttgagtactgcattgcattggagtttttagtaaaccaactgagaaaatcttacaattgaaggtaaactcaaaccgaaataaaagaacaaaatcagctgatatttctgaggaagactcagttttgtgatcctaagaaaagagcaagaaaagggtttgtttcccttaccttgaacttctcttttgcctttattttcgccatttgtttggcagctaatcgtttcgcctccaaaggatcaaccatgatcacctccttcttaggtctctccttccctgaagacacctgcatcagtgtatcaagatacaaaaaataaacatcatacctccattgaagaacctttataatttaactaaaactcaagatctcaatggtctgaatttaaccgaaaaggacagcattgagtttgtctaaagtacagaactttagcaacttttactaggtggttcactcaagctctcaatacttattgctcgccctctaataccgaatacatcattagacaaactcttctaaatgtttttgtttctgcaatctttaagctaaggctaatgtaaactatgtgagtacaaaagaatcccatgtacacacaccaattgaagaaatacacaacatagcgaaacaagttcttgtagcatcggcgggaaagaaagacattgttagatgaagttcggatgtagcagggtagggatgacaagttcaaatgacatagtatcttcctaaaatactgaatcaaagcactttaagctagccaaatatatgtattatctatacttcaaagaaatgatatcaaaaacttgaaatttagttccatagttttaatgttttgttaccatcatgatacactaaattaggttgattgaaccatcaatcacatacctaaacaatcttttcagcatattcaaaccaatttatattggcataaatttttatgtggaatggaagccttgagttgatgcatacattgggattggccaatacttgaattgcttgtcccctggttctgtgggaaaccatgtttgcatttgggtgttttctccatccccacctgaaaacacacaagtagagagctatacataatcacatagagtttaaggtgaaagaacattcaattgaattttcaaataatgaggaaggaagattaaggttgcgtttggttggaggtaataaaataaaatagaatagaaagaaatcaattttcattccgttcttttgtttggttatattttaaagtatcagaaatctcattccaatggaatgactcagaattacaagaaattatgcattttttattatattccattccattcctcattctcattttgattctcattcttgtgttttaattcttcacaaccatctaatcattagataagtcatcatcaacatgagaaattcgcaattttttcctaatatcagtgataatattttcagaatcacccaaaaaatgaaaaaatcatttgaaagaactacatatatattcagctccatttataatatgtatgaattaaaattatcctatataaaacatccatccataaattctgaagaagcaaagatacatttttttagtaaaaaaaataaataaattgtaaaaatcaaacaatacaccttaaaacctc

SEQ ID NO: 191142 - DNA, 6665 bp, Cannabis indica
gtttcggtttcggtatcgattgtgtttgtttttcttgttcataccaaactttataagttatggaaagtgtggaatcagttgttgagagaaaggaatgataatagaggtgtgaataggtgtattcaagaattgagaatgaaaggttcaagctttgatctttgtaaagagccattgttgagtgggaagagaatgaagagctctagtgttgagattaaatggaaaccagttacttggtgctgtcattattttgttactattttgcttgtttgttttgcaggttttgtttttcctgcttctaaactcattttatgttacttttgagcttctttttttggctatttatgtaacttaattcagatttggcttggcttcttctcttctcttcatgtaagtatatatatatgtacgtacattattatcatgttattataagttgaaataagagttgaggaaatgctcatttttaattgctatattttgtagtatgctaaaatggttccttataagttggaataagagttaaggagattctcatttttttttattggtatatttaatagattttgattaaaagagaactatgctaaattggttattttgcatgattatgctaattctcatcataatcttaggatcactagttacttacaatttgattgtactaacatagtctctaaattggttcatttcatgattttgttcttatactcaaaatacgaatctctgaatttgaatagaatagaattttttacacactaagaattttgattatactaaaaatctaagtttgaagtgttttatttgttttgtgtttgggcaggcaccaccaccaccatgtctcttccttgtttgagtgaattcttcttcttcttcaagagcaagaggggatgaagcattttggtccgatgattaagaaaaaaaaagctctaattttgaagaaacaagtgaagattttaggaagtgagcaacaccacttgtgtgcttcttaattgagcagccaagccttttcacctttattattactattcttctgaattttgtataattattattgtttatttattaattatgagaaaagctaatggtataattattcttacccttcacacaactttgtatgttttacaactaagaaaaaaatatagaaccatggacatatattgttaataacgaccatgacaactattcttagtgtgtgttttcctccttgtaattttattttttgagttgattttgacaactattgaatttttattatttagatgagattaattctaataatattagtgtgagttatcatgtggtactttttatccaattcataagaaaataatcaaacaagctctaaacaagtttaattaaatctagatgtaaatcttaatattgtaatttttattccatttacaaaaaaaaaaaaaaaaaaagaaaatgaaatttgattgatgaaaaatcagtacaacctttttcgtcaccattttgtgtaggtgaaaatattttattacaaatgaacaattgtttcatacgtaaaatcatgattttacgaaaagataattgtttgttatgtaaattttaattgcgatttaagttgttttatttggttgctgtaaaaatatactatgagtgaaaatgtgaaaatgaaaaaatttcaagaccctcaaatttctaattagaagaataaaatactagagtgaaaaagaattgacagataaataaacaatctagaaagaattataaggatgtgacagataaataaacaaataatccacactaacatttttggttccatacaaatgcaaaatttactgcattttcttattctttctatatattatatatttgaatgtatgtacaaagaaatgagatcattgaacttttagtaatctgaccaaaaactatacaaaattgaaagtcaactagcttcctcaccaccatcaaaattgagctctaaaactacgtgagaagagaaaccagctacaaatcaaaccagcaacactttcagttcgatcaccatatcctcttcgagtagatcgcgccaatacaggctagaatccatctcctttcagaagataatcgggagaacaaaatcaaattaacctcttttactcgagtgggggtcgtctggttttgagtgtttgagttttgttcctcacttccattctgagaatatggcttccaattttgtttcgattccaagatgttttgtctagtcatgaaaatcctcgtatggcgaggttccacttgaagaatcactttcgaatggagtggtctcccttggtgataagggaggtgattctttctgttgggaggaggaagctgaaacaaaacaaagtatgcacaaaatcagctaggtatttttattttaataaatttaataacaccaagacattgactcaattaccaaaaccctgtcacggacttaagacttagtagctactaaggagtcgtttggtatgaggttcaaacttaatgggaataggaatgtcaaactaattaaggagttatgttaatcccctccaacacttaggtttcatattccctccaacactttcatattccctcaaacttaaactcacataacaaataccctattatatgatgtttggttggaaggaacaaaaacatagctagataagaatgacataccaatactttaaaatgaaactaaacaaaagaatggaatacaagttatttcctttccattctatttcattacctcaaactaacgccacaaaagtgtaatataaaccccacagaaaaaaagacatgcatgtaagttctgtctcacattgctcgtgtgtgagtaatttgtggagtttatatcaaattcaactcagtgttggtatggaggaataataagagagaatcttcacaaacctttttgtctagagtagaactttttcgtgtggcgccttataagcctcttagcctttgtcatcgtgagttgcctagcaaagggagacaactctacgtcactttcgctccaatcaccttggaaattattttccgtttcacccctcattgtcctcaaaacaaacgcctttgccttgcgtcgttgagtattgaatagacctctaattgaagtgacaaagccatcgcctgctccatcacttggacggttaggccaaaccaacgggtactgatcagattttcctgcctgaccttcattgtcgctgaaattaagatcgctatcaggcacactagacccagtcagttctctctgactatgtgctttgtctttaaacttcttgccctgtaaaaatatagtaacaattatagatttaacttggtgatcataagcttaacaacaacaaatcattaactgctggggattgcagacatgtcccatggaaataggaagtaaacaaattacaaagaaacagattattatgattatcccattggaatatatttccattatgaattcatttcaccataccaagaagaaacaacaacctcaaataacaagatcattaattaataagaacataattaaaggcagagatagctttagatataaacacaaacatgcattatcttttttcataaaaaaaattgaacaagtgaaatcgtgacaaacctgcatccccgttacggactttaagacaccccatatgatatgcttcttaacacgcgagaataatctccgccaagtccccgtaaactcaacgcggtgaaatgtatccattagtaacttaagatcattcacaacaaaccttgatccctcataagtaaccagcagctcaacctgcatagaaaaaaatatatatctaaattttatcggacaagctacattacatatgaaatatgtgacaagcatatgaaaccaacctggctaatcttaatattatgaaactccatcatttttcgtggtctagatcttttctcctcgtgtgattttgctacttttttctcttcatgggatgacctaccagttttgagattcttgggatctttcagtttattctttgacgattcatcttgttgctcgacagaatcaagtggagcatttttggaagaagaaatactctgcaagaccagctcagtagcaacagactctgccacagtctcttcccatgatctatcaaaagaagaagttctccgtaacactggggttggcctgctaacaatattatctgtctggttttgcaagctcaaagcctgcaagtgtgttttagaaaagtaattaggaaaaagtcaagtaacaaatacatgagtggagggacttgaataactcacttgacaagagtcagatacaatagagggttgaccgacggatgacaaggagacacttggttttgatgggttctcattctcttttggagtgtcatgagttgaagagcctttcttaacacgttttgaacccgcagttgtagaaaccttccagacttcctgcatttgacaatgtgaacaagcaatggtttcagatttatagacttttctctcagctcaacttgcattaaaaaatgaggtacaatttaagttattaaaatcttcaacagacctgccgcctctgtgaacttgttcttcttcggggaataaatattcccacatcatccggtacatggtctccgtcagatggattttaagggggtaaatctcaacctgtagtgaaaacaacaatgtgtaaagcaagcaacttgttcacaaagcatgaatttccgaagaaaaagaatcctcattagacatgttcaacctttttcacacagaagttatattttaatgaataaataaataagcatgctattaagaaaactctgattctaaatctattatagtggttgttggcaatgcacatacagttagatgaattgagaaatgtgtggtttgtaaaatgttgttaagtcttttaggtatattgcctagccggtcccctttagatgtaatgatttcattaataaaacatttccttatatatatataaataaataaggccaaaagctctcacacttccaaaacttgtaaagaggagaattacctgaaattgttcaaggatagaatgaccctccttcggagctccctgttttgcatccacacgaagcataacttttctgcaccgaaaattaacagtacataatttcaaaagaattttctaatttacacctttctttttatgcaaaatatctacactgtgattgcttcaaagaaagaatcaggacaaaagaaagaaagaaagaaacagaaagaagaaggtatagaatgactgatcaattgaaaatagcaacttattggcaccatttttgagtattggttaagaaaaatgttcatactttccccactctggtggaggattccatgctgataaaagcatatctgactttgcgttgggcaggcagtttcggacaacaaaatatttagttgtgaaaagagcaactccaacatccttgtaatctcggtcaaagtcataaatctgtattagggaaaaaaagaaaactatgtcaaactaacttttaaatgctacctcagaaagggaaataaaataaagagaaagagaccatcaaagaagagtcaattacagccccataaagacaaaaaattaagcaaataaaggaaaaacatatgcaaccaaatgaagccataaaaacaaaaagaaagttagcttaccaagtcatttatctcagcttcagcaaaagatttaccatcaacaagcatgctccaaaccactttgttaattcgcagagatatacgcatagcatatgatggacttttgttcttctctttctccataagtcgtagttgagcagctttctgtagagccatcctcaatgatgcagatgcttccttcctagatttcttggcattaataagctctttctttagtccttgcacctggagttagtgaaagaaaactcattatatttgtggtccgttttgcattgaataaaagagagaaaacatatctacgaaatggtatatcaaatttactgaaaacggaaaattatgccttaaaagaagaaaacggaaagataccagaatggaccttgcaccagtaatccaccaaaggtccccctcctctaggtataggtctccagaattctcagacaatttcctaatgtcattgagtatcaacttttgctctcgctctttctcctcaagatgaactcttgcaagctccacctcttcaacaccatcaggaaccacctcatctgcttcctcctcaacatcttcatcatcttcaacgggaaatgaaaggctacttttacgaggcctaaaaattttgctcagaaaattagaattcttggaaaatacacatcaaatgtcacatcacatcaaaagtatcaatgtaaagttccatatctacttgataatataatgacattttttaatttgtcacaaaaccccagttaataactaagacaattacataaaacaatagaatcgctaaacaagaaacaaaaagaaagcaaggaaaagacttgacactctttaaccaaatagcaacccataatttaattctttcccatcaggtgcttctgatcaaacgatgggtattcgttctattttttgtaataacacttcctacagagatgatcgtatgatgaaacttgcggatggttcttttactcttattgcttattttggcactgtttagcttacaatgacattctctttgtctaatgtgctacacatgcctctttccatcagcaaggtgaatgctgacctgaagt

SEQ ID NO: 191143 - DNA, 737 bp, Cannabis indica
attttgtgatgactcctcaatctttaatattttattactattacgtgtgaagatattaattttttaacacgagtaaaaaaaataataaaataattactcgtattaataaaaattttttttatcaaaatatcaaactttgaaatttcatatagttctatcatttaattatcactaaacaaaatacaaccacttgctaaaggtgatttgtttcctaattaaataataattcttgaacactttattatcgttcaagatataatggaaaggaaaaaaaaaacagacaatatggaaattattgtcttacattattattattactaatatcatataccaacttaaacgagcgtttggaaagacgtaagtagaaacaaggaaaatatctgacttcaatgacatatacgtatagatataaaacaaagccgtgtcttctctaaccagtgttttgcataccggcggcaatacccttcatggtcaaaataagagtatcttcgagccccggcggatactcactggtggggttgagcttcacaagctcagcagctggtttgttggtcgactccatgctttctttggacaaatgtggccttattttcacatgataagtcgggtcacgaattctcttgagtgtataaacttggcacacattcagagttgttgtgtacgaatcacgaagacaaagtctctgtctcaagtaggggtctccttcaagaagttctttgtgcccagcaacctaccaa

SEQ ID NO: 191144 - DNA, 1408 bp, Cannabis indica
aataaataaataaataatttcttaataaatcaatatttccacaaaaaaataaaatgaggagacatatatggaatttaacttctccttcccaatgatttttattgattattgttttacttttctttttattaataattaaatatttggtatatactttatcactcactctcaactcaactagtagtgaaatgctaaattaatgatggaactaaagtttttgataatgtattatacgatagtattgttattattaggtataagtatttgttccataaataaaaaataggtataagtatttgtgaatagttaacggcttttcaagaataattattgaattaaaatatgtaaaaaaaattatccaaaaaatataagattcaatattattgacacttcataattaataatgctttgtaattgattaataataatttataataattattaaattaaattatgtgataaacacccaatacttaattacatcaataacgacaatatgatatatgatatgtttaaataaaactagtccacctttaatattttttattggtaaataagttaatgtattgctcaaaagaaaacaaagctgtgatatatgccttaagctttcgaaactacaacaccattacaattaaaacaaactatgaaaccaactcaaatcttgaactttacaatctcttagacctgtacacaagataatgaagagctaaaaacactatcgtataatattttttatttgttatatatatatatatatatatatgtatatatatatatgtttaaatgttttgtcttaaacctaaaaacactatccacccatctagataatgaagagctaacacaaattatcacacatcacaccatatatatatatttatatatatatatatactacttaattttatatttatgtatacacaaagaagtttaagttattatagtgtaaattaattgaaagatgtaagcaagcacagagataagattgtgatgattatatcaatatatcatgcatgtcaatatcatcatcagctaattaaacacattattatatatatattaaatggtgcacttgaaattaaaaagaaacgacaccaaatgaaactccaacaacgttcaagccatgtattaactattattgtcgtttagttgaaactttttacaccatgcacatgcataaataaatatatttatccatattaatatatgaatttttgtccctcaactttgataacgtgtatataatatattattagtgataatttgtatttaaacagggtaatttgcggcaaaacctatttaactatcaatttacttgcaaaaaatcatctaacttcatattttagtaggaaaaccctcaaaagtactgtttcgtttacatttttaaggtgtcgtctgttttaaattctaa

SEQ ID NO: 191145 - DNA, 1939 bp, Cannabis indica
ggtttgatgaacacccctagtttgaggaaatacgaaaattacaagagtgggtaattaattatatttttgaagctacttgatatattatttacattattcacctgttgtatttttattaatatatttaaattaatttttttatttgaataaattaaaaattatctactttacttaacacttaattaaatttaaatatttatttatagttgtgaactaaatttaaatatttatactataaattacttattttatttataacatattgtgtttgtatcagttattcaaaataaatttaaatattttatatgacacaataacaatacgaaatttatttgagttgtgttcgtgtattataatttttttgtattacaagttgtgttcgaatcaacagtttttcgataaacttaaaacctcaacacgacctaaacacaacacatcaacacgaattatcactcgagtaagtctacaatacacccaatataaatacattttggtacaactgttttattatttaaaaaagattttaatctagttttttatttcataacatatgttctagtagaaaagtctaaatagttgataatgtcgaaaatatgacttgaatattttgctacacgtgattatttttatatacacagtaaataactatttgaattgttaaaaatactgcaactattgagaattttccaacaaattatagaatattctaaataattacaaaagaaaaaaaaaataaaaataaaaagtatactgaaacattcattttcttgggaataatacctatttttttcataaattggtttatccttaacaaatataaaaataaaactaacccttgatttgtttgaatgaaaatcactaattaagataactactattttacattacaatacaaaacatccccaattatttctccaataagaaaaaaaaaagttaatttatttattaaagttatggatccttttttactgtttttgttaagagttagatcaatcaatcaacggttgtttgttgtatgtagtaaataaataaaagtgtttaaagaagtgattatgttgggaggctgtccactctctttacttaacggtattttggcaccaaagtttcttctcataactcttcttctttttacttttaatttaatatagaaataaatatggagcgttgagaaaaaaaaaatatgagagggaattaattaagacattttcagtgttataaaatcatcttcttcttctttatatatataacccttataattaaataattaactaatttaattgtgaccaaatttgtggcccattaacaatgatgtattttgttaaagacagcaaggataaaggtgaagcataaataatcatcagtccacattgttatacacactaattccaattaaataaatcttactttgtattttattttttaaaataaaaatcaagggagacataaatataataattagaaagtaaggttatattctttatttaatttttgataaatgtaataagctaatcatttggtcacaatataagcttaagactaggctatgagaagatgttcctcaaggtgagacttgagagtgtacctttttttttcacctgtaaattctccatatctttatcaaatttaccactcaatttcaccaaccaaacttcccaaaataataattaacatataaataaataaataaaaacagtaaaaggaaagaaaatcactgtgtataacatagcatatagatgtcttttatgttatgcaagtaccacttcaaagtctctttttaaattattaatttgaatggatactcttaacaaccttaaatcgattatattgatagaaaggatgaaaaaaataaagtgtacttctttttagaattatagcataaaaaaactaaattgctatctagaccaaaataagacttttaaaaaagagtgtatatatatat

SEQ ID NO: 191146 - DNA, 924 bp, Cannabis indica
tccttgaacttattgataatggtgttgaaccagaactcgcctatggacctgcaatcaaaggggcacccttgccaagttcgggctatgatcggtatagaactgacttctccaaaggtcatgcctggcctttagttactcgactagcaaggaaagctatcacaagtaccatccctgatctctctctgcgtggccaaccacatccgaaaaaactgctttatggggaatcttcggcccaacagaatgaatcccctcatggcatctcaattcaacctgctactgatggtaaccactctcaatcggacatcactcaccctcacaccagtggttctttctctttcgcaccagcaactttgtcctctgcctctctggtgtgtaataatgctatgatggctgggacgaatcactagtctacaactgtaaacagggaaaaataaggctaaattggatatgcatcaatctattactgagatcggattctggtcatatggataggcacaatccaaatcaatttgctcttaaaagtcagcagggtgttcacaacaattcactctctattaatccatctcttccacaattaaaggatgttcatccttccctggttcgtggaaagaacaaggttccatcatctcccaagcgagtaccgtcttccccaaatgagagtgatttgactgacattttcatgcctcacattggatcaccactgggatacattgcaacctacccgcctgacacaactaacaccaacatcattaacactgcttctacaatggctaattcaccagcttctactcccatcatctccgattccactgtctgcatgactactggtgtttcttttgacaaagaaaaccagtcaccaaaccgttcttcaaagaggctgcctgaaagcatatcaatgaggaaggctttaaagcgttgtagggg

SEQ ID NO: 191147 - DNA, 3119 bp, Cannabis indica
taactcttgccacagttctttggctgtcatagtcttctttgagtatagattaaacaggttatcggacagagaactaaagatgttgtgagcacacaggtagtcatcattcatccatttctgttcagcagcttttgttcgactaatttcttcagcacttgcttctgggcttagagcaacacttggacctggttcagagaggacatattcaatcttcaattgctttaacaacagttccatctgttgtgcccaaagcaaatagttcttcccatccaagcggacaacttttattggaagttcacgaggctgaatatcagttgttgaattactcatgtcttcttcagcgtttttttcatcagttgttgacttacttatgtcttctttattttttttatcaacagtttttgatttactcaagtcttcttcagtttttttatcaccagcttttgatttactcatgtcttcttcagtttttttatcaacaagttcagatctgcattatatttatagaatattatgttagataaccataaagctcttgttttttttttcagccaaaaagcacattatctacatctagactgaatccaaacatcaaaactcgactctcaccttgattttgactccagtttcctaatagtttcttcgattgcaggtacattgttcttgaaggtagaccattggtcagctggcaggctaattcctaaaagcaaaacaatagaacagtaaaagcaccgacacaatttgtgtttttctttcttctaggagtaaaggaaggacattgaaactacaagagaatgaccaattactatgaacttatttgactaaacaagcaatgagtattccatcaaaaaaataaaataaaaggcaatgagcaagcttcttagtctacattggcaaaagatttgagctttggttctctgctcaaacattaaaaaaaccaattaatattgtatgaacttattatgaatattagattcttggtatttaagtttcatcattaaaagaaagaaaacaaaatctataacttatgagaaacttgaatttttaattcttataacattcttaaatctctatgttaaaaccgcacaattataatgtgcatctcgtcactctttaattgttaatctccaagcaaaacgagaactttaccacataatttgatagataaaataattctatattttaaatagcagccttgaattgcagtaatacttatggttcagaaaattaatacaaaagcagaaacataaacctaaagatggagaagattcacagtttatccacacacacacatattatgtatgattacctttattagaaggaagctgctttccatctttattaaagaattccctgattgacacaaacgttttgcctttgaaatcatgaaccgctacacttcttttctctgaaagctaaaatgaaactaaatgggtcaagttaattttcaatatttttctcagcaaccaaagaaaaagaagaagaagaaaaaagaactaggctttaaccttacagataaagcgatcacccctctcagtcacctccttgctattgctcttctctttctccttctcctgttcttcttgctccgccgccgagaccagaaaagtctcgaccgcaatcctcaccaacttcttatactccgccccagataaatcgattccgagacgctccgaggccgcgactcggactttatactcagtcatctcttccaaactcgtatttctcagtatgtccaccactgtctcctcaatcttccgggccctttcttgatccattttcacgcgaaagtaaaagagaaaagctagagctttcgacaataaaactcaaagtacagttgtagcaaacaagaaataggttcgagttttgagtatttgtatttgattttgaggtagaataggccatagaacttggctgaagcgcaatagcattgtctattacagtcacttcacaacgaaagaacccaaatcgaaataaatatgaaaaaagaaaggttccaccgagacttgaactcgggttactggattcagagtccaatgtcctgaccactagaccatggaaccgttggtggtacatttagtacttttatttttatataataatttttcaatagtaaatttgtcattaaatttttcctacaatttaacaagttaatcatataccagccattaaaaaaattaatgccaaacatatttataatcaaataattactgggcagatgattgggagaattttagaaccttaaaaatccgaaaagtaagtcttgaatagtaatcccataatagcttggaaagtgtgtcaacccaatccaagcttgccaattgccaagtaactatgtaagtgtaccctcatatcataacagtattttgcacttccattaaattctatatccattaccagtcaaaaggtctaatcttaatgactggactctaataaaatttaagtgatgttttttatatgaaaatatttattgaaatacaatttcttttaacaaaaaaaagagttgtgtcataaaacataaataccagtcattaacactgaagaatataaataaaaatattaagaataaattttaaaaataatttatatttattattttcttatattaggatgtccatatatacttttgggcaaatataatgactggacttcactatttatctttttttttttttacaataaaagggacatgcaattgccatttcttgaaagtaggaggagacatttaaaaaagcctattcaccaaacaaatacctaaaaaaacttttaacaatgaaaaaagaaaaatgcattgcatgtaaagattgtgctgatcttaagtttttcttattgaataatcgtccatatatacgataaacaagtcaaaattttcattaaagttggaaaatattagtttgttttgtacttaaatgtggaacagtgtattattatcttctaatacaatcaatggatttagcagcttatgctatgtctgttctcttcacagttattcttgcccataccattttaaaaagacttagtagtaaatccaataaaaggcttcctccaggcccaccaagatggcccattgttggaaaccttcttcaattgggccagcttcctcacagggacctggcctc

SEQ ID NO: 191148 - DNA, 2752 bp, Cannabis indica
atgtatctaccacattcaattgataaaactcagataatatttgtgttttgttaaatggatcaaatgatcattattcacaagctttgcccgagtgtaatactcaaaaacacataagcatacgccgtgaagttgtgcaaaaatttctgtatgatcataccacccaactacaaattaggatgcccattggaagaatgttgctccgagtatatatttcttttagcatttagcacagcccgaattcgtttttcacttgccacggcttcctgaatgttctccctaaccaagttgcagagatcatctagggcaagcaccggaaatggttcttcaataagaacaccaacctgcagtagataagatgaatggtaaataaagtcatctaaattaaaccacactctacaaattccacaacttgactcccataatctgatatcctatctattttctcttcagaaagaaaggtttgagattttccactacctaatttggctagaaaatctcccattcaaccgacattgacataaactgtttcattaacctcaatagctccctaattatcaaaaccaaaaaagcagcactcactacttgcctcccaatctttagatgatctaactgtcaggcaaaagaagactaacacaagtccaaaactgagtattagagagagaaaacatacttcttctatgcagaacaaagaagcagcactaacgaaagtagcaggaaccacaatccagtggcaatcatcccaaagtatgatagggagagttagatgccaaaggacaagaaatcttgaagtcaagcgagtgtatgataaagggattggagtgccaatgagctgttcacaaacaccaattccttcgtgaaaacaagagatttttgattcctgcacaagttgagtttaagggttaccatgatatggtggttgctaatttgaagtgtccacttctctgaactactaaattatagtcttaaaaaagaatcaatgatttccacctgatgatatcttaattacaaaatctaaacagaaattatagcttatttaagatgtttaataaaacttgggaaatgaaactgacaaaaatttctcaatgtcttgctaattcaagaaaaattaccaacgtaattctctttgcttcttccaacttcagcatttgcaagctctgtgagatgaactgaataatgctgcgaggccgatgttttgaattcagaaccaccgccaattcatctctttcaagcaaattctggagatctccttcagcatccgaaccgtaaagcacatggcacttaaatcaagaagtccaaaaaaatcagcatcaaactacaatacaagcatatgaaacatatgaatattcttagaaaaaagcttgaacccaagaaccactaattaattagcctgaattttgacagcttaagcaatttgtttcaagtccaaaaacacaatttgagatcaagtgaaaaatatatattgaatccattcctctcataaataatacttttggattaaatttcatatttttgttacttaacttgggtcaagcaaaacttctctacttttggattagctaatatatctgtcttggtatccactttcaaatttcttcaagtaacaaaaaaacttgggaaaaaatggaattaaccttaagggcaaccgggaatgccattatgtactgcaaaagcgcctttttgagctgcgcatcggaggaactcttcaccgctgtaatcaccagtctagccatatcattcgtccctgcaatcactttagtccaagccttcctcccttcctcgaacctcgaatacgaagcctccgttcggaacaccaacagtagcgccaatgccggcgcagtcagctggtacggtagcgagaggccctcaacacagggaaaaactccggcaaccaatgcatcaaaaccacagagtatagctcgcaatgacagctgctaccgacgtgaatgctattaccggtggtatcaatgaaaggatgactcgggacgacaggctcgagagaaagtggcggacatggcggagcgagcttctgtggtcaacccatttctcgtggttgtaaagggttcggttctgtcgcattccgcgctctttgattcggtcggcccagtctggtatggcacggaggattgaaattagagttttggagggagatgaagatgaagatgggttcgtggggtttgatgaagcgaggactttgaaagaggtggttgttctgggtttggaggaaagggttgggtgtaattttgagagggtttttggggaaaagtcggaagaaagggacactctggtggtagagtcatttctggtaaatatcaggtttggagttagggttttggaagagaaggaagaagagggcatgttatggagtctgagagagtgaaaacaagaactaggagagagagtggattggtagttaaaaacagttatttgtgaaggaggtttttacacgttcaaaatacaaaaatatgaaatatgaaatatgataatgttacttacattcgtgacagacatatttggaagttactgaaaataagtatgctgagtggagtcggggaatttgtttcaaaacaacaacacataaattcaaaaaactttttgaagattaaagagactcatcatgggtcatttgatgtgatgacctcattttaatagaaagttttctcctatttcatgcaaaatcatattcaatagtttgaacttccaattggtgaaggcagatcagtcgaagcggttctgatccatggattctagtcac

SEQ ID NO: 191149 - DNA, 2303 bp, Cannabis indica
tatatatatatatagatcttttttcctttccgtttattattatttttttttattaatttagacgttgctgttacagttggctttgtcaaccttgttttcccactaacaatttctctatatagcttgggctatattaattaacaagtatagtctaatctcctcatcacttcacatggttgccagaccaaaattggtaatccttacgcactgtataagattaactctacccataaacaaaagaaaatgtataacaaattaccaaaactaacaaacttctttttttgattaccataaagaaaaaaaagataagtgcacacttttctttatactagatttggtccattttaagttgtggcgcctctattattgccacccattcctttattttttacttatcacatctcttttggtaaaagtacctcatactaaagctttaatctacccttgctttttcacatattgttgaacataatttaaaaaatctcaattataatcaataacattatcatgagtagagccatgctcaccacacaatttctaataatccaccttatatatttttcaaataaataaaattttgatagtataaatcatatatttatactgtgtgtcgtgttagaacacattgtaataacatggtcagcccaatactcattttccttcattgtacctatatatatatatatatatatgggtcccgattccaataataccaaattgaataagttgggcagttcagattaattttcaacaacgatttcacaataaaaaacattaattatcagcaaattaattaattatatgaacaaatgcatgcgtacgaaaatgtacaataacactaactatatacataatggaaagtcacccaaattccaatagagttaaaaattcacagcctctttaaaaaacaatatatcctactttcttttttcccctccatatgtttcctgcttatccaattgcttaattaaattattagctaaaagttctaaaactgacccgactccgtgtacgtcggtaacacagcgttcaaataattttaatttatttttaaaagaagactttaactattcctgaagagacattgtcacgtgcctagcagtggcaaagctccattccatgaaatttagcaaagatctcagcaaaaaaaaaaaagcctttaatcaaaacacgatgtgacatgtcacacacggttcacattcacacacatatcaccttccttccaattaatttaatccaatctctcagttcgatttggcctataaattcacaccctttctcttctctcataactaaaaaacaaccactctcatttctcctctgtttgtatccaaaacaaaaatggctaagcttattaactccttgcttcttttcctagcttttcttatctgcggtgcagtcacagccacaggttacaaaagcccagcaacgaccaccaccccaaattttgtaaaatggtcttgtagttcgaccacatatcccaggctctgcatcagaaccctctctacctattcctccaacatccaaaacagcccacaccaattggcgctaaccgctttgaacgtcagcctaagcaacgccaagttagccaaagggtttgttctaaaattgggtaagttcaagggacttaagacaaaagagtacaaggccattgctgactgtattgatgaaatgggtgagagtgtggaccgattgggtgagtcttttaaggagttgaagaatatgggcaagtacaaaggtcaggatttcatgtggcacatgagcaatgtccagacttgggtcagtgcttccttgaccgatgacaacacttgtatcgatggctttgctggtaaatctatgaacggtaagattaagagctctgtcagggcacaaattgttaatgtggctcaactcactagtaacgctttggctttgtgtaatcgctttgccacaaagaagtactgaattgtttattattgtctattatcacaaaaacccataagcttataatttattaatggccttagctgggtggaatgtggaaatttttgaatctgttgtatggtaatgtggtgtatgcttttgtaataatatgtatatttggtatttgtgtgttgttttaactttttaagttattgttcttaattatataaatatatataaaccttttaaaaaaaacaggaaaattggttctgtatttgaattttctcgatcagtataaagggattttgtcttcttattgcttaattttggttttgtgttccccatgtactgtttactttaagtcaacaaaagaaaaaaaaaaatgaaaaagagaaaaaggg

SEQ ID NO: 191150 - DNA, 1890 bp, Cannabis indica
atttttcagaagaaatttattagcaaaacagtgaacaagctcactctgttttctttgtctgcttccagaacttttggttaaatcagcaattagaaagttttatctataataattttctttttacaattatatattatatatatgatgagctactcttccctgggttttctgaactaattgaattaataaatcgtaatttaattccagttgcttcagctgtgcagactcgtgtaatttaaattattttagttatgtattatatacgtatccctcttttatctcttaattttagtcctaaattttgtcctatatatgtttatagaaaacagctatcatatacatatataaatatagcttcgttctttatgtgttttttttttcaaatatatttggttttccttcccaagaatgatctgaaacaagcttttgtgatccttacaagagttttacttgaatacggtaaagtattcaatggcagcatatatatatatgtgtgtgtatttcactgtcaagaagcaaagcgacatttttgtattattgtgccatgttgtacctcagatcaaagattcttctttttttatctttttttttccttaaaatttacatcgttttcaataacagaggaaataagctattaaaatattgatatattaaaatatacagttatatatatatattattaaacaatatatgttatatccctttatgtatatttctatatgtataggtgcttcgctattggaagctaaagacaaacaagttaactttgatcgtgatattcgctcaaaatgcagcgctatatcaaaaccccgcactcacggtaaagctaaatgtttaatcttaaaaagatttagagagagagagaaagagaatttagaaatcgaattgttttttttacttgtgagagatgatatggaattctctgctaaaataaaacaaacacatttactttcctttaaaatcaatatacttatataaagcaaattcgtctcattcgtatgtatatcccaaatatgcagacgtgtttcaaagtggtggtctgccagttataaagtggcacgagattgtggaggatgacatagatggagaagaagaagatactaaggtgggtttatgtacaaattaacttttcttactttttgcttttgcctttcctattttattttctttttataattggttcgcgcatatatatatagcaaagaaacaactactacttcactttctctctctatatgtatatataatatttacaaatatcctatgtttattctgatgtgattattaatgtagaagaaatttcttttttttttttaatttccaatttaaagtaatttatttgttttttttttccaaataaaaagtggacaagatcgaatgagatcgaggaacgtgtcgcttcaatcaaatcaatgttggagagtatggatgagggagagataagcatttcagcgtacgacacagcatgggtagcccttgtggaagatattcatgggagtggcttacctcaattcccatcgagtctccaatggatcgccacacatcagctctccgacggttcttggggcgatgctgacattttctccgcacacgatcgccttatcaacactttggcttgtgttgttgctttgaaatcttggaacctttatcccgaaaaatgtcaaaaaggtatgtattaattaattaatttaatcgtttaattcgttttgataatgaccgggtggaattattataacaggtatggccttttttcaatgcaaatataagtaagcttgagagggagaatcctgaacacatgcctatggtttcgaagtggctttcctctttcttgaaatgctcgaaaattaaaccttgaagtgcctgaggattctcctgtgttaaaaagtcata

SEQ ID NO: 191151 - DNA, 2640 bp, Cannabis indica
ttacttccctaaaatttctctcttcgtatcagagcaatcgtaggctcacgccatggaagatccaaataccactctagctccaggcaatggtgcaaacactgcaacctcagaagcctcgcaacaaaatccagcagcatcagttgtttcaggtgctacgacacaaacgactttctccattcctgctacttcacccttcagtaacacgctcagccaacccttttcactaaggttggacaggaataacttccctctatggaaaacgatggtcttcacaatcattagaggacatcgactcgaagggttcatcaacggtcagagaccgagtcctgagcagttcatcactacaggtattcgtaactcaacagagtctcaaatctcagttaatcctgaatatgaaaattggttggtttatgaccaactattaatggggtggctctatggttctatgaccgagggtatagcctccgaggtcattggttgccaatcggctttaagcctttggacagcccttgaggagttgtatggagctcattctagagctcatatggatgaactcagaaccaaactccaaaccgtgagaaaagggtcagccaccatgactgactacttaaaacagaaacgtatgtgggctgactctcttgctcttgtaggagagccataccctgaaaagcttttggtatctaacattttgagtggtttagatgtcgaatatctctctattgagtttcagattgaagcaaaaccacagatatcatggcaggagctacaaaacaccttgcttggttttgacagcaggcttgaaagactaactgggctctcaaactccagcaagtttaatcactcatctggaggaccctgtgccaactatgctcaaaagcctcccaacagcagtaactcccgattccagggtaataatcaaagtggtggcagaaaaaatttgactcatcctaggtcaagaggaaggggtggctatcgtggaagaggcagaggtggtcgatttggaggagggccaaaacccacttgccaagtgtgtggcaaatacgggcattcggctgcgatttgttataatcgctatgatgagagttacactggacagcagcctgctactactactgaacaaacccaagacaagcagttcaatgccttaatagcaactccacaaactctcaatgatgagagttggtatgcggacagcggtgcaagcaaccatctcactgccgatgagggacaactgaactcgaaatcaacctatggtggtaaggaaaagataaccattggcgatggtaaacaactgaacatttcaaatattggtattggtctattaaaagcaaattattctcagcctctactcttaaaagatcttttacatgttcctcagattttgaaaaatttgatcagtgtgtctagacttacagctgacaataatgtatctatttaattctttcctactatctgttgtgtgaaggatcaagtgacaaagaaggtggttctggaaggagtgcttaaggatggtctgtatcagctaaaaacctctaccgtgtcgaaaagtaacactactgctggtgcaacctgtttttctggtgtggctactaagtctaaatgtaataaaactagcacctccatgtcagatctatgtaatatgaggcttgggcacccttctaatgttgtattgagtcaagttctaaaaatagctaatgtacggcctagtttgaataaaaaagttgtgttttgtgatgcatgtcaattcggcaaatctcatgctttacccttcaaatactctagttctagagcctcacaaattcttgaactactacacccggacctttggggacctgcaccagtcacctcacatactaattgcattttttacattcatttccttgatgatttcagtcgatatacctggttatatccattgaaacacaagtcagatgatcttgaagcattcaaacatttgaaggccctagctgaaaatcaatttgaaaagaaataaaaaccattagaaccgactggggtggtgagtatgaagctttttcagatttagtcacagaaaatggaatcactttccaacactcatgccctcacacttcagcacaaaatcgtagagaaaggaaacatagacatatagttgagatgggtctgacactcttagctcaagcacaaatgcccttgaaatattggacagatgccttcaccactgctgtgtacctaattaataggctaccaacagcagttctttcgggtaagtcacctcatgagatcttgtactcaaaaacaacctgactataacttcttaaaaatatttggaactgcctgtttcccttgtcttagaaccaaacacataagtttcaattccactctgtcaaatgtgttaatctaggatattgtgaaacatataagggttacaagtgtcttagtcctcatgggagaatatacatatctagacatgtagtgtttaatgaaaaagattttcttttttaaagttggttttttgaacaactaccaaagggaaaatattgttgttgtcaacactcctcattcatggtctttacttcccacggctccaccagtttcatctcctaacagtccatcgaatcaaatgcctgcagcactcacaccagaaccatcatctccaacaaa

SEQ ID NO: 191152 - DNA, 928 bp, Cannabis indica
atacttaggtggttttgagtaccgctaatacttaatagcagttagcaatactcatttaataatttttaacaataagtgaatactcaagtaaaatgacaattgactcaaaaataaattgtgaattacttaaataatacgaagatttttaagtggctcaagcaatctagtaaatgtccattaaaagtgtaaaatgcgactaatctttttttttcttttatcttttttgaggtgtttgtatccactacttacatagatttgtagataaaagacagaaaatgttcaatcatcaaaataacaattaaaaacagaaattgactaaatacaatagttagtagttacaatattacagaaacatctacatgaactacataattaagttcaagtgttttcaatcgttggttacactaataattgtttagatttggtggcgatatttgtatcaaccactcgacattagagggtcacacttttgttttagagtgaagaaaaatagagtcaggaaccaaaaagtgaaaagtttataaacctctattgcaatgtagtttacaattacatcatcaaatacaaaataaagtattaccccatcatcatcatcatcatcatcatctgttcaattttctgtcgctcacaatttatctttctttcataccaaacataacttaattgaattgtagccataaaaatatgagtcacataatgcattcaaatacaaaacatttccaataactcagattttaattgacaattgtggaatactattaacatttccattcagtgggggggcaaaagattaaaattaacaaagcaagcacagtttttagttattatataaggaacacgatcccactgaagcaccagaccacattatggaatcaattacaattctctccaccatggctgcacaatctataattgttgcacccatacc

SEQ ID NO: 191153 - DNA, 1612 bp, Cannabis indica
cttcttcttcttcttcctcttccatggatgtgagcttctcaccaaagcctcaaattctcactcttatctcatgcacacctctatcttcttcttcttattcctcttcctcacctcgctctcgatccatccgaagagaattccttggctgtgcccataatcttaggcctccaggtggtcttcgctatcgtagacgccatagaaagtcatggtctcactctcactcctcccggttctttttcagagctgctcttggctcacactccgtcctcgttgtagtcgccgtcgttactgtctctgctgcttcttttgtttactggaatctctttaggcctaagaagaattccagagaggtttgtattcaatttgaataatattatgtaagatacatgagtcctgtgtagattgtacatatattaagtcattttagtagaagatattgttaaattgagaaattgtgcgttaattgagcttgggcaagttcggaggtgaaaattggtcatcatttgattcttatgtatttttttttttttgaggaaattagtggttgagttattagaaatagtaagctttaagatgatggaattttatccttatgtagttttttctttcttgacaaaatttcaactcgaaattgaaaataggttcagaggcctgcaaatttcgcgttacatcagttgggaggacatggcataaatcatgtcattgagaatgagatgatggatttaggtgaatttcgtgaaatggaagttaagcaattgttgaaggatgagaacatagagaatagtcacgcttccattcgtaatgaggctcccctgcagtttcaccaagctgctatgatgaacaaagagactgttatcactaacgcattgcagtcgcctacttccaatgtccttgtttcgggctctaataattcaacatttataaacgaatctaaagtggtggatcagtctctttcacctctgctttcggaatcagctatgctagaacatattagctttgcagagaagttgaatggcttgcaaatagagaagttacaagaggaaatagagtctgagtttagaaatgattctgttcaagaaaaggattcacttgtagaagtttatgaacctgaactggaaaagaaagaacctagtgtagagggagaaacaattaatttcactagtttccttgttgattccgtaagagaagagcttcacatgttttacaatgaaagcaaattagacggaaaatttaaagtgaacgttaatggtcacaaaacgttgtcttcacatgcttctgctctggaaagcaatgcattttcttcagtttctagaacagagggtactgaaaaatctatggaggttccccatattacaacaggtaatgccgtggagattctttgtggggtggtgtcataagtttggttttcccatttttctgactttataaagggttttctttatacaggtaatgatgaaggaaaaattccttttgcaaattacaaagaaggatctctttatagtaagaaagtcttgggaaaaggtagaggagatacaagaattataagaaaaggacatttggctcagaataactaccaagttgtgccccacctaaatggcatggacgttgacag

SEQ ID NO: 191154 - DNA, 3444 bp, Cannabis indica
gggcaacgatattctcagctccagatctcaaaaccataaagcaatctctcaagttgtcaaccctttccccgatcccaccttccgattcccactccattacctgactcgtggttgtggttgtggtggtcatcgtcgctgtcctctccaactcacttctaagctcatccatggcagccttagacctcctgaactcatacaaaagaatccccggccgaccaccgatctgttcgatctccgccgccactctctgttgcaacctccccgtcgatatcataaacgccgatccaaagaacaagcaaccttcgtacccacctccgcctctcagaaaactcgattctggccaacagtaaaccagcccataaagtaagatcatcagcagtagtgagctaacgtttctcatagcgtaaagcactcctctgaatccattaaacccatttaacttggactcaatcgaaaccttctcgtcaaacctcaacgacaagggttggattctcgtctccattaacgctctgttctcttcttccaatcccaacgcatctcttctacacccagatattgctctgatcacctgtattttattcttccctttagaacacaaagaaaaaaagaaagaaaaagacaacaatcgtaatgttgaatgatttgattcgaattggggttttacctgacgagagagttgtggagtgagatggcgatgagcttcaagagaggaagttatgttaaacccagaagaatagtaattctccataccagaaatcccagacttaagaacatggcaagcttcccagagcttagaactctcgtccatgtactcgtcgagccacttgtcaccaactggcaaatgaagcttttgaacgagaagggtgagttgggaatggaatgatcggaggagggttagcgctctttgaaggaattggattgacatgaagttgttagagaggtaaactctttccagatcatcgattccacgagtcaggaatgagtagaatccattcacagagtttgtagtagaagaaggatccattcaaatatgatttatgatccaaaaagaaaagaaaacaaaagaaaagagaccaaaccaaccaagtaaagagtaaaaggaaaaggaagaaaagggttataaagaagagaggtatttaaatggagaagaaagcattagattattaattataataataataataattagaattagaatttgaagaagaagaagaagaagaagggaatatcttagaagctcaggtttctaaggttgaaaaggattgttgggagcaatgatgagtgtttcctacagaggggaaaggatgattggtaatatgccattttcattgtttaatgggcagaaaggaaaggaagtagcaaatatttataataaaattgttaattgttgttattttttatgatttcattttaattataataatgatacactaaacaaacattacccaatttaacaaaaaagagaaagaaaaaaaaataaaaaagagaaagaagaaagtaattaattaggagacttttataggagtggttttaggaaaccatgaatttcccgtgagctcccttccaatatcttccttttctccaaaccccctttttattaaagtaatgcccaattacccatcatcatcatttaggggtggggttatagagagagagagagaaagagaaagagggtaatggtaagtttattataatttagtgttgggggcttttttgttgttattagtatagaattagagtgaatattagatgttggggggtcattgggtttgcaaagtgtttgactggattgactgggattatggaatttctactctaaaacttctcacaacccaaaaaaaaaaaaacttattacaaattcaagaattgaggaaaggagaggcttttgattttgagtgcttctatgggttttggctttccatctttttttcctctttttcttcctcgagcaactgactttggtcctttactaaaaaaaaatcctctattctatagaaatttggtgggtttttttgtgtgtaattgatttggtttttgggtttgttattcctagatatttagttttgtttttgttgattttttcaaaagaggataagttagaatgatgaggttccttgtatattgtttgtccttgtaaccttctaccatgcataatcagtcttttcaggacacatacacttaattccttgtttatttattaatatttcttagaaaaaataaaataaaataataatctttcactttttcttttctcttgggacaaaatggattgtttgtgcttctttcaagtccctcacgttgaattgattatacgcattaaccctcaaaaattgagtaattcctttaatccacaccgttcactcccttctctacaggacccatcaaacggcggagaaagtaaatcttagtgggaatgatcaactgggtccccatattttgttgcactccactaaatgggttctcaatcattaacttgttttacacattaaactaattacaacaaatttattttaattaattgactcccattcttctctacttcttttataatatatatttgtttaatttaattagctttttttttatatatatttttattatatatctatacatattaatgtgtgtggggtgggggaccagaaaatctaaatttatattgggctaagtaaccatttatttatataaaataaattttagtataaagttgggtgctcgtgggtttttggagaatgggatacatataaatgatatcttaagagtatgttggtcttttaagatttcattggaaagccaagacttcttagaagaaatatattaaggccattgataagggcgctcctatattattttgctcacctaaatcatataataaaagtattgctattaaggattaattttacgattggttaaatgatattctataaaaattattgtactaaattataagaaatttaatatttaattatactaataacgattattatagagtagtaaacactacttatccttttcactatttctcatataataagtagactcttttcctttatctttttatttttatattttggcatccactaactatacttataaaattagattcggtagttcccccaaaaaaaagaggaaaataattttaaggaaaagaaaaaggtagggtggaatatatgcaacctcacacacacttttatgactagccatttcaatgaattgcattcattcattattttcttttttgcataattaatataatacaacaaagcaattttttgttgtttggtgtcaagctattattattattattgagttgtgagcggcttgatagatgccttatccatatgtacatacacatttttttttccttttattatattatatatactaacataatacatcatattcaaatatagaaggaaactataaaaatataaaaattagtacggc

SEQ ID NO: 191155 - DNA, 1580 bp, Cannabis indica
tttaaaatttttctattttacaaaaactgttctgagttctcttaagaacattaatcctctgtcaacaattcctgctctatttcctgtccaccacacaagaatatgacaacattgctatgagactttatttgtaaacattttcatagcaaataaaaactaaattaatacccttcaccctaaccaataaaacaataaatacgtattactcttgcctgattaaaaaacaaattagtgtatataaacaaaattgatggtattgcaaagtaaaaatattatttataaatttttgttgctaaatagcttattaaattagtaaaatacctttttttgctaaattttaaagaattgtataaaaatgtacctccttcagaaagatagtgagttaaaatagagctaagaaaaatatataattaaagtattttatgattttagaagaatttatgttttactttctattaatcagcatttattgtatttatttgtttatttatttttgaaagaaaagcattgcattaaatcaaaaattaaaagcacttaaaaatctcgggcaagattattgcatttattggttagtgtggtttttatttgttattatagaaaaaattggaaaaaaaaattaatgattttaatatacaattgttttatcaggaaaaatatataaataaaacatttgatgactttagaagaaataatttttacgttcattaatcagcatttatttcatttattgattagcgtgaatagtattactgtgatttttatttgttatttttttcagtagtaaattaattttattaaccattaaaatctgctactaacaatagtaataaatcagttgatacagacaccaaattaaaattataatcagaataaagtaaagaagttctagcaaaactatgaactatcttattcgctcatcactttacaaaatagacacaaacatctctaagctcagaaaataaaactttacaatcattgattacattactaaataatgaaatcatagcaataacactctgtaaagcttgaataacacaaaggtatgtagtccgtttcaacactaatcctccgccagttttggtctttgatccaactaagagctttttaaacgtccatcacttcagttagttctatagaaaaaatgctattgggtatagaattttaatattttcggagagtatcgctcattaattgcaagacaatatttttagaaaatgttaaataccattagtatttaataccaatactaaaaaaagaatatgctaagtacattattcatttagataaatttagaaagaaaaaaattaatatagaattttttacagaaaaatatataaataaaacttttattattgtggaggattttttttagaatatatattttcataaataacaaaaaaaattaaaaaataataaatttacagttttttttatggtatttcaattttttgttttgtagtatttttttattttcacactttaaaataattttatttgcatttatacgaaattttatatagaaatttctattgcaactaacagagtaatttaaattgtaactaaaaaatcatataacgacc

SEQ ID NO: 191156 - DNA, 1275 bp, Cannabis indica
agagtatcttgaagtgaaaggggtaaaattggtagaatgtttaaaaaaaaagtaaaagtaataaactttaaaaaagaggataaaaataaaagagtacaatataaaaacggtgtagagtctaagatcttcttatttttactgaaaaaatatatttatgaataaaaatgttcaaaacttagaaatgaaaaaaaaatccctactaattttttttttaattttttttcaaaaaaaattggccaattatataattttttccatacatttgtatggtcagtgttagtagtgacatcagaattggttgtatatttattataaagtcttcatgatatgtcaaacttatcaaaaaaaaaacccaaactttagtaacaaaacaaaagcatacaatcttgtaaaagattcaatatattaattgaagcaatatacgtagatactcaatattcctccttttcacgttgacaaaagcaaaacccatggtgggtggaaatcttaaacccataattaattaattaatatcgagtacagtagactagagtagtacgtatagtagaattacactacaaaatcaatagagatagagatactgtaaaagctcaaccacataataaaggagtcctgtcctgcgaatatgatttgagatcacaagttgtctttaatgggccccctcaagtggggaatttaaagcccaaaacaaaaacagggcctccaataagtattttgtatagaactagtcattatacgtgtcagtctctattaacgtgtgatacagtagggtcaggtgtaggtgttggccgttggactccaccaatcaaaaatcgacaaccctttaccagccagcgtgttagatgggatctcacttccaatactacactctctctcacactatgtcagtggggttcagagacaaagacacagaaacaaaatatgtttttctttttgattgatcatcatcacattacaaataaagttttgttttttattccacttccttccaaattattatattataggataatgcttctcgtctattaaaaataaataaagaatatagtcttttgtgttaatattattattggtttaattaaaatattttgtattatataatttaatataatatttttaaaaatataattagccaattaaaaaatgatatatctaaaataacaatacgtaaatttatatagagtttttttttttaatattgtatcattattttattttatatttatatttaatgttattattttttattatatatatataattacttattaaaat

SEQ ID NO: 191157 - DNA, 625 bp, Cannabis indica
cggtttggtttgggtgggttatttggtttgggcaatttacgaaaatttatgtacaagccctactgtagcctatataagtccctttatttcttcacaaaggggaatcacaaaattgacatagccaatgctctagtataatactctttatgtttttttcttcttcaagagaaatctggagaaccagagttagattttttacggtaaatacgacttgtaatacattttacgcctataactataaggtcaatatactgattcgtgaactaagaataattaacaacagaattacataaaaattttcatctcagttatttaattgttaaaatttttatttgatttgtttctaaaaatttcagtaaatatgtataatattactaataaaatatttatatgtagatgagtgaactatagatgtggaaaactacactgtgaaattaaaacaaacaatataaaaatttgaaaaacataacagactggagaaagaatttttattattatttttcaaatgagtatttttgtactcttcaaaaatgtaaaattaaaaatggatataaattttctttttactattctgttagaagaatctcctcttacaatcgaggatgtatctgcattatttattttt

SEQ ID NO: 191158 - DNA, 1290 bp, Cannabis indica
atttttacaacaaaaggaataataataaataataataaataaataaaccatatgatttttacacaatcacttccccattaatcataggtgattggaaaggaaccctttttatttccacaaatgttgaaaattcttgcttcaatggctgtttccatggctcaccgtccatttgcatgtaagcgtctttccactcccctcctctaatttccaaccggatcgcggcagcctaaaaacaaaacaacaaaaatgttcaaactcttaaaccaatcctccaaaacatgttagacattactcgaaaacatgttatattgatcgagtagcattttcagcctaatctcgtatggcttctgcacattcgatttctgaagattttgcagtttacgatttgttttccccagaataaaaagacggggtgaagacatgatcattcaacaagtctttataaacaaagagcagtacctgagcaatgtgtttggcagagatgagttcgaccatgacaaatgatgcatgccacccgtgcttaaggccaaaaatctctagaagaccatcgtcagcatgggcctcaacaaattttttctacacgaaacaatacaagtcaagataagcatactagagtctctcaaagtccgaaaggacgttgtacaacaagagatcaaaaattgtaaggggcaagttataacgacgattaaggtagtactcgagtgctttttttcatgctctcatctgcataaccaagatacaaaatagaagaacatatagtttacaaacccaacaaaatgtagcattgtctcgaggaaatataaataccttttccaaataatcaggcttcagattaccccagggatgtcgtccacttccatagttatgaagatttaaagcaacaatagctcttacactagaggaacacaaaattacaaatgagatttatatcgaataacaatacttagcgacaaagattgtaattatcgaagtagaggaagtaacatattgccatacaaataaaacaaactcacaaaaataccttgaagggacattaatgtgctcccattctgagcaattgacctttttaacatgcagcctcagatattttttagtcccctgagcaaaaaaagtgttaagagatataagcaaatatgatcaagattgatgctattactgtgactagagctctaaacaaattctcagccacaacaagagaaaaaagattttttaaaaaactatggtttgagccccggtaattttgaaaggaggaacaaccgtcttaacaaaacaaactgcttaaactgaatg

SEQ ID NO: 191159 - DNA, 2161 bp, Cannabis indica
  modified_base (45)..(45): a, c, t, g, unknown or other
gatcttccatcgttgttctgtcgacacttttcgctcaccagtcancttccatgcacagtaacactcctactaactgggctgacagcctctccatttccacttccctgattgtcagcagacactttgacactgatattatcgaattcctcatcactatccaaaatatcgacagtgttgagagctgaaagtctagccccacctggtgtagatggagccatattcttacttgggctctcttgctcaagtaccagttgtcttttaacaagttgactagcagtaaattccatgccaggctcaaaactaaccccttttgcttcttccttgataaaagcatcacttttacatggcgtgcgaaaaaaagctgaacctgcacaattcaaagatgataaaaatcataatattgtatgccaattgtactatgaaaggtacagttaataatcacataaacaacttgctaaaaaaagagattccaacataaaaatttcaataaccgtaaaggattctacagatctcaaatagccacaatccaatataagagatgatattgctaaataaagattgatccttaaggtgcttgtgaaaatcacactttcctcaaacaaatttaaagatgaggattaacacttgaataagcaattataataacaattgcagccacttttagttttcacctaaagctttaaggttacacaagaatactaacattttttgttttttcaaactcaagagtacaagagacagagtaagattatacctgctgttttcggatggtcaattcctatgccaggggaacgacggcagagagaactaacaaccgccgaatcaaaagctttattcttactccctgttgtcttttcaaccattagacctcctgaaagtaatggtttttgagaatgtaggatccatgcctgcagttcttcaaactttttctcccaagccttaacatctctttcagctttcttcttctcacattccaaaactcgattctcaatcatcagaagacccatcttatcttcttcttcttcttcccaatcatccttagttagatcaactattttttctatcctcttagttcttccacaaacttccttagtttcatccaactctctcttcaaagcttctagcttttcctgagtagcaaccttttcagcttccaaagccctgaatttggcctcaagtgcttcatactcgttaatcttctgcttaacttccaactccaactccacacacctgatttcagctttagtccccatattctttgctccaaaacaactacacccacaagctcttttgatcacagcaacaaactctgatcatcaaatcaaacaaacatataacatataacatataatcatattcctcaaaatatagatttcacaaaattccttttacataaaacccacctagaaagaaattagggaaaaaaggttagcaagacacatcatttatcagtgtctattaattggcaaccaaaaagaaaagaacttttcaaaacccaaatgcctaattctacacactaagctagggaaacacaaacaaaatgttctgaaccatcttcctagtctctagatatgttcataatttggaaaacaatcccaaaaataaaaaacactcctttttcatgacactaatattaataagtaactactattacatgagtgaaaaatcaaagaaaaagaatgaaacttacaaaataatgtgaagaaaggtttcttccgtgggactaatcacaagctttttccattgtttctgttgactgaggtttttgagtttcgcccttgtttccgtacaataagaccgttttgagcttagcaagagtggcggaataagaacaatcacaaacgtaacttatggcacaagacgagttttgggaataaatataaataaaatcaaaaaaaaattagaatagaatactatcttttcctctgaaaaatagaatagatagttaaaataaatttttaaacaaaataacttgtataaaatagtcatacacaaagttggtttatttttttaaaaaaaaaataaaaaaaaaaattagtacagattgtttttaattttttttctttattaaaatgtaattgatttttgtttttgtaaaaataataaaaaaaaaatacataactatttttggttacttatttcataaacataaagcagaaat

SEQ ID NO: 191160 - DNA, 5196 bp, Cannabis indica
gattctaactagtactaaaaaagtctaacaggataatgaagatatatatgcagaaatctagaaccatttagcgacagtagagatgggttacattatctcttcatatttgactagaattaggacttaactgtcaaaacaggataaaactgccatgagcagtataatcacaacaaatacaacaattgcatttctgttcatgattttcaattggaaaattactgtattcttcatctatatggggaacaagaaatctcttaactcaacaggtaggttactctcttttggtaaatcaacattaatcatttaggtaatactataatcagtcaaacagccaaccagaaactctagtcaatacacaagcacacacaatacataagatgtattaaatgttcgaaaggtaccccttcgtgagtactttctatgctttccatcttcatcatcagcataatatgaaatttcagagttctgccgatcataagccagaccaccctttcgcgttgtagcaccaggctggattgatcacaaccaccacaaaataaaaggagcattgagtaagactttaataaacatggacagtacaacaataaatataacaaaaagaaaaaataatccggtaaaataaataatttaaactaactacacatatgttcttacaccaacagggctggtgcttttcgtaaaatttcctgctgaactggggccttctatctctgaaatatctgtgcctggaatctttaaagatcctgctccagttgcacttaggtacgcttcagccatgttcatttcgttttttgctgtgctattttccctgccatctgcagaagtgactgcagtcagcggatcagatgcaaatgctggaggaggacttcgagactctgagactggaaatgaaactggatgatttccaaacaagttcttttcaaggccagtctgcaaaacaataataaatctattcaaagctgagtgtaatagtgaaacaatcaagttcgcgcccacagaactaatgttaaagatatcccctgcttatttgcaatgaatgggactacaacatcagataaatactccagggttgaagcagttttacaaagaagcataccacatacctaatgtcatgtcaagtaaaagagatttcgaaaggattgaaaaacattaggtatttggaacttgagatagaaaaaaaaaaaggaaaaagacaaattgcaactctaaaataggagtacgaaagaaatttgtttgttagaggtagaacaaaattgtacctctagcattctatctaaatatccacattgtcaacagtctcaacctgttattcaaactttcgcaagactgtttgaattttaattgttaatgtgattaaattatggtttcgtacttgctttaatgaacaccaaccaactgaacaaaacatcatgaacagtaataaattggttatcagataggcatcaatctttctgataatctaagagccaagcagaagccatacctgcatgatagcttccttcaactttgagtgtaggcgagatcctgagtctttcacattcttgggaggccatatctacattaagcagttagcattaaaaagaagagtacaaaatacaatgagcatcaaaattgtaaattacacatagtgaccataaacaagtcctattgaacaaattgtgttagcgctaaaatggaaaccatctttagtcttttatcaactagatacttttatggggacttaagaccactccacacacccaactcccaagcacttgacttactcacaagtgactagaggaaaataaatttctgctttaacattaaataactccggaacttaaaatgattgttcggcacaatggtgaagtgacaatgaaattgtttaaaaatccaaatgtaccttatgatgtacacttgttcagtgaaaataggtgatagttcaaaacaagctactaactctttcaacaactttttttacactgaagtatcgggaaacaatcttgaaattcaaacttcaagcgatgtttcaattttttccttccaagtatttagtatataaaatacatatgagtaatgatacatgcacacataaatcacacacaaacatgacatacttatgtggcaagtcaattttaataaatgggacccatcttaaataaagatgattggttgaagttacttgcaacaaaagtgtgtcaagcttttttgtgaattgtgggtgcacatattattactcaatacacatacatatatatatatatatatgacgaagatggggaagaaacaacagcaactacaggccaatagttttgcatacatatgtaaagtcaagttctagaaatatctctcaccgatgtagagcattcaggatcaggacacgcatatccagcaggagcagtatgcgaaggaaaacttttgatatgtgaaaccaggcaatttgtgtgtataacatctgtattgaatatagcaaacatataaattacaaagtgtagaatggattccacatctttaataaaaagaatgcacctgtaagaggcagtaggctgtaactataaatataactgcacttacgcaagcaacccaaccgagtagtctgagaatcagtcccgctttcaagtacagcttgacagaggcagcaattagggggccaatcgtactctccatctactacccattctgagtatgtacggatctttacaataaatgacaacatataatatagacacatatgtcagaaagcacaacacacttacatactggaaaaacttttatcttttttttttcggcataggaaaaactaatcttcaagagttacacagcaacaacctatgcactacagaaaaatttaagtgttttattccatgatgcgttagctcaaggggcaaaaggttattccaataaacataagtaaatcagaatctaattaaacaatttaaattgtgaattatcagataaaaaatggggtgctgccatatgattttgattttattgttaatccaaaaatgaagtagagtagagtaaaagcacattcgtcaactaaaagaacacagaatcagaaccagagtttcgaaaaattcaaccggaaacaacacaacaagcacctaaaaatactgtaaggacaatcgaacaaatcaagaagcttaccacgcatatttggtgctcgggaaaacagatgcattctccacagaccgggaccttgtgcacgaaacagtacaattttgtagcctaaatcacaaagaaaactacatgtaattagacgaagcaattatacaaaataaatacgagcaaatcaaaatgcaccacaacacgcttcaaaggatttagtaaccacataattcattcaaatttcaaatatcgatcgatatgtagagagttcaatctcccccgcccatcccgacacctaaaaccagtaagttggagctaattcacgatcttagagatcaccttagcttttcaacagtttataacctcgatccgatctgaatctcgagctacttaatcacgtatttgcacatagaaatcaaagcggaaacaaaaactgttgaaattctaattgagaaagaagacagagggaaagagagaagcataccttgcggcatttacagaccaccattgcatagactggtgagtgggtgtggttgggcgagatgatcagactccggatgggaatggaagatgataattcttaatttatgagcccaaatttggttagggtttttgaaaacgatcagtaaatgaagaagacgagaaggattgaaccaattcaattcaccgattaattaaactgtttttcttttctttctttctttctctctgtactttttagttttgccatagagatccgttttctagttttctgttttttttttaagtggtgtttttttatgttttattttccacttctttctattttatttttaattgatatttcatcttgagattttctttacccttcaattatgcattacttgatatgaataaataaaaattgtattatataaaatgtaattttgtgatagatttacatcagtttttaatattatattttttaatagacaattgcaaaatttgatccaaaatttaatataaaataaaaaatatataaaatataaaagaattaaaattttgaataaattataaaatttttattgctagtaattagttaaaataatagcttataatctaatcgggacattagtgttattagagacatgactagaattagaattagaaaaatgaactaaataattagtcgtataattcctagatcgtttgacaaaaaaattaaaataaaataaaaattaaagattgcagcatcacagttaactttaaaacatctacattctgtttcatccaccgctcagaaaacacaacagtataaattgttgcaggttcaatctcgtagcttgaccactcaactattgtgtaagatacgtgactgcattactaacaaccttttcagtcgcaaaaaacttgctagtcccaaccactaacagtgatttaatagcaagctattgaataataaagaagaaccaacaatgaaacaaaataaaacaaaatcatgtcacataggcaagactaaaatactcaaaatcatgtcatgcaaacaagactaaagcactcaaaagtcaaaactatgtcacacaaagaagactaaaacactcaaaattatgtcacagaaacaagactaatcgcagtaacaaaaatcgaatgacagtatcaaaacacaacctcaaacaagacacgcctaagcccagggaaggtcggtggacctggccggagaaaaaagacgacattcgatagctatagatttaaaaatgagaaaccctaatttttttcttataaatatatatattcaatagtatttaagtataatgattaatcctaaaaagtaattaaatgactaaatttaatgctaaaatattaaaaatggcataaaagtgaatataagcagcgtatttattattgtgatacaaattttacatcatgtcatattgtgatttaaatttggatcaacttttagcacattattgaagcaaacttttacaagatgattaccaatttgcatctctaatagagatactcttactaagtataatttagacgtatgacacaccttaaaatatttttactgaaaaaaaaaaaaaaactaaaaactttaatcgtactttaccttacttatatattactataattaataagtaattaagtaat

SEQ ID NO: 191161 - DNA, 1954 bp, Cannabis indica
ttagtttttttttttttttggactagatatgtaattcaatcaattaatgacaacggcccaccaattgacatttattttccctttgtgggccatctttttgtggtgcattattcagcacgcttgtaacattgtggcctatattctatagaagttgcaaagaaagaaagaaaaaatcagaaccttattttagtgtgaaacaaaaaataaaatttaagagagaagagtcattgttattactcctaaacgaaccatatattacataatacatatacatcatgaatgtcgttaattaagatcatgtgtagttaattaactatatccaaacttaattgtaatagcatgaatgattaaaaatatatatttagtatacatattatgattaagattattatagtgtgattctctttcactttaattagtgtgtagcatacatatatgaataggattattagggcaaaaggcaacgctaaaagtttatgcagagccgccattagtatatatatatatatatttatttggaaatgactacgtgtatataaaatccatgggtagctaggtttaaccagttaggtcatattaaagaacaacgacatgttatcctttgctggacagtagtatatatagtactaccgatggtgtatatatagtttattatctcatatgctaataattttcagctttttgttccatgaaaataacatgcaaatatgataaatataatgataatgtcttatttatattattattactatacatatttgtatctgtattgaatatatagtttttgctattaattttcagcaaagaatatttcgatacctagtggatgatcgtaacaaacttaacagtgacacatttgatagtattcacatgtaaggagatatttatatgttcacactttaaactttaaacctttcattaatgaggtcccaatacatacatagagatgtataattaatattgtataattaacattatgcttaaaccttttacaccatcaagttgtgttcctataacatattacttgttaaaaatatcgctcaaaatataactttactgtaatataatccttttattacttttaatttaattttatagtgaaacggtgaaggataattgataaataaatacaaattaaataacttttttttttacgttaatgaataatagaataaaaaatttatttttttattataatttatatttttatttttaattttttattcattaaagtaaaaattgtaaaaagtatgtaattttgatccattaatttatcaactattatcaacagtgtcacttgttttacgataaaattaaatataatattataaaaggatgaccatgatgtaaaaattatatttctaaaattattaataagtatacataattcaagcaatgaaaatactaattattctatattgatatatatcatgtgtagtatgtgtaatatattattaatatattacatggttgaccataataatataatattattgtgggataatattctccgtgaaataaatagtaaaatattaaatcatatataagaacatgtattatttcataatcacctgggttgtaagatggaatatctcatcatattagaatcatatccttgaacttttcattccaggtaaaagtttactacaaaatcaatatttttactatattgtaaaatctttaatttgtttcataaattttaatgtttttaagattcaatttccctccaaattaattcaagtgttggaaggataaaatccctgtatttgaaaccctaactcaacatggatgaattacaccttcaatcaaaagaaattagaacctacaaaaataacagaaagaaaattaatctatggatcaacttctatcaaagagatgttagaatgaaaataaaaaaataagtactgaatatttatactcatgtagcacccgtgacggacccagaatttttact

SEQ ID NO: 191162 - DNA, 816 bp, Cannabis indica
ccttgcgggcatgtgatcctatctagtgactatatccacgagagaatattgtgaataatactgttctacataaaataaatagtagagtaaatagagcctcataattctcaataatgactgaatttcatattatatatatgtccattttttattagttgtttaattttatattatctaaattaatcttgtgttcttattgatgcatctgtccaccacaaaaaataatatagattattttatgttaattaataccatttcaattaagtaaagttggagactgtctaaaccaagtaaagaaacaagtagtacaactacaagtgctgaactactattttatatggtgtttttcattacgtttacaaataattaagttaatgtagattttagtatcaaatgtatcatattaaataagttaattaactgtataacttaatttaaaaaatcatatattatgctatatatgttttttttttttaaataatatgctatgtatgtttttgattcttttgggtatatgccaaacatcataaagatttttttttattttttatttttttaacttttgcattattggcagcattgatcaaagaatctagattcgactgaattaaaaaagagatcataatacaagactttattttaacatcacctctattaaatcttgttatataatcaagttgacagcattaccctaccttatttacaaaaaaattagttcatttaattttcatcaaaattaagaaaaaatagttcatgacttgatggaccaaccgttagctaaaaacatagtacaaactacaaagagaaaaggattct

SEQ ID NO: 191163 - DNA, 1448 bp, Cannabis indica
taaaagaaaaaaaaaaggcaaagaaggcaatataaatataaatatatatttacccaaaatttaatatttttataaattttccccccaaaaaaataagtctttatacaatactttctagtcaaataataataaatttgtttcgtgctataaacatctttttaaatttttaagaagtcacaagtttaacactccacatatttatttaatttttgaattttttttttaaaataactaatatcattgttaaaatttgaaccacctaacaattatgtgtaaggtaaaaaagtatgatatgtcattgtattaaaattattttaatacaattacatatattattttacattttaattttataactttatataaatcatttacaatatagagacattttttttttagaaataactataattcgtaattaatcttctaataatttaagagtaattaaataaggttcttttatatacatcattcccaatataatgaatttattataataaatacataattttttaaggaatttgccaatatatattgacatttcactttctggtaggcacatccacgatcgatgtttgatgttttactttctattaattaggccggctggcttgtaatatttatatgatatcgatatgatttatataaaaaaaatgtattaattattaaatatatatttgttgtttaagctcccctatgtttttccaaaaaaaaaaaaatcgtatgtataatataaatagatacaactttttatgtgtagtcgaacgatatataattgactaagatttatctatgtgatgataagcatgcacgattaacaaattcattttagaggtatataggatatattatataaatatatagttggttcctttaacataaacgtacccatttttgttgcgtgggccactttttagtctctaattacgacgtggtttggttgaaatcttaaaaggggtttcaaaagaaatgaaataacatttctcacacaaataaataaataaataaataaaacctaattagctataaaacattactattaaacaccgtgtctagcactatcaaaataaggcacacccacaaggggctattttgtagcaaaaatatgtcttggggcttgatcttcagccaaattttgtaccaaatacctcattagggtggcgagctactttggtggtggcacttttgtatttttaaggtccaagtttttgtatcttagattatgtccaattatgtctagttatatctagcatgttagtatgctgtgattggaaataattgtgctattaatgttcatgtcacttgtttttaagtcttttaatgtaaacaacggtcgttgtttttgttctgttaagtcttgtttggctcgtgtttatatatagttgtttctgtttacaatttcaactaactttcatattgtctcttttgatagtgtggttagattagag

SEQ ID NO: 191164 - DNA, 871 bp, Cannabis indica
tatatatatttatatgtaaatatctatatataaagtactagatactctcacagctaataatgttttttcccccaattttttcgagataaaacaaagattgtgtgtgtttacatgttatggggttgcactactggttttcgatcgtttatatctatcttaagacataaaaatatataaatatcttatggataaacattggtgtgaatgtaacatttttccaattactagatttttaagacatatgtttgtacttttaactagtcacaacatcaattcagagaataaagggttcacttagcttccgtgagtttccatctaacttgcaatcctttctttctttctttctttctcttttctagactttgactaatattattggccttatctttttgcttttcagtatattatatatatatatatatatatatttctctatatatatatacatatacacaagtacacgcttgcctaatttccaatcaataatatattaacatattcaatgttgaaaatgacccctcccctttgcttgattatatgtcttctttccacacaacgtttcttttcattataataacttcatgtgttgtgatcgagtatatatgtattctgagtatgacaaacaaagagttattcctagctatagagtagtaactatatttataatgtgttatttatatatatatatatttatataaagagagctatataactgcatgcttacctgggcatatataaatatatatatatatatatatatgtgtgtacttggaagaatgtttgagtttttattattggatggttagtaggggggccaaggaatctgtggccctctggcccagaagagacaattaataatcaatatatgtgt

SEQ ID NO: 191165 - DNA, 1594 bp, Cannabis indica
gtcctaccagtttagtggagttggagaagttactttcccaatctttgaagcatcaagaactaatcaaatgaagaattttgagtatcagcatgtaaaggtttccaagatccagttgtttgataatcatactttgaacctagaaaaactggtcccaaagtttgtatgtttagcctctctgtagatttaaaaagcattctgaggctgaaaactgaatgccatatcgagttgtccccaattttcccccctccttgactgaaattgccagatttgctaactaatgataatcaggaagaaaagaaatgtagtacttattagattattttagtacatttagtttaacttgttattttggttttcattgactaaatgagttctgaattttagtacttattttgctttgtttgattgcattcagattcaaattagtcaaaggtgtatgtgtagtccttctaaagtaattaagaaccgggaaacgaatatggagttttttattttgcctcttaaaattagtaatttattgattgtattgccactggcccactgctgaaggccggcttggactttacaactatttttttccttttaaaattagtattgatctgaaagagggtcataatctttgaaacttgaaaattaatatgaataaacaaaaggaaaagaaactgataaaataatatagatagaaccaagaagttgactagaaaccaagaacagagggctgtgtatcattaaagtttatctgcaacaaatgcatatatgagagttcagctgaaaaaaatgaagtgcttgaactatttatggctgagtattacattattaggattagtacattttccagtggctcactccagaggcagccatggtggagatggagatggagttcagccactgtctaagattgctatccacagagctgtttatgagcttcatgaaaacgcgtctgtcaaaacactaccacttgttcttggcaccaaggttttgtacttttataactgaacatgtatatttgtctatatatacatttatcattgatactgtggtaattatatgtaaaacatcatctgaaatgattttaggtgatgggattgttttgcagggggaagattttcaatggatcgatgtcaaatttgaatcacctaatcctagtgatgatgattggattgctgtgttttctccagcaaatttcaagttttgtcttctttgtttgacttttttgttgttttgttactttcttgtaaggctcattgtaaattatcgatttgtttgttctattatggcagctcctctacctgtccagctacagacattatggaagaagctccatatatatgttcggctccaattaaggtatgagttattgcataagagttatttaaatttctttaaagaacattgttgagcttgttgttttgtttcagtacaagtttgcaaatgattccaacactgattatgccaagacaggtaaggccaatttgaagtttcggttgatcaatcaaagagaagatttctccttcgcattgttctcaggcgggttatcaaatgtatgtagggtcactcttatctttcagctctattaatattctattggtttagc

SEQ ID NO: 191166 - DNA, 3456 bp, Cannabis indica
ttatgcattctttactaagggtgaaatgatgtactgcagaggagtgatggaggaggggtctttgatattatagacagaatgaatggcctgacattgtgcggatgtaatactgtcactgcttgccaggtatctccataagtccatatcacttatatctacttttagttgggtattcatcaaccttttttaccatcttttcattcttttctattcccacattggcaaatggcctagatgcagaactggtggtccaaatttcttttatttttctttcgagtcagtctccaaatgttttggaattatagaaactataatacagttattttccattcctttgccaacaaccttatatacggcctcatcatctcgtttaagagcttctctgaaactggatttggaactaaggtcaccaggaactgagttaccatattgggtccagaaaactgcacccacccaatttatatttttcaaagaaattcaacatgtacttttaaacccaaattcttggcctctcataaaattactttgttcctttctttcaatttaagagggtaactctttttgaattaaactgcattttacttaagcatatacatctattttctgaactgtcactgtgtgagattatgcaacaatatattatttcaatatgcctcggacatatctgtttatgattttctcttaccatctccattaaaaagtctctaattccgagtacatgtttctcaggctggtgcaccttttgggtcctgcaagaatgtagctgttcctagtagaagtccaccaacaaccaccaatgcaggaagctttactggatctgttcagtttacaagatctgcttcaactgtcaactcttcgaatcgcttgtttctcttcttagtatcattcccactgttggcattttggttatgaccaccacagccaattagcgtaaatccttgagatggtggcttacttacagtgttttacacgtaaaaatctagtgtcatagcaaacggttcttagtgttataaatttgattatagaggtaaagcttaccgagattttagttaagagcagaagtgaggatatgtgcggcgcatgcatatgaagtagataagttagtgaccaagaaagacccagaaagcactggtttggtttcaggtatacagtacacttcattacagtaaagcacttgtttttatggaagaaaatagaaatattgagattgagatgctgacattttacctagtgttataacaacacccaattctgccatcttttttttgatcattttatctgtgctgcgctgttgttttctttcagggcacagatagtgtgggtaaccagtcagtagcagtcaagcaaatccatggcacatcatatgtaaaagtacttgtgtgttaaataataggctttcttatttgtattctaacatttttaatgggtgttgtttctcatttcttacctataacataggttatgttatctcatgtctgcacttttgtttttaacaatgtggatcactatgaagagttgaacaaatgatttatttgagaattgtgttatgtaaaacaagaaagaccataaagttttcattttgtgctgtccttggatctcttgtctcaaaaaagaaagtaatgtatgaatcacaagtaattaattacataacaataataacatatgaagctttgttcataaattcataaaagaatacacaaattgcatgtggactatacaaagacagagcttcaatatgcactctgatataatatttttgttataaaatgttgttcttaatgaagatacacttgcaccatacaccaaaccattttcaaaaacaatcacaagaattggataccttcttcttctccttcttctttttttatacaacagcttgttgaataggaggatttccaacatttaaaagcagtcctcgagatttgatctgaagagcaggactaatagtaagcaaagcaataaaacagtctacaggaactctggtgccccatacattgatcacctctaactttctacatttatttacaagaccaacaagcccattctctgttatatgacggcagctccaaagtactatagtctgaccaaaaagaaagaacagaaaaagaaaacatcgtttattatatcacatttgagagttgcccccatcaaaattattaaataaaataccaagttgttatgtagtttggataatctacacacctttaggtgtgaacaattatctgcaatgacaaacagagactcatctgtgataaatgtaccaccaatattcagatgctgcaatgaattagctcttgatatctgtttaaaaaaacacataaagtctatggagaaaatcataacaaacatgttatatagtcatatgaatatattatgtgattacgagtgatgtgattcccatttaatacttgcccacagcccacatgttatacctatagtttttctaggctaaaatttagcttatttgatctgatctgaaatgatgttgagcataagcaatatagtacaatcaatcttattgagaataattaaggttgagggagaaagtatctaaatttgaaaatgaaatcatacagaacaagggctgctaattgctaatgcttaagaaacaattttccactctttcttctaagatttattttttttttttttgatctctccttttaatagaatagtaacacttagaaataaaatcaaattggcattgcaaaatgaaaaaggttaattcttctgaaactaaaactattattcttaccaaatgagcaacacctttatctgtgactccagtcataccccataaggatatggaggttaaattactgacacactttgccaaagatatttggtaaagtccattgtcagagatctgacaaccccaacggcttcttgaactgaaaaaagagaaatgattaagttaaaaaaaataagattattacctaattacaatatgaaaagggctatagagataagaagagtacaagtaatttaaagcaccaaatatgaagagaatttagatatacatacatatcaagctctttgaggctataagcatggcggactagacgagcagtagaaacatcgtccattttacagccagcaaagctcaaattgtgtcttccacccaaagactgagtaaccccttttctccatttccggcaaacactgctcaccctgcacgtgttaatatatgttttcatttaaccaaaaatttaaccaaacaacaaactttcccacacaatttctcaggaaacaaacatacccagaaaggaaaataaataaatacatacaaaaaaaaaaaaaacaagagctttagaagctgattattatgaagataagaacaaagcaaattacgtactgggccaaatcagtaaaagaagttatgagaacaaagatatgagctaacaaatcaattggcaaccgatcaatctcagcctcaaccgccattacttcccaaaa

SEQ ID NO: 191167 - DNA, 1303 bp, Cannabis indica
aaaagattttatgtgctactccttggcacttaattgatcatgtcgtttttcctattaatatgaaagagcaagagcattagatatgtggatgattaaatgtttctgagaggcgcatatttttgtataactcactctggtctggtaggtacgagaaacctgtaaaggaggcttgtaagcctttttctgttattctgccatattatttttctatgttagatttcaaatatcttaagaatgaaataaggttttctactatggagcactttgagattgtcccttatttctggattgcatgagcagaatacaacgtaagtttttaatgctttgttctggttttgttttgttttgttttttttttttatttttcattttatatttgattttgatgattttgttttctggtgtgtttttgcagcgatcgtggagtttttctagccgcttttgcagagtattttattaacagtaagcctaatcattttgatgattttgatgttgaagtcaaccgtgatcgcctggctgttttattctattactatggtctgaagaagcaagtggaaaatgttaacaacgactcagaatgttcatgatttgtctaacagaattatgttcttatttttgttttatgtcttttcttttttagtttttaagactgaaaataatgtttcaaatgttagtatgtttttttattatttttaatgttttgttgaatattttgtgcactcttaatatcttttgttactataatcgtgtatgtactggtttatattttgtctatgatatacataaaattccaaaattattttatgtttgagttgttttgatattactttagggttgttttgatattattgtgattgaattttttttagaaaattataacaatcatttattgttttttatggttgttttaaggtttttctacctttgtatttttattcacttagtccacatttccaacaattttgttctcaaatttttttcacatctttcactatcattttttttttaaaaaaaaatctcaattaataaatccattcatttctcaattctatttagtatccaattagtttaaaaatcctttaatgtatattatcacatcattgtcatcccaatttttttaaaaaaaactttaatgtaaattattttctatttcttttctttagttccatatgctctcttatatttttagttttttgtgattgttcctttgttgttcctcagttattcttcttctcttttattgttgaggccttctactacatgttctcttgttgtgccccagatctccaagtgactaagtagt

SEQ ID NO: 191168 - DNA, 2097 bp, Cannabis indica
aaaaaaaaaaaaacaaacaagcaataaaatccagctaaaaacaattcataaaactcaatactaacaccaaaaaacaaaactacgcatccacagaacctacagaaactaaacctcataattcaagtatgaaaactaaaatttaacttcttaaaaatacaaggaagaaaaagaagaacttaacttgtatgaactaagaatcttgctcaaagagtccctaaattgctataaagtactaagaaaatattgaaaccccttttggtttcttggtagctgaccaaaggagagagagagagaagtgaggttttctaatttttttttgtttagcttataaaacttaattaattgaaggattattacacaagattatacttaaaaacaccaataacctaactaaagataagactagggtaaaatgacaaatctaccattactaaaacatgaagtaatcaacatacataggcataaaatggtcttaatctataactctaaaaattcctaacattctaaatgtctaattaaattgcctcgctatttctaaggtactgaatcatatctatgtgactatacaagtcatacgccgcatttcactgtcaccgggcatataatataaaaattataaaatttcacaaatatcataattaatacacctagatatatcaccaatcatttaaataataatcaaaagtctacttcttaaaataaactttaattattggctagttctcaaaataacgcttaagcgatcattacatgaatgctccctaatttctcaactttacctccataataattcttgagatgctgaccttgtgcctttaaagctggttcttctcctctatgatcacttcaatggcccaaaaggaaatagttgtgtaactatgactaaaccggactatcgcgattttaactttccaagaaagagtttgagagaagaattaacaaaagtaccttcttggccgaattaaaatctctacaaagaatatagttttcatgccacttcttagtttttctttgtctatcctcgcattatcataagtgttatgatgtatttcctcaaattcattaagtttaaaaagtcttatcttacttgatgctagaagatcaaaattcagcttctttattgcccattttgcaaggtgttcaagctcaaacaaacaatgacaagacttttcataaactaaacgatatggaaacataccaattagtgttttgaaagccatcttataagtccataaagcatcatcgaacttgtttgaccaatcttttctatttgagtgaactgtcttctctaaaataagctttatttcccaattcaaaacttctgcttgaccattacattgaggatgataagaaagagacatcttgtttctaaatccatacttagccatgagagcatcaaaatctttattattaaaatgggtcctttcatcaccaaggatagctctaggtgttttaaagcgagaaaaatgttcttttgaataaatttgacaactacccaagcatcattcattgttgttgtagtagtctccacccatttagtaacatagtctactgccaataaaatacaaagatttcaaaataaaggtgggaatggtcccataaaatctatcccccacacattaaaaatttcaacttccataacattagtgagaggcagttcatgtctttctaaaatattttctattctttgacatcgatcacaattattcacatattcatgacaatctaaatgtaaaataggccaaaagaaaccactctcaggtaccttcgcatcagtcctactcctctaaaatgcccatgggggattgatgacaatgcaaaaaaatctcacctacttcctcttctggtacacatattggaatcacaagattggcacatttcttgaactcatcccaaatgtagtgctttaaatcattgaataatttcttcttttattgagattgtaaccccagtggaaaaaccttgcttactaaatatttgagaaaatcatcatgccaaggtatttttattaccatcgcaaatggttgctcattcagaaatgcttctagaatagatgaaccacttttttcaatattttctccatcaaggcaaggaaaa

SEQ ID NO: 191169 - DNA, 2055 bp, Cannabis indica
ttttattttttctttttcaaaaccatgtttttatgtgtattgtattcactgagggcttcacaaactacatgcaggtaaaggaccagaaaaacaaaaatatgaagaaaagataaaaaggttacgtctcaaacgcgttgcatttcgtaccatgtggctatcagctgaggattatccactgctccttggtagttcattaagatccttatccttatgcttttttttccctctctcgtagtgtgaactttatttggctctgggttggcggtacttatggtaatagtttggtacattcacaggatcagcagaccttggcgtgtgcttgcatacttcttcatcaggactggaccttcccatgaaggtatagagtagaaagtattatataaaaatgcaagaggcagataatcacttcaaacagtttttattttttatttttttcgatgcaaggttgtggacatgtttggttgtgggctgcctgtttgtgctgtgtcgtactcatggtaaatgtgatactgaacttactctgcaactaaatattctgctctagtttcgtgtactctatagatgaccgttcttggtttttggtttcttggttataagcatcaaggagctagtgacagtggagaaaaatggtcttcttttctcatcgccatcagagctagctgatgaacttttggtaagttaatcatccccttggtcgctatgctgagcttttcaccaagccagaaaaagcctcttcttctttattttccagtttggttttatctgtcaatttctgcaactctgctactgttccattgctattactctatatttttgctactgttctattgaatttattcatctgataggattggttcttatcagtaaaaaactgactcttaccaaatttctattggatttttcacttggccgttgaataagaataaaattaggaatcaaatgcttcattactttaaaatattatttgttctaaaaacagttcatatgtacacatttatacgaaaatctgtcagagtataagctctctttctctcagtctttgatatacatgtgcttcaatccttggttgcattaccttttatgggtgtgagaataagtaaaatacattactcgtcatcacatagagcacacgtggaatctatatcgattggaaaatcttgttgttatttctggcaggccttctttgtgtttgcatcttttgaaaacaccattttgcataatgcttaatgccaattacgagtttagttttgtcagagcacattttttgctagaatgttgtatatgatcaaattactaaggtcttacatgcaactgtggaacaaatttgcatcacaacatttgcttctcatagtcaaatgacatcttcgtggtatgaatctgcacagcatctgttcaagggttttccagatgcatgtgatgcacttaaatgtctgaggaatggtgctttagaaacgggatctttggcgaggtgggatgttgagtgggaagagaaagccaagccattgatatcagaggtaactttacttacaataatatggtgtatttattaaataggtaaaatcttttgcagttagcaatagcattactcatgctggctagtttagaaactagaaatagaccttgcagctgaccccctcttaaatggagttgattgaaatggttatggaattcaggtaatctcccgaaatgctgattgagatttgggttgtggtggtctcattaaattgtgatgaatagcaaattgtttgatagaggcttctctggacttgctgaaccaaagagataaggaagcatagctctcattttgctctactggtatatcatctgatgacaactatgcatatgtaactctatgccaaaagcaggaaaagtttgttatatttatcattttttattttattttttgaccaatttaaaggttattcacaaaaagaaaaataaaataatatttgattgtaagttgtcattaataatttaatatggttgtaatcacacttattatatagtgataattttattgtgagtgattaattattactttttgttacaatctaa

SEQ ID NO: 191170 - DNA, 1474 bp, Cannabis indica
agttaaaagatttatgcataatcaattttgtatataaagaagctgtattaaatgttctatccaaattattaatctaactcagaaaatttactcaagctgagataacatttctgatttattccaactatatattgagaataaataaacttggttataataactataaggtgatatgagaacaatggcaaatggggttccaaactagcaaccataatatcttcaatttcaagcacttgatttcccaatactgttaaatagttgcccaaaagttgtcaatgtgccaaacttgatttttacactgattaatttctcttaaaattacttctaaatacactcaaattggcagaagaaacactcaaatgcttcactgattttagacaactttctaatgcaattgtgccaattttctaatgttttgttctttatttcataacttattgattcaatccaatcattagactcctttaaaatcaattttttcctggtcttaaagaagaccctaatgttttttctgcatcagtttctttgtgtttttcaaaccaaagggcttttggaaggtttcccattgtggccatgttctccaatttacattgagatacagttttcttcaagcaaaaagaaaatataaatatatatatatatatatatttaataataataataacttgttacaaatatctgttgagctttgactataccagtccaattagctagttttgtacaaaaggggaagagaaaaagaaccatttcaaccttgccttaaaaatatacatatagacaggaacaaaggcaagaatggttttttctgactcttcctaaggtaaggtagtgaactaatcatatatagatacatatacactaatgtgttagtttaatggcatctaactatatctatagctacaagcaagcaataacaaccagcaacaaaaagatcagaaatgcagagtacaagaatcctcttgactgccccgaagaacaagtagaccaaaatggtgttcaaaatcgctggtcgtgtacactcacttatcttagttaaattggtttctggctttgtgaaaagatctcatctaaatcaacgctagcatcactgtgatatgaggaactagtttgcttgtcagatgaggaactaacctcaaaattgaaagccccactctcatcaccaactgttagctggttaaaagtagttggagagcttttgtcctctcttgtcttctcttcgtattcaacttgaacatgttttgatggcgattttcggttcttagcatcatttgtaggtgttgcaccatcaagcttcctcttgctcccacttgcattaggtgaacaagatctttttcgtttagacagaatgggcttaatatcccaatccgtcagatctatagggtctttataagtcagatctatagggcctttataagtcagatctatagggcctttatcatgcaaattggttataggaggagcattttcatcatca

SEQ ID NO: 191171 - DNA, 2561 bp, Cannabis indica
tttttttttttgagtaataataacccaatcctcacttctaagctatatcttttagcttccaaaataacataggaatttctagtaaatccactatcttcctcacttaaaaaaagtaacaaaacccaagaaaaaaatactaagttattttgttatgtgtcccacaactaaaaaaaagtgcttaaacatgagtatgtgacactaatggccaatccgtcgcttttccactattgccggacacaattctcaataatactaaaattaacatatagcatatataataaatctagaatttaataaaattttcaaaatcgataaattattcttctaaggcttattttttgataactatccctaattttcgaccagaagcatacactggttaaatatgaattaaataactgattatctactaattctcatgattaaactatgcggtcattacaattagctccaccttacaaaaagatttcgaccttaaaatctaacttgaataactacataaattgagccctcatgccgaactccaactccaaggtggtttcctccaccttactatttctctaaagtactttgaccaaggctatcattgcttcaaagaactttatctttcttagaggatttgcactagttgctcctcataagaaaagtttgaatgaagttctagggtttcataactcaggacatgcattgggtctgaaacgtattttctcaacattgaaacatgaaatacgttgtgcattattgacaaggctaggggcaaggctagacggtaaaccactaacctaactttctcaagaatttcaaaaggcactgtaaagcttactacgcggaagctaaccttcacggaagcttactacacgaaagctaaccttcaggaaagcttactacgcggaagcctagggcataacttgccattctttccaaaccgttttattcctttcatttgagatacctgtaggaagacatgataccttacgtgaaattctatgttttttgcattttggatttgcataacttttttgcctactttgtaaagcaagcatcctagcgttgattttctctatagcctcagtggttcactgaactgatttcggatctaaatatttcctttctctgctctcatcctagtgaattggaggataacacttcctaccatacaataacttattgggagccatcactatcgtactctgatagttgttattatatgaaaactctacaaggggcagatacttactccatgaacatttgaaatccatcacacaagccctcatcatatcttccaatatctgaattatcctttcagactggccatgtgtctgagggtagaaagttatactgaatttcatctttatactcatggctctttggagactttctcaaaacttagaggtgaaccttagatccctatccaaaacaaaagacttcggagctccatgtaggcgtactatcactttaacatacaactccatatactgatctactgtatgcattattttcacaagtaggaagtgtgttgatttagcgaactgatctacaattggaatcgacacttacaattaatgcattcaccgaactattaccttcttccacacttactactcacatcaacaagatgtctatacatgacatatatagtcgatattgaaggggtattagattcattggttatatcggttattaccattaaccgtttgtcaaatggttgctgttacattctgttagaatagttatggttagttaattactgaccttagattagttacttcttgattaggatagttagcttattttctctattctttatatatatgtggtaactcttgtttttttattcaatccaattcaataagatttttccatttcatttcacctcttcttccacaataaaagtatcattaattaagggaaagacgatgttaatcacatgagcaattcttttgttctcatctatatctaatctattctatatgttaaaaagtttttagcagtaaagaaaaggcaaatggaaatgagaaagggtattcataatttctaccacttttaaatgtattaagaaaaaatttggcattaatgtaagtattgtagaacctttcagtattatgcaaaatacaaagaagacaatgttccactattgtgctaaatatgaagaacacaaggcttaattagtctttcttattagtgtttgtatggtaattaaaaatgtaatttaactgatattttatggaatttaattattatataaatatttgtaccttatttgatcatattagaaatgtttatattatttttaattaatatttaattataatatacaattaaatttaaaataaatagggttattgtaatacaaatataaatttatttttaaaaattatgaatttagtgaaaatatatatatacacttctagcgtcagttgtaaaataacactaaaatttgttagtgtcgttttaaactttaaattatatcattatttctataaaaagaaaattttatcttttatgcaaataatgccatattaaatcaaaacagtcattaaaaaaaacaattacaataaaaa

SEQ ID NO: 191172 - DNA, 3390 bp, Cannabis indica
aatttatataaatatgcaattggtattatagattgttactttactcttgtgttttaacttttaagataatcaattcaggatatatttgtatcattttaaaaaatacagaatttattttattatttaaaaatagaattcaattaataacgtttgaaaaatacaaaatctattttattttaatttatatacgttgtgataggttagtaattttttatataatttattaaattaaaatgtctaaaaccgattataaattttttctaataaatatgttaatatatctcaaagcaaattcctctaataacgctaatcatgcaataattttctattccaaaatatacgcaatttgcctttaaaaaatatccagcacgcaattctttcccttttagcaattaaatattaatttatttagcagaaattcaatgaacgatgaggtgtcacaatactattggttaatcgaagaaaccgcagggtttatcaccgcacagtagtgtaatcttttccaagtccacacttgagagttcagacaaagcaaagctacgataagaaaattaaaaataaaaagagttgccttgcgaaagtctctccctcatttcttttgtttacaaaaaaaaaaaaaaattaaaaaaaaaaaaacaaaaacaaaatcaaaatcagtctttgccggccgaaacgaacagtgactcgttttcggtctcaaaatctcaaacccaaaaacagttcttttctcttctttttccgattaatcgttgatgaaatctctaatttctttgagttaatccgttttcggaaatggtatctgactgttttcgaaatatcagtttgtgtttgaacttttttctaaatactgtcttttcttttttatcagtttgactcagaaaccctagagaaggtggaggaatgaccacgacgacgaccaatattggcggcggtggtgccggtgaggacagagtgttggctactgctcagcagatcgtgaagaggctcaatccgtctaaggaggtaagagaagacatgcttttgatcttgcaaagctttgataatcggctatcgaatatcactgatttgattaacggtgaggattcgaggacggaagatcgatttgaagttgctgagaaggtgattcttcggtgggattcgaattcggaagcttctaggcactcgatcccttgggaagactctccggatgaggctgctgagtacttatcggctgttgatgatatactgaatatgatggatggtctttcgatccagtccagtaacgagtttgtggaccgggctgagaacgcggttcaactcgcgatgttgaggcttgaggaagagtttcgtcatatcttgattcggaatactgttcctttagatgctgaggggctatacggttcgatccggagggtttcgttgtcgtttgcctcgaacgacggtgaaatcgatgatgagtttgagagctttggggaagacgaccgtgacgccactgggcgttttcatgagagaggagctagcttgggagatgacctgtgcgtagatttgattcatcctgatgctgtggttgagcttaaggagattgctgatcggatgattaggtctgggtatgagaaggagtgtgttcaggtctatagtactgtccgccgtgatgctttggatgagtcccttgtgattctcggtgttgagaagcttagtattgaggaggttcagaaaatcgagtggaagattttggatgagaagatgaaaaaatggattcaagctgtgaagattggcgttagggttctcctaactggggagaggaagctttgtgatcagattttcagtggctctgaggagactaaagacatttgcttcaatgaaactgcaaaagggtgtgtgatgcagctgttaaatttcggggaggcagtcgctataggtagaagatcgcctgagaagctgtttcgaatattagacatgtatgatgctttggatgatgttttgcctgacttggaaataatgatgactgatgagtttggagtttgtgaggctagaggagtattgggtgcacttggtgatgctgcaagagggaccttttgtgagtttgagaatgctgttcagaatgaggcttctaggaagcccatgcttagtggggagattcatcctttggctcgttatgtgatgaactatgtgagattgcttgtagattatagtaagactctgaactttctcttagaggatgcagatgacgatgggtttaccaatgatgatgctgagaatgggttggagttagaaaatgtgtctcccatcgctcgtagattgttgttgttgataaccacactggagtctaatctagacgaaaaatcaaaactttacgaagatggtgctatgagatacatattcctgatgaacaacattctttatatagtgcagaaagtgaaagattctgaactaggaaagcttttgggagaccgctgggttcgcaagcgacgtgggcaggtgcgccagtatgctacgagttatcttagagcttcatggagtaagacattgtcttgtttgaaagatgaagggattggtgggagctcaagtaatgcttccaaagttgctttgaaggaaaggtttaagagtttcaatgcttgtttcgaagatatttatagaattcaaacagcttggaaggttccagattctcagcttcgagaagagcttcgaatatctatatcggagaaggttattccggcttaccgttcgtttatggggaggtttggtagtcagcttgaaggtggaaggcatgctgggaagtacataaagtatacacctgatgatttagagaactatttgttggatttgtttgaaggaacaccttgtgttattcaccatctgagaagaaaaagtacatagaatgaatacaggggctaatgtaacaaacaggtaatccccattgctttatctgaggtttaatggttacacaaatcccatgttgaatgtagttgatctatacgctatttatgttgctggtgttgatgttttaaaacacaggtttttttgttaaaaattatcccccatgccctcctttatatactgtaataatttttgtacatggtttatagattctagtttttttctttctttctcattttcctttcttttggcctttttttttatgtgtgtgcattttgatggtacatgtattttactgacatgatttgccatcagctttggagtgattcttggcttgatcggcctctgtatattataatctctcccggaaagaacaaccaaaatctttactttgtatattgtgatatcccagaaagaatcacaacaagaaccttatactgtttggtttgggttttgtcttcttaaacctattatcagtcatttgtaataattagctttcttaataacggtaatctaaagaaacatccaagatat

SEQ ID NO: 191173 - DNA, 4256 bp, Cannabis indica
  modified_base (48)..(48): a, c, t, g, unknown or other
ctaagtacagtttgaggatgtattgtgatgagatagtaaaacacaaanagacatacatacctacattcaagtcttaggaatgaattttcagtattatcttgcatagtacagatgagtaaaatactcttcactagaaaagaacacatgaagcacaaccattccagcagacaaactcaaaagatgaaaacaatacataataacaaaatttcaagtgacagtgtccactaaaacatagagggagaaaattaaaattcaacattataagagaaatgaaaaggaaattaatgattttccaggcattagaagtaggattttaataggaaagtggatcattggagatttgaatgattgtgcagataaataaaatttagatgtatgtgataataccttcacgataatgatggctatgactccaacaacaattaggaaaagtaatgccataatacacttgtcagttgcaacctaatttgaaagggaaaaataaaaatgagttgccaacatggaggaaattacagctaaaacatgacaaacaaaagatgtggatattttagaaatcgacctgcctaccaatttccttgaccagttgagatgctttcttgatagagaaatggatagagtccagctcattaacaaccctactcatttgttcagtctaaacatgcaagtaaaagatcacctttagtactcatatatcgaagcaagattataaacaccagtgtaagtaaacatagtgaataagtcaaatctaaactttaaaaatcaatatttatgtacatacttgagccttgagagctgctgctgtatcagttccaacattgatggtgtcttgaacaacctatacaacacaaaaaaaattattgaaaacttgacgcttataattcaacttcaaaataggaaaaagatagttcgcagtttgcttctagcatcgcctgcctttgtaagacaggaggcaaaagccatcacataaaatttcactagttttactaaaggaatttacaatttcaagtttaatgtaaaaacataacgatagaactctaatatgactcctcagtttagtaaacgaagtctccctgaagctggagattgctaaacatcaaatacaagaccacaacacaatcacctaatacttgttgcaaaatataggtagctggagcaaagtttcttcatcaatttttctttttcatgaaaaaggagtaagcttctttccaatgcattaataatgcttgaagagaaccaaccttctttgatctctcaatggcctgatctgtttcattcatcatttggtgtccattatccataagctgttgatttgtcatatctgcaatatatacactcttagaaacaattcactattgcagagtatgggacatacccgcggattttattatattgaatgcaagtcctaaacaaaaggaatttcgttcttataaaagcagcagaagaggaaccttgccaatattaggtaaattgaaaacctagacacgatctaatgcaagtagtaccacctggaaggtctcataatgccaacaaaaccgtaattatgcgcatatgtatttacttacttgaggctagcaagacattttcttcatcatgtccttctgttggtccatcaaagaggtcaatttttttgttatcaagattggctgtatatctgtatccagaggaagaaaaacattcaggaatagtaacataaaaaataaaaaacctcaacaatgacatttctcatatattttctagtaattatatgttcaaatatcatgccatcgtgatcattgaacatgacatacttaagcttcaatagacgtgagtactgaatgggtatgaatgcgtatgaatgctattggttttattttattttattatattttattttttgaaactaggaatcctgcctaatgctacaatattaggggaccaggaaatataaatttcatcgtggataaagagaagaaaaaaaaatgtttaaagttgcataattattcatgtgtaaaattctcttgctgcattgtcaaccaaatagagtactttccaatgattcacttactgtttcttcaaggcaacatatgaattcaactccttaatctgcattagatatataataaagttaaaaccacttggaacacgtggagcaaaattagttgagagaaaccgaaagcgcaaacgaaatattcaaaacatcatattatcatattatcatgtgtcatacaagtataggattaaaaacataccatagactgctttttctcactaagcatcctgttggtgttgggatcatttctactttcaatatccttgacttctctgtcaaactctttaataagcctgaaaacccaacatataaggtcattcactccttacagaaagagaagcctttattgctcttagtattttagacattttcacagttttagtcatactcattttgaagcttctgctttttcaaagaggactttttaaagattgagtgatgagtcaaaggtcaaatcatgatatatgaaactaacatcaacaatttcagtctccttgagtagatgatgatgaaggagagattcagaatttttaaaagtaaattaagctttaactgagaggaaagaaacctcctcaaatcttgagcttctttcagctaatgcagaacaaccaataggattaacaattgaatgaaggctgtaagttttcgattatcattctaaattaataatgcacattacaggactaattccttgccaatgaatataactaaagcaacataaatatgctatcagaaatccacaagttgacaaacaaagacaaagatagatctgattggaatgtgaaatgaaagtaaaacagaaaaaaaagacaattcttttaactttggcaaacatagatcttgcagacaccagattattaaattcaacatagcaataacaattttactcggaattataaatttagctgaagctacctataaacaaatgcacaagcacataaattgtaaaagataatcaaagaagagctgataatgaaatataaaggataagaaaccagaatgaggagtgggattggattgtaacatacctcttacattctcgcatcttctctgtgagctcctccagctgcctactttgcctgttggaatccttaatcttctccaatttttgaaacccatttctgcattcaattcatatgtcaaaacccatatcatcaaaattcaaaattagaaatatgacattaacattaaaaaaaaaatgcattataaatcttacgataaagccctgaaaatatcgctgatttggccttcgatctccgcaagttcttcgctgatcgatgataatggatccattattctcccaccaccaccacaccaatctcaaaattaaaaaaaaataaaccaaaacaaatcaaaattttcaacacacacacacaaaaccgttcgatcagatccaatccaaccaaccaaccaaattcaaaaacacttcttcctcgaacaaaatttcaatgctagattcaaatggtcacaacaatctaacaaaaaaaaaaatcaacagcgtttcacaatgctcaccccgatctggattttgttgtcaaattatttattattatactaataataaaaaaataataataataaaaatctctccttttttattttatttaatatttgagacttgagagaagaccaggtggtttttttttttttttttaggttgggccgttttggaggggatttttggctccgaagctgtaaggcagagctgttttaaaatttggccgataattatggattttatttattttgaaaatgattttgagggagagaaatctgtgggggtgggaccccattccgtaaggagagaaaaagtcaaaaatgtccttgactgttcagtcaactaacaactgggaaggaaggacatatacggtaaaacagaacagagggagggacctttcgtttgtttgttgttgttcttataattatggtcctaccaacctcgtaaccctcgtttatatgtaatacaaatataatgatgatatatgactagttactacataaacgctacgagctacgtctataatttgaaattaaaaaaaaataagattattaaattaaggctaattaggctaattagaaaaaagtcatccaatagttcaggggtatttttaacagccttaaaagttcaggggcataatttggtatataggggtaaaaattctaattaaccttaaattaaaaatcaattagagagctcgattggttgcagtggcggactcagaattta

SEQ ID NO: 191174 - DNA, 2841 bp, Cannabis indica
aaaaaaaaaacattattcatctatgaatcagagatttcctttttgtttaaatttttgttgaatagtaatggtttggtttatcgttcgatcccaatgctatgatataaatgtaatattgcttcaggattatgcattggtttgtatactacatttcaaacacagcttttcctcttcttactctctctctctctctctctctctctgtctgattgtgggtttttgagatatataatattgtttcaggaatatgcttggggttgtattctcatcaattatatgtatttgtattctaaatttcagtgacagtgtttatatttaaattatattatatactccctgaccacccagctctgttttctgtacagatgttttctcgttctcacccctttagttactattatattgtcttgttcttcaaactcttgacatgtttaaaaaggttttctttttgtgtattgtttgatctgtgtttgtgtatttatgtttaataattgttgtaatatgtatacagtccaggtgatgaggttccaggtgatgaggtgagatcgacgttgttgctactgtccattagttaatatctggaagatgacttttttcttgagaagtttgttggcaacatcgctctctgctgctgctagtaatagtaataatagtaataatagtaatagaagtatgagtagaacaagtattattaagactcagcttaagaatagatgtagagttggagcaacacaagaactacccacgcctccttcattacgagtttgttcacaatcacacttagctgctaagactaagactaagaagaaagacaagaagaacaagaagattagtatctcaactactactattactaagcctcctcatcatgataatgataacgatcatgatgctgatgatgatgatgatttgatgatcaccaacaatgaaactaccactactgcaactactaacaagtcttctactgaaacaacaacaacaacaaaggacgaggaggacaagaagaagaagaagaagaagaagaagaagagatcactaagtccggtgattattatgcacgctagatatcctactcctaatcctactcctacaccaaacatacaagtcaaattcattaaccaagggtatgtactatatatcattatgtaagtttctttctttaatttatttttttgtacatcatgtgtatgtgtgtttattacattaatatacaatatttgacaaatctcttgtatgtataaatatgtgaaattagttttggatacaccccccctcatcttagagatctactaaaggtatactgccgccaagagaagttttatgaggtaaatatatagtaatctaatctgcattatatatattcattcattctgcctcttttgaatttcttcctctacttaccattctctactaattaattactaaatttgtcttctgtactttattacttgatgtttcactacactgatcaattaaagattgtttcccacaactcatggcatgggtccaatattgatcttagattgaaatgcactactataatatataaacaccattaaaggtcccatcttcacacacaataagcacacaccagaaatcatagttttcactatcaaattaaagaaccggttcaaatcagctgataaattgaaattgattaagaagccccatatcactcttttcatgaaagtcaactcctggctgttgagaatatgatttctttctttgtttgcattgcacctacccataattagcctttagcaacaacaagtcttcattcattgctttaattcctccaacattcttagagaatttatggttcaacaataccaaaattgaatatttcatagacatctctcaaattcctcattttctttggagttgagcttagtgatggtggtgatcttgcttcatggagtatatatgaatttgctgctgcatgcccaacgcactagaactgaaagatactagaaaatagaccaaacagggaagagaaagtagtttgaaaataatagacagagcagatattggattattaataggtgagcaaaatgacaaagagaacaaataggggcactaggcttatgtcctaagtttgtttgttttgcttttcttgcctatgctatttaagtgaggctgaggtcaactctcccaaaagccaaagctcaatcccatacaatttccaccccaccaattcaatcccatctcctctatatactgcccaattcatacagtggcagcctacctctcgttttgattacttttttaccttgttaactaacacacaagtttatgtcaacttcataacactaacaaatgaagaactaattgtgcatgtgtgtgtgttttttttgaactttatcttaggggttttatatagattcttatccggaactagaagaagtcaggcttgatcttgttagatcatgttcggtagatgatcccacagcccaagagcttgctaaatgggcaatcgaacagtataacgctgacaacgacaaggtccctttgtttcgttctttctttgaataataattaatgtatatacatgcatatttttatgatattaatatggaatggaatgcagggtgagaagcttgagtttcagaagattgtgagagtgaatagaatgctaaaacttcgtagtagtaattactatgtaacaatgggtgtgttaggagcatggcaccgttactatgaagctaaagtttcatatgactataaaatcatttctcatggtcgctgcgttccctctaaaacacttcacttctgtagatatgctcgccactatccaatggtctattagttacccatcaatcacttcattattattattattat

SEQ ID NO: 191175 - DNA, 2913 bp, Cannabis indica
cacaagttcagtttcttctacagaaagaaaaaaggaaagaagaaagatatcatatatttccaaatgtcttgcaaacatttcattgggatatatttcatttacatttttgtatctgaattctttaagaagcacttaggtgatgcatgatgcatgcatcttaaacatattgtagcctttggagatataaatttctgatgatttcattctcagattttatgtttacattttgatatatttattctgtttgccagttccacaatgtttgaggtttaagtttctcatgggtgcctacttagcaactgctatagtttcctattcctcatatattccaaatgaaaaaaagtaatgagaaggggtgcatgaagtttcctttaatactattatatttacaccacaagaaaatctatttgcgctccaatattaaaaaaatatcaactgaaattaatatttaaatttactgatgataatttttcttttatattttactatgtaataatttcaatattttcttttacctcgttttcatataccgttttctaattaatgtatatcaattttgtttactctaataaaactttatatatttcttggtttaaaaacgtatttttttagaatgtgaaaaagaaaaaaaaatatcagaaagaatgagtacaaattaaaaaaaacatgcataatttaatttattcaaaataaaaacagtaaaatagggtgtttttatacttttttgagttgcaaataaaacttcccatataaaatttagttgtctcattgttctgtatagatctattctaatcctgttcccttcaaagtttaaagactttaattgttctttttgatcgagtttgtgcatctacaaagtaaggattcctctagtacaagacaaagcaaaatgtagaaggattaatgagttgctttgaaacgaaaatctgagttcatctaagagttcctagctttgtagtttacatatttagagcttaatatccttataaagaaattgataggaataacctgtcaaaattaataggacagtagcgagaatggagtaagtttgtactgaatatctaagatttcgagagcttggttctctcctaaacaggtattacacctttaacaaaacattccacaccctttccctttgctactctcatatgtatactataccaatactcgtcctcattacaatgacccgagcaaatacctcttttagtaagctctaccacatctaatcctgaggtctattagaaatgtagtggttaacatatacatatatatatatttgtaggttttattcttcactattattttgttactttgattgatattatagactttgcctgacattaagtttcctcactttcagaacaggttgaatataacaaaaacaatacgtaaattctccatagatgcagatttaaaacctactggtgctgagtttcactcagaaccaatgtcaaatttcattaagcatggggatgaagttgatgaagaagctggtgaaggttctgttgctctaacagcaaataactttgataaattttctcaccagtaagtggtccatgtttaaatcaattctcagctaatgatttgaccatggaagactttttatgctatctaattaaagtgttatcttcccataatttgtgtaacaattctcttgtagatatccagttttaattgtcaacttttttgctccttggtgctactggagtaatcgcctggtaaattttctacttctatcactgaattttggtgagagtctatgatgcacgtacactatatccatgtgcatatgtacttctctctttttcgtacttcctctctttcctccttgttggaaagaggaatctcttaaattacattgataacttgcaatcaaaggagagcttatctttgcattattttttttattaagatacccatttgtacttaatgcttatattgttttgttttagaaaccttcttgggagaaggcagccaggacaatacgagaaaagtaattttttaattatttccattcaactattattaagaaattgttgcctttacactgaagttcttttatttatttatttattttttgcttgtattcagatatgacccagagttggatggacgtataattatgggaagggttgattgtactctagaaggtgaactgtgtaagaggtacgcttttgtagatctaagctttaagcttatttgttttatcctaaaatgtttcagtgttttctctctgccattccatcctttaggactcgtttggtaggccggtcatattgtattaagtaataataaacactatatttggataaaaacttattatattaattattacgatcataaattttaatacaatgtgaatacataacaaataattcatattagtttgtattataatatttacaaagggctcggggttcggagtccaacttcgatccagggtctccagggatgggattaggattggggttgagtttatgttaatgataatatagttttacacaatctattaatacaactcaataccaaacatagtattgtagtaatacaatccaacacaatactatacaatacaatacaacacggcgtaccaaacgagcccttaggaattgatttagttaaaaattctctgatgtcactaaagtgttgaagaaaagtggacgccaaaaaaataaaataaaatattctttaaaagatgtaaacatgggaataattgtaatggtaatatgtttcttttgaaggcacaaggtgataagccccaatacactttgttcactctaggagaccaaaggaatggctttggcagggggttactttgtattctggtcttatagtaattgtttcctatttttgtattagtgggctgttgtaagtggaagggctgaattgtggaaatagctgatagaatatttc

SEQ ID NO: 191176 - DNA, 1196 bp, Cannabis indica
ctctctatatatatattatgagttttaagcttgttatattaattttccttgaaactttttcaatgaaaaatcatatattgaacgcagaattgtacaatcgtagtagaggattaatgtaaaaagtgagaattaatgaatttagaaattcctaagtgttgacttaagaaggcacaaacaataataatccaaaacttacttttttttttttttttaactttaaataatacaaagattcgatcgaagagaactactcatgatatttcctcctttcccatgccaaatgccaacatcctcataaagttgtaacaaataggaactattaatatggccaaaccacatgtttgataagatttttctttctataattttagagaaatttaaggattatacaattaataaagattattcttgtatgagatgtactacagattatatgtatttctatgacatggattttataatttattaatgtatgcttaactcttgagactatcaaagaggcacgaccatccgactgcgcttattattgttcttattttttttttttgcattaattaaattatactttgagtttgttaattataaaaacaaaagctctgtgtcagccattaaccagtactaatctctctcatctattaataagaatggtaatgatgatcaatggtggaatctttattaatttaataacaaaatgttagatagctaatctgtagttttctcatttttgagctgtgagattaaattaataataagattattaattattaataatgtgagatcgatctatagtaagtggtgggacacgtggtgcttgcccctccatcacatagcacattcagatatttatttatttattaaatatggtttataaattttggtgataacattaattattaattatatattctgcctttttattaataagacagtattatatggactatgaagtctaacatggttgtctctgtccctacatgcacactttgtggcacgggctaaaaaaaaaacttacaatatatccagaaacaagaactattctctttatcctcccaaaaaaataacataaataataaatattataattaattaaacaaaggaaaaaataataacatgaaaacaagaaacgaaaaagcgtgttgatttatattcattgtatccttgtttttatattctgttcttgagaaatcgagatcttc

SEQ ID NO: 191177 - DNA, 1758 bp, Cannabis indica
tatccatgaccagcagagctagaaacttccgccgtcgtgctggagacgatgaagaagacgagtctaacaacagcaacaacaatggaccgtcaacaaccgcaaaaacttctactactacaaccaccaattccaagtcttcttcgaaaccctcctcgatctccacttccatggcagtcaccaaggccaagaagcccactaatcaagctccgaagctccttagctttgctgatgatgaagagaatgaaatcccttctcgcccatcttcgaaaccctctaataagaacaagccctcttctcgtaataataagctctcctcctcgcacaagatgaccacacttaaagaccgtttgggtcattcttcttctgcttctccttctatgacttccaatgtccaaccccaagcgggtacttacacaaaagaagctctccgtgaactccagaagaatactcgaatgcttgtcagctctcgaccctcttcagaatcgaaaccctcgtctgaacccatcattgtgttaaagggcttggtcaagcctaccagttccttatcggagaaggagaaagaagcggatgcattggactcggatgatgatcggggtgaagagaaaggggctagtttatttaggaaggacaaagacgatgctgaggctcgattggcttcaatggggattgggaaaggtaaggataaagattcattgattcctgatcaagcaactataaatgctattcgggcgaagagggaacgaatgcgacagtcaagagcagcggcgccagactttatctccttggatggcgggagcaaccacggcgcagcggagggtttgagcgatgaggagccggagaatttaagccgcattgcattggtcggggagaaggtggatggaccaaagaagggtgtttttgatgtggatgatggagcaacggatttggggttgaggaaggagatttcagaggacgacgaagatgacgaggaggaaaagatttgggaggaagaacaatttaggaaagggttagggaagaggattgatgatggagttagtagagttggcagtaatgttcctgtggttcaaagtatgccccaacagaagtttacctacccaacaatgtcccaaactatgccagctagtactagcataggtgggtcacttggtgcatcacaaggttcgggcatgatgtcgatatctcagcaagctgatattgccaggaaagctttgctagataacgtgaggagactaaaggtactaaaaattgttactttaggccaaagtgaatttcatactcaagcatgccattttgttttagaattagaacttatgagggatggattattggatttattatatcttgaatattggccgtgtaatggttttcatgtgcagattcttactttttgttccttgttgtgttaattgttgtcttataggacagcatgaaagtaatgtagtattgtttctattagacagcattgataaccaagttgaattggggggcatgtttaatagttcaagaaaatttggacactcaactctgtcaaaccaagaaaaaggtgttaaagaaaattatgcagtatcaatgatgagaaaacataaaaaaaaaaaataaaacaaaactagaacaatatggaagtgaggttagaaagctatttgcattttcagttgagatcaaaatatattctttacttagattaatatttgtagcatggctcttgctttcttttgcgactttatttaatcgaattatctttggcaagagttgcaagac

SEQ ID NO: 191178 - DNA, 3779 bp, Cannabis indica
tcctatctcaacttattagttttttcataacagttctttacttgggcagttggaatatctcgattccatacatatttatttttgagttttttgaaataaataaaaaaatatggtgtttttgaaccgacaattggtatttttattatattagctgatataggacaaatcctacttataatgaaatatcacacattgagatgaaaaacaataacactagagaagattctctgcaacaaacgaaaaaagcacctgatatatccatgaattgatcttctgatgcacttcatctattatcggcccacgaactacggttgaagaggccttgaacatgcatagagcaaataaattattggaacttgttaagaatttcattctatatataattgagattctttgaatacctgttctggttttatgagaaatgtcccatttggacgaaagatatatgccccggcattctaagaagaaatgataagatcacactttagaaatcatgaacacaataagaataaaattaaacacaaataagtacaataaagctatcaaattgtatacctggggagctttatccttgctcccatcataaccggtgtaatatccataagattgcttcactgtctcctcaaccttcaaaatgaacaaatcattagctacaaattgataagtaaaaattagctaaatcctcttccattcattacataccgagcttctgatgttaacatagttagtaagtttgttttgatctttcgaaaaagtaagcttcaaatttccttggccaacttcaacagtagatttctcactagtgtgaaatgtgtgtactgatgatctagttgaactagaacctgcaagcacgaaaaacaaccttataacgaacttggaaaataaagttttacatcatgttccttcaagaaaagatgataaaggaagaggacctggcttttttgaaattgagattgtgtagcttctgaaaccaagtggcggtatggatactgcaaatgcaagccaatacttgggtgtctgagttagattgagacctaaatatgccttaacatggtagttccttaagctcacatgggcatcaacgagtggaacaagttgcgattcaatttcttttccttcagaatcatgaactatgacatcttcatttatcacctacaaaagacaattaaatcttacaaatagaaatttcgcttcaatgtaatccgcatagaaaacatgttttcgcgtgaaacaacatgcaaatcttatattttatcttcattctaattcatgaaagggatgagactaattcaaagatcacaatgaggaccaagctaaatacataataacacatctcaatcaatataacctgagagagttctttcatgaaaatcttgttcaatacaattgttgaaattttacatcattggacaatttcatcatattttctcattttattttctgttagggtacaaatctaaaccacaccgttcatctaaatattccgccctttacatattgttatacggctactatcgttttcgaatgtagacatgcaaaatggaaatgcatagaaactaaatttagttccattaaagctagaatcctaatatgatatattttctccctcttaagaaataagagatacaaatcaaacaaaaaacataagggaatcacttacaggaattcgaatcacgtcttctcttttccatccaagagagttgtagatcactacaatctatacagatcagaaaatacattatatgagagttacacccatgtaagattctaagattgaaaatttcaaagtgggaaagttacacccattatatgagcaagaaatttcaaagtggtaaatgatctttcttaccaaactttttccttgagacagatgaacttctgatgaaggacaatagctaacatttaaaagtgggcactgaaagggaagaaaaagaagaagaaagaacaatccataaggtattaaaattcggggtatgaaatcattaaaggaaatattttgcaaaattaagaggacaataatttttacttgttgaaactttgtagtagatttttcacatccagctgcatggtcaacaaagcaagcaagtgaagatgaaaccaactgctcagcctgccgaaccataatgtacaagtgagtagtaatactttgataagaaatgaaaagcgaaacgcaagataatccacaccttcttgtagcctataaagagccgtttcacataatcattagccacatgctgtttttctgtgccagtgacagcatcgtgatgttgagcaatcgccaaggcatctcctaatgaatctgtattgattaatttacttctccctttgaaaaactcgagttgcctagcagcctgttaattaaatatattgatataaaagttcagaactagttttggacatatgatagagaggttaggctactaaagcattcgaaaaagaaaaattaataccagataatagccgctcattactctaacataacgtttcacggatggcctgctggtaaagtatcctgtccagtaaccattctcacgatcagcgtacctgcaaagatgaatcgtataaaatctaagaaaagatttgacatggaagaaaagatattgtatcgactgttgaacatcaaactcacggaaagaagtcatcaatcttgagcggccaagattcatcagctgcatattttgcatccgtgtatatggatggagaagaatataatgcattaacacgaccatcctagaaaatatgtaagaagaaacaaaagcatttagagtttatgaaactagctagattgacagtaaatactatggaagctaatgaagtataagtcaaaacaagctaaagccatttacacaagtcttaaggagtagttaccaagttcacataatgaataagcttgtccatctgcttgaaccatgtgtgagaatactgatacttaaaatccgtgcccatagtccacattatatgatttgtccgagttatgttagcctgagaatgaaataattacaaccgacaactgaaacaccttcaactaggaaaagaaaaagggtttcgaaacagctcattctactaatgtcatcctcggatgcaggtaagaaagaaatcattttacctgtgtgactgcagcagcgataaagtcattcactcgctcttgcacattataatcaaacaactcagggtcatccttcaagtaagtgaagtaaataaatttaggagtataaacaagttgcacaaaagaaaatctatagagattttgtaagttttcttggtttggaattgaactagaaaacaaacctgaactactggagaagcatcattgacctcaaaatagaaaccagatggaggttcgtagttctcaggaaatgcaccagcgaaaatcttcaaccagaaagaagagactaattatgagaaaccaagagaaagaaatttcactcacattattaccttttttactaaccataatatatagcattacacaaaaatagaacagcataaagggctagcattttcacctgagaggaagaaccaagactcttggaaccgcgccagacaacttcaagactcttttcacctttccttttggctctatcttgataatctatccgaccatagaaaaacgagtcgaatccaacctacagcaaaaggaaaatagtccacaccaaacatcattagccgtgacaaatgggaaattttctgatcaaattaggcactaattatatgcttacttctgctcccaacaagtaagcctgcactgcagaatgtccgaaggggtcgatctgccaacc

SEQ ID NO: 191179 - DNA, 3562 bp, Cannabis indica
tcttgactgttggtaaactccagattgaaagctacttgaagttgaactacaattaaaaatcactcataccatacaacgttaattatgctaatatgactgacaattttgataaaaatttgattatgagaacattccctactgataagtcgttattaaatcctcatcaattacaacttcatcttggtttgtgacttcataagcttggacgcaaattgatttgacaaaattgtaaaccctcatgtttgctactggttgaatttggcattttaacatggaaaattatctttgttttataaatgataatgatatgatacatcaagttataatttacaaaatcatgaaaataaaatcacaatgtgacattaggctgatggtttgattgaccaaattgataaactgatgaacataatcagattgataaatcatattatttataaactggtgagatacaatcaaaacccaaatgatatttccataaaagcctctataatatatatatatatataaaaaaaaaataaaaaaaataaaaaaaaaaataaaaaaactaagacaactctttttagtaaataagagatatggaattcagggcatatagaacagcaagaagagaggaacaccatcagatattcagtaagatgaacgatcataatgtgctaaagttgcaagagaaattattgctatgtcaaacagatatatattcagtaagatgaacgatcataatccttaacattaggtttcaaggttactgaagatatggtgcgaaaaatgctagaacttctttataaacaggcttcttaaaatcaacagcctgcacagattattggagaggaaaagcaaaaatgtagtcaaatataagaagtgtgtaaataaaaaatcttttgaacttacgataaagtatactcaccaggtcaattgtttgttctgctgacaaccatgaccactcaccaaactcagctttctcagttccatcccccaagagattgatttcttcatcctttccagtaaatttaaacagaaaccttttttttttttgacaatgcgaacaaaataaattagagctagcttagtatcatttatttcttctttaaattaacataacaatttttcttttgacaatctagagtaacaaatactaaagttaagatgaccttaatttaaacatacataacatgtatattcgaaacacaacaattagttattgtatctcgatggcagtgacaagtgagaaaggcataaaatggactaggaaccagaatgtttttcctatttttgcaagaacaaaaggcttattttcaagagtatacagttgtttgtaacataagagcaggagtgcacatgcatatatttatcatcgaatgcaagtgctggagataaaattgataaaatggttggtgtgtggcaatagttcagaagcgataaccaggtctcattttgtcctgaaacaatgaattaactaaatgaaagctgatgtcctggctgcagcctacaaagcatgcaatgcatcgaactacgtagatgaaaaagagtcataaattcaaatcttatactaaccacttctgtgcctggcctttccaatctcctccccactgatgcctaagtttttccctgacttttggtgggaagtcataagtcaaccaatgaggtacctaaataatatagtcattataataacaagaacgttgttaatcatataataaggcagcatgagcaccactcccgatctttttgcctggtagaagcatgctaagaacagaatataagccaatgcataaacagcagagaggatgtatagaagcctaacttataaacatagaggaagtacagaagcctatcctaaattttcacacattattaaacttgaaatcttaaatgcgaacaactaagctaatctatattatataacttttctttggaccttcatctcaatcttatcatagagtttagtaactataacgtttgaatgcaataactatgcaaacagcaaaatgatcagcgctctacttctttatccaacaaccaaatttaataagtttatcacaaaaatagactggtgttttatgaccaaacatgatactttcttcagtcttgaacagaaatgctatcttaattcttaaagaaaatgtctagagcactaaggcatcgtactcaacagtatacgagttgtacctctgcaaggatttcagcagaactcactcctgtctcttctcttaattcccttatggctgcacttctgggatcctcaccctcatcaacacccccctttcaaacacaagagaaacaaatattatattattcaacactgattcagagatattataaagatagtactcaatgtttgagtttgaacaatgtgataatttcattcatcgctttcagaaatatcaggatccccaagttttagttatctagagatagaaagagatgaatggagtaaaaatagctcacttcatcctagatcttcatttaaaaaaaaaacaccagtcttatactttccctgtgtacaaactcatatgatggttgtttccatatgaattgagttaatatcaaaagctcatatatactacaatgaaattgaagtaattcacaattttccactgccaaaccatcaagttcatatctgtttatacttgtactctacttcctgtgtaccttacaatgtttaggaagggtaaactaacaaaattaaattcgttttgacacagtaatttaatcatatgttcttcaaagaatcattatcgcacttgcaacaaaacttaaacaaagggttttctttcagttttgtctatgaaagttttccccacaaagaaacgagagaataaacggaaaatgggcaagagcttaaattatccaactaaaatgttttatcccaaataattcaagcaataacgttgcaaatttctttctttattcaagcaatccattcctataattacctgaggcatttgccatgaatctggtatatctaaccttgatgcagcaaaaatctgttacaaaaatggaaagaaagaaagaataaaatcaaatttacttacacaaatataaacatatacatatgtatatgtatatgtattcgtatgtgcgaaatacataggatggataaataaaagacagaacctttttggaatcgttgatgaggcatataccgacgtttcttctgtaaccttcaggaggagcttccatggcgggagatgaggaggaggaaaaggaggattggcgtgtagtagtagatgaagagaggagtgggaaaggtgataaaataggggatttaagagggtagctgagaaaaggtgaaggcgtaggaagtcggagaagagtggaggacgaggaaatgggatgataatggtgatgatgatggtggtgaagaagatgaagtggagaacttagacttacacagaccgatcggcttaaacccattccattcaatcacttcaattcattcttttcctcccaaaacattcactttttccattaattttctatgcataaacaaattacagaaaacataataatttgagagtagaattataatttaataattttgaaataagaattgcactaaata

SEQ ID NO: 191180 - DNA, 4511 bp, Cannabis indica
cttgactttgggatgaaaaggttaagccatggatgtggaacttcccaaagtccttgtgattgaagcttgagctctccacttcgtactctatctagaaaatccacatacgacacatctttctcgaacataaatccagcctcgtacctcaaaccttcggtcaatcccttaaccacctattaatattaattaattaaaattaacagttagttaatataactatatatttgtacacatgtataatatgtaggtatatatatatatatatgtaccttgtgtatggattgagaagagcgatcgtcgtaaaatttagctatttctagacagtaaatgattttgttttgagtgactttagagattattcttggatgatcagagggtggaaaaaatgaggatctccaattatcaggagtgccctgattcatgagtagtgaaccttctaaataatcaagtgcgttcttgtctttcctgtcattcattttgattaatcgttcttggtcttcagcgaattctgagaagtttgtgtataacattcgtacccatttcacctgataaacccaccacacatccaatatttcaaaaccttattattttaattaccatttgtactaaatattcataataaatatattatataatttattactactttgcaaattaatatataccctcttaggagctgactcaaggacgattcttgctctgacaataactccaaactgacccaaacccccaagaaccgcatgaaatagctcagagtttttgtgtgccgagcaagtcacaaattcacctttccctgccaaaacatatataaattgtgacaaagttaaaaaagaaaaagacaaaaactacaaaaagtaaaatataactgcgcgcattgcatgcaaatctcgcagattattatagccccacacaaaataatagttatttaataatatatatgtactactagagagtaagtgcagtactaacaataattaattattataataaatagctgggaaaacataagtacacaattatatacaatattatctttcgtttaaaaaataatagatatatacacaaacatataaatatatatacgtacatacatatctcctatatattatttatatttatattatatataattaaagaccagtgtgtgaactagtagtgtcctaaaatttcttaacgcgtgggaccaaataacaggggcacattccaacatgaagtaaagatgtacgaaaaaagactgtatccaagtttcgacagatactatcttgtcttctcttcctataattaataattacatatatagctgtgttgggttgggtcaaaataaataattattttcatgcttatattaattaagtacataattaactaattaagtgatgtaattaattcgtaccagtgataacatcaagttcgtacacattgctgatctgaggaccgtaccggaaagccgtaccactaatgcccgcattggaaagagtcccaccgacggtgaggtaaaggtaatcggtccacgaaaccggcgaaagtccatgctcaagcgtggcgtgcaagacatcgatccaaagctgttctccaccgacatcggcgtagtagtagtaaccggaaccggaggcagtacggttgccggagacgacaataccggtaccgttgcggtgacctttcaaggcggtcatgttgataacgacgccgttttgggccatggcttgaccgcgaatggagtggccttgtcctctgggggctatgcggaaaggggtagaggaattgtttgaggatttaattaaattggctatgtcgtttatggaagatgggtctaaaacggctgctgggatttctctaaccatgtttccgtaatcactcgaagccatttctaaggcttctgagtcattacgaaggttatacccattttccttgttattattcggaaaaagcggagtggttgttgggcctttattattagttgtcgtggtagtactaatccacggcttggatttatttccaaagctgaagatcagacggctgataagaaaaacgaacatggcatatgtttggatcaaaacattctctgcagccatttttaatattaactagcagagagagagagagaagaaataatagggagtttttgggggtatggtgtttgttggctgtaaagaatggctgggatgggtggtttatataagagtaattgtaagggtatgtatataagaatttagaagcttttgcatggaacaagaaaagtaatagtaaatatataatataatatagtaatttagagtaacgacaccttggcctaacaatatatttttgtttccaaagatacgcaaaggacatcttggatttcattttttcttcttcttttaattagtttttgttgttttcttctctttccaacttcatgaattactcgtgcaagcagggtcttaatccaatttaatacaagagtaatgataactgaggagtactttattgctacattttaatatccaatctcatttaataaataatataaaaaacttctaactaattataaaatattacatatagtattagaaatcttaaaatgctaaataactcaaaaattataccaaaatattacacaacaaatgtgatgtgtcattattattattttttaattaatacaaattttaagttaataaataatgtatacatataaaaactatacatactcataagatctcatcttttataatatattagatactttaaaatactcaatactaattattataaattttttgaatttatattcacccggtattaaactttaatattagaattttcatacttaagtaaatattgtatttagtgtaattaagaaaaaaatatatatgcataatgtgtatatattaatgaaaatatgattgctctcttatattattaactttgttacgcgtcttgtttgtatttgtgtatgcatcatcatgaccatcaagattcgaaaccatacgagctgggtacccactgaaaattaaggggccacacatagagagcttctatttttgtttttctttcatctctttgggacccacactctgtgtaccaaacctaaccaaatataaaccgtttgatcacgatcatgttgtcaagatgagtcaagtttggtcaagttgcatttacccaattgattttgtttttagttaaaaatgtatataagatttttcttttatggaatcaaaatatttaaataactaataactatattctctttcgtgttttctctttcattgatggacagtggtcaaatttaggtaataatcgaaaagagcctcaataatttttctatgcgggtttcggaggaattccaaggaagcaagctatgaacttcattctcaagttatattgtattattgtatggattattagttcttgacatatttggagacatgggaaacatcagccacatatatacatacatatttatatatgtatatatgaagactttgtttgtgtgtgtgtgtggcatgcctatatgggtacatgtgattggtaaaaagtcaaattggagactagctagtcatccaatccagcccatatgttgtcccaagattgggtagatcttgatttgatcttgatttttttaatgggttcattaattaggatgtttcccactacaaagataaccaaaaaaaaagggtttttccaactatttatgtggtttatattattaaaattaaatatttctacttttacaaattgaattgcttaataagtattaagtatagacttttttgtgcctctctctgacattatctcattaacaatttactttggctaaataataatgcatggtcttgcaaaccgatcatgatcttttgtattattatatatataagagatgttaatttcaattttttatattaaggaatctctctcaattgattacatataaaacaatcaagcatgcactcataaaaatataggaagaaaacaatatattgcgtttcatacgaatggaataaatcacaagaattaattttttggtcatcctaaataatggtaatgttgtactctagtactacgtacattttaaatctttaattattcaagttcaatactcataataataataattgtacgtttcaacaaacacattttattattattatcttgaagagaatgaaaccatattaattataaattaactagttgttcatattaaaatgtacgtttagatagagtttgctcgctcttctagagattctctagtcagatttgtaccttttttaattttctatatctctgacatagacaaaaatatcttcaggtttatgaagcaaagattttgatttgaaatgtctattagacttaacaaaatgcatatctctttctctctctttctctcattcaaaagataatctttgacctaaagatctcgcaggtaagaggagctatcggatagcaagagagaccctccaccatatatactattatgacattaactcatcaaacagaaataattacaggacaccccatgaattatatatagatat

SEQ ID NO: 191181 - DNA, 4390 bp, Cannabis indica
tttatttttcattttttttagaatattctttttcaattattcaattatgtaatctaaattaccacatttaaataagagaaaaaaaataatattaaaacactgacaaaaccatttaattaccaaacaaatattaaagatggtagttagctttggattttttttttattttctttcttaacaaagtaaaaaaaaaaattgaataacttttgacaaggacagacaataataaagaaataagttaataattttctttagatgaaaagatgatccaacggctaggattaaaactttcacaaatggaattttcatatatggctgtaacgttagcctttatattcaatttatatataaactctttctcttaaaaccttttaaaaccaaaattcatcaaaaaacgtttcaacctctctttctctctcttctctaatattattattatttatttttaaatattgaaatttccagtcaccggagccgtcgttagaagcttcgagttctcctccgttgatgatttgactttttgactcagtgaagatcaacgatgggacaatgctgtacaaagcaagtcgccgtttccacagtcaacggagaccagtcaaagacttctaatgaagctccgactagttccgttaccggaggaggaggaggaggagcttcttctcactccggtaagaatactccggcttattcttttaccgccagtccttttactagtcctttaccagctggtgttgctccatcgccggcgagaacacctgggaggaagttccgatggcctttaccgcctccttcaccggcgaagccgatcatggcggcgcttcgtcgccggcaggggaagtctccgagacctaaggatggaccgattccggaggaacagaacggagatgaaggggagagagagagagagcttgataagaactttgggtatgggaagaactttggggcaaggtttgagcttgggaaggaggtgggtcgagggcattttggtcatacttgttgggctaagggcaagaaaggtgagcttaaaggtcagcctgttgctgtgaagatcatatccaaagctaaggtaaagattatgattgttagaattatggttctttagattttaaagattttgtttttatttcttttatttggggggatttggggttttagacagatcattgtgattgaaaaaatcttagctattctaggtgggtattaggctctgatgaattagggaatggaaaatcttagtgaaatttgaataaagaatggtgatcacatgattttctcagtatttgaagttttagaagcttcaattatcatggcatttgatgtagttatatatgggaatttcatttataggcattataggcatcagagagattctggaagagctgtcatatatatatatatatatatatatatattgttttggttttatgttgaaaaggagccatttgaggaagacaatagtagcttgagattgaaacagataagaaggaaggaagttttatgattacacttagtctgagagggttaaatctctacattctctgctatagttttctgggactggaattggttgatcatttatgcattactgaactgaagtactacgatttcagctagtaatttatcataagaaagtaatggctttctgcacgagtgatttgtgtatcatgtatcatacttatttagttgtatgctgttatcgtagttgagtctgttcttcagaagcaagcttcttccttggcttaagaattattgacatctttatattctgaaagttaagctagaatgtgttactttctcatgaaaatgtattacaacaagttttagtttaaggctcctagttgctaagcacatattcttttgcagatgacaacggctatatctattgaggatgttcgtagagaggtgaaaatactgaaggcattatcggggcacaaaaatctgatcaaattccatgatgcatttgaggattcgaataatgtctacattgtaatggagtatgtttcccttccctcagtccacttgtttttatgcttattttacgaagcacatagttgcctcccgtttaatagtttcatatgaagttagtaacaatatgttcacttgttaggttatgtgaaggtggagaactacttgatagaattttggcaaggtatagccaatttcttttcattttgctttcgggttctgttaatttggttcaagtcaccattatttatttattttgttaaatttgattctttttatgcagaggtggaagatacacagaagaagatgcaaaaagtattattgtacagattttaagtgtagttgctttttgtcatcttcaaggcgttgtgcaccgtgatctaaagccagaggtacatcactctgaagtttgagttaattatcccatttgcatagtttgattccttacttacacaatctaataagcaacttccttattcattatactcttggacagaattttcttttcacaacaagagatgaagatgccccattgaaagttatcgattttggtctgtctgatttcattaggccaggtacccgcttttgtctattgaactgaccttgtttactgtcttttattagtctcattcaacaaaagaagcacaaatcatttgtttattcctctgaagttcattatcttttttgatcaatcactttgtattcacattctgaagttcttgtcggtttgtagatcaaagactcaatgatatagttggcagtgcatactatgttgctcctgaagtattacatagatcttacagtactgaaggagatttatggagtattggcgtcataacatatatattgctgtgtggaagcagacctttctgggctcgtactgaatcaggcatattccgttcagtattaagagccgatcctaacttcaatgactcaccttggccagaagtgtcaccagaagggaaagattttgtgaaaaggcttctgaacaaggatcacagaaaaagaatgactgctgtgcaagctcttggtaatttaattcaaccactcttcttatcttaatgccattcactcacgcacacttttgatatcactactcttagtttttttctaaagtaacaattatgtttgtgctatttcagctcacccttggttacgagatgaaagtcgtgacttgcctttagatatttcaatctacaagctagttaagtcatatattcgagcaacacctttgaaacgtgcggccttaaaggtaaagttgccttcccccttcatccaattattgcccatttttggcggtctttggccccaaacaaggccaccttttgggcacgatactcattcattttgttgtggattataatgctctacttacagcttttcattttgcttgtgacatttatgtaattacaggcactatcaaaagctatcacagaagatgagctcatctatctccgagcccagtttaggcttttggatccaaaacatggatatgtaacactcgataattttagaacggttagttagatcaatcaccttactgtagttgtttcagtttgtgcttctggtattaaacataaccattcaatttggttcaggctctcacaaaaaatgctactgatgccatgagggaagcaagggtttccgacattttaaatttggtgagaaatcatatgatccaacttcattaagatctcttcccatatgacttcattggttataaaaatacttagcttttctatgattttaaattttagatggaaccactttcttacaagaaaatggacttcgaagagttctgtgccgctgcaatcagtacttatcaactagaagcccttgaaggatgggaaaagattgcaagtacagcattcgagttttttgaaatcgaaggaaaccgttccatctcagtcgaggagttggcccaggtacgtacacacaatcattagttttcacaaatatcttatggctgaagaaaaccgcgaaactaaagagagaaaaccaaaacatttgttgtgcaggagatgagtttgggtccaacagcttatcctttattgaatgattggatcagaacttcagatgggaagcttagcttccttggatatactaaatttttgcatggagtgacactacgaaacgctaattcgagacatcgatagagtttaacttaaagaacaattttcccctactttttttcttatagaattcttttcctcccctcttactgaaagtggtttgtgtattttttttggtttaccatttccttctatggtaaaaggtgaaaattggagtgtctacataaggttaaaaaaaaaaaagaaaagaaattgaaacagttggtattgcatggcaatagcttgtatgaattaatttacatgaacatattttgtttaatttttgtaaaaataatttgtgtactgtaaacaat

SEQ ID NO: 191182 - DNA, 1751 bp, Cannabis indica
agaacattcggaacaagattgcatgatctcctcatttgacatgtttcaccattccaggttgagccacattggatcctaaaccaaccctttaaaaacaattgcatacaaaactattatcttgaaataaaactatataaccaaaatatggaaagttttgaagcttttcattttcacataccatatcttagctgaaatgaaaatgtaactacaaaatttcacaagagaaggcaactatctgataatatgacatacctcgccttcatcagaatccgaatggcgttgaggaaacaccactctcaaatcattatacaagtagaagcgacgttccccatcagggatctctttacaatctggagcagaggagggatcagatttacatctctgcaatgattttgaatttttctttggtaaagggcatacaaagcgggcatgaagtgcataacgcagaacaccagcaccgttagcaggaggcgaagaggccagagtgaccttttggcgcagaaatgtctgttttacaatcattaatataataagaatcttacttgggactgaatgttaataaccataataacagaaacaggcatattaaatgaatacgaaattcaatgtgaaacagactaagcttagaagggactcgaaagtcgaacctcagactctgtgggagcaaaccacaagcctaagaatatgaattacccttcttagataatgtgtgagatacattcagttcaacaaaacaaatatttcagcagcagccataattatgagctagagaatccatttctataacctctagaatggactaaatagcccaaaaacagcttttcattctataaataaagcagtacctttgtaccagctggcatgtcactcaaatcataaggacaaaagaatgtgtgtatgggagtcctttctggattgctcaaaacctgccatagaaatttcggcttataagtgaataacaacaaatgtctggcagtctaactactaaatagatgttaatttcagttgtctacttctccttatggtactacaattattgctaaaccaactctattgtcttgcattgaagacatttacatagatttttcctatttaacactaaaggcaagatccttcaatatgttcctctgaaccagaaacaagaacaatgttgtgttttttttttcatttataattaatgggattgggagttaccaattgtattcgtcctttcatgggaacacgcagttggctctttatcatccccgacctatcaatgctgaggctcctcttcatcttggagcctctagacttgtttgcttcagtacttcctgcaagatctatggaggaataatacagtaagcagttatctccatccacactggttacataaaatggtagtttctgcggttgtggtgagaaagaccctccagtaacattcagaacagcaaggaaaccatcaattgtctgcaataaagaagctttaattaaagaacattcacacaagtgttcattatgaagtaaaaaaaatgaaaactttgaatcacaagtgaagataaaaccgccaaccttgctagctttcccacacaaccaacgaccggataacaaggattcctcaaatgaaccaaccaaggaccttctaacatgaagtccactcagatttctcacttgtttgcaaccttgaggaggagtgaagtcaaaattgtgataacaatctctttccaagttgactcctccagtaaaggggtcaaagttatgtaaaacatcatgtt

SEQ ID NO: 191183 - DNA, 1920 bp, Cannabis indica
tttcattgttttagaaaattcatttaggatgttaaattatagattataatcaaacatacatgttagtaaatctagatcctggtaaaataagttccaatagagggactctcggcttatatggcatccgagaggtaccaagggattcgacacgcctcccaagataaagcattatagatgactgcctcaacatagaggacaaagtgaatctaccctacaaaagaagttatatttaagatttagcccatactattatgaaattgccttttttaatgaattctaattgacgactaatccttgtgttatcctattaaccgcctagaagataggtcttgtgtcatcaaactcctacttcagagtttaccttatgcacacattaaacatctacacctgcaaaaaatgctatgtggagcctataggtaatgggaagatgcaccaatcacctaagaatatcccatttcctttacctataaataaagggaaaaatgtaacgaaaaggggattgggaattttagagaaaaagagagaactctgaaattgtaagagagcatatactctcaagtaataacaatattactcatcaatacaagtgactcgtggactacggttaattaacacctggaccatgtaaaaatactcttttctactcataattaattttcttaaaataagattaagaagttgctaaaaatctcagtcagcacatgatgataggttttccgtcaagaactaaagatacatcccccctacaattatcctattttgatcctcaatagagtgaaatatcacaataaacatctgatgagctagaagggaaacctaatcaattcttttctccttccaaatcctgtgaaagaaactttccataacatggattagagggttagccccaagcacataacagaccaatggagagttccaatacaaaatttcatcttctatatcatcaaactaaatcttgattttctcctttccactcccctcaaagttaatatttgattataaatgcactgccatagattcatcaaaatttagacatgtgcagaaggaataacagacatactcatttttccctctgaggcacgcataaccccaattcaagtggaaattattttcaagactgctgatttctctcgaggagtgtaacttgccaaaatcttctccacctccaacgtaccttcctccacagcgttagcacaatctagttcttcctttggatttaagaattccacggtagtaatctacccatcatttttgccattgattttgttttaagaattaggtcctctgatgaagatcccttcttcttcgagttacttttctgagaacctccatttccattgcctttaatcacactctttctaggtctcctccgtgtggccatagcttcagcagtgctgaaatgattgagccctagcagagaacatacctatgtctcacgtttatcatgtttattaaaagttaaaaaaaatattaaaaaataaaacatacatgtttacaggggtgttcgcggtgcgggttgtgcaggttgtaatattttttcaaactaaactgcatataccatttttgtgatttttcaaatcacaaacgtaccgtgagattttaaaactggaaaaatgtggtgttttgttgtgggatttgagcgttttacactatcatcattatcaaccattataaaaaattcaaaaaccaatataatcaagttttaacaatacaaaaaaaaaatcttattaaaattttaacatcataacatatatactaatcacaaagtcattatattaaatttttttaaaaaaaaaaaataatgtaatatacacatatattacatatatttatcttattatgaaaaaataaataaaaaattatattgtaataattggtaattttgtaatatatagttcggtgtggtttgaatcgcaatta

SEQ ID NO: 191184 - DNA, 2772 bp, Cannabis indica
atgatccctaccttattgaccgcgacttctatttttattattgctttcattgttggcggtatgtgtgaacttgtttttgaatctctactttacgcattaatgacataaacaagcaatgaccttgaaagtccaccaccaccccgtaaattaaagaaattacattttttatatttttttaaaaaaaaaaactaaatttctaagtttaaagaattttttttataattttaccgttttttataaaaataacacaaaaaaataaaaataaattacataaaagtaacataaaaatattttctaaataatatcaaaacaacaaaaaaaaataacatacagataataaaaaatcaacaacaaattaacaataatacaacataaaaaaaaactctattttcggtaaataaaatcaaaaaattataaaaatatttaaaattccgtgaaactatatttttataattttttggttgtttttgtgtctttgtgaaataatttataaatttgggttacttacctaaggtattattttttttgtacaaaaattagagatcagtcccaaaagggaaaagaaaaaaaccaaagtacctcgtttagttgagatctcattgtattaattctaattgatccccatttttcggtaacgggccgttggaactcatcagatttaaaaatcgtaactaactaggattattgagtggctaataacaagagggtaaaacattattaaaaacaaaaaaaatgttgaataatatggcgacgagggagagagatggtgatgaagaactcctcctcgtaccagttggtggagtaggagtaggagtgcctggaaatggaggagcagcctctaagaccttgtcctccccatctccatctctaccaccacctcctccaatttgccatcatcactctggccgtgaggtttgtgtacattgcttaaatgtatattgtgaaagacaaaaaatattgttgttgttcataatgttataacaacattattgatcttttgtttgtaggctttttctaaagtcattcgtagctgggcttcgaagaagtttatgacaggatggtaagctcttttttgtggcaatatcatgttgtggttgtgataatgtagtagaaataggaaatactgaaccttcttggcagtgtcatacttcttccaatggctataacattctatgtaacatggggtttcatccactttgttgatggtttcttctccccaatctatactgaactggggatcaatatttttggtaaaccacattgtctgtatagtttttgttaaattaccatactcgcaatggtttttgacatttcttttcaacctctaaatttctaacctgcaggtctcggatttgttacctctatctccttcatcttcttagttggaattttcatgtcatcctggttgggagcttcggttcttactcttggcgaatggttcattaagaaaatgcctctagtaagctatatttatgctgcctcaaagcaaataagcgcagcaatatcgccaggtaaagattgtaaccacttgccatcggttgccatgttctgaaacttattgaagctcattttgagccctccccccattgtagaccagagctctaatgctttcaaggaagtggctattataaaacatccacgtattggggagtatgcgtttggattcattacttctacagttgttcttcagaggaatgtaggcgaagaagaactctgctgtatttatgtgccatcaaaccacctctatattggagacatatttcttattgattccaatgatgttctgaggcctaatctgtccgtacgagaagggattggtacaaagttttgtagataaaatatttgtaatcctgtatacattgattattaaactcatttatggtctacaatgacaatttggtttttggttttaatgtggcgcagaaattgttatctctgggggtttgtcaataccccaaatattgactacaatggacgcacaagccaccacaagtggaagaagaatcggcaaagctaggagcatcaatagtataatggtgagacttgagtatggtcatggaacagtgggaatgtatttgctatgaaataagttttggtgttcagaaaaagagcgttaacattctgttattaaaaaggacttattttaattcactttggttttctttttctaacaaagaatataaaataataaaggaaaacaaaagtgtattaaattgatgtttcctattaaattgcagtaggaaggcaatgttaagcgaagaaattgctgtgtgaagaattatatagaagaaaatggagtggaaacctcgaatccaagtgagaaggaactttttctacgaacctttctaccctgaatctgtactattttcgtcatctacctaattttaagttgcaatggtctcctcctatacttcgtcctttttggaatacaaaattgaacatgattttcaatttttcaaaaaagaatgatgcattatctcttccttcaaaatttctagtgtaatgaaaattatcaaaactgatagccaaaacttcgtaaagaattttgcatccactaaaataattttctggaaaagctagtttaatccactaattccctaaaatatcatcgattaatccttaaaataattatcattccttttcggcttgtgagaaagtatcacaagcacaaaagaagcccagacaagcagcaaagtgcaaaaacaattttgaaaccctaattccccatataaatataggctaatgttattaccgaaaaaaaaaaaaaaaaaa

SEQ ID NO: 191185 - DNA, 2816 bp, Cannabis indica
ataataataacaataataatgatggtagatagatgcttatttggtacatcagttcaataatggtcagtatccataataattattatgaattatttaactaataattattattattatgagcaaatcctaaattatatttcaacaaattaaataaattacctggtatattgggcttgaagtcgattgtgagctgaagagctactaaattaccattctcagaagtggtagccaacacagctctagagtcaccaacatttgctacaatgagacgttcaccctgaaaaaaatcaaaaccaaattagaatgaaaagaaaaaactataatattttaacttggtatagctctataagtacaaaagtatatttgtggagaaattctttgtaattgttacacatatgattataataaaaaaagtgacggaaaaagttttttttcttacaatttcgtttaagtgtcaattaaacctattaagtgccagtttagaatcacgtaacgatatattaatatgtcgccacgtatttttgagttgacactgaacagctaaaaaaatacgattgcaataaaattgttaaattaaatatttttgtcgctacttttttagattaatataatatgtgtaataattataaatattaaggaattttctccacaaatatcctaagtacaaaaatatatagatccttttatataattaattacctgcttaacaatggtcaaagctgtggtaccacttagaaaggtatcaatttcattgttgtgtttaagctcttggtcaatagctgcataagttttgaagaaggattccttccaagtaccaaaccaatgaagatctctgtcgttttcgatttcgaaattgaggtctagagatgtttgggaaagagtgttttgccaattgcatagtaaagaagagggtaatgattctctaacccttttgctaacaagatgaccccattgaccatgcccatcaaatatcccacaaaacaccatgtcttcttggcaaccaaattcctatatataaattaataagttatattatcaatcttttatttaattttcttgctaaaagaaaaatcaagaaattaattaattatttaattacctcccaaacaacaagacagtcttggttgattcctttctttcctctcttggagaaaatggaagataaattgtctgagttttgagacttaacaatgccagaagaccttgaaattagctcattctttttggcttcctttgacaaagcatttgcagtctcttttccaatgtcatcaccaaaactcttgctgcctttcttcatggtcatgctctttgccaatccatcaaaaatggatggaagaagaaccatgttgatatttatgtatatatatatatataaatatatatattcttgctcctatacatacaattattggtataaaaattaagaacacatatctaatccatttcacttttgtaaatcaaagtcaatccaaacaatcatatgactaaacttgttataaaattagatgtaatattcttatcatcacctacttttgttggtataaaaaatgatcaaataacatcagcccgagtagtcaaatattatgcataaatatacatatgatctgttatataacatgtcttgaaaacaataactatacgattatgtatgaacagttgaacaagtataactataatattctcatactatttatgtatatacctcttatgtcgttttgatcctctgtttaactataacaaagaaagcaagtgtcgttttaggacaatccctttgagggtgagagaattgaaaggcttgttattaatcttccaattttggctatacttctccatttttcatcttcttcttattctcaattctcttctccttatttgcctttcctcaagtttatagctaagcaacatacacttaaggacaacaacaatagtctctgtaatttagttgcctttgtgatattactatattgcccatctacttgcttaaaaagtcaaaattgttaaggggggtatttaggtattttcatatgctgactattgtgttacaaacattacatcatgtgcctcacccactttacttatgcgttttgtttaagatttgaaaaagtatcacattgtatacaaaatttagaagcattataaggatttatcataagcttgatcgatatacttttatatacagggagatattatagaaaaagaaaagtcggttttaaattactatatgctattgggggtgaattggctgtgattaaatatggtatttttgtggatgagaatagagagggattaatgatataatatcttgaaggtttttttttcaataaataaatgagtgtttaatataaagcttcattgagaaagttaagatagaaattagaaataaggtgagtgggaacacatttcagcaaatgacgattaagattttggaaagacattattaaactaatcattatcaaatacaaggacaacaataagccagttgttttttgtgggaccatatggatcaaaaaccacatcacatgattatgaatacgactaattttgcagtcaactaactttatagaaagtatttaacatattaggaaggtggttaatgtttagaaaatatcatattggaatgataacttaggataaatttattcactcttacacaaataattattaccattattatgttcattacaatcaaaatatcagcttctagctttaagtgaaaatttcacaacacttttgcatgttttgaggattatttctatgtagcatgatcagttagaagaatctctttttaacatgaaatttgagtagttttttttttt

SEQ ID NO: 191186 - DNA, 2217 bp, Cannabis indica
ataagatgaaaaagaaaatatataatcaacactaatttagcttaaatatatatggaattcatatattaatagaattgttataaagaactagtggtgcctaataccacctaaagatgacgtcttgtgatttaattatattttataaaattattatattaaattatatgtgacccattacctaattataccaataataatatgacacataggagggtgcttaacactactgacaccttaatatatgagaaatgaaaagcactattagtgtctagtaccctcttcgatgtcataccactattattgtaattaaatatcaggtcccatataacttaaagaaaatagcttttagggaataatatcactaactaatcgtacgacgtcacctatatggaaggtgctgggcaccactgatacccaataacaatgctcattatcattagagcatctctaatggagatgctatgaagaatgcttgaggatatggataaatttttaactattttttaatttgatgtttaccatcgaaatagaaaaaaaatgtcacaaaagaatgtcataccatagcatccttacattttcttcttttttattttttattatattatattattttataataaggtaagaaaatttgtttatttaatttgtttatttaatatatattaaataataatataatattattttaataatttttagagatacttattattagattattttagataaaagtgtaaaaaatgatatgaaagaaataataaaataaaataatatatttttaaatgaatgtggaagtttttgacactctcaaagaatactatcattatacatgcttttaatatatatgtttaatcaaaaactagctaattaattagctactccaaattaattaattccattttccaagcaattgattaagttgaaaacttttgtactattatagcttaggttaataatatgtttgactataaattataggtagtattacatgtcaaattattattaagtactactaatagtacacaatattagtcaaactaagtactaccattcattctcatgaccaccacaacacattctccaatcccatttctttattataaatatattaacttatcaaacttttttcactaattaaattcttaattatgaatttgaattcacatctctcacactctctcttatcttcttcttttctctgtcaaacattgcaaatatattcattcccaatgaagagtagtgttatattggtttttggaataatatgatgatcaactaaaaacaaaaaaaagacaataagagagagagaggccagttagttgactttgactgcactcatacccaaaatttgcttcgaccactatgccaatttcctaattttaacatttttttaataacacaacactttatacacaaatatacatacatacatataataataatattcaagtccttttcatttcaccataaattcacatgacatctctcaagtaatctcaacttgcctttgcctatataagtaccactcctttcccatcttaattaatattctctcttactcatctctcattttctttatttcttcttctttgatatttaattataacacattaattggtgttaattagttgtagtagtaatgggtgttttcaacaactattactctatactcatcatttttctcattatcaagtgtgtcaatggctcaccaacaaaatcatggaccaatgctcatgccactttctatggtggtggtgatgcttccggaaccatgggtaagttatcacaaaccctaaaattatttagtctttctgttaagttctgattctaatgtaggtaatactccattaattattgatcaattatgtttgtatttaattaattataggtggggcatgtggatatgggaacttgtacagccaagggtatgggaccaacacagctgcattgagcacagcactattcaaccaagggttgagttgtggtgcttgctttgagatgaaatgtgttaatgacaaaaagtggtgcttgcctggctcaatcataatcacagctactaatttttgtcctcctaatttggctctaagcaacaccaatggtgggtggtgcaaccctcctttgcatcactttgatcttgctcaacctgttttccaacgcattgctctttacaaatctggaattgttcccgtcaagtatagaaggtactctttctttttt

SEQ ID NO: 191187 - DNA, 1740 bp, Cannabis indica
agtccgagtccgagttcaggtcccggtctgggatctgagtcctagttctggtatgggtttggggcgtttcgggtccgggtccgagtccaagccgtggttggggttgcggtcgagtttattgtgaagaatttataattttatataacctattagtacaaggtgatactaaacataatattgtattaataatactaatacaatacaatataacccaacacaatactaatcaatgcaatacaatacaatatatcggtgtaccaaaagagcccaagtgtttaacatgcactattttgtttagaggaagtagtgttcaacatgcacctttaaaatagtgttttaagtgaatattcatttgggttttaatcttgaacattaaacacaaataagaaaatggacatctaccatcttcatgtgaatcagtccttattagctgcacattaatagtaggtcttaagcttcttttgaatagggactagaaatagttcctctcattttttcacagtttttctattctttatttgatttcattttttctaggctggttgatgaaaaacgtcgcaattaagagttattgtagaagtaaaagtcttatattgaagaaattttgttttgcaatttttcttctgacgaataatactaacattgatcagcagactaagaccttacagcattggtattgaagataacatacagacttgcaggtaaggtattttataataataataataatttttatggttttttttttaatactgagagggaagaaactacacacaccgttggggacaactagctaaggctattgtgatggatcattgtgttttgaatggcttatatgtcttgacatctgtggccaagccttgaatagatccggcagcagcgacaatggacacaatcaaacaggcaccgctcaagatcttgagcatattccatctgaatgaatactttggtatttttgactgaacaatatgcatttcaatggggaagtaaacagtcaacggccaaaacgatgctgctccaaggagacccaagaagtcgttgaagaaagggaatatcatagctactaatgtcgtcactacaacgtatgcggttctccacaccaacttgaaggggctcaaatagtagacaccatggaatggaatgttcatggcatactcacgcgatatgaacttgttttctggccagcgtttattgcagaatccttctacgagtccgtatatgggctgacagaacacctggaaatgataataaaattaataaagttgggaaatcacattctgatgatgatgttgttgttgttgtttttatcataagaaattatgcataagagaaactaatatatgtgattcacacaattttacctgataggcaccaataagatgaatggcaatgcaaacgttggccaaatcgatcaaccaaaatggttcatagaacccaaatccagtgaggaaatttcctggtgcgttatttccaaatgctgcataaccaacacaaccgcatagaatatagaaagtcgttgtagtcataattccagcaaaagttgcctttttcatactcctgttttctggtgggcttgatctcaacgtgtcctgtaatttgcacacacataatgataagattcaacttatattttactatttgggttgggcttcaagcctgaataacccaattcgtaattcgtattgggtcatatatatacttgttagatatataaaagtgtatttattttatgttatttgt

SEQ ID NO: 191188 - DNA, 2557 bp, Cannabis indica
atccattgttgaaaattctcttttggaggttaaataatttacttggttctttcctcttgaagaatcttttgatacctaggaaaccctttcttgcaagctgaaacctgcacacataataaggtagacttaatattaatattataattcaaagaacaaatttaaagcaagtagaatatgaggccattttctcaagtaaacaagtacgaaagtcatgtgtatatttatatgtatatggaaatgagttttttcaaagtcaaacagtatcgaaggctggcttataattacattcccaataaatttttctaataatgaaaattatatgtagaaaaccaccgttgagggaaaaaaataatatatataaggtatgatcagaataaaagcaataaaagtaaaaaaaaaaaaaaaggtaggagaaaacaatatattttggaagattctcgtttaattattttttaatgaaaaaagattactatagactcaacaatacaactattcaaataactaggcatagtcaaacaatacagctccaacaacaagttgcccatctctgactctgatcacagattcctctaatttaatttcatttatttttatattgacaatagactaacccattaattaataataagaaatatttatagcctaacttaacaaaaatgaattgttgtctctaaacccaactgccaattgttaaaccacaataattatagttatttatttttcagttgaatttcaagaacatagattcaaccctttcatattcagcttaaaaaaaattaaatcatttacactaaactttcttcccaagcaagtaaaattgaaagcaaggaagaaagaaaacaattaagaaaaaaaattaagaaagatagaactactcacagcttcaatgtcgattttgtaaactaaaagctttcgtctttctctgcagctagttctataagccacaataatatgacccacagccaaaatcagtgagcataagaaaagggctatttcagctactctcatattgatatacccttcttgatcaacactcgaaaccccaaatacataagaagcttttaacgaaacaaacacaagagaaagcagagaacacactgttgtaatccccaaatatggtcctctcgataactttggtccatcacagaagctataaacacctacacacaaatacaaatacaaatacaaaagctaattattaattgattgattaataattattttctttctttaaaataaaataattgtatcaataaattagtactactacttacagatgattacggctgatctgacaatggaaatgattggaatatcaatgagagagtatcgaaaatcgtagtttctgaaatgaaaagagagagtttcgagcggagaataagaggtgggaatgggattagcagtatcatcatgaaacgacgccgtatggtgtggagaaagcgaggcagagagaatcgccgaagggagtaaggtatcggcaataacaagaagaacaggagccgagaataagagaagagaaatcaacatagtgattaagaaaaacactgtctttattattcgcaacactcttttagatttctcttcttttaaaaaacccatctttctctgtttttcttttctttccttttttttttttctctgaggaaaatttgaaactaagggtgtatatgtacaagagaaagggtttaaaagatttgaatattaataaattccaaaaatagagggcttaaatgagaagaatagaagaggaaatgggcatgaaatggaaggtgcaatgttttgactggacttgtagtctatatacatagtgatggccgaagccaaagattggaactttatttacacgcgcaagttactcgtcaaatattaaagtctttttttcgtataaaaagccaacggcaatacctaaacgccttaaaacgacaaatttttataacgtattgctgtactttatttattgagagataatcgagtgtgactgaggtcatccatgaagccaccaaaacatttggttatttacattctgactttgacatgtgtcatgactcatcggctgaggttgcataaataagagtttttttttttttaaaaaaaacatgtaataaatttctagaaaaaaaaatagtacaatatctttgatattttaatttgctatgctctgggtctgggaaattccttaactatttcgcaagtgctgttaattttagttgatgtattgttttggctgatttttttttattattattattaaccaaatctttcatgttactagttcttccccctttaaaaaaattgtaactatattatataagtagatacgcaattacattctttttttaattttatatattatatctagtcaataaaattcagtcaagtcaatacatattttaaactcaattcccccaaattttcaaattagcaaatttgctctataattgagttttacccatatattattggatatgcattcaaatactctaaaaaaataaaattcacaattatttatgtatttttttagtttttataaaaaggaaatcccaatataaggggtaag

SEQ ID NO: 191189 - DNA, 5914 bp, Cannabis indica
ctgtgatattttccaagagtgctgtgataatccataacttaaaagcggacaccaccacgaaacgaacgagcaaaagacaccaaattcctcggcttctcttctagaatatacacttagatacctatgaaacagttagcatcaccccttataatacctatttctcaagggctgagaataggatcaccaacactgttaattctctattttctcatccagacttccccttgggctgtcaagtggatctcctatataagacccatctggctgtcgaatgcatatgttcaaattgcttgaaataaaaggttcctggagagtcaaaagatagagaaagtgtcaaacaagttatccacttactgctatttttcaaaggaagataattttctcatttcccataatatgattatgatcccaagcagggttgtaaatggaatttgatgccaggtccttagattctactccaagacacatttactaacttagctacttgacatctctcttttcgagaaatatcactcctatcgagctacttatgaattgaaaagctcaaaagcatttataaattgtagaacaggtctggaaaatatgacaacaaatccagaccaacttatgagtaaaaattgaaatgctttttgtaaatggtaaaataggagtacaacacaagcattatagggaatattggtcttcggtgaagatggaaatatacaagctcagcaattaaaacatatacaaaaataagagttcagcaagtcaaacatattacctgatcaccagtctcttgaccttccgagtggaagacaattgggcgacatcgcttgtcttcattcattagacttgaattttggaagtgtgttacaagggcagccttaccctggattcgtgcatatgccaatgaagcaactttctcgctattaaacttctcccatttcttcccattaaatgcctgtaataatagtttagttagcaaagtgaaaaacgccaagtaatttataattatttgagcagttggatagtaggaactaatttattgctatgagcctagcatttttattttaacagatgagatggtaaggggacaaaagataaccttatagaagggtataatgtgagcaggagacaccatattgatgaacgcataacccacattgcacttattctgttacaaggagagaaaccatcaacaactatctaatgaaaagggttcataaaagagaactttactccaacaagccttaatctctcaagttctaggagccaaatactcagtagttaaggtaattagaatgaaaagtatcaaaagtctgaataccttgaaatcaattggtaagtataagaagtcataagtgcccctgtgaaattcatcaatagcagccagcaacatctttgaagtgtatctaataaagaaagaaaaagggtgaagcattaagtcaaggccttcaaatgaaaaactaacaagcaaatgtatcaaaaagaaaaaagtgagagaggaagaagttttttttacttgttggggatgtttttaatcattaaagtagtcctggcatcctccccgttgacaattttgtctaagtcaagctggtactgctttttgttatccaaattcccattttcaacacgccgactccgacttcgttcaactaatccctcaccattgttcgatggagatcctacataagaaccattcccaatgaaaactgaagaaggctttggcaaagacagcaatctgaagttaggtgaaccggtttcagtaatatttcctggaagaccaacaccagcactcaaggctgtacgaccaccaacattcaccatataattcccattattacggtttaaaccaacacctccaaatccaactggattcatgaaagatgattctggagactcagggaagaagccaaagtgcctttcgaaaggaacaccagatggagctgatcccacgtgatggtgagatgatccaattaaagagccatgccggctagtgtatggaaacccctgtgcctgtgcctgcccattggacgagaactggcgactcccagatgatatagaccaagcagaagaacttgaacgctcagaataaggggttggactaccccagagaaattgaggacctgacaatgttccaataccaggtggatttgattttgattcaccaaaggaaatgggaccagggctagtgctcagtttttgatcactaaaagaatgtgactgctgataggctgctccttgagatgacccgccattgttatatatctgatttgtctggttaaaccttccctggtccttgccaattggtgcaatctttggagagttagatatgtgaggcgggagaattgaagctaacccagtcaagtggttgctacctacagggctgagacttcctataccaggagacttactaaaagcctgcatgggattatgttctactgaactgccgaattgccagttacctgttttgccagagaagccatttcagcttatatcttgccatacatctgagatataactcaggtagcccaaaagaagttcagagatcaactaagagtatgaatgggtatctacctggaggagagctggctattggtgaaccaacttgaggtcggaaacttctagcttcatcttgttcaagctcttgagtcagttgttgcattaagctaagtgaaagaaagaattcagtaagcgattttaaccccttaatcaacaaaagcttatgaccaagaatataggttttgattccataaacaatatattggagccaaagtcatatgccactgacagagacaaatagattagaagggaaccgagaacccagaagtcgtatcaccaaaaaagcacctaagctaaatcatacagcttaagggatctcaactcttttttttcccccattattcacagtcctagtcttgcacaaacatattatgacaagtattgatttctcacagtattaagcattccattggaaaaatatggaaatgacatttaaatatttataacctattaaccttgtaaacaattcaggaagaaaatcatcccactgctctaatttggtgaaaagatcaaagcattttaattccaatactgcatagaattagaagccattctcaagtatgcacctaatgaatatatatgataaaactcgtaaacatttgaaaatctgaatatctaagaaagtaagggagatgacccagtaaaagagagcaaacttactttcgacgagctccaccagggcggcttggttcaagttttatgcgtttcccagctatgtcactcctatttaatgctctgagagccgcatcagcagctcgaacatcataaaattctatgaacttgtggtgtctcttgtgcggtgtttctctaatctgcgaacaaaaatgagaattcataaccaaaggaaaattcctaaaacataagtataacaaggaaaaagacatgcaaatgggtgaaccctgaaacaatgatatccatacctctttgacctccccataagccccaaatatttgacgaagctcatcatttgatactgatgcatccaaattaaatactacaagagttccttggttaatatccttttcagatgggttgtcctggaattttaggagaaaaatatgtattatatggttgctcatataactctcaaacatgtcatatgagaggggttaaaaacaaccttgggaattaaaaatgaatgtcaagttttctacgcctcaagggtttgttctgcaacgcacgcattgctgtacgagcagctcggatatcatagtaagatatcatcacaaaacctctatgcttgcacgcggtgtacaaagttcggatatctccatattgctatcaaaatgacatgaataccataatcataagcagtaaagtaaatgtaatgaataagattacaaaagaactatgataattttagtaagaaaaatgctaaatacctcaaaaagggttttcaattctgaatcctcaacattactattaatatttcgaacaaacaaggttcttgatggatgctctccataaggatgctccccagccacagtccccacgccattcggaagtggataatgattaataccatttgaagaaaccccatcactgatgctcatcttagatatacctatacttagaccatcttgtgattcaaaatccatctccattcctcctccactgccaaaaagatcatagtcttccatatcctcaagctgattaggcaacccactaaggtcaaaatcatcagtcaatccagctaaaagatcatcttcatcgtcaggaaggatgcttccaatttcaattggttctatatcttcaagaggatcattactccactttgctcgctcaattttgtttaaattaggcaatccatcatcaattgatttaccaccatttcctaaatcagtgaaattcactgcatacagaaaataacaagaaagaaaaagcaaaaactaaagaacaattccaaaagataggaaatcaaaatatcatgaaggggaaattaacaggtgcagagtgcaaacacatacacttctcatggggaagaacaggcaatgagctagaaaacaagctggcatcatttgttgcatgatatgcatcagttttaccacgcatcaccccccaaaatttgcttcccatgtttctagaaaagttaagtggtggaatctcagaaggtcctgcagaaaaatcatgaacatgaatttaagtaactacatttgtgtcatcctttgtaacagttaaagaaaatgaaagaacaaaaaaagcacctcttatttgaccagatatagaatcctcagaatgcttctccatattgaagtttcaactttctgcccaggaaagatcattacaaaactttgagataaacagaaagattgctagcactaccaaaaataacatacacagaatgtgaaaaccttgttattaagttaatcataaatcagatcaatcaaaaatgtcttccacaaaattaaccatcattagcttgtaaagacacatgcttttagagcagataaagaaaaaatcagctttttttcgtaaaagataaacaaaagcagagtaatcaataatgcagaaaattaaagcacaaaacagcaacaacatgtgtgtgtgtgactgtgtgcttataaattctagtacaaaacatctactaaagtgtacaacaaatatcaacgccgacagacgattgattccattgacaaaatctctactcaagcaaaatcatgcaaaacccacttgattgatcaaacaaaatcatcagaagaaatgaagaggaaatgcaccaaaaaagtttcaagtcaagtcaacactgtcctgccttcaattttagctttgctatcttccagaacaagaagaaaaatcatcactttcagcatacccagataacaaaaagccgaaatcatttcaaattaacatatttcccctagaaattaatagacacaaacatgcaacccccaaaaaaaaaatacatatgcccaaaaataaaaaaagaagatcaagcccagatgcaaaacaaaaaaacaaatcaaacccaaacttgaattacttcatagtaattgagagagagagaaagagagagtacctgatgaaaaataataaatatgagagagaaaagagagagagagtaattaaaaagagttcatttccaatgggtattgtaaataaaagaaaaaagggtatagagagggagagtgtttcgtagaagcagaggaatttctttcttccactcttctacttcctcctctgtcgccggaaaactagaagtgaaagacaaagaaactgtaaaagaaactccctttaattattattattacttttaaattaaaataattaaataatttaagattatgagaatgaaaaaggaggaaaatgattggagttttaggaagtagtaggagtagtactattccctatatatatatactaactctaccaaatt

SEQ ID NO: 191190 - DNA, 1913 bp, Cannabis indica
tctttgtttggtcaggtggttcaagagtgtaggggtttattagattttttgaagtctgctaatttaatttttgttaaacgttatgtaaacaagataactcactgtgttactcacaactcttgtatctattcagatcgtattatcaataaaagctctgctcctattaatgttttatcaattattatgattaaagctaattgattaataaaattgtcattttttttctttaaaatcattaagtaaatattagttaataaaaaaagaaacaaaacattaaatatttaaataattttttatatataataatcccagtaaatataaatttaaaacgaaattaaggagagtagtacaaaatagtataagaataagaaaaggcgaagacagagagagggagagaagagaaagagaaggaaggagaagaaaatgtcgctggtgtggttagaagccgttctgccgctgggaatcatagcaggaatgctttgtgtcatgggaaatgctcagtattacatccacaaagctgcacatggcagagtaacctatccaaccttcttcttctttttttcccctcaattagggtttagatccagactttcttccttgcccatttaattttgttggtccattcagcatgtgcaattttcttctaataattttatctgtttatttttaatttattttatgtgcagccgaagcacatcggcaacgacatgtgggacgttgccatggaaagaagggacaagaagctcgttgagaagttgtatgctgccgatgctcctcaataagagatctcttcttttccggtactctccttttcgaataattatgaattttcttgatgtgtgcaaaaattactttgaaattgttgatggcaagtattttcttaataaatatagtattttgacgagagggatatctatgcaaaaacaccttgattattctatcaacacaatgaaatgtcggattcttttctactattggaaacgtgtgattggactcctaatgcttctgaccaagttacatgaaatagcttgattggtttgtaaagtacaattatgtcgtttaccaattatatcgaaatcccgagaggggattccttagtaaaagagaggtctgctaatgcttaattatggcaataatttcaagactgccttcctatactcttacacatgcacaaacctatacctagatcaatgtaatcaaaactctgcatacaagatattttagaaaacacaatgtataatttacaagaattatagaagtcacttgttaatttattttccaggctactgattagctctgtgtttctcaatggagattgtagggaagttgcaaacagtaatagctacataatttttttactcatcatatgcttaagagttaagacccaattccaacaacaacctactttattcgtcttcttcttaataatttttcttcattagtatagttttttctcaattggtcattgatccacattattattattgatttttgctgcaatgaaacttttaaataacttaaaatcattttaattcctggctcagactcaattccaactaaaagaccatcaattttttttactttaatcttgcaacaagatctatgctattactatgcaagagccagtcttttggtctctgcaaaataggtacactgttcgaaaagttgatgcagaaggctttctttctttcttttttattaaatgagatgtagatgacttaaagaataaaattctaaacagaaattagattgacaaatcaactagtcgattcctgaaaaaagatatcattgttcatcaactcaaagcattcactgccattatcatttgctcatctctagttttaattagtcattgttcatcttcattcacctctctgtgctttggtcgcaaagaacttgacctcaagttcaaa

SEQ ID NO: 191191 - DNA, 2097 bp, Cannabis indica
tttttttttttaaatttacattactagagttacattgttgaatcagatctcatgacttgcacacatacatacctcaatactctctatatggcgatttgaggtaacctcaaatgatttaattaggtgtggcggtcaagacaagttttcgtttttcattctttctttcttgttgtgaaattgaatcaacttttgcttcttaattttttcccaattaattattatatttagatcaatggttgtaaatacatgcctatatgagttttcttattctattcaatcattctgcaatttcgcatcacaattgctacataaccatagtataaaaaatggtcgtaccaaatcaaaaaaccctgtaacccaatacaatatttacctgttaattctcagaaaattggtgagattttagctcttgctattatttgatagatattataagctagtttgtatggccatctagtcaattcaaatcataagaaccaaatatattttttaggctaattaagagttttacttcgtaaactttaacatgtactaagtcatatttcttcaacttttctaatcgttaaaaaattccctgaattattgaaattattagatttaaggacttttgtctaattttagtatttatcaaagtttgaaggacataatttggtatatatcaaagtttaagaagcataatttagtacatggacaatcaccaaagtagtaatattgaatgaaatttgacaaaagttcttaaatttaacaatctcaatagttcagagaaaatttttaatggccaaaaaaatttaagtaacatgatttagtacatgttaaagtttatagatctcaaaaatggtgttcattactaatgacttaccagaataaaacataacaaaaggatttaaaatcatataatgctctaatcaaacaatcaagagagtttgtttctttgttgtattagtatttgcataatcaatttgctgcctggtttctacacatatagatacatatcatcaacaagaaaattatgaatatataaaggtgtttgctaaaactagatgtgggaatataattgagttgatcaaattttcctaatcttgacataagtaataacaacacaacataacataacatacagtatataataagttgcagttaaaggtcatctacattgaatccaccaccccatgatggaaatggctgtaactcaagcacacccccatttgtggaccagctgatcaattcctgcagaaacaaacaacaaaacaatggaatgttaaagtttttgctttgttatggttctcaattcaaagacatatgttgttgttgttgtggttgtttgataatttacctcaggactaggaaagtatacatcattagtagtactgtccattgggactgagttgtcatagaattcattgtcttctggctttgtattgtccttaacaaactcagtttcagtctctgcttctggctccatattgttgggtggtgctgaaacagattgttttcttttggaacgagctctcctgttctgaaaccaattgtagacattggtttcagaaatttggccatgttgggtgagttctgaagtaatctctttgatcttctgtttggttggagtaccattaccttcatcgaaaatccgctcaagtatttgaagctgtaaaggggttggagaccacctctgccttgatgtgatcttatgcccagcataagccataagaggatcacagtgaaaagctcccaatttcatgcctaaacataataaacaaagagaaatagaacacaactttaaggcctaaaacagaaaacccctaaaaaccctactcttcattgttagagttaaccatgtaaacaaaagtaaactttcccatagaaacaattgagattagaaattgcaaaccagaaaaatcatggtgggtagagatggccttatgcatctcagcaagcttttcacagatggtggcgtagacagagatctgcctccttaaaagctccatttgttcatcagtcataaccttcacgaacaacccatttgaccctgtcaccatttcttctttggaactctcattctccatttgttttcacactgctcactactctacaactact

SEQ ID NO: 191192 - DNA, 2128 bp, Cannabis indica
tatgtgaattatatttcattcgttggattgttttttttcttttggataaagtcaatttaaaagatgagccacaatattaattatactgtaattattcaggtgaagtatttatattttcacttgggaacacacaaatattatacgtgaatgaggcagatatggtgagggagatcaccacatgcacatccttggacttagggaagccattgtatcaagccaaggagcgaggtgctctgctcggtcagggaattctcacttcaaacggtgccgtttgggcccaccagagaaaagtccttgctcctcaactttacatggacaaagtcaaagtacgtaataattaattaattaattaaaaattgattattatttatatataagtaataataattataattaattaacgacgtcagggaatggtgagtttgattacggaatgtgccacgtgtcttgtggacacgtggaagaatatagttggaggaagtagtgcggaaataaagattgattggtacatgagaaggttctctggagatgttatatcgaaagcctgctttggaagcaattatggtaaaggagaagagatttttcaaaagcttcgatccatccaagagtccttgtccaagaaaatgttcttaactggtgttcctggcatgaggtatatacatatataaaatataaaatataaaatataaatatattatagctatataggtctccgtctttggcctgtaaacaacaattttatatatctattttaacattattatagtttcacaaaccaaggcaacaatttattgttcaaggggataaaaggtaaattagaaaaaatgggttcttacaccatgtattaaaatttttaatttttttttcttttttattgtgtggcagaatttttttaaaaaatactatatattttttattctgtgtattaagtttttactgctgttttacggttgtaaaaaaaaggtgtggcagtaaaattgtaaattttatttgaaatacaatatttttgtaaattaataaataagttgattattgagaatataaaattacaaatatttttaagtaagggtgtcacttttagatattgttagagaaaactttttatttttaacatttaaaagaataagtcatcaaactattttacacttaaaagaaatgttagatatttttctcaaaaaaaaaaaaaaaagaaatgttagatatatatctatcattattattattttattatttttgtaatgtgatacacataattatttgtgattaaacataatgttaaaaaaattattatttgtgattaaatataatatttaaatatctttaatcacaataaattataatttttacaattcatatatttataaattttttcatcacaacataaaaaaaattataatttataattagttatatttttgcatttcagttacaaattttattatgaataaaaaaaaaaaaattagagtgagggttggcatattataaatttataatataaacttctaactttttgctgaaactatatatttttactttactcgatgactctaaatagatatgatctattttcggccttattagttagcactgatttattttttccttttaaaaatgtgtagaaaagttttttaattaactaattgatccatatactttgattgagtgtttttacctaattaaaaattgattaaatttaaatactacaattttttttgtgggagtgttaaaatgttgagctttcattatcgaaataattttaaaaaatgaaataaaaatatatttgaacttaatatttaattgtggatgatgacagatatgtaccaacaaagagtaacagagaagtgtggggtttagaggcagaggtgggaagactgataattgaagtagtgaaaggagagaaagaaagttgggttatttgggtacgagaaagatttgcttcaaatggttatggaaggagcagagaatagtaataaggaggttattggggaaggagaagaggccagagagcgtttcatagtagataattgtaagaacatttacttggctggctacgaaaccactgctgtttctgccacgtggtgtctcatgctcttggctgccaatcaagattggcaacatcgtgttcgac

SEQ ID NO: 191193 - DNA, 1874 bp, Cannabis indica
agagaggacgccacgaaattcaccaaaaagtgagacaatgtcagaggcatgcgaattacagtcgacgtccgccgctgaacttttgggcatggtcaaccctggcctttcgtagtgtgggggatagatctaatagaagccttacccacgggaaggaccggggcaaagtacgatattgtggcgatggactactacaccaagtgtgtagaagccaagcctctagtgcacatagcagccaaacaatttgtttcctttatcaataggttcatcatttgtcggtttgggtcccccataagatcatcaccgataatgggactcaatttggtgacttgctaggagaatactgcaatgagaggggaatacgtagaggatttttggctgtggtacaccctcaggccaatggttaggtggaggccaccaacaaggtgatcaagaaataccttaagacctggctggaaaagctcaagggagcatgggtggaggagctcccaaatgtattgtgggcttacagaaccaccccctgtacaactactggagaaaccccatttgccttagcttatgggtgcgaagctgtactacccatcaagatgcaggtaagctcccaccgagtgaaaaactttgaagaagcacggaacgaggaggtgatggtaggtaacttagacctattagaagaaaagagagaagaagcgcaaatgagggtcgtagtgtaccagtaaagggcggcccgatactacaactcaagggtgcgactttgtgcctttcgagttggggacttagtattgaggaaagaacttccaaacaccagggatcccacaacaggtgtactggggaaaattgggaggggccttaccgcatcgcccaagtagttcctccttaaacgtacaagttggcttgcatggatgacacagtagtgccttgagcgtggaatgttgaacacctgaagaggtactaccagtagaaggctctagttttcagtcaagaaggagagtgactaccctctagaaggaagtaagaagtttttttttatttatttaggtggctagtgtacaatcaaagaggacatttgaaatgtccaccatttcgatgtaacttaagcacgatgtaattcaaaagctttattgcaatgtatgatatgatgagtttggttaagataattgtgcagaccatttaaacaaatgagtaacacaactcaaggatctactaacatcaatgtcagcacacccttgggggagataagagtaaaacacttcaaaaaaaaaaacacagaatataggccaaaggttcttccttaggattatggggattagctacccctaacaatccgagaaaagaaagagcctagtaaaggcatgtcacgtactctctaaagtacaaacatacgtaaaaggtcgagttggttcacagaaccatcatctcccttaaaaataataaaaacacgcaagaggtcgagtcggttcatggaaccatcatctccctcatgaacaacaaaacaaagagaagaaaaaccacacagtaaagttaaaaagccaaaagtagtgagataataaccaagaacaacgagtaaagtaagagccgctagcaggaggatacccgccgcccccccccccctcccgcgacctcaccccccgtaaggcagcggtgaaaataaataagttacgtacagtcatccaaaattataacaaacacacatactaatatagctagagggtgtcaacaacaaaatatatggtagtgggaaagaggagatcaactcaacaaccgcccccaaggccggttgaagtaggttctccatttagcaacccactgaactgcttcaagaccgaaagagttgaaatcagtgttaggattggtacaccaaacattgtacagagttgtcg

SEQ ID NO: 191194 - DNA, 1449 bp, Cannabis indica
agaaatgattttcaatagatagaagaaagaggcctcatgccatacataaagtggttgatgatcaacttttttcttcttctcatttgtatcaatttgtcgttttcctattatttaatttcatcattaacaatgtatattaataatatttacatttatggatatatagtttggtggcaggcattctcataatttgtactattaattctcttatttatttttatgtccattatgaatgatttcccttaatattctcttttcctattgagttttccaccattaggaatcactcttgagtgttttaattttatattttttttgtaataatatgataattaaagaatatttaaataatttgtaaatataaatattattgataattaatagaaaggataagaaagataactctttctctttgggcgtttttggactataatcaaccttaaatgttaaatttgcattatttggatgatttggattggcgatggtaccaaagaatattaatggaggtgatgtaagaatattttgtctttaagcccctatatcgataagtttgttctgaaaattggttagataaactaaagttgaaagctgtatggtgatgaaagtggccatgaaaacacatatatgaatcatcatcatcaagtcctatcaatatatcttaatcaaattggaattgataagctgcactcggaagagtccacataaatcactatcaattgccactaaagaaggttccacttccaccaccaattttcgattaatttgttaatattgaaaatatctcctatcacgtcggactatttcatatatatttattagttcacacataactaataatacacattatcctcttgggtttaatctatattgaattttgtatggaggcataatctagtttggttcactatagtgtactctaataatgataatatttacacataaaagtgtcacaacaacaatcataaagtgtgattggacaaaaacatgtgagatgttagtgcacttcacaatgacctcaaaggacaaacaaagccactttacttgtatatatcgaggaagcaaatgagaaacatgtgacgcgtttttacgtatagacatatacaaagtctagccaagatttagtttggctacatacttcatgagtagaagtttttattatttaagaataatttttaatttgttataaaaaaattaaattctaacttaaagtaattataaataaaaataagatctaaattataattagttggtgactacttaataattatgtaactataatagttatactaatttattttttttaaattaaattagtatttagtaccccgattttcttttgggagcattactgtttttttttttctattctttatttctttctatgtccacatcatatagttgagacctcgtctaacttttttttttttaggtttttcgaactacacaggg

SEQ ID NO: 191195 - DNA, 1804 bp, Cannabis indica
atgatgtaaaaatttgtaagtattggaaagatgctgtatgagatagttgagcggtggcaaattggtgtccatgagatacggcagcagaagatgacaggtgtgaggaaacaaacgtagctggtgtagcctagccgcctctaattcatttctttcatgtccttgaatttttttctctctcccaaaattctttcttctttcgcttttacaattttccatgtgtatcatatctaccctttgacttgttacccatccatttcctttaattttactccatttctataaaaaatcaaatttttatattgcacagtgtaccaactagtaagggcattgactgacttcccctgccttatatcattccatattagctttcattctgttttgggcactctgagtttttcctttctttcttttttttagagagagacggatctgtgaccgcatcactgaccaggcctcctccaccaaaccaactacataaacattaaaacagaccaagcattacgcactggacccttttcactttcacacttttgcttcctaattcttcaaggttaaggttgtactctctatttattactgcccaattttgtttatctgaatttcagattgaaagaatagtttttttcgatcttatgttgtgttttcttacttgggttctcttatctctctttctttcaatccattttttgtcttacctttttctggtgacagttgcaggtgttatcgtgacatttggtttctaacaactattggattgattacaaaattgggcttttaaagcatggtaaaggagatggtgttgggttgaaaatgcgagacgtggttggttatgatggaaaccatcagttattgtccaatcagaggttgtcttcaacaggagaatcaacttctaatgatatgtcttctaataagggtgtgtcgcagtggcttaacaatgataggaatcaaaagcattctgctgatgttttagataggtaatgctctttttttttcacaagctttttcttttatgttcatacctgggcttgagttgttggatttttagaagccttaacaaaaagagatatgaaagctttccaggggtttataacaacacacagacatatattttaggcagtcaaaatggagaaagaactggggtactgctgtgtagaaatttatgagttcaaatgcacctaaactagcataaataaactaaatctcgttttcgatgcacgtactaattatttttggtgttctttaagtcttctgtagcgtttggttgggaggaattgggaggaatgaaaatataagaatgggaatgagaatcgtaataggaatgaaatggaataaatttaaaatgtataaaaaaatataaaaaattattatttttttctcattatatattagaatggtgtttccttctattttaaaatggaatagtcattccactaaaatagtgaaaatactttaatatgcaactgaacaaatgaatggaatgaaagattgttttcattctatttcattacctccaaccaacgccacctaagtgctcattcgtgttcttcttctgtaggcataaatccgaagcacaatttgcaccaaagaatttaaaaggagatggaaactttggtcatcttcagaatcagagcagagaagcaatggtatgtgtcctttcagtttaaacatactgtggacggtattgttcttttacactgacaaagttttgtaattaggaaatgtattcacgagttagtaaacaggaagaggagatccgatttcttcgtgaacaaattgctgttgcgtctgtgaaggtatgaacttt

SEQ ID NO: 191196 - DNA, 1579 bp, Cannabis indica
aatttaatccctacaaatatcaatcattggtctatatatacatgtatataaacatattgaaatatcaggtacgtcccctataactataagcaagtctaaagacctagctaattatataaaactggagttaattagttaatgacaacccaataattaataacttaaagtttaaaagtacttagttgaaaaaaaaaaaaaacctagtactttcttcttctattattattattattattaaatggttcttcttttataattaatagactatagtcagcaaggtttcaattatatttattgaattttttggtagggccggggtatgcttttgctttcaccggtagcggcgtgttctttttgtatatctttttcatactggaaaaattataatttatataaatatatatatatattattagagatggttattataggtcattattgaaaaagggaagctataaagtatcccaatatatggttttttatttaaggaaataagcaaagagtttggtgaaacacagaagtgggttttataaccctatggtcagttattttataataatcgacaaaataactgcacgtcctagtagcagagtatcttagggttatatttaggcaaagtcgaacaaatataaataagcttatggaccaaaagaaaaagattgcccctcgaagtcaatgatagatgacaataatgtggcaaaaactttggttgatatcaactttttaggagttagatgtcgtacgacaattgggttagattatgaaaattgaaaaaagatcagccttacactgaaaaataaaatttggaataatataaagttaagaatttatttatttgtattttgatttgtattttttaattaattcagatgtagctctaacaatttttgtttaccttataactagctagggcagttttgaagttcgggaagatttctaaaaggattgcttgataatcactaggaattaaggatttcaagagtaaaatgacgcacgacatcatatatctttttattaacacaaaaattcgttaacaataatgaaactttttaaataaaactaaaaaattaattaatataaatttttacatgattttgtagtttaaatctacatactccacgagtcagtattatttctaattattctttatagtgtccctaaatacaaggtaatatttatgagtatttcctatacttaatcttcgaaagtccttttttccaacaaaaaaaaaaatcataccctcttcataggttctgtccctatttatagaattcttacaaatgacagttattctcttttgattttatcttgatattgtttatgaaacatggacaaaccccacgtttcatatttacaacatgtgagataaaagaattaaccgttaataacctctttttatccttatcaaaaagtagttcttttgtcgagatactagagtaaaaatatgcctcgcgttcttcaataatgttgggaatgactgggtgcattctacgagatgctagctgaggtactttcctcgctcttgccgcctaagacaaatcttgagcattcgagatgggtcaatcctctcgcgtctatg

SEQ ID NO: 191197 - DNA, 2756 bp, Cannabis indica
gttgtttttaacatacgaagcatttgtataacaaagagtataaaagacagcaacctcacctcccaaaacatgatgcccaatgaagcgctgttcttccacgagcatctctgaaattgggactgacaccagcagcaattatgggaccgatagcccattgataaccaagagcagctgctaaatgaatgactcctaggccttcatcgtcgaatacattaggccctttaccttcttcgtgaattttgaaaactagccattgataaagtctatccttgagcaaattttgaatcaagatatcaatcgacgtcaagtggctagttttgattcttgtcaaaggtacattatctataatcttacacttgtcacaatcaagtgaacaatttaatgacttcctctctgggcctatatttaacaattttcctagccgtatctgtaaccgtaattcatcatctggtgctctattgtcagcaatgacctgaggtttctcccgatattcaaactccctcacctcgctgcacgccaatctattactgcaggtaacatagaatggaacacgtccaggtgcatgtaaaggagttctgcatcgaatgacattatcaataacaacttcagcaggaacctcaatttcaccgaacatacatccccatttcgtctcagaagaatgctttttgctacccaaaaatctacctgctactaaaacctgaaattataacaaagaaagtaaacgtttaaattacccattattggaatctaaacttatcttgcacttaagttttcctcgaatttgctaatacctttgtctcaacacccgtataagtccaatctggtgaaatgtcacaaatgctgaataactgttcctgggaaagagatggaccaagtgaatcaatctccaactgcatatggtgtgataaactagatacttctttgtcttcgttctcagcatcaattgcattccaataatttccagagtcggaagccatcaaggaatcatcacaatcgacaccgatttctttgtccatccatcttccaaaactatctaactttttcagctctactgattcattgttattagcagttccatctttatcttccgaattcttctcaacttcatcagtgaaagttgccaccatctgaggatcagaataaaactgaaaaggggcgcgggtggaatcaaaaccatgctcttgtgacacctgaaaaaacaaagtagattacttgagaaacttctacacaaggaaaagtaacaaaacaaaaattgagaaagaaaggtataagataaataatatattacatgaacatttcttgatgaacacataaacacggctgatttgacaccaaaatttcttcgtcacggaaggatacagatgtatatcataatgttaaacagatacaaggtatcaggatccataatatacactattatacagctgacagcaaaaaacatacctgaatttctctcttgggacctgacggtgcctcctggatgcttgtgcttgttatcaatctatcactgtaagaaacaatatcatgaattttaccaccaatatccaatctagcatcagtaagcttatgaattataaagtcagctccaccaggtactgcaacatcacatttctgatcaagcatactttcttcttcatgtttggttgagccgtgagcccagagcgatgatccagcagaatgaaacaatttagatccaggataccatgaatcagtagggttcctagatgactctccgattcctgaaatgcagcaaagaaccatgttggacacggcacactcactttttccccttaaacttagggaactcgaagcccaacactagtttgcagtaacaacttaacaaatggccctggagtccatcctgacaaaaggcatttataatttatttttattttaagagaatgtataaacacattgttatccacattacccgcaactccatctgaaagcattgatgtgttatgtgatatggaaccaaaagcagtttgagtgagagaagctccagaattatcacccgaatccacatcctcaagcgatgatgttggtccattccaatcagctctgtttgaattggatgcaaaagagttttgaattgctggggcaggtgagttttcttgtccaaaactatttagaaagctttcaaatggtggcctgggggtcggtagcatacgggatatgccagacttgtaaccctgaaatgcataaaagaaaacatagttgcatccccgccaaaaaacaaggggttggggtggaatcaataaatctagagcaagatgttatagttaatgtaacaaatccaaccaaaaagagaatgaaagacaagatgtttttgctgtgtacctcttttatttctctataatgcacgagaacaatgtgctctaattgtctgaaaaagtaacaaataaacacggcgggaatggaagtgagatataatatctatgaagttgacatttaagatgcaaaagttctaaaatacctacaattgattaagtgtgtcgttaagagagaaagagacattagataatagatatactcacccatcaagcatccaataactccgccgctggaagctctcattatcctctccatgggcataataacagtgaagaacatccacactgccagcctgaaaaaaggaaaggggaaaactaatttactaaaagcacaaacagcaaacacaatcattcttaggccacagagaataatttgtaggaaggaggagaaccaaggagaaaatggtaagatggtaacacata

SEQ ID NO: 191198 - DNA, 2874 bp, Cannabis indica
ttttgtatttatagctacctgtatttttgttgcagggaccggccaattctaaagccaagatttcagaaaataaggatggtgatgatgtcattactgcaaataattgtgatgctgccaatggaaatggctccaatgcattggttgatgctacagaaattgaaaagtctgctgtattagaagaaaacaaagatgttgaagatccatctgaatccaatgaatcacggccattaaagaaaccaaaatgtgtagatgcggaagattgttgtgacaaagtagaaggtggaggtttgtttatccttattcttctctagatttttcttatctattctgttttgtgttttcccccttctttattatcacaggtaccaatgctctagttgatgtattgttaattaatttgcaataggtgtaagtggcactgagaatgttgtatgtgaaagctccaaacaaccagaagcagattctgctgctgaaattttaaccccagaaactgatggaagcctgaaagtacaccctcgcgaaaagaagattattgactttagagataagttgtatcttgctcctctaactacagttgggaatcttccttttagaagggtttgcaaagtcttaggggccgatgtgacttgtggtgaaatggccatgtgtaccaatcttttgcaggtttgtatgctgtttccgctggtaaaagaatttgagatagattatcataatttcattttctgctggctgaataattgagatgtaaattaaaatttggttggagctcttaatattttgtctaggctgatttccttgtagggttaaattaattgctttaacgcgtttttaattttctaaggagcatgcaattatttatattataccattttatacgtacaagcctctccagagtggaaatattgcaccactccattatacatatttttgtacgtgggagagtttgtgagtttatgtttacaaagttaaagtgcgttaggaatttctttgacatttattctgtttcttgtaattacaaataaaattacaaattatgtatgactagtattcttttatttatcacttgagatgttctattttcttgaaatataagaggtgttagcttctattagttgattgtaaactttctttaatatgtttgcatggatacaggtttttttttcatcgacaatcaaattaaatgcataataatgatttttgacattatatttaattacaattccacatgggaacagggtcaagcatcagagtgggcattgttacggcgacatgtgtctgaggatctgtttggtgtacaaatatgtggagcattcgcagacacggtctcacgtgctgttgaacttatagaacaggaatgctcactagactttattgatataaatatggggtgccccattgatcttgtttgtaacaagggtgctggatctgctcttctcatgaagccaatgcgaatgaaaggaattatagaagcagcttctggcacaatggaaaaacctttaactgttaaggtactaaagttttttctcaccaaacaaaagttctgtatgctcctgtagtgtagtagttttttcttgattttcttataccactaaggtgatttgttatgcttgattgcatacttcttattctctccttcagatttcatcatttgcttggctacgttcgtaactcctttttgatgagatgcattttaactttttttcttcttgctgtactaggtgcggacagcctactttgaagggaaaaatcgtattgattcacttattgcagacatgggaaactggggtgccagtgcagtaacaattcatggtcgatcaagacagcaacgctatagcaagcttgcagattgggaatatgtataccagtgtgccaataaagcccctgatacattgcacgtattgggaaatggagatattttctcgtatctggactggaacaaacgcaaggttgattgccccaagctgtctacctgcatgattgctcgaggagcgctagttaaggtctgtagtaagtagttttcggcatacatatattctttgttttaacaatatagcttaaagtttatattctgctttgcagccttggttatttactgaaatcaaagagcaaaggcactgggacattagctctggagaacgacttgatattctaaagaagtttgttcggtttggccttgagcattggggttcagacacaaaaggttcgactttgtcaacctacatacacatgtcaacacagagctctctgtcaaagttattacttcttacgaaattaacttcccaagctttatcataaaattcttcaggtgtggagacaactaggcgtttccttctagaatggcttagctacacatgtagatacgtacccgttggtcttcttgaggtcatcccacaacgactgaactggagacagccatcctacttcggccgtaatgaccttgagacactgatggcttctgattctgcagcggattgggtatattatctattaagtatctttcttaacgaaatacaggattagtatcttatgttctaataatgatcatcggataccctattatactatacataagctatggtactaccaaatcggtatattcgcattagtatgataccattttacacccattttcaaattataaagataccttatgaccattattctttatttcttttttagggtatcagactgttaatcatcatcatctttttgttgttgtcacattttgcagattaggatttcagaaatgttacttggcaaagttccggaagatttcacatttgcacctaagcacaagtctaatgcatatgatagagcagaaaataggctaatgctgttgcagagaagagataacagtcactattgtcttaggta

SEQ ID NO: 191199 - DNA, 2017 bp, Cannabis indica
aaaaaaaaaattaaaaaaacagtgtataaaataattcctctattatttattacaaggaggacgatttttttaaataaaaaagatacattttatatataagaaggggtagataatagatatacaagatagtacagcttggatgatcatacatttgtgcactaatacatgaataaaaatgatgatttattttcgtaatataaatctacctttattaatattattaatgatacatatcaaatatcaaaagtctaaaatcttcctttccttaatttcatcctataatactctttactcattctcacatcataactttatatcattatatatgagaatatatggatcaaattcaaatctctctctctttctctcttcacaaaaccagagtagaagaaaatattaataaaattaatcgctactaattagaaaaattaaggagagattaatagtatcaatattaattatcattaatcatgatcatcatctacacatttgtgggtgacgtggagtaagctcacagtcagaagaggaagaacaagagccgttgatgaaatccttgtccccagtaatcaatccaaacgactgatcgttaccgttattagtgttaaacaaaaacacctctcttttctcctcaacaagcttaagaatcttctcgaagatggacacgtggcagggaatcttcaacactccctcttgctggaaaccaaactcttcttccgcttcccttagaagaatcccaaacgcctggtggctcagatactctgttggaattataaatctcttcatctctttcccaacgcaaaccgcaagaaaccctttcggaacgacgtcgttcgatgaagccatagaaacgtcttgaaacgacagcgttctcttcatcaacagcttaatgctttttccgccgcttcccccagctgacgtggcagtagtaatggttgcagcactcgtattagttgtagaagaagcagtatttgtagaagaattagtagtagtatttgagttttttgaagcattggccatctttttccacttttttaggatctgttgaagcctaacaatgtctctgattttgttagacttggattttgttgaatccatatcgaatacgaattatatgagagaaaaggaaaaaagaagaacaacaacaacaataaacacactaactaatgtcgtttttctaattttgtgtcgtttttctacttgacttgtatatatatatgaagctataatatgaggctatgactctctctggaggatgtgtatagctgtgagggaataatgcaaagtgcaactcaactgggtgtgggtattgggatttaaaggaagatgaagaaggtggtgcagtgatttttataataatatatattatttttgttgtattatatatatgtgaagagttgtttaatgatattatatttgttagggtaagggggggtacgttccgttggtgcaactacaactgctaataataaggaatcagatgaagatgaaccccatgatcaagggttctgattgtttaatcatcaaatattatatttaatcaattaataatttttttagagcccctgactgacttatcttggtttctgtgttttttaatatttattttattgctctaaatgattccttaatagtttactcttttgaagtaaagattgctcccatttcaaaaaataaataaataaataaataaagtaaagatattgtaaacagtgactttttttttcttcttcttttttcaagggttagttacaaccgtaaacttggactactcactcactaatcaactatacaggtcaaagaaaatttgactactgaatttctattttttattgtttttcctttttttttttttttttttttttttttttttttttattagttttggcacagatgtgctgtgggaaaaaacagctgtagctgtgagaaaaaagcagctgtagcaaaacggtagaaaaaagctgagttgagtgtttggcaaattataaattttaaaatactgtaagttgttaaaatttat

SEQ ID NO: 191200 - DNA, 3040 bp, Cannabis indica
ttcagttgtcatgaaggtgtagtttttatctagaagaacgcctttaatttaaagagatctttatatgtatacatagtcttggttttgttcatagctaaattatctactatgataatatcatatataggatagatcatttaagggatttgcccaagtttcttaccactaacccaatgaaaaagggagctcattcagaatcagaaggtgctctaaaacagcttatccgaaccatttttagaggagacacaggcatttggataagttaaagattaatggttgattcacatcatcatgtcatatgaacaaattattatatggttgaattgcttttgtctatgtaagttttgacatttcttgagacctgttatatcaatcaatacaattttttttgtacattgttattttactatcatgtaaacaatatgtaaaatctagcaatgaaatcctattattagaccggacaataatagtttgagcgatatgaaaatcaatgaatataacacctaagaaagctttagcagcaagaacaatagaacaattagtggaaaatgtctgtaatatacatatatatacatcaatttgtggcagagccctttatttttatacatcaaatacgagcagagagtccctttttttgtacagttgaggcagagcttcaccatttctaatacaaatctttccaatttaaaccaatgcaataattcaacaaaacaataaaagaatcaatcgaagttaatctaatccaactcatatatacatctgaaatttgcatggtgactatccaatttagattgccaaaaatattgctcttgtttaggtacgggagcctccaaaacgaccactgacttggcgagcataagcaactacagccttagcccatctcttgatatcatatttcaacttgtttgagtccatttctttcaaagttttgcctgcttccatcctcacctccatgaaagagaaacaacggccatatttcttactacgtttttctgagatttcaccgcctttcacagcttcgccacggtttaaagaaagagttttcttgacagacatggtggtgtttttggaacccttttacttctaatgaacctggttaagtaatttgatgcgtattatacgtattgggtctacatttatataggtagagaattaaaccaagacaagtaacttggtgttttaatacgtgtggcaacattgacttgaccatttcaaaattcccattacataattccaataaacacaaggttttggtgtctaaaacacttattactttaatacacggttgtttaaagaaatatatacagttctgtaccaaatggtaagttgtttagttttatgttttaggtgactatattgtctttttataactttgtactactttaaaatattcctgtactagtaatctctggcttcttcctcttggtcaaaggaataaacagttgataaaacatcacacgtttcatattataaattttacaatgacattattaatagttagttcaaaaaaaccccatttgaattttcatatggagaaaagtaaatacgtacaatgtattaatcaaagagtacaagtaatttagatcgataatttgaaaggcttctatttcagatattcttgacttaaattatctttctaggcctaagaccattcaaatcaaatcaaatcaaatatatataatattcagtgtagcaactgccaatgattataatgatttgactttttattttaattaaaaaaaaacgtatttttataaagttcagtgcatgatttgggtgtgattggttcttacacaaaaagaaacttctcaaagaacttgctgcggaagtcatttaagtactttctgatgtagtagactagtagactagttttattttttattagagaaaacaccaatataaaagtaaaccaaatatttcctttaattttaacttcaaaaaatattcggccatctttttacagatatgtcctaaacaaatagagggcaataatatttactacattacaaaaaaaaagtaaagtgattgaatttttagctttttttatgtcaaattagtgaattctaccaacacatatttacaataaagaaagaacatacacacattaggagtttagaactatcacctgtctcatttacggtaattttagagataataaaacagaaaaatataatagatgaataaaactatatagtaattatatataaatatgtatcttatctcaaataatttaatttcataattattataaaatatcactatccagtatacacttctaaattaaatttgacataactttgattctttgaatatgtcaaatagatatttaaaaattatggtgggttgggttcttgcataggaaacatctcaatggactttgacgtctgtactttggcaaacgtatattttttgcatcatttttatgtgtaagtaatcatcgtatacatttatattagcaagttgaccaccaactacaacattaaattaaactagttttagtgcttacatcatatcatatcatatcatcagtgtccttaaccattttctttaattcatctcaaacagaactgttgctcatatattagacagtactaattggacctacaaaccaatttaaccaaatcattaacggtggtccataaaaactcccaacagagagacttagctgcgtttgattgagtatcaagtccttcaagtcttcttcaacttctgactttgtaacttctcatacatattacccaataatacttttgcaactggaacgaaataattcaacgattcctgaagcaagcagctgaaaatccttcatccgttactaagctatgaatcctgaatagtaataatctcttttaacactaaatatatggctttattgatgattgatttgatcaataatttgattttgtaatttgtaacaaagtcaaacccaatggtttccaaatttttagtatctgggtacgtagcttgattagttttaatgggttgttgattaattaatatattttgtcaaatgaaagttgatcattgttggttctgactt

SEQ ID NO: 191201 - DNA, 2940 bp, Cannabis indica
aagaacattaagttttaaaataataaacaaaaataaatgtaatgtatctggatcatccatgtgtccatatttatgacttaacgaaagtgatagtaacaggtgtgagagaattgtaacattaagtatttttgcctctaaaaataaaaataaggtatttaagtgtataaaatctgaaacattaaatatttataccgcaatttacccttattgaaaatatatactatttgattttcacttataatataattaacttaagtatatatagggacacgattttgtcccgtgatgtacggtagccgttagatggggagagttatttgatctgagggcctgggttgatctaggggtaattaaggttaaaaaaatagtaacgtaccctgagtctgagactcatctaatgtacactgaaatccatctaatgtaccacagaatacgttccgtgaaagtacatcacggaataaaatcatgtccctatatatattgtatattgttgttctacttttttttttctaatatacatggtaactttatgactggacacgtggcaattaaagcttaagattcaaaggtgctcaaagatattttaagcaggcttatgaattaagtggatataatcaaagggctcttcccggagctataattggatccgaaaggatcaacattttgctcataatacgcatttcaaaatattttatatccgattatatcatataatcagtataaaaaaaaaaaaaacaaaaatataaaaaattataaaaataggacaaacaccgcacatagcgcggcttggttccctaattattttaataagtgaaaaatatatatttttctaccatcactaaaagtctagtctttatgtatttaattttaaattgacgttgtaaaatgtaattttctctatttaacttcctcctctttagttgataagtatacacggatatcatatgctaaaatatatcattttaaatctttggctcttttttgaaaattcctcatttattcaaaaagaaaaaaccaaaatgtacaatacagaatgaatcttctctgtcctagcaaaccttcttttagcttacaataacttttttttttcatatataaaaaaataaaaaggccgatagacaccagaagaaacacatggtaaatatgccataatgctggaattatataagtcaattttcacagatagggggcaaagacagtacttgaaatcaaattcatcactcaactaattcaataaaaacatttatatacaaataaagatagtacaccaggcaaaaaacacattccatgaattgtagaatgataaattttccacttttttgtttaccttacaaatgtattcccattcttttaagttacttgtttgcatcaagaacaacagcaaattgggggggccaggaacctctgtaagtatccgataaagcagtggcagtttccgagacatcggtcttaatttccagaagcttggaccgcatatactctttgaactttgaaactgtatcaactagtgttatgagttcacaagcacacatctgaatttctgcttcactttgttttattgcttcctccaacttctgttttgaggtctacacaaaaataatagttaaattgatattttaaatacagcagaagtaagcgaacacacgaaaccaaaacacgaaaaatgtcgtaaacttgtgaatcagtaagcattaatcaagaaagttgaaagatatgagaatattaattacaagctccaacccaaatcaagaaatacattacttctttctaactataaacaaacaagccgagactgttgctatgcaaaccaccaaattcacagtaacaaaccttgtagacaaacccataagaaggcaaatcctcaatactcaaatgacacccatagagcacatattgccccctccccaccgacccccactctccaaagagataagaagaaagataagaagtgcagggagaaaacatatgaaatatgatacatttaatgtaatattctgtttaaaacatgtcttccattccattccagtcagtccaacacatgttcaatcacaaatattttgacattttaaagctaaatcaaaagcgcagttttaaactttagcatagaaatgtggcagtaccttaagaatatcggctgcttctctttccacaacatccaagttatgagcctccatctttaaatcttccaccattcttttggcttctgtggcacattcaaacgtgtacttgtctgtttcattctccaacaacgatgttgaccttccatctgaaaatacatcatttatgccatgatcaaagataagatttgaagagagcttaacaaaacataacgaaatcctttgggtgaaaataaactgttccaattagtaaaaaacttggaagagaaaacaccgaaaagactaggttcactgcaagtttcaaatacaacagtcatatatatacaataataataaatagatgattgaacaatacgaagtaacactgagtgctacttgtcacatgttctttttcatgttttaatactgaagctggtatgcaacaacagcaagaacatgtgattatcaaaaccctaaagtgttatttgtagttctggtgcacttacttcattgatttgtgattcaagccttgccagagtctttcttttttcctcgatctttgcagcaatatcacttgactgctgctgaatagagatcaactcttccaatttcgtcaacgaacttttctttatatcctcagcaaaagattcaagtgcaggctttactgttgatttgtagtcaattcccatgacctcagcgggtgtagagccatcggcattcaagttgtaatgaaaaccatcaccaatttttaacctagtaccagcaaagtaagaatttcacagccaacacacacatattaagtgattatatcccgtacttcaagtaaatcaaaaaaaaaaaaaaa

SEQ ID NO: 191202 - DNA, 1719 bp, Cannabis indica
aacagagaagaaaagatgaggaaatttctcagccatttctcatattctactaaccttttcctcttcatctttctttcctttttcattatttttttaatttcttcaccttcttggtaacttcgccattttttgtactcataccaaacttttgaccaaaataagtggacctttttattttatttttattattatttttttttaactatttgtaaaattattggaaaaaaaataaaaagtttacagtaaatatgttatttttaaccaaataaattataaggaatttttatttttttttttctaaacaaaaaatgaattacaaactagcaccaaaaggcatatctgctttcaaacaagcagcagcacaatcaggaaggaccttagtccacacctcagaaacttggcataatctgccccacttagctaaacaatgagctactttattacagtttctaggagagaaaataaaagacaaattctgaaaacttttacgagcaaggaggcaatcaacaaccaagtgaccccaatctgtgtttgaacgagcatttccagtcaaggcttgaatcacaacttggttgtccgaagatatacaaactttttgcagcgaccatttttcagcaatcttcaaagccaaacgaatggccattgtttcagccaaaagaaccgagagacagccaggaacaaatactgtctcagcagcaactaaggtgcccaaatgatctctgattattacccctaacccacaccccggttgcccatcaatgagagatgcatctgagttaataagaaaagaacctgggaggggaggggaccagttagccggagctttgagttgcttctggtttggacttattctatcagttgcaagatgtaattccaacatctctatggcccaaggaatccatatattatctgcaacatccttgttctgaaaaatacatttattcctacgataccaaattagccaagttaaaccaataaagaaaagaaactcatcctttgtgagcttatccttcatggtcattaaaaaatctggggctttccacaaagaggaaggaaataggtgaagatagccgaaatgtttccaaaccttatgtaaagtggggcaagtccataaagcatgacaaacatcttctttatgacttttacatcgattacaagtatcatccatggacatacctcgcttatttaattcggttttgactggaatccaattgtgaaacacacgccaagtgaagttcttcattttaggagtgagccgtgatccccaaactcccttccaccaagcttttattttagaattattagaacattctgctatgtcagggtctctaaatctcagcttgtagccactagcaacagtatagtgaccactcggagtaagactccaaccaattacatcttctctctcccgtgagggattaatccccaacacccaaggaatgtcatccttatgaaaccagctagcaatttcgtcagttttccagtccccttcctcagttataagtgtctgaattttgacttcagcaggcacttgaatctttgtacgaagtgtaaatggagctcctcgagggatccaagggttctcatttattctaactgatttgccatttccaacaacccaacgatagcctttaagtaacaaatctcttcccataacaatcccctcaaaatattagaaccgaagtgacccaccttagcctcaaaaaaattgttgttggg

SEQ ID NO: 191203 - DNA, 1293 bp, Cannabis indica
ggacatcaaagaagcagcctactatgtctcgatctagtacagagacagaatatcgaagtttagctagtataactgcaaaaatcacatggatacagtcattgctctctgagttaaaaattcaagttcctcgatcaccaatcatatggtgtgataatttaagtactgttcagatggctgtcaatcctgtacagcatgctagaaccaaacatatagagttggacttacacttcgtcagagaaaaagttttagctaaaactctcacagtgaaacacactccatcttatgaccaaactgcagatattctcacaaaggccttatccaacactagatttgtgtttcttagaagcaaactcaaagtcgagtctctctccaccttgagtttgagggggaatgttaaagacaatatgtaataactgtattaactgccttgactattttttagttatgtttgttatatcttaagggtagtattgtcttttgtctttgttcatctactatgtatataaaggctctaacctccttgttcacaattaatgagaatcaatttatttcgttttcttgcttttatttcattccttcacaaatatcgctattgatttaatttaatattgggtcccatataatttaatataatagtttttagggaatatcgctagtcaatcataaagcgacgacagtcttaaaggtactaggcaccataacaatactctttaatttaacaagtattgtaaaattttattaaccataggtaaagaaaatatccatagcaatgctctttaatttaacaagtattgtaaaattttattaaccataggtaaagaaaatataattaatgctcaattattacttacgatccaaatagaattttaaaagaaaataattattcgtatatttccaaccacattcttaattccataaatttgtttgtattgaaaattttaaaggatttggtgaatacgcactacctttcagtgacacgcgtgcctgccaataatgtcgtgacacgtcatataatggttggacctcctaaaattgaatgcatcctttatatttatagagcaagggcacgattgccaatacaacttgatgagagcattggatgattgattatgcagaaaataaatatggtggaccacctctagtaaatttcatcttatctaaaaacatgtatatataaatttggtaagtgtatactatgcactacgcccccttttttgtttttttgttttttttttttttgttaaatggaaatggtttagtttattaataagataaaccattcttaagaattta

SEQ ID NO: 191204 - DNA, 4721 bp, Cannabis indica
ttttaaaaaaaaaacaaaatatacatcaaaagcatgagcggcttgaaaatctatatattaatcaaatgtgcaactagaaaggtgtaaaatcacactcaggtgtttcactgctattctcattctcatgatctgctgcttaaattttttttgcttgaacctcacatctctggatgtaaaaatatcagaaactcggtcagctgaattctcgcagtagagagagtataaaatgacccgattgatcaattttttatcaaaatgctggctattgaaggggtggcgaaagaatccttagtacaacatttcttctactattcggtcactcatcttctccaagtcttcttgagacaacaaggttttcctaccactgctacctgccttgtcatatggctgagccatttttctaagaaactgcaatcagagaaaacaaagcatcttagattttctaggaatatacatgtagagaagaagaatcactgttatttatttgggcaaaactttttcgaaaatctatgttgatgatgaagtctctgaagtatcattgataagaatactatcaagatcatgaacaaacaagagcaagtgatgcatatgaagagctcgctatggggtataaagaaaaattaacctctcgagctatatgaagagccatgtctgtgctcaaattcaggtgtgcatcacgtaagtgtgagagtatccatccaggcaattttgagcgcttatcatgacgactatacctgaaaaataaaactccagtgatgagatgattatgcactaatgaaaaatgagttcaaacaaaaatactacactcaatgctagagataactacatctacctcctcgaaagcactctcttgataaataataaaataaaggttgagatgcaatgtgattgtggctacatctgtatctcaagtgttactttgagactgaattcaaaagtttatttccacttttcaaatgtttattgtgaagttttctctaatatgcagaattacttaagcaaatgataaagctgttatactaaaattggaacatcagtcaacattatttagttgactatttgatttgctcagataaaagtagctaacatcacaatagcataatcagctttagtcgtcgtgattagaacattcagaaataattcaagtaactttagccaaatctttagcaaattaaatagagtaattaaataaatgttagtcttattggctgaagttagagtagcggattcatttttcaatatatgaatctgaagaggtttcaaagaaaataagtgaaaatggtactaaccttttgtctgcaaaaatcatcatgccataatcagcctttgagcggataactcgacccacacattgagctgcttgcctctgttgaatttaattttcattaataaaacaccttcaataaaacttgtgaagtcaaaactagtaaaaaagtaaacacaaaatataccaaagcatcaaatgtcaggaaatccccttcctttatttgaaaagtatcccgtaaatattccaatcgtgcaagcaaaatcctaggaaacaacatttccacatgtcaagttaagaaaaaagtaagttagtgaaattaatcaatagaaatagctcaaatccctcgcaaaccaacctcccccaaaagcacccatgacacacacacacacacacactcacactcacactcattacttacttgctaagtgtgtattggaaaggaacaccaaacatgatgacaagtcgtccataatggcgatcaaaatctattccttcagctacttttcccctgcaaaagtgtacatgtattattcatgggttagtaattactgttaggagtaacttcctaaagatttctctattatctgacctgatgtcataatattagccgtaggattgcatgatattgacagaatgaagggtgcaccaatggattttaacagctaaagtataatgctcaaaataacacgataactacagatatgtcaaataatcacatgtcaactggtgaatatatgctagagccagcaacaacctagagcattctggcaataacttctttacaggcaaacagaaaaggttgtcctgattttgaatgattacatacctcgcaacagaaaagaagacagcacctctcccgcagtcacaagccttacgatagttgtcaagagccaaagtagtttctaccacatcttgggtttcgataaacacaagcttatgttgcatgatttcctgtgacacaaaagacaaaattaatgacccttgacaactagtttcctttcagtagaatataaaaatagaagagggatagagggataaaaaagttaattgtgaataccaaaagaaaaaaaatagacatgattaatgcagtcacctttagaatgccggtctcgttccaactatttactattccatccatataagaataactgacaaaaaagcatacaatgccatctggaacaacagataccatctccagcaagagtctcccatagtttcttactacacccaggtcacttctcatatcaaatttggtacttactggaagctgatcactgaaatgaaaaccataatattaacgtacagacaaagtataaaataaaatagtcaattcttaaatgccttttatatctgacaaagtaaaatgcacaggacgttgtaatgatggatttatgataaaattaagaattgtcatctttaattgagctatgctacaaaaattaataaaatgcaagaaaaggctgtttggttgaatctttaccttccacgagtgagaaccattgggcatatgcaatctctagtcaaggacattgtaaaacttcgactgacaactggattgaaattgagaagacgggggtagagatcaattgggctaagggttccagatgtaatcactaccgattgaaatcgatcaaacacaggctttattgcaagagaagcatcgtgacagctaagctggaaagtcatagtacaacaagaaaatggtcaaacaatttatatttacaatgtgagaagtaaatttcgcttgataataagatttaaaatctcattccttgtcttcaaaagctgaacatgtacatttgtaatggcagatcaatgagtatcatgtaaatgaaagaaagctaaagttgggaaagagctatttaacaatccctaatacttcgtaatacaacatatagagatgaataaagatgattcatatacacaaaattttatccttgactggaatccagaagaagttccaaaatgaagtagaaaaatgcacttggaatgtttcaaatgataacaatctgattcatggacatacaagaacaaaatgcaccaatatattttccaccttagaacaattacatttttccatgtgttctcacaaatgtaaactaacaacaaaatcaaaaataaaaccaacctgcaaaactggatcaggaatatgaggcattctctcatcaaaaggttcaattattatagagaaaccacgggcatatgttcccacaagtgttgcaaagtcacatattgtttggatgtgtaagaactcatctgtatctgtaatttctaatgtcaacatgagtgagtgcaggcgatcataacaaactttaacgttttctggtcaattccagcatgtgtcataatggaggaaacaaatccaatgggcccttctttctcaacattttcagtctctagacgcccttctagatactgaaccaatctacgtagaacatgcaggaaatgctctgctctgcgtatattaccaggcacagcttccttcaaaatatcatctggtagggctgggtttgcaagccaagtgtctgatactgcataaattaagtataacttgtgtgaatttatggatgtagaaaacataattgcagcatacataattgaaaactgagaatggaaatccagccttctgggaagaagtcaaaaaaaaaacatactgggaagatttcctctttgtgccaaaccatcaacaagccggttgtattcagcacgcagtctaccagcatcagtggccttgaacctacctaacatgtcaaggaaacaaaagaatatccaagttaaggattagttcaaaaattactctagaaaaactatagctttgattataacaaatattggtatattactgagtcagattacaaggtgtcgcaatgggataatcagtttactacaatatgcctcacaatcatccattagcaattgtggttcaccataagatcaaatacaaagataaaacactccattaaaggtgagtttttgtgttaagctggcaaggttaaataatgcatataagacgaatcaagataagaataaaagcattccttaacattctttaataagaatacagaactatcatcaccagaacaagaaatcagaagacagcacctacctgtcaatctcctgacgcatcttattaagattccttcttgccccttcaagcgtctgcctcctcacactaacactaagtgcttcaatacacacattgtcaatattgtgagcctcatcaaacaccacaacagattccttctgcatttccttggagataatcccagccactttcggatcaagcaaatactgataactataaacaatcacattggcaaactgcaccatatgtcgtgccaagaagtaggggcaccatcctttctcctttcccacagccctcaaatcctaaattttcaaatacaactcagtgagtaccaagtcttgattgaatttgaagtctttccaaattcat

SEQ ID NO: 191205 - DNA, 2076 bp, Cannabis indica
agataatgttcatggcaaagtttacatgtttcactaatgaaataaagtttacttttgcgtcattaggccgagaaacagattgagatgtacaccaggcaagggttttcagggctgcccatctgcatggccaaaactcagtattcattttcagacaatgcagctgagaagggagccccgagtggctttgtcctaccgataagggatgtcaggggtagcatcggggctggattcatataccctttggtgggaacaatgagtaccatgccaggacttcctaccaggccatgcttttacgaaattgatctcgataccgctactggaaaggttattggtctctcttgaagaaggcccttgtattgtactactcaaggctatttattggcaatgaagcagcctcagcctgtggccaaatttttgaccaagggcagacttttcactaccatggtttgatggttttcctgaaagtgtattatgttatattccttctgttttgtacaactaaacattaatttctctaaataaaagaatcatgttaaatttgtgttttgaatgctaatcatgtccataaattctttaagttatataactgcattttggtttttgtttataaatgacattacctatatataaattagataaactctcaaagaaatatactatcctttcaatgatgataagctggttcaatttgatagggtataacataaattgaaaaaaaaaactaaatattggtatgttaatcaagtattcccttcttcctttttatttacttggtattaaaattgtacaatcaacaatactcttctacatggctttctttttcctaatcaacattctatttccatagcagaggaaaaacaaataaaaaatgtgattgacaaaaccccatagaagttcaagcagcagaaaaagaagaagaggaagattttgagtcaaattttaggtgagagtttgtttgtaagaggcttcggcacgagcttcatccaatttcatcaacagctccttcatgaaaggtgtattggttccatgagagattttaagtatatcaactgccttggttagagacttcacaccattctctgtctccccaagaaacctgcaaaactccacatcatttgatgttctaacataatcctcaatcacaaagcattgtcatcttaaaatacaagttgaacctaaaatcctcaaatctcaagtttataggctcaattctctagagaattagatttctcatatgaataagtttgtatattctcacttcatgggaaattcccaaaatttacaaactaagtcctcttactcaaccttacaactctctatatattaaatctatataaaatcctatttaatgatttaactaagagataattacaacaaatgaatctcaagaaacaaatttgagtgaatgtactaaccattcaagtttgccacatgtataatattgcaaaccaagcaatggatgaaaacttggatatactcctgcaatacaaaggatcaatacatcaagtcccaaagtgtgtaagttactaaattttaacccaaattgagtctataatctttttcatggtgtaatttagctaaatacaaaacataacttatcatttggcaggacagctaaattacaataaactcatgaaattaaattattggctaacccatgtcaatttttcagaatagctagaattcagtgttaaggtctcaagtttgagtccatcatcctctctttcaacaaaatcaacttcttttctactgtgcaagagttagcctaatcgaaagtttcaaactttttctacaagtgtttgttttaaactaaaatcggagagtagagtagagtagagttggatttactttgttattactattatgttcactgcttaaatcaccagcttaaggaggtaaaatggatctgatttgaaagcaaacatactctcatatactggaatggtcattctgcaataagatagagcttcatgccagttttgcaaatccataaacatctgaaacaaaatacaattttgttatgatcagtaagaactaccatgcagatgatatccttactgctaaaggagagaagaa

SEQ ID NO: 191206 - DNA, 1601 bp, Cannabis indica
tttttctttttgatgatgagaattttacttttcattcactgcttctagtttgtggttgacttgtttttgcatgaatgaaataaataagctttaacaagaatgtaaaattagtaaattaagatttattaggtttaatacattgcaatagtaatataaaaagccagctctcttttcttttcttggtcagagtagagttgagttgttgaatagtgagagagcctcaaaatatgaggtgggttctatcaatacttgctatcattctcacaattagtcatctttcagaggctaatcatgtgagaaagcttccatctgcaattgttgttggcactatctattgtgatacttgttttcaagaggattttgataagagcagccacttcatttcaggtaaagaaagaaagtgaagaaaaaaatgcaaacttttttgtttttcttatacatgtttttattgactaaaaactcttgctttgtttttcaggtgcatcagtggctgtagaatgcaaatatggtaaagcttcaaagccagtgttcagagaagaagtgaaaacaaacaagcatggagaattcaaggttcacttgcctttctctgtaagtaaacatgtcaagaaaattgaagggtgttcagtgaaactcataagcagtagtgagccatactgctctgtagcctcaacagcaacttcatcttcactccatctcaagtcaagaaagcaaggaacacatattttctcagctgggttcttcaccttcaaaccactaaagcaaccatttatttgtaatcaaaagccaagcattcaaaactccaagaaaccctttactactactagtaatgatctcaacaaaaagccatctttacattcaaacaatcctgaattatcattcccaccaccactcaaagatccagagactcctaatgttggtggtcttcctccacttcctggattccctttcctcccaccattaccaaatctccctcctttaccacctttaccaaatctcccaggagtagtttcacctataattccaggaccccagaaaaaagcagaacctaagccaattcaatcttcactaaacacccatcaacaacaaacctatactaaagaatcaaccccaggttttttcttcccaccaaatcctttccagccaccacttatcccaaacccattccagccacctccactcattcccaacccattccagcctcctccagccccactcatcccaaacccattccaaccccctccagctccactcattccaaacccatttcagccccctccaactccagctcctcttattcccaacccattccagcccccaccagcaccaactccagctccactctttcctaacccatttcagcccccaccagcaccaactccaaggccattgtttcctcctttcccaccaataaatgtaccaggttttactccttcaccaccacctccatcaccaccacctccattgttgccattccctttccctccattgttgccattcccatttcctacacctcctagcccaaaaaacccaccttcttcttcctctccttgaatgaactaaatatgtaaaaccatgtataattttccaataagttttttcat

SEQ ID NO: 191207 - DNA, 1102 bp, Cannabis indica
tgcaggcccatcagcccaacctgatcggatttgtctaattccatgcctgtcccaaacaaaatcacaaaatattatttatatcccattatattactttttatgtatatgtataatatatacacacacagaaaaaccacataattgttattctcattttaccagtgaatggaaatgttgttttgaatatggttgaccacattaatgagaaggcgatcaccctccctagccacaatgcgaggccctggaaattggtcattgactgtcacaatgctctttgtgtggcaaagtcttgtcacatttttcagcttgatctacaaataatacataaaataaaaagtaaaaaaaaatgaaaatagaagcaactaagaaaaacattaatttaaattaattatactctaaataaacttaattacgtgaaacttataatgcctggttgtggctgcatatgcatgcatgggaagaacagccacggttatgaaagacaagagaaatattctgatgagtaatgccacacaacccatattttcttctttactaagcaaggagaaaaaggaaaaaaaaaacaatagaagaaatgaaaaaaatcccaagatactactgatccttcttagctagatatagctttgtttgattgtatccaaaagctttggggtaatgtatattatatatttagtagtagtggtgatgataatgatatcatcaaacaaaactaggcttatttcgttaattaattaggtgaaatatagtatttgtagttcattgaaatagacagaatggttatttgaattaaattaatagatatatgtaggagttagaacaacttttttagagtggtgtcaaagataatcaaccgattaaacaattctttctttccaagtcaaaccactagctatactttccctaatgaagaagcctcaccggtcatcacttctttaggtatgtgattttgacctatttcgaacattgctgctaaatttagacatgtaaacatccacctttttgctatagcatacaccaagaattaaaaatgttagatatttaagttaaatatattataggtatttaaaatcattttatgtagagttaatttttttaaaaaaaa

SEQ ID NO: 191208 - DNA, 1765 bp, Cannabis indica
tgggttcgagtgaaatgagacaaaacccaggtgggtttagttcacaaggacatttaggatttcaaggggcttcgaatggaagttattcgccatcattttcgcagtttcagcaaagcccagctactcagtatgcaggaaactctggacctgtttatggacaatatcaacagaatcatcagccaaataataattattatcataatactacgactggtcctcaagtaccgagttaccctgtaactgaaggggcattggttgaagcatccgaaagtagcccaaatgttgcgagtcttcaggatttagatggtctttgtaaggagggtaaagctaaggaagctgtggaggttttgaaattgttggtggaacaacatattcctgtggatttgcctagatatttactgttattacaggtttgtggagaggctaaagcactagaagaggccaaatttgtccatgaagatattttaaggtcacaatcttctcttgaaataagagtttataacagaatcctagagacttattcaagatgtggttctatggaagatgcattcttggtatttaacaagatgccgcagcataatttgacatcgtgggacattatgataacatggcttgctaaaaatggttcggggtgggatgccattgatatgtttactgagttcaagcaagctgggcggaaacctgatggtcaaatgtttattggggttttccacgcttgcagtgttgttggggatattgatgagggaatgttgcattttgagtcaatgagcaaagaatttggaatcgttccaacgatggatcattatgtcagtatagttgatatgctgggaagtgcaggccatctggatgaagctttggaattcattgagaagatgccattgcagcctagtgtagatatttgggaagccttgatgaatttgtgcagagttcatgggcacacagagctcggtgatcgttgtgctgagcttgttgagcagctagaaccttcacgcttagataaggagtcaaaagccggccttattccagtgaaatcgtctgattttgcaaaagagaaggagaaaaagaaagatcccagtcttttagaagttagaagtcgagtacatgaatatagagcaggcgatacctctcatcccgagaatgataagatctatgccaagcttaggggtttaagagaacaaatgaaagaagctggttatataccagagactagatttgtgttacatgacattgatcaggaaagcaaggaagatgctcttcttgctcacagtgaaagactggctgttgcttatggcctcctcagcagctcagctcgttcacctattagggtgatcaagaatctccgtgtttgcggtgattgtcataatgcactgaagattatttcaaagatagttggcagagaactcatcatgcgtgatgccaagaggttccatcatttcaaagatggcgtgtgctcctgtcgggattattggtgaacaaaaattgaggtgctattcttatcttagtaatatggctttgcttgttgtagtttgtctgaattaagttattgcataaagctcagactttaaactctaaagagagtaatcaataatttgcacacacaaatgcttgaaaatattgctctttattctttagtgcaaggcctacagaaaagaccacatagaatagaatcaagaaaaagtttgtatttttatggagattagattatttgggaagttagatactgaattgtcaccctgatataaagtttgactgggttgtaatttat

SEQ ID NO: 191209 - DNA, 1024 bp, Cannabis indica
cttctaggcaatggtttgccaagttttccagttgcgtttagttgatgaaggattttatcattcagccacggatcactcattgttcatcaaacactttaatggaaattttatatttctattggtgtatgttgatgatattattcttgcaagcaacacattgaggaacttcaagccttgaagataagattgaatgacagatatcagcttaaagacttgggaaatttgaagtattttcttggcttgaagttgctcggtcagatcaagggatctttgttttgcaaagacattatgctctacagttgcttgtggacttaggacatttaggctgcaagcccatgaacacacctatggagcctaatctcaagctcgggcaggatgaaaaagagaaacttgcagacccgactctttttaggagaattgtaggcaaactacaatacttgacaatcactaggcccgacatttcatactcagttaataagttgagtcaattccttgcaacaccacgaatgactcatcttcatgctgctgaaagagtcctccaatagataaagagcagccctggtcaaggattgttctttgcagcaaaaactgaggtaaaattacatgcctatactgattgtgattgggcctcttgtcctgatacaagaagatctactacagggttttgtgttcttattggtacttcaatgatatcatggaaaagtaagaaacaacacactatttcgaggtcttcttcagaggctgaatatagggcaatggctaacactacttgtgaagtagtttggcttttgtcaatcttaaaggagcttaaagctgagcatgaaggacctgcacttttatattgtgacaataaattggcacaacacatagcagcgaatcccgttttccacgagagaacaaaacatattgagatcgattgtcacttggtgagagaaaaagtgcaagaaggcattgtcaaaactgtccatgtctcaacaaaagatcagctggcagatatactaactaaacccctcttttctactca

SEQ ID NO: 191210 - DNA, 1307 bp, Cannabis indica
atccataaaacatgttgcttgtatgtgtaaaaaaaaaaaatagttacttaaaatctgacacttaatgttgttttttcttctccagctacgtcttttctgccaggaaagtttcaaatgatgatcatatttatggtgtcattgggtatggctatgtggaagtaggatgtgatttaatggagcaggactattggatatgtacttcagatagatagatagatatttatttgctttatatatcattggtttatttggttttgatagattatttttgtaataagtttgctttgtataaataattgagaacagtcatgctctggtgactgtagcatagtagtacactagtactagtacacactatttattactttgtgagtatagttattagttattgatggttatttttgattatacatttgcttctaattttgcactttttgacatatatggagaaataaagctgggaagaaggaaatgaatccacttgacaaaatattaccccaaataattcaacgaacaaagttgcaattgaatgaaaaatttataatacattcaaagctacatgaaaataattttatataacgaaattttctggctttgctagtgtttattgcccaagattacacattaatcatacattgatcattataatcgatctcaaagacttatcccatgtataaagaacatttttcctttgtatgtaatcattctactttcgacccctacacaccagagatggccttgcaaatccaagatttctttatttcctgatgtttcccaaatgaacttgaaaagctcaagtgccctgtccaaatgtctcaccccactccagatcatcctttcctcatctgaagttagaatccttcccatacacaaacagaacttatcattcccactactataaaacccaccacacagatccacttcgatatctctgacatgcccataaagataatacaagagaagtgtgaacaagcacttggacgggtagcccaaaattttagaaagtttcttctgcactaagctttcttggagccgagcttccttgtatccaatacttttatcaatcaaaacatccttgatttgagataatccttctttcatggcctcaagctttaccacatgatcaagtagcctgtcttcagttttcaaacattcaataaggtcattaaacatctcaagaacatcttcccatttttgagagcaagaagattgaaccttcttggcaggcacaagccgcatccatgaagtagaatcagggtcagaggaaaaggctgtgttatacaaaaactttagacaattggaaacta

SEQ ID NO: 191211 - DNA, 6308 bp, Cannabis indica
tcgcttatcattgttttttttttctttctgacatgtctttatgcatttattttatctcatgtttgaatcatgcacaattcaatggaaggaagagtttttattattattattatcttttaggaaatatgagcctttgttcgccagtgacctatgttgactgctcataccattacatatatgtttatttttaaggaggctgaacaaattttcatgaagtttcttgttttgctgcataggtatgctttctttgcaagctgaagaaaccaaattggcgttgtgttaaatgcacaatggcttcacacgataagtgtgcagcatggccagacgaagtcatctctttgaaagaccagaaagggaaagctatttgttggaggcaccctgcagattggcggctcgatcgggaggtcaatttcttctttccttcctttcttagtaatgtattgattgcttatttttgaaaatataaataatatcactggaacaaaatcccattaataatgtgtcccatatactttgtaagcttgcattatcttcctcttgatttgcttgtctgaattttaattacacacatgcacacacacacatatatatattttgggttagtaaattctatgttaattacattgtgaattttattttgcatgtttgttgttacattggacttatgtttgtgatttttttattttattatgatgatgctacaaatatacagctactttttaagggatcaaatgcttttgaggttgacttttttttttcccttcataagcatggagtccttaacttcttgttaaagttttattcttcgtctgtattttcattgattaggctggatgacaggactgatttttttgttgaatgggcagaatgcagcttcaacaagcgacatagaggttagctttagctaaagtctgttagttttactttgtgttatacacaggatctaggtatgtgaattctcatcttgcacatggcaaaccgtgaattttagggtactacaaatttgagacattctcatcttgttgtgtttttcaaactattaaatgcttccaagagttgcatcaatatcattagcaaagagaatttagtgatataaactttgttcttatggctaagttcgcatcatttcaaaataatttattttcttaaagctaagaaaaaaataacttttcaatttttagtggtgtttatgtgaaagaaaagttacttagaaattactgctcataccacttcatttatctttgacattttaggaggtgttttgtcgcttgcctctgccttacattgatgaggagttcaaaattgactgtacatggaaagacactgattataagatggagccgccccctttcatgcacattaggcgtagtatcctgttttttgtatctgttgctatccattgcatttagtatcaatcatttagtgaatttgttgaatatcagaaatacatactgcacatgacaaataatttttaaagtgtcatttactggttaaagtattgatacagcatccaatggttcatggtaaatattagaatgggaatcatccttaatgtgagttagacatttacctgtgaagaagaagcgtgatgatgctgatgatggcactggatgcacaagttgcagctctgaatgctctcagagttgtgtttgcaggtgatttttgaatcatttttttggggcagtcattatgtttcagttaattaatatgtgagtgactctcaatgtagctaataaattttgtttggctagctaactgctcttcttaaattaaatgcttcgtattgttgaaacgtgttgctatttgagtatgtctttgtgtgctcaccaatgaagccttttgaagcaagtttataatgcatagaatgtgtaaaaataattagctttttggtgcatgtagttctttcttatgtagaaagttcagtattgtttatgtttgtgtcataatggaaatcaatctcggctatgtattagccacagatttttagcctaacatttattacgcgcttaaatgttacaatgaacttctcttctgtccagttgtttctgtctcaaattttactggcatgctggttaggtgaagtttgtactatatgataagtaaatgtattgttcatcctctaagattgtgccatacaatggaaatttgaaactactcagtgaacaagtatcatgtatattccagatacttggttgtttcaattctgagttataacttgtaacacatgtaatcatctatagagttcaatgcataagttgctcaaaggcttgtcgctgctcgggaaattgcacaaacaggccttttcgtaaggaaaagaagatcaaacttgttaaggtgattgttaattctaccacttaacaatctagagagactttaatgctttagtgatttttcattttcttttttggtttcttttgtatgttgtgagagataggttctaaattatacttttgcgagctattaggttaacaagtaatttcttgacagactgaacattgtggttggggagtagaggcagcggaatctattaacaaagatgaatttgttattgaatatattggtgaaggtaatggtgttttatttgttgccttgcttgtcatactttataatgaagcgtactactcattttcccatttcactcttttttaagatcaacatattgtcttaagaaagttttcttataaagttgtgccctttagattatatgttgattactacctggccaatttaacaccctcttgagtataaaaagctacatttgtcacaaactttaaatctctaactcgaaaatttgaattcttaatatcgattaggattttgaatatttttatcatatagtttattgcatgtatgaaagtgctcaatggctttatgctggggtgtttatgggatatccagggtctttggggcttcctttactttctggggttagtggtctcttcaaacctggacctcctcttgtgaggagaggtgtgacaccactaggctatgcttacgatcacctcaagtatgaaaaactgcagtcttaatttcattttttttattacattgaagatttagcttatctggcaattgaaattcttggatgtttgcttatattatttttgattgtttggttgtaattattgttattattacaagctattagctctttctaaggttagatctttggcgtttcagttattgatgatgctttgtgtgaacaaaggctgtggaacatgaaagacaaaggcgtgcataatttctatatgtgtgaaattagaaaagacttcacaatagatgcaacttttaaagggaacttatctagatttctaaaccacagttgtaatcccaactgtattctggaaaagtggttagtacaatctgatgatgggcctttgatgtcttttgattactggaataacttgcttaattcattgttctggaagtagtgaaagaaatcctgttttagtaacaaactcaaatttctcattaaaaatgcgatttgactactattttattcaggcaggttgatggggaaacacgcgtgggtgtatttgctgctcgattgataaaagttggagagccattgacatatgattacaggtacagtggagtctttacaaagttgataattcatgactgtatgactgctatcttggaatggaaccacatactttccatctcaccattggtgaacttcactgaaatctagtcagtgacgtcttttagtaataaggaacagcattagtattgtcatttttgcctcttcctataattatatccacagaaaacaaacacatgctaaactgtttcctgggacatttcttttgcatttgaattttcatttggcttttttctaatttaagctttggaatggaaaaacatctttagtcataaaactacctttgctattgaagctaaggagaatgtcttttaattgttttacttgtacagatttgtgcaatttggacctgaggtgaggtgccactgtggtgctaccaattgccaaggctatcttggaaccaaaaagaaaatagataaggttgaattattaaaaagacaaggcaggcgagcaaagatatcaccaaacccccttatcttcagggatgtcctcagtgactggggtttgaagcgcaagagatcttcaatgcctttcatagaagctactgtaagtactactgtatagtttgcatccacaatttaattctttcggggcttattaattttatattaatcattgtgggagaaatgaaaacagaagaaaaataattaggaataaaatgctggctcgggtagttgtctatcccattgagctttagtttgtttgaagtctagttttcatgtagcattataccatattgtaataatgcattctcttctattccttttgataggcccttaaaaattgtaatagaactagtaaattgacctgtatcttagtctcccatctggcatggccattttcatgtattgaatacaccaaaagacagcacatgctagcaagttttcacattgattttctgcaattcatttgcaatttgttgtaactttagaactactgtaaccataaggaataatgatatacaagaactacgcaggttattgctttggttaccctacctttctttttcgttgtttcttttcctttatgtctaatatcccattgatcttgaggtgataaaaattgtttcactgtctgcatgaaaatgaaactatgattggacgattgtttttgtttgcatcagcatacgagttccctcaaaagtttcatgcacaccttctttagaagctgcattgtgatcagtcatcactgtttttcaatagtttaagaattgccatgtacttttaggttggtattgattcaaattttaacgattacagagtgctaggatttgtattattgatgaattgattctattctttgataactgaattggttcaaaggtagtaagcttctcattcaatacacaatgtagaactgaatttttttgaaatgcttcttaatattctccaatttgctatatatgtatacataaggaataaatgttttagattttcttctatggcattagccttgaggaatcaacagaagttacagtgtttgtctgtttgttaccatatctttctcaatgctgaccatgttatgtttgtcaagttagagaattaatgatgaaaaataaccaataaaagtaggggtaatagaagagagaaaataaggtgaattttatgttcctttgaggaaatttctgcagatcttttcccagcacttcctatctggctcacctatttgcaacttaaactttgcatcttcagccaaacctctctgaaatcatacattgaaaaccccaagaattagctaacaaaactatcaatagtaaaagcaattgcaaccctttaatttttttacctcaatggagtgattgttgagaaggcgatcgatgatgttattgagaatgtctttggtgtattcagggtgaccttgaataccaagaatatggtcttcaatggtgaacatctccaccccagttttgtctgaatatgctattacatttgcacccaaaggaacctcccaaacctcatcttggtggcattctacaatggaaagagaagctgggatatcatccaattccatttccatttccaattctttcacatagctacttattaatggcaccaaatcttttgttatcttcaccttccttatccccaaatcccacccactatcagctttccctaccttccctcccagtgccctgcatatcacctgaaaatgaaattttttttacatatattttctactatggagttaaatgaaatgtgttatctatatttactatagtaattatatacctgatgaccaaagcaaataccaaggactttcttgcccatggaatccaaagtatgcaagagagagcaaagcttgataatccaaggctgattgccataagcatcatagggactaccactgaccacaaagccatcatatttaggcaactcttccaattcaggaaattctccttcgacaaccctaaacaagtcccatctctctccttcttctccaaaagctgccatgaacacattcaagtaacctccatacatgtttttcacgtactctgagtccttgttgctagaagaagaccaaatcttttctcatgattaatatcatatctttgttcatcaacttcttcatctcttaatctattattgtttatatttccaatgcaaccaaaatgcccagaagaaatatataataatagctaaaataggtgtctaattagctagccttgattacttctcaaatcaaagtctttgtctaatggagaaaa

SEQ ID NO: 191212 - DNA, 1386 bp, Cannabis indica
atgtttcagatcataagtgatctgtctgattgaagctctgacccgattcgaataaattgatttttttgctatgcttaaatacactactattttagtacttgattggatatgctctaatggcgtgctaaaacgttattaaatttgacaaatattaaaaacgtaatctcattcaactaaaaactagaaagatagtggtagaaacaaagaactttacctcgttacatagagggccaacacgattatgatgatcctcccaagctgctacattatggacaaactcatttttagaccaagacacctaaaacaaactgaaattagagaaagtgtcaaacaaataaacaaagagtgttagaagtctagaagtgtggtaggaaaaaaaaaaaatagggtgtgtatagtaagttgtaaaataattaacaattggagtaatcaatatatcttatatatatgatattaaatttctacacattatcaatacgaacttttaagaacattgactatgagatttcttgacaatgttggataactttcaacaaagcttaggttttcgcttctcgaagagaagatatgaccattctcgaagtgaccattgtgtcaagaactccatcattagtccaatagataacaacagtgttacagtgtattcaagcatcccagctgcatcaacacaaaccatagccttgccacatgaaacatgatttgctcataccatcgtgctagagcaatcttttcaagccttaatcttattaaaagttaattaaatttggcacaaaatataatattgttataattttgacacattgattttttttcattgtattggaaaaccatttatgacaaacatttttatgtcaatttacattttaatttattattgttaaggatataaatggaggagtaataagcgaggagtactctcccatctccattcccattaactattttagtactaatctttgctcctatactccatatttcttataagtgcaaagcagagaatttccattgggccagataatgcttgtgacaaatctatttatttagaaaatatatatattataaataaaaaagataaattacataaaaaaaaattatatattaataattaaaaatatacaatattttaaaaaatagaataaatatatttcagagtttactttaaaaaaactacaaaaacatatataaaaaaatatatgtataataactataaaataatattacaaaataaataaaaaatagaagattgtccccattccgttacctatttaagtgaaaaatttccgtcctattaggggtggccacttgcgggtccacataagcgcaggtgaaaattttccttaatttaattttaaagaaatatgcttgtgttaaatttaacacattttt

SEQ ID NO: 191213 - DNA, 982 bp, Cannabis indica
actagagagagagaatttacagaacagttggattgcaatgcaaacacttttggtttggtctttacgttatagtctttacggggtttttgttcttccctcaaaaaaaatgcacatatagtgcaactttatttcaaaactaccctttttaatttatattatataatttatatatttgtcatctttacttggaattttcctaatatttcttgagtttatcctaacttagcccaaacttttggaatgattattctcaagactaaagtcaagttcatggaactggtaaaaaacagtaactaatttgactatatcaaaaaatacgtatcaaaagtatagaaaataggatgcgtttgggtgtttgataatttactcttaaaatctcaacaatggatttttttggtaaccaaaagaaaatctatttatataattaaatatatattatataggtgccacaaccacaagaggagtctttattttctacataaaaatatgttatccttcaatagtgttcttttagtccataccaactagttccattgtcctttttagtatttaaatcaagttgaccaatgaccattccctttaaaccttaaaattgatttatatatgataatacttttcaaaaaaataattatctcgtggtaatggataaggaaagactagtggcaacaaagttgaacaaatcttttaaaattttaacaactaacttggaaatttggactaatcttcatgttgtctcttaaaaaaagacttggaggaatttaattaattaggagtttggcacatttcttaataattaaaatataacaatttaatttatagtagacttgtgtccaaatattattttatttcatttgaaaattttgagaaattcattttaggacaagtaagccaagtaattaattaatggcttgtaatagattaaaattgattactaagtataactaattaagatttttgcacctcaaattttgatatatactaa

SEQ ID NO: 191214 - DNA, 3223 bp, Cannabis indica
tttccaaattttctaaatagtttttgcatgtttgaatattcaggcgagtcttggaaatacaatggggggttcgatgaatgagaactcagacgattcagagatgagtgatggtgaagtggatgagtttgttgagaaatcttacgaagacctaaagaatggtaaacatcaggtgaaactttcagatgagactttcaattgcccttattgcccgaagaagaagaagcaaggatatcattataaggatatactccaacatgctactgggattggaaagagtacatctgataaaagaagtgcacaagtaaagggtagtcacttggctttagcaaaatttttggaaacaaatctagctactggagctagtccttccaattccaaacccactggacaaactgctgttgatgtaaataattgtgacaatggtgtcaagtttgtgtggccttggacagggatagtggttaatcttcccactagacaggctgatgatgggagatatgttggagaaagtggatccaaactgagggatgagttgtgtcggcgagggtttaatgccttaagagtacgtcctttgtggaattaccgaggtcattctgggactgctttagttgagtttaataaaggctggcctggtttggaaaatgctctatcatttgagcgagcttatgagagtgataagcatgggagaaaggaatggttagccgataatgatcaaaaatctggcctctatggctgggttgcacgtgaagaggattataaattgacaaacatagtaggggagcacttaaggaagattggagaccttaaaaccatttctgacattatgatggaagaggatatcaaacagtctagacttatatctaatcttacacagatcattgagatgaaaaacgaacataagaatgaaataagattgaagtgtgctgaaaccactgcatctcttacccttttggaggaagagaaagataagctgcttcaaacttataatgaaggtatatttgctttgttgtttcttttctttttcttttaataatgaatttgggcttatttatttgttcatgcattttgtattcagagattagaaagattcaatcaagctcacgagatcaccttcagaaaatttttaacgaccatgaaaaagttaaggctcaattggaatctcagaaaaaggagctcgagtttcgtcgcacagaattggagaagcgtgatgcaaataacgatattgaaaggaaaaagctcactgaggagatagaaaaggtttgacatgttcacatttcatggtgctaatgaattacaatctccagttaatgatgattagtgtgtagactttataaaatgttaataattcaggtaaactagaatacacatggtccttcatttgtattgtctcatgaaagtttcgaagtttgaaagttaatgctcatgatctttcatctgtgttaatgctcatgaatacacatgtaaagtttcaaagttaatgctatgatccttcatctgtgttgtctgttctggtgagttatttaccattactgttgtcattagaacagtttgtatgaatgacaccattaattaaaatttacgttaattcatatctatgtaatatactaattatgtttgtgggtgcacttgttctgacaaataaagttccaagcatacattttctttgacactagctccctgggactggtaactatagcaattgctatgtaggtactcaggatggactctcgaaccttagatattgtaggagaattccaagcacactctttgagattatttacaacagcagcatgagctgccaacttgtctttatgctgactgatgttgctataaatttgataatactgatttcattgttctttcagaatgcaataaagaatagctctcttgaaatggctgctttggcacaacaaaaggctgatgaaaatgtgactaaactggctgatgatcagaaggtttgtaacttgctcttaagaatttaaatagtagtaacttatttccttaaaattttattggggataaactaaacataagtgttctaattttatccagaggaaaaaggaagagcttcacaatagaataattgaactagaaaagaagcttgacgcaaagcaagcacttgtattagaaattgaaggactaagaggcaaattgaatgttatgaaacacatgggagatgacgatctggaagttctagggaaggtggaagcaatacacaaagttctgagagaaaaggaaggagagtatgaagatttagaagctttgaatcaaactttaattattaaagagcgcaagtgcaatgatgagcttcaggaagctcgtaaagaaatgataagtgtaagtgttatctttctctgtgttggtttgtgcgtcacatgtagcttattgctttcagctaaatgactgtctaataagatggtctttctccgtatttttctctgtttatgcttgctactagtatcagtaactctagcttgaatggaaagtaatcttttgagttgtagggcttgaaagaactaccaggccgagcattaattggtgttaaaagaatgggagaattagatagcaaaccatttctggaagcaatgaagagaaagtataatgaggaagaagctgaggacagggctatggagctgtgctcactatgggaagaatatcttaaggaccctgactggcatccttttcaagttaaattgattgatgggaatcatcaggtttggtttttatgttgttttgtctagtttggttgcgtcgactttatgaactatcatagtcatagtgactttatgaactttcatagtcgtagttttcctatgccttttttctctgattatgcagaaacaatcacacagcatctatttgttatcattgacaaagcctaacaactacccggcacctctattttctctctttcttgaaaacaaaaatctattttcaaatttaaaatattaaattagttttgtttgtctattttccatttacattgagttggactgctcatctaataggtagatcaatttgcagatctggtagcaataactgtaatattagttttaaatatatttggcaattctttgtttttttggtgcttttgagaggattacccaaaatcagtgttcctcttgattcaggagctgatcaatgaggaggatgaaaaattgaaaggtctgaaaaaggaattgggtgacgaagttttcaaagctgtaaaatcagctttggttgagat

SEQ ID NO: 191215 - DNA, 1060 bp, Cannabis indica
attataaaataatataacactaaacatagtatttataattttatgaaatttaataagtataaatatattcaaaaaagaaaacattaaaaaaagtctcatatcaaatttataaaaaaatatttttttaatattttcatactatttgtctcataaaataaattttccttaattaattaattagtaaaatcaagaaccacacaaagcctaacaaatgataaaaattattttaatttttaattacaaataataataaaattataaaaaaagatataaagaagaaaataccatagaagaaaaaaattattggatatatttttaatcattaaaataaaagaacacttagaagttagaaaattagaaaagggtactacttaataaaaatgtcataccataacattatattttataagaatataagaaatatttctctttgttaataatatatatgggttatgatgaaatactcattatgaattgcataaatgatagcataataaattacgattttattcattgaatgaataatatatatatatatatgtatatatatatatgtataagcattatgatatataattagtcaaacataacacaaatagaaccaatttggtaattgatcatgtaataagcaaagaaatcgtaaacaagaagccatgaaaaaattatatcgattcatttcacctaaaaataaaagtgtaaagaagctcctcatgatataaataaagtagctagtaaaaaaatactaattaatttgcatgtaaaaatttaaaaatgaaggggaaaatgtacctttcgaaactactacatataactaatttagtttatatttgattgcagataaataactatacattaattgggtttgaaagtaatagtttatttttgtttttaattgggtttcgcggatacataatgagacagctcatgctcttgctagacggggtttgtcttatatatttgtaatggtttgtttcgtttatgggaggtgagtccctacgtgctcaccaaatttcttattttagctaaatgaaatttggtcttttagcaaaaaaaaaaaaat

SEQ ID NO: 191216 - DNA, 2049 bp, Cannabis indica
ttttttaaaaattatttagttttggaataggagtaaatattagtcgtggtttggttggggtctgtgatctcggtgcaccaggcgtagcatgatgggttccctttgtgtgtcatattcattttcttcataggttgtttagtgttgttggcaatttctttgggttttagacttcgttcgatgtagttgggaggttcgttcgatcgagatctggatcagattgttggtggtctaaggatggtcttgtttttggattctacatggactcaatttggctttttgtccatggtgttgtgatagaaggttggtggttctagtttagatccgacaattaggttttgctaaggatactgtgattaagtttttcgtactatagttaggttttgacattattgtcttctagtgtgagtaggattatgagatgtgaacctaatcaacctatatgttgtctaagatttttcttaaaatgcgtggcacgtcaagaaagggccatgtggcaacgagatccatagtacaggacgtgttatgttaaatcacattcggagtttgataattaggaggagcttcagaaagttagtcatctctaaaagaccctccaggaggacagttgatttttctctttccttctgcaagtaagctttacccagaggagagataggaggattgtacaaagtatagcgtgtagcccaagttcaagaaactgtgcacaaatttaatgcagcatgggaaagaataacttactccttaccacggaaagagtgtttgagggtttaaatccataattctctgacttcacgacatccaattcctaatttgactaatacattatgaactgtcaaatcatcagtaaaagacaaatctagtctcaccaaacgcctacatcaagtgcaggaacatcatacagaataggtaatcatgtcctataatcaagttgagaaattgtgcaagacatagtttatacaagcacgacaatggtgaccttctttctatactattatttataaatattcccaaaaatgtaggggaaagggagatcgaatcattgcatctctataacacaatccaggaataaaaatagctcgtcgactaaaactcattaatacccaaccacataaaaaatcctctaccttaatttgcattaattattcaatactttgtgaatgaattgttgtcaaaaatctcaatcaacactatatattattcttgtctctataccatgaagtgtcttttgttttgtttcgttgttggtttgttttctttgttattgagccatcaagtcgttgtaagtggtttgaaataatatgttctttgtcgttgaaggggttgttagtggtgcagtaatgtaccttgcactatagttgagtactcaagctaaggggttgaatgaacttggtgcattaatttctactattgtgttttttgagcggtggatgaaactgaatataagtttgtttaagattaattttgatgttgtaagctttttcatctgatgttatttctgtttcttttatcaaacgatctggtaatcagggggcgattagttggctcgtttttcttattctaattccagtcgtgtttctaacagaggaggtgtctcgaatgggttagttgattgctattaataaaattgcatgatttcttttaaaaattattaagttgtttatacatgaattacttttaagttttttttaatgttcttataaactaagattaattttataaaatggaaatttttaaaaatatttttattttatttacaattttacgatttaaatttttttatttacaaagatactcttataaagttttaaaaattacaaaaatacactttgctcaacaaaatgtaaaaaaaaaagaagaaaatgtaaataaatggccctatttctaactctataaatagttaatgtaccatttttttaaaaataataaagcaaaatgtccttttttacttttttaatacctaaaatacccttcattatataaaaggtattatatgttttattcctttaataaaaattatgaaaaacaataaatgaaaacctctctactgaa

SEQ ID NO: 191217 - DNA, 1216 bp, Cannabis indica
gctgttgttgaagtaaggagatagagactcaaagatcatgcttacttgagtcctttcgtcaatgatagcaccatgtgcttcacctcatgtattaggtcaatcatgtgcaatacatgagttgtaatagggaaacctttcttcatcttactatttattcatgtagctacgagtaacatcatgtccagttttgattagactgttgcctaaaaacatggcctgtagagaattcattatttcagatgcattctccatctgatcatgcgtcttatgcaaaatttcatctatgctaataagcatgaagcattcggccttattgttgaattgaatccaagtatcatatttgtcctgaatattttttagggcattagtagtgggcttttgaggacgctcgtcagttaagataaatttgtagttctcacaaaccagcattctgattaaattttcacttatgaaaattctcaccattcactaagtgctaataaacatttaaagaatttggcatagtagacatgagaaacaaataaagataacaaacgaatatgtttaaataaataaatatcattttgaattgcacatatgcttgacacgtaaagttcctcttagcattcctcaataaataatggtatgaaaactgctaagctctcccaattcctctcaactcatcataattactaattactgttcatcgtactagaactggttttgggtcgttggattgtataattatgtaggactattttatatatattatatatatatatattcatttaataatgaatatgggctcacaacaattaactacatgcataactttaatttatatatttgcttaatttctgtatggtgatttatatataaatatatatggatatatatagtgatgaaccaattcattttaaaatatcacacgcgaatattatggctacacctactgctcttcatcatccacatcacattgtgctgcttccgtttctagctcacggccatttgagccccttcttagccctcgcaagacaaatcaagcacacatcaaaagcctttacgatcaccatagccaccacagctctcaacctcaaatacctccgccagtccaccaaccatggcgacgacatcctcttcgccgaacttcccttctcccatcatgaccgtcaaagcacagagaacttggccatttctaagataccggacctctgccacgaatcactctctcttcagt

SEQ ID NO: 191218 - DNA, 3032 bp, Cannabis indica
gagagaaaaaattactaatcagcctttattaaataataatatgtccttttctactaattaccaatccaaaactaatattaattaataccagtgatccctaatatatatatatatatatatatatattatatagtaaagagggccctaccaaaaaaaaaataatcaaatgataataatgttcataattgaattattgaacaacatatattgattgtatttaagattaaaaaatagaatagcatattttgaagtaaaacccactccaatttaatattcaagctatttttagagtgtgcattaaatagatataatgttcttctataaatagaggaactacttctattcttgacttcatatcatattatcatatataaaatggcattggagtttgatttaacaccaaagtatagcgagaaggtagtagagggagaaggaggagagtacagaagttggtcaagtacacagcttccaatactgtctcacaccaaagttggtgcaggaaggcttcttttgcaccctcgtggctttgctcttcctcactatgctgattctcccaaagttggttttgttcttcaaggtttgtataatcacttatatatcttaagatctacataaatttattatacatgtgtatactttcttttgtttttaatcttacatattaaatcaattaaataaatttgatttgcctatatataatccttgtattgtatattgatcttatatataacattctatatagggtgtaggtttgttctttatcaaggtcaatactcaccttgtggttttttcaatatttggatagttatatagacttgatttttcttttattattattattgttttcattttagctatattgaagacattttggaaagtttgaaaaaattctcaataatttataatttaaaaattatattcaaacatcttgttgcacaaatctcacttttctctctaaaaataatttgtgaaattgatattgtttaaatcttaattttagctctataaataatttgtaatttttttaaaaaaaattcaggatcttttaataaataaccatatcatctgatttatataaataattgtatatttaaatacatatagatattaatattaaatataatattatgtaaaaatacaacataatacaattcataaaaatattatacaatacaataagattcacgaaacggatcccaaaaaaaattaaaccttgtacatccattttaaagaatactgcttttgaagaagttccctataattattgagcactaagcatacttatcgtgttcagtaatattattaggtgttgcttataaatagttaattattttttataataattattaaagtaaaatatataaaactaatatttaattatatcagtagtttctttcccaattaatcatatcctttaccaattatttagatctgcacaattttcaatatattaaaatattatatacatgccattctttttcttttcttcctatctatttgattataatattactacatatatatatatgcacatgtaatgtattattatatcttatgattatccgaggcccacatcgtaccaaaagttttttttttcccccatgcccattttgtttcagggccggccctgatgagaccctgatgattatacattaatttatgcatgtgacaggcaataatggagtagcgggaatggtattagcaaatgaaccaaaagaagtggtattgaaactaaaaaaaggagacttaataccagtgccacttggagcagtgtcatggtggttcaatgatggagattctgattctaatgatgaccttgaaattgttttcctaggagacacttctcaggctcatttcccaggcaatatcacttactttttcatagctgggggtggttcaatgttaggaggattctcaactgattttgtcaaaaaagcctttggtatggacactaatgaagaggcaaacaaacttgtcaaatcccaaaatggggttttggtcatcaaattagatgacacaaaaaccttgcctaaaccaaaacaaaatgaacccaataacaacaacttggtttataacaacttggagcagtgtttgaaaatagaaagtgggttttggagtaaagtgacaaaatcccaatttcctttcttgggagaagttgggttgtgtgcaaatcatataagagttgaggctaatgctatgacttcccctgtttacacgtgtgattcatctactcaagtgatttatgtggttagtggaggtgggatgatacaagttgtgggttttaatggtaagcttgtgttggagagtgagatcaaggctggtcatttggtcattgtgccaaggtcttttgttgtttctatgatggctggtcatgaaggattggaatgcttctctatcataacaactccagagtaagcatatgcattttttttcatctgtttaaaaaaaaaaaagtttttcaaaaacttaatattttgtatataaatatatttttgatatagtataaaaaagaatatttttttaattaagtatataaatttaaattttatttttattatttattaatggattaaaatttaattgtttaatatttttaaaattaatatttataattaaatttattaagtaacaactattgaaaagtgcctcattatataatctaaatctatcaaaatttaagagctataaaacaaaatttcagttcaaattggtaggaatgggaggaatttttttagtttgcttttggtctataaataaattataaaattaaggtatcttataaattttcgaattttttttaataatttgacagtcaaaattagaattcgaataacatcttgtatattgcatactattaaactttttatactttgtcaaaatgaattatatacccctttcaaaaaaaaattaataaaaatttctatatttatatcaccataatctctataagatatatatatatatatatggcatataaatgtgtatatctcaacggtattaagggataaataattatgggtgattctacaatg

SEQ ID NO: 191219 - DNA, 1702 bp, Cannabis indica
aatttattttatatataaaatttaaatttttttaaacgtagttgtttactaattaaggtatattcaaaaataaatttactaaagagaataatatgagaggaaaagcaaggcttctatttcatttcaagtaaactttacatcaagaacgccaagagggttatagtaatgtcaacataatatattattattttataacaatttatatattaatcatatattttattttttgagaaagaaaaaagaaaacaaaaacaaagggaattgtaaagagagttcaggaaaattaagtgaaattgttcctataccaatgaaaacaaacagtgtaactaactcagatggaaatattagccaaaatttacaaaagcatacatgagctttacaacttacatctcctttcagtgaccaagtcaattaacacattagcacaccaaacagattcgtctacattctcagacattgtgctctcatgatgcttttccaccatcactggcagattatactggataagaaaacccccaccggagatgtttagagtccacacccgactcacgcaccagtgcgattcgtccagtccgtgccacctggaagaagtgttaatgtcatcacaaaatgatgcaagagaaaatatagggtatataacaccgtctactaggcctactctgtttacagcaacagcatctaagctaacatattctcaaatctgataatgaaattgcaagacacacctcacagatgccatagggctctaacagtctttgtagtgctaccatcttgttcaaatctccggtaagctgaataatatttaaatgagtaatcagtcacaataggccattttggatgaactaggattaatataaaaatcacttaaggggagattcacctccagagttattgtatgatctgaaacatcaacagctttagccctaaatatgttagcaatgtcaaggacatctctccgtgcaacagcattcactgccacctttatcaacactaactccctttcagcaaagggtaggtgggtaagatcctggacctgaacgacgaacgcaactcattaattaatcagtggcccctgctaaacactattgtcaactacaatttttcagctaggtgaagaacaataacagcaacacataaggaacaatctaaagactatttttctaatcccgataaaatcaacaaccatgctaagaatcctatataaaattatagaaactaacttgtaccaggtatgttaactcgtatgaaccaaagcaatcttttagaaagctaagattcttacctcatgaagatcaataagcttagaaagctgctgcaatagcttactaattgattcatctgtaccaggaacaactgtagtaattcgagagaggccctcactttctgcatggccgacagctaaactctggttgaaaaaaagcatcaaggtattaaaaggagcacatgtgataaaaatagaagaaacatgatggacatagcatacatacagagccaaagcaaactacctgaatgttatagcctcttcgagcaaaaacccctgtaacaatgtaaagaactccaggaacatcattgacaagcatggacagagtatgtgatctaaaaccacttgtctgaaattaagaacaaatcacaattcctcttacaaaaaataaatacatcatatctagcaaattgagcaagaaactctctagtctgtcatggt

SEQ ID NO: 191220 - DNA, 986 bp, Cannabis indica
attttgcgaatgaatctccaaaaagcaatagtttcatccccacatctctatcagaggacgaagttcctgcaagaagtgcccaagagggcttgctgtctactggcaagataaatcacatagttcaagagttagaaggaccaatcaccatagaggtacgaggaagcgagtccacggtatctgctcaagggactttcattcatccacaggctattccagacactgaagttaaggagatgggtgaaaactttgagtttcctgcttgaaggtcgaagatgatggcaaggaaagcgagtcagactcaatagagaatgctcctttgaacgagctattttcctacaaacactcaatctcacgagttaggaagtttgacttgacaacgtttaagagactgaagttataaatatggctactacgaaactcatgtcgatgcagcatcctcattttccttttaccaatcttgtgatcattctgacccaaaatgtggtggcctcgattcccatcattcattgtggtgtcacccttccttttcacccttttgtaaaggtaatcttgacacacgacgacatctccccattccaactcacgcccaatagctatcaaataatccttgccttttggcaattcaccaattaaatttatgtccaaaattgtgaatggctatgggctggtgatagaatttaaatttcttggtggtttgttgacatatgtggtaatccgttgacacttgtcacagttcttagcaaagttatttgcacctgcctataaagttctagaattgatcaaattaccccttgatggtttagtgacttttagttagtgtgggggggcaaaattgtccttttcccctaaagttcttttgtctttttgtgagtttaattaactctgctaatcaaattttttatgctgaaattagatagataaaacttgttttattttgattttattaaaattagaagaaaaacacaaaaaaatactctctctctctc

SEQ ID NO: 191221 - DNA, 912 bp, Cannabis indica
ctctctctctctctctatatatgatcaattgagtcattgtatataataataagtccaccaattattttgacaatactccaaaaatatttgttgttttatatgattattgacaaaataccaaaacccacaatttatatttcaatagagactagagtacaagtagatattgatgaactcgaggaaggtttatatggtatgacatgttattgaattttattgtagtttatggaaatgttatttgagaaaaaatagcaattaaatatttgagtttttgataataatttgttggaaatattttttttttaagaattatttggcaaaatgaccttttttaagttattttatactttgatttagttttgataattctttacaaaataatttccaacacttttagataattcgtcaaaaaattttaataagcggtcaaaatatttagaaaactagtagagactctagtgtttaaaattgatttaacaaaaaactatcaaaactatgccaaagtatttgatagcactactacaaaattaggcatttttgtcggtcctcaaaatattttttaaaattagatgagtattttaaaccgtcggaaaaaatttagtatccccaatgctttagaacattagtaagagcaagaggcgatagtttcacaagtttagaacacattatttattttggggtttataagtgtcaggtatactattggttaacacacactttacacattaggtaaaatctgtaaagagaatattgagaagccagctgcagtctcctagtaagatatttcatgatcaacacaaaaagcagaagagacaaaggatcaccttgtctcgacctcttttcacccttgaaactgccttggactcttgtattcatgatgatggagtaggaggtagctctaagacaagacat

SEQ ID NO: 191222 - DNA, 4516 bp, Cannabis indica
atttttacgtaattctactagagctgcaatctaatttgcaacaaaaaattgtatcgaaacctctattgcttcaaccacaaacctaaaagtaaatttaaaaaaaaaaattaaaaaaacagtctatatgggttaattccccaattatttaataggaggcaaaaatctcattaaactaactcaaaaaacaagaataacattggagttgaaggagagaagaatacttcttagataactaaagtttggggcttaagttggagtgagctcttcccatggcggtgaaccagtctcaatctcagtctctgcaacaaaatcaagctaagaagattcctctattcccctttgtttctattatctgctttgtctccatctttctccttctctcttccataagaaacactacttcaattccttcacattctcatcatccatcaattcatttccccaaaaccaacggcttatccaacccgggtgcttcacctgaatcgtgcgactactcggatggaaattggatccgcgacccggttgggacatccccgaggtacgaccatacgtgtaaggagattttcaagggctggaattgcatctccggcaataaatccaacggtcgggatctcatcaactggcgctggaaacccgcccattgcgaactcccgccattcgatcccactgcctttctccacgcgtacagggacaccgccattggtacttagcttgagtcaatcttttgttttggggaagtttcaattttttctgaacttgaataaaattttgtacagtacagggtttgtcggtgattcgttgaataggaatatgtttgtgtcccttttctgctctctcaaaagggtctcaaatgatgtcaagaagtggaggccggccggtgccgaccgcgggttcacatttcttcgatataatctcaccattgcttatcatcgaactaaccttttagctcgatatggtaggtaagatttctttcgctgttttcgtttttgactacattttttcgtgttttgtgggattaagaattggatgactgagaaattatttgcctgattgtactgtttgcactctaagtttgcataatataatatatggtaggtaagtttcctctgctaaggttgttattttacagactgaacagttcttatgttggggtagatgaggaactaaatttattctattgtgtagtttgcccatttgtatctttataatgaaattttgtagagggaaatatttgcattttgaacacaggctttggtttcccatttgtcacaggtggtcagctaatgccaatggtggtgctctagagtctcttgggtataaagaaggttatagagttgatgttgatattccagaaggaacatgggaaaatgccctgacctttcatgacattctaatcttcaacacgggccactggtattttattggcctattattgttattgatgtagaatagagactatagtggatgataatgtgtcatctaattacgaataattaccccaatctttaaataaacgtgaaaataagaactccttaaaacaattgtatcatatatccaaagctatttacataatagcttcccacatgaaatcgaaaccaccaactatttattcaaaaaatgcggtattgttttctctaaccaaagagctgaacaattgtccttgtagatagctttgttcattgcttcttcagcctttcacttttgcctgtgccaatgagctttaattactcacttatgagttatgatagtatcaaatgcactttgtatgtattcatatttcttactatgcgcttctatatttggatctgtattttggtagtttacaatcactatttgacatggaaagtgttgcaattaacaggtggtgggctccttcaaaatttgatcctgtcaagtctccaatgcttttttttgaaagggctcagcctgtgattcctcctgtatctcctgaggcaggtcttgatatggtcttaaaacacatggttagtattgtttcatttgtctctagtaacaaaagagtgaagttattgttattgttagtactttgcagaaatgcctttctgcgtttctgtaacatgcttagtcataatgtgtctgtggtctaactcttgctttatgtgccaatccggtttttatgtgtaataatgactgaaaacagtgtgcatctgtcaggtaaaatatattgaaaatagaactcgacccggtacaatcaaattctttcgaacgcaatcacctagacactttgaaggtggtgattgggaccagggtggtgcttgtcctcggctgaagcctttgttaccagagcaggtgagcgtcattatgttctgtaattagaattcacttggtcctgacaaatcatttttttttattttgaattcggcatcacttttacagttgcatataagttcatccatacggtctttgacaagccatttttaaatcttcttttatttccttacaggtagagacacttttctcactgaataataacggaacaaatgtggaggctcgcttagttaatcagcatctgttcaaggctcttgaaaggtctgattttcatatactagacataacacatttgagtgagttcagagcagatgcccatccatctacagccggaggaaaaaaacacgtcgattgcatgcattggtgtttaccaggaattactgatatttggaatgacttgttaataaagcaattaaacaatattaaggttagaaattgaaatactttattcgctctttttctaattgattttttttttttatctttctaaagtatcaatgatgtatgtaccatagtattctttaacaatacgaaatagttttttctttgatatgaagtcccttaaatttgcatatctggttgaagttcaaaatctggtatttccttactaagagatttgaacttcaaaattttgcgcaagcaaatcacacagccatatcatctgagttacctgttttggaccttttggtacaatgattgaaattattattgcacttaaataaacaaactcaacttggatatcataaatctttctacttataagttatataggatgatttctgaggacaaaatgtaccctgagtgttgtgttcaacattccttcttgtcttctgtaggtcctgttttaacttcagttaaaaattaaatgccaattcagagaatttgcttgtggttttgctcccacaagggctaaggttctctccaacctccgttctgaatcgatgagcattccaaatatcgaatgtggaaaataatagatgcattcaaaacattcagactaccagccagctatgtatgcatagcttgataaggtttcatcaaattaactctattagaagtttttctagaaacttatttaaattctgtacaataagattttttaatgagcttttcatacaacacattttctccggtactaattgactaatcagtttgtgctatgtatttagaaagagactagcaaaactagaatcatatgtcctagtactagcaccatagccatcatccttgataaaagtttggctaaccttctttaagcatatgcagtcatgcaccatattaaatctccagtctctttacatgaatttctctttacatgaattacaataactaggagagctttgcaacactatccttataaaatagaccaatataaattctgtatgtaaattccatttctttaatggcttatattaattagaataaaattagattttcacatgacaagagagagtaataaaagtgtttatatttctatgcttaaaagctcttatgtatcatataatatgaataataaatttttatatgatgtttcgatattgcagtaaatagaagagctatattatattctcacacatgataattaataactgaaattctaatatcatattattaagtttcaaaataaaaacaaaaatgccaaaaagatatacagaaactttattcttggcaagaaattcaagaagctaagtaaaaacctctagtatattcttgatgaattaatgaacacatattcccgataaccaagcacgtaacaaaattgatgaacaagagagggtcaacggtcaaaagggcctgaagggtcaagttgcttgcagagattcaagtaagcaagatataggagtcgatccttagccccagttcgatgaatctgattaaccattaaaaaatacttgaggtgatagagagtacaactctccaagaattgagtcaacagcaagaacagccagttaaaattgtaataatcgatattaagatgatggccatcaatgagtacaggcctgaccgagtaccgatgctcacacattgggcatgtggggtaaggagggttcttccaaatggctggggctctgtcatacattttgtgcttgttcatgacgatgaaccccttcaccttgttgaattctttcaccaaatccaacctcatctcgtactcatgcttacattcattgcactttaattggcccttgatctcaaatatcccatttgccaacaagtattctaagctgtg

SEQ ID NO: 191223 - DNA, 1425 bp, Cannabis indica
attattgtcgattttattagctataattaattgttaattcaaaattattagtggggtgtaatccttatgatgttgaaaactcacattaacaaacaagattatataggaaattagggattgtaataatgatgtggtggttgagggatgtattgtcaaataataatgtaaaagaaaaaatgtcctcatttatacatattatagtagaaatatttttgtatatttattaattattatcttcaagaaaatatattttgactaggcagagtatatatttgtgtacactaggcatattaatttatagtatatttatgtatactcgtaccttgattaattaattaaataactgtaaattaatttctggattattattttcagacacaagaatgtattcatatatatgttattcagatgtataataaaaaatatcatataacaacaaatttggaccacatgatcatttactacccatcattatgggtcgatcgagaccttgattttttcgcattctacagaagaagtataaatcaataacaaaaaaaacgaaactcattcccaaacacaacaaatacataataaaattttaaaaaaaacaaaaaaaacccaaaatttgaagatagagaatatttgagatgaaagataaggacaagagggagatgttagggttgtttgtttgttttcatggcaaagcatgggaggagagattagccaaaagggattttattatatattttttggtaaataaataagaaatgacagaaaaagaggaagtaattattttctttattttaatttttttaattaagaaaaacagtattatcagggtaagccaagcttaatggtagaaaagacagagcaaagccgacaaagattttttgggtgtacggagaagagatggcattaaatattaccttaaaaatggcataagggctaagctatatatatatataggtcgagatttaaggatttttatggttgtttctttgctacaccgaaatgcggtttgagggaatgtatgtcgtgggaatgaattaaatcatttttaatttactttttattatttatttaattaattattatgtatcttgtgtctcaggctgactgcctaataattttaatatagcttaattttaacttatacttttgttttcacaatattctgctgcatgctactatatattctacacttattattttacttatattcaaatgtactttttttttttttaaaaaaaaaacctataaggaaatgcactaaatattgagttggtgatcattggttaatttgtttaattattattattaatgcttactacttgtaatccatttttgtctattttttttttttgtttagttataatctttagtttggtgatttaactaatagaataaaatgtgagaggttttttttttttttttttagttttt

SEQ ID NO: 191224 - DNA, 3321 bp, Cannabis indica
ttaaatataaataatattccaacattaaaatctatataaaggctatcaagcttacaacacattattcatttgaccataatatttgaaaaaaacaaaatggttgaattcgaagaggttgaagattattatgaaaatggtatggaagaaagtttagaattagaatatgagttaacacaaccgaaaatcgaagatgaagttatagagcacgaaatgaatgaaaatgagctggttgcgtggaaaattatgctcaattttctaagcataaccaaagagccagagttaattaacgagtcggatcgaaggggcaaggagttcttatatatggaacaagctgaagaattctacactttgtattcaaaagtgattggatttagtgttagggaaaaaaataaaaaggcccaacacggaaggtgatgtttacattagaagttggttgtgttctaatgaaggtttcagagacccaaaatggtttcttttggagaataggaaacgtgacccacgttatttaacaagaactggttgccaagcttcatttaagatttgtagaaatgcaactactggtcgttggtagacaaaattgttcaacacccatcataattatatgtttgcggtaaactttacaaaacctttccttagatcgaacataaaatgtacagattcggctattgagcaaacactcacaatgaagagagcggggatgaaaacaacacatatttggcagtatatggtggaggtccatggtgggtggcataatattggttttattaaagacgatctttaccatggtcttcggaaaaaatactccacatgggatgattgtgatactaagacggttatgaaatatttaaaagcaaaagaaggaccacacccagggttttggtacaaatatgaagctgacatggaaggaagattgaccaatctcttttgggcggactcaagttgcaaagtggattaccaattattcggtgattgtttggcattcgactcaacctacaagactaatcggtattatttccacttaaaaatttgttttggcttttatttttgaaattgttatcaattttagagatttctctttttgtggtgaatcaggtattcgaaacctttggtgatactactaggttctaataatcacgacaagacttgtgtttttggttttggattactagttgatgagagtgctgaaacatataattgggttttgagcactcttctaagttgtatggatggtaagtttcctggtacagtattcacagatggttgtaagtcaatggagaaagctcttgaagacgtcatgccgagtgttgtacatcgtatatgctcatggcatattttaaaaaatggaatgcatcacatacataaacgagggttcattgaagatttgaagaagttgatattcaggtaattaattaacaaaaaataatttgaatatgggctattgaattattactattcacagcaatttatgtagtatatatgatattttttcattttcaaataggtattacatggaaaaacagtggcacgaatattgagataatatgattgagaaatatgagttgaaagggaatatgtggtgtgaagcacaatttttgaccagagcaatgtgggctgatacattcctacgtggccattattttggggatgctagagctacaggaaggtgtgagtcaatgaatgcattcttaaagagagacttagttatggatttgccattgtggatgttcttgcgtcattgtgatatttctctagctatgttacgttacaatgaaatgagagaacactacaagacaacaatgacagatccagtactcaatcaaactaatatggaatcagtggaggatgaagtagcttcaatatttacgagggaaatatttacaagaataagagatgagattaaacggtctgacaaatatgttttttagaaagcatggactagaacgaattacacaatttgttcggtagctaaatatagacatgaaagcagaaagcgtacagttttgtactctgatgatggggaagatgtgagatgtgattgttattggtttgagacgaaaggaataccatgccgacatattttcacatgtatgaagtctttgcataaacattcattcccaagttgtcttatcaaccatcggtggcttaaggatgctaaagaaattttacctgcaaatttgggtcttgaaagaaagtgtcctcatccacaaatgatagaaaattcaagatacggtggtgtcaccacacaaactagtttagttgctttctatgctacaagatctaaagcttcattcgaattgactatggaagtgttgttggagtcgcttgtgaaattggaaaaaatttctagagatgaagattattcacaaaataatgcagatgatgatgagtttggtgataaaattttagattcaagggtacttccgacaaaaggtcgacctaaactctcaagggcatgcaaaaattcgtttggtggaagcagtagaagagcacaaagtaatagtgatgttcgcgctaaaaagaagaaaaagttaactagtgctccaagatattacaagatatgtaggggaacagaacatgattctaggaattgtccacagaaaacagattaagttatattttaatgttgttgtccggctgtttacaggtttgctatttttaaataactttggtggtgttgtagttgaatacttgaagaaggttcttatttttatatattttatatgacgtttttttatctaagtagtgtttattaatttatatatttttactattttcatattcagtatctttgaacaaaaaaatgcatttcaatttctaattctaccagtaaacacaacttgttatgttaatatgaaactaaaattttaaataaaaagtaatttcaaatttttgagtgccaaattccacatctcatgtgaaaatttgataattttcaatatctctatttcaatatgtagtcttctttacactaaactgaaaatgtatagttgtcttgtcatttgtttattttctttcccgaaatgttcaaattatttgaaaaatgaactattataataatttattgctcaaaaaatcaaaattaatggtagttttaaatatatatatagaaaaagtagttttaatttgtaatgtttgtgtatatatttgtgagtgccctgttaacatccacactttctatccttatttagtagattgaatagagaaaatgagcacttctcctccagttgtaggtgatccgttattccgtatcgaaggtagatatataatgccataagcgttagtggtatgagcgattctttttttattctatccatctattcg

SEQ ID NO: 191225 - DNA, 1976 bp, Cannabis indica
aaaaatcttatcatcgtgcagtgcacacagtgcaactttctgttttaacactaccccacaacctttcttcaaaacctccctcttcttcaaagattaatctatttcattccaccacttgcaaacattttagctggaatacaccaatataacctgaatattgctatattgctataaatataactcagatcggaaataatgtttggcggggacattaatatctttttcttgttttttttccctctccccacagcatgaagctatatccttccaaggacttctacaaatcttcttatctactgacttattattgcccggattggtgccttacctattcctttgtgaccccaatttgctctattcattttgtgctataatgaaccctttctcctctgaagtctccattaccattttcattaatagcacattattccttagtaacaaattcttaatttctaaacctcctttacacttggttttacacagactagatgatctcctccatgatcccctgctttccccccaaaaaaaggtttctcattaaccttcccatttccaccattgaaataggagctttaaataatgaaaggtaataaattgccaaagacatcaccggctgtatcaaagttagcatacttcctctttaaaagtaagcatgtaagccttttttacaaaccttgtgttagacccgagatatgggtagtatatagataatagggtacatgggtcattgtaaagggttggttgatgagttagaacagtatttatatatatatttattctaactgagccttggctcttggagagtactctgggtctctcgaatacccagctgttctattgttttgtttattattttatcatctaatagcatatggtttctccatcgactagatcatatgctttttcaaagtccactttaaatataactctctcctgctgctgcataaaatcttccagtaattcattaacagctagaacaacattaaatactttgccttacagctacaaaagcaaccctttgcttttgcgattgtctcacttaacacttcctttagccttatggacatcaccttagaaattacattgtaaaggcttgtcacaaaacttgtatgtctaaagtttctgactttatagttattttttctatagtaataagaaacaggaaaaaaggaaaatgcatcttgtcatatttactctcagctttgtactgtatttattctaatcatataaatcatgttcctgtgatgggagtcccattcttgggttttcaattttgtagggatccaggcaacataaaactctcaataataccattgatgtcactattttgaagggggtgagggtctgtaaaaaagcacaggttagagaacatggaatttaaaacatcaaattcactttctcagttctttcgttgataaaccttcttccccctgttttagcctttctgcattatttgtaaaactcttttcatatttacttggtcacatgctcttcaaaatcagaaatactcatttggatgtttcttcaggatggtgtgtgctatgcagaagaactaaccaggaattagctgaactttagcctatttagaatgtttataaagtttgtgcagtaaatggattatgagaaggttcatggttttatgaggattcgggcttctttttgttgttgttcttatttcctttttacctttgtctttagtaattgatatacggtattacttattgggccattatattcacaccccaacaccccaatattcaaaaaaaaaaaaacttaaaattaatttttaaaattttatatattttcttgttttaattgtttttgtcttagtaattaaaatattttttattttatatatgtactgtttagaaggtgagaacatataaaaaatagaacaaagtataattaaaattatatattttagggtaatttggagcgaaacccctttatgttttaattttatacacttaacaccc

SEQ ID NO: 191226 - DNA, 4044 bp, Cannabis indica
agtccatctacaaatttgtcttggtcttcttgggtaacctatcagtcatgtctgcatccattaatatgaaatgctttctcactaaattgttctgctcataataaatcttgctaccatagtcactgccattaacactttgcctacctacttctcctcccttatcaactacaatctcctcaccattagcttcatttaaatttataataccaccaaaatttcttacttctattgggttatcatggttggattccttgctgccctgatactcagctgcgtgcttgaaagcttctagcgcatttcgcaactcggcctaagatatggaaagccaatgtcattagttgtttacatatgtgtgtgtgcaatgttgatgagtgtaacgaaatgaacttacaatttcaaggtcttttcgttgagattcttcattggcttcctttaatttgtcctttgcttcgaggattgtttccatgaccacttcatggagaccaccaaccatttgtagtagcattgtcgctatttctgcacttacctgcataatgtttacgaaatgaagaatcaaacaacagtagacaaacacaaaaacgattgcagttactaagagttactgtactcacatgtttgacatcatcaggaaggggaaggccttcaacctcattgacacaggggattttaatgacttgtgtccccttgtctatttttggcattgtcaatgtccatggcggcaaagtaattccatggataacatcactagttcttctttgaacactgccacccgttgtttcgtcccttctatccacaacattctcttgtaaggaagacgcaacatgactcttttgttgaacaccactcatgcttccttcccttccatccccaacattatcctgtaagaaagatacatcacaagtcggttgaccatcactacctgtacttccttcccttccgttatcatgtaagaaagacatgtcacaaactggttgaacatcactcgtgcttccttcccttccaatatcttgtaagaaagagatatcacaagctggtcgaacaccgctcgtgcatccttccctttcattcacaacattgttttgtaagaacaatacattacaagttggttgaacactactcgcgctcccttctcttccatcctcaacatttccctgtaagaacgacagcaatatcatgttttatgcgaacaaaaaaaggagaatgcaacagagtataaagtgttcatctataccattgtctttgtttgcactaagtcttccatattgcagtttggtttaagagatggtaactctttagctgctgccaactggtgtgtgtgagttggtacaaattccttaataatccaactgcctttcttgcggtcataattaacacgaaatgcagcacaacaccctactcttgtcaaagcctttggttttcgctttcgatcaaccctttccagatgcttttgacgcctctggccttccttagaacaaacccatctccttagataaactaaaccgcgtttatcacgttttacatcatcttttcttacattaaacccaataacacttgaatacatgtagtagaatgcttctgccttttcaagggtgtgaaattccaaaccaaccatagtttctgttgtcagttcttcaaaacgtttatcgatatccaagcaaaaaaagtgtgattgttcacatcttctaagcaactttgagcttgaactgagacacccgttgtgtcaccacattcaagctcaaattcattgctccttccaccacaagatccttcattacaattattattaagacagcatcctcgattgctaccaacttcttctctcaaagagcttatttgctcattacttcctgtgtttcctttcccctcaccctcagctgcatcctgcaacgaagaaaatcatactaaattaaaccgcaaaaatcaaaatgttaacatactaaatttctagtgccttcaccttctcttttactaaaccaaattcaacattctgatttggtggagtaactaacatatcaattggttcccatgggtgtgtgtggtttgacacaaattccctaacaacccacttgcctgtctttctattgcaacgcacagataatgaagcggaacaacctactctagtcacagcccttgatcgtttcttcctatcaatcctttctaggtgcttttgacgcctttgcccttctttagaacaaacccatttcctaaacacaatagagccatctttgtctcgtttcatatcatgtctacgtacactaaatccaacaacattggagtatatgtagtaaaacgcctccgccttttcaagtgtttcgaactcagtgccaaccacatcttctttgaccaactcattcatacgcttatcgatacctaagtgaaagcttgattgttcccattctctgaagacatatgttccaacttgagttggccaacgagaatcctgccaaggaccgttaattcttgaaactccgtgtgtgtgatttggcacaaattccttagcaatccatatgcctttatgtttactataactcacacgaaacgcagcacaacaccctattcttgtcatagcccttgttcgttgcctccgatcagcttgttcaatgtgtttttgacgtctttgcccttccttagaacaaacccatctcctcaaaacaactgaaccacgtttatcacgtctcacatcatctttccgtacactaaacccaagaacattagaatacacatagtagaatgcctctgccttttcaagagaatcaaataccacaccaaccacatcatccgtccccaactcttccatacgcttatctacacccaagaaaaaacgtgattgttcacatttttctaattcactttcaacttgaattggcgcatcctgcactggaagctcctcagtagatgcagccgtgttctctgctctaaagtcactatgacaacatctaatgagagcacattccgtaacacactcatctgtacttttgttgaaagaactttcattaaaatcgtcatttgcagagcacactttagtactaccatcttctctcaaagaatccattgcctgcaatacgaaatatggttatatcatcttctctgagataactgatcacatgactaacacaaaccaaggttgtagattgaagggaaaagataaaagaaatcaacttatacaattgtaattcaacatataagcagtaactaaccctgttacactcactccctgttttcaaaaacaaatggtacaaacacctactttcagtaataataattctattaaggttttcttcaaaggcatagataaagatcactgttttttcctctacataaggaatcatctgaaagcaactcagcataagcaagtgatgataaaaacaaaagactcatctggagttttttattttttattttaattgctctttacatacattaattggtaaaattaaaataatatacaaataaaattagaagattcaacaacattaagtttaacatcagaaactataataatttaaaaacacagagaaacatacaaaatcatctatataatcaattacccactatttacagcttgtaattcattctgaattattcacctcaagaacactaagcatctgagtattgacgatcaattaggggcatacctaatcatgtaacattttccactgttatcaaaaattgattggaaaacaataccaaactcatctttctatcgtaaagatcaaatatttacacagttttgagcctatatatgaaaaaacctaaaccaatgaaccaacttcgagaatggattcataaaaattaggttgcccaaaggtgaaacttttaattaattgtacgaattcaaagagaaagagaaatcacatacatagattgcctgagattgtaagggcgagaggagaaccgaacgataatatcatcggtcaggcgtcggccggtggtccgatgggattttccgagaacccattacccaaaatgaaattatgatttattgctttttatttatggaaaatgaataaaagaattattataattattataattattataatt

SEQ ID NO: 191227 - DNA, 3638 bp, Cannabis indica
tttaacaaaattaagattattgtcacagattaagagagagatatcaacaatgaagttgatcaaacacccaaatgtcttaaaacttttcgaggtaaagaaacattaattcttacttccttcacaccttttatttcaactattttgtaaacaatgttgaattaatttgtaatgccacctctgtcatctgttcttacattatacattaattaatacatcaggttatggcaagcaaaaccaaaatttacattgttcttgagtttgtggatggtggtgagctcttcgacaaaatagtaagattttttttctttattcttttttggggttgagttttacattcttggcttagtgtggaatgtggttagattgtattagtttgttttaactgggcacatgattatgaactcactagtacttatcccttgcttaattacttaactcttatctgactctactctatgatataggccaaacatgggagacttaaagaggaggaagctagaacttatttccaacagctaataaatgctgtcgattattgtcacagcagaggggtttttcatagagatctaaaggttttaatacactacttttttactgttttttatcaaatctgatcaatttttatatgagtaaaatcttatgcttgttcaatatttttattgacttttcaactatctatatgataaggtacattgttaacatggtatacaataatgcatgatcttttgcagcctgaaaatcttcttttagattcctacggtttccttaaagtttcagattttggtctcagcgcaatttcgcaacaagtacaggtgagtagtagagcatacagtttccacttcttttggagctagataataaatattattggtggggttgggagaggtggagtaagaaattaggataagatcgatattgtcatagaaaaatacatgtttaatttttaggagaagtatatactaattattgaaatggttaatttattaagctagttcagatgatcagtaagcaaagagtcttgaaatatatataaaagagtgtcccactacgtacttagaatagatgcatgtcaaattattaactcacttataagacaacaattatttactttattaattgtcaattaattttgtgtgtaaccttttcaagcacatcttaaggcttattttattttatggccattatatatggctagatattgatcatattgtttatccaaattaattcttgtttacagggagatgggctgcttcatactgcctgtggaaccccaaactatgttgctcctgaggtatcttggacaagtattttaatttaaagacatggattaattttacagcttatatatgtacattgtattatattgaattttgttatatataatgtaatacggtgtgtgaaatacatccatatattgcatatactcatgtatagtatttttataattatgacaggttctcactagtaaaggttatgatggcacatcgtctgatgtttggtcttgtggggttattctctttgtcctcatggctggttacctgccttttgatgagccaaatctcatggctttgtacaaaaaagtaactatactcaatttatataaagatgatggcatatgtgatcacttacgtacatgacacacaagcacacactaatgtattcttactatatccaaatcagatttgcaaggctgaatttggatgtccaccgtggttttcatctggtgcaaagaaactgattaagcgtattcttgatccgaatcctcttacagtgagttcatatacaaaaccctgctcacttctaattacatcatgaagtttatattctaagcaatttttttaattggttgcttttcgctaattcatactattctttctttcttttattgggcagagaataacaatttctgaaatcttacaagatgaatggttcaaaaaggggtaccagtcagcacgttttgaaaaggaagaggatgtaaatcttgatgatgtcgatgctgctttcaatgactcgaaggtgaaattttttggtcatatatatgtcatatattatctaagataacaaggcattgcatttgcatgtgattttctaacttcttttttatttccatcttgagacaacacactatttatgcatatatatatttaacaataaattcaggcatgcagctgaatgaatgagaaacaaagtacgtacctacataaactacttaatcatatatacttgttgatattgcaggaaggattgataacagaaaagaaagagaaacctgtttcaatgaatgcttttgagcttatatctagatcacaaagtttcaatcttgagaatctatttgagaagcagtctgtaagtatcatatgattccctggttttctttcaatataattcgactatgtattgtagaatatgcaacttcccattttagttcttctacttgttttgctgctaactatttttttcttttttcttttctacaattttgatttgatgattttgtgatatagggtcttgtgaagagagaaacccgtttcacatctcagaagcctgcaaatgaaatcatggataaaattgaggaagcagcaaagcctttgggctttaatattcgcaagcagaactacaaggtacgtacgtagtctaattaatattgttatatatgctcctctcttgttctatttatttattttccagttgtaattgacggatatttttggacaacacaaatatttaagctcaaagaagacacataattattaattatggttcaactaaattgcttacatccatgttaaaggataaaattgtgattttaactttttttcgtttttaccaagctcattattttcataattttacttatttatttacctttttatgctcacttcaattttttacagatgaaactgcaaggtgataaaactggaagaaaagggcatctctctgtagccactgaggtatttcattattagttagggaagtgtattgcatttattctttccaatatacaaaaacttttgtgaggaccaaaactagtatcaacttcatttttacacatgacaacgaggcagacacacaaacttgttacacgtttatgtggcaaataatttcactactcataccgaaatttatatcaaaattgggaaataacaaaaaattattatataaattgtacagaattgtaagaacaaaattatttatttacacgccactgcggtgtaatgagtactttgttttccaaattcaggtatttgaggtggcaccctccttgcacatggtagagcttcgaaaaactggtggtgatacactagagtttcacaaggcaagttgtttctcttgttttgagattgtgtgttgattattaagctcaacttgacagaaagaaacagaagccatatataataaatgcaaaaactatactactttttttctataattcccaaccatacaaaaatgaaagatctaatattgcctcattattaagttggccaacttgagaccatattaattgatctgggcaccccacactctttttttctttccatttttttacagttctacaagagcttctcatcaggtttaaaaagatgtcatgtggaaaactgaagaaaattcagaagaagtgaggtaatctctctctctct

SEQ ID NO: 191228 - DNA, 1598 bp, Cannabis indica
aaacttccaaaaagctactactaggccaaacacacattgatatgtttgtaactaaagcactggctggtatatttcagtttagcaaagcctaataactcatacctccccaattgtcaaagcttgcagtttattcttggaattaacctgttggccaacccaaacaaagatatcggagtgacaatccaagatgaatatgtcttcagtcattaagtcatcctgggtaaagttgtatatctctgtcacctgaaacaatgataattctttaaataaatcctttttttttctgtggataagtccactgtacttttactttaagaattaatttattttgtttcgaaaaaacgttatataaattagagagaaacaaaatattgtaataaacatgaaaggaaaacattcagtagagcatctggtatactcgtaaagaaatgaataaaatataccttcaaaattcctgcaaattgcgtgcattggcccaaagaacgaaaagaaaagaaaaggaagttcaagaaaattacaggtcagataaatgaaaaaaaatataagttcagaaataatataattttaccatctattgacagaatcatccataccatttgaaaaattgcaagagaaaagatgaggatcagtctcggcatcctttacaaccttttggctagaatattcagactttccgcctaacaaatcccaaaactgttctgattctgaaccttccttttgtggttttgactgaatattaggctgcaatagagcatattaacaaggagattataacataacatgaatagcgactacggattttgatgaaaaacataatgcacaataaatgagagcaaccttcttgaaacaatactttttcaacataaccagatcacttgtttgactctaacataatatcaggagattcttatgacaattgaagataaaaagcggaaatggaaaacctcagctgctctgctatctcagtgtgcatatgttaaagccatgacagagcactattcagtcaaagtttttagcagaaagaaaattaggccaaaccttaattaaatcaagttgcctttcaacaagctcatggtgatccgaggttgtcaggcttccagtccatgtaaacacagttgacccgctatgtaagatgaagcagtaagaagaattcaaagatgatgaagcctggtgaaatgacaaagaaaaatgaataatacttccatgcaggacacatgcaaacatttcttaaataagaataaataaattgacatactgtgtcgacttggattgcttgcatattatcaggcccagagccctgtactcgaaataatgcaacaccatcttcttcgtatgtctcatctggaacttcattctctgcaatgtacttcttatagccatcactaagaccaccctgattgaatttagaaaatcatatggtggtcaactaaaaacaactattattaattagattcatggcaaaaaacaatgccaaatgtattctatatgtttgttatctcaaaatttcactaaccttataaactataatgctttggaatattaaatagaactgaattggttcatttccttcatagatgcgagcctagaaaccaatgggg

SEQ ID NO: 191229 - DNA, 3938 bp, Cannabis indica
tttttttcaaatactcagctagaagttgtgctgcaagaacaagttttcttgaggagaagctggaccaatctcttcctccaaactcctcaacccgtcgttggcggagtttttggcttccaagttctttccctctaagtctgcctccgacactgaggacttcctcctctgagaagaggccacacttgggaaagttatccatgatggagctctgaactcaattctttgctcttcgccttctactacatcagtttcggatgctgatctgtttgaagatctttgagatggtttcttgtgcagcctactactccccaaaaccacctcagttggtaaaatcggttgctcgttacatgggctgcccattaacagtgctagagctcgttccaatgatgttgtcactttgtccatggatggcctttccttacctctcattctcacacatttacaagctacatttgcaatccttttcaaagcttctacatcagatggaagctttaaaacaggatccaaaatcgcagttacgtctcccgattttatcagaggaactgcccattcaactatgttcactgccctctctactacatttccttcttcatattgcatatgaatagctttcttgccactgagaatctccaacaacaacacaccaaagctgtaaacatcggatttggttgtaagataatgaagcctgtagtactcgggatcaagatagccaagtgttccagctggaagctcaggcaatggtgagcaactatccgcaggccccagtagtgacagaccgaaatccgccactcgggcattatgttcttcatcaatcagaatgttcgaagacttgatatctcgatggattacaggaggacaggcatagccatgcaagtattcgattcccctggctgcctgaactgctatggttactcttctaacccaatcaagttgttccttaagagctatgttcttaccatggaggtgttggtgcaatgatccatgagccatgtactcgtaaacaagaagcctttcctctccctcctcacaatatcccagaagattaagcaaatgggcgtgatttaatctcgagagcaggtctagctctgtatggaactctttccaactcttctgcatatttggagacataacggctcgtttcacggcaacaaccgtcccatctttcaaaaatcctctgaaaacatatgaaaaacttcctttcccaactagagattcttctttaaaaccgcctgtggccctttgtagttcatcataagtgaacatctgagccctcctgatcttcaggtcatccaaatcggggcgaatcctaccattgtctttctggaatgaagtactattccggttactcttcttggacttagtgtcttttgttgagcactgacagtccctcaacttgtaacggacatacaacactgcagttaaggacacaacaatcaccaagaacacagcaaacgcaatctccgcgatgatgacaggcaattgcagcgaccaaaacctttcgttcttcttctctgctagagcgttagaatacgaagaacaattagaaacacattcagcagagttgcatatggaacagttatactcacaatgcctatcaaaattcaatctgcattcagtcttctcatacatttcagctggacaaccactgctgcaaggcaaacaaatcctagaatttggatctttgcaagaggcattcttatggctgagttcatagaaatctggagcacagggtgtggacttgcagagtccaggagagacagccaaagggagagaagtaggaaaaccagaaccccaacaaacgggcaacagagatctgtcagcaagaatcccacaagtgaagtaattcccagcaataatctcataaacctttatgccattaggaactgaagtacttggtttaacaatgaagccccagcaaataactccccggtcatagctcctaatcccacaagcatgaaactttcctccaactacagaaagcattgggtcgtttggtgccaaatctacattgccttgaccaggagaatgagcaactgagatctcttcctcaatatccaagcttcttccccaacaaaaggctctagagttcacaccctccaatatcccacaaacgtggtaaccaccagctgcaatcttctgaaacctcatctctttggggatcaaactgctaaccctgctgctagtttcatcaccccaacaaaaaacagtcctattctgagcaaataatccacaactgaattctgaaccagctgagattgagtgaatctgaccatcaaactcatagttttttgtcatgttatacccccaacagtcaacaaaggaagtgtttctgcgctttccagtgatgggttttcttaatccacacaaatggtaatccccagcaccgatttcaatgtactcaactccttcaatcataggttgtggaacacccatttggatatagccactactaccccaacagtatggctggttagtgttcataagaaggccacatacaaatccatcaccagctgttagaccaagaaatggaaaacgaactggagttccatttgttatagctgagtttgacccgtaacaagctacaagatgagacccatctgtttctaatccacagaagacagcacccttttcaccataagaaactgcaatcgaagacattgaccctagccctgaaactgagcaaaccaaatctgataaaactagtaggaataccaccaaaaccccagctctccatgtgcttgtattaggagtccagataaggaaacctcttaaaatgatcctcattttaagctaataaaagcaaaatagagcttacagagaaggcaccagttctgggattcgtctaaacatgtgaaaccgccattaatgtagtttacttagcctttcctccatgaaagtagaatgaagaaaaggcatgcaatgcaaattatatccccataaatgaatgcgaaagtaaaagcaaaacgtcatgctactaactaaccaacgcaaaacactacaagattcaaaccagaatacaccccattctcaaagcaattcccagcaacttcttctgttcttcttcaatacccaagtgaaaaaaaattcatactttcctctctttatccagcaaatactaacacttgcccatcaaaaagcacataaaactgaagtcaacaaccaataagaataataaacaaaagcttcccagatcggtttactttgacctcggatcaagaaacaaaattcagattacttttgaaagcgctctctctctcaaaacacagcttggcttactttcaagttcatttacaaagctcaactcaaagttggtctcatactgttttctgggttgaacgagaggtttggtggtgaaataaaacgaaatgaataccttagaaaataaaagaaaggaaatgaaagctgggttggttgcagggtattgttgttacaggagaaagaatgtgtggagagagagagagaaagcattaaatgacatgaaactgcaacctctgaaaatggcctcagtgtaggtgaaagcaataaatgagaagttaatgcatatttgatctttccaagcttcaatttttttaatttttttttaaaaaaggcaaacacactcacacacttacttttccaccttcctcgatttattactttgttctttctttgcagaatgtatgtatttatgtatctaaacttccctccctttgtacccagtttttcattttcttaatagttctacacataacacaacacaacactttagcgtaaagctctatagctttttcttcacatgtctcttcttgcatgcatgatttttgttttgtctctctctctctctctcttctttttaagagagattattttgtctcattattaacggttgtcttttttatttattattttacttgtacaataagcttacgaaaaatggtgtatatatatatatatcatta

SEQ ID NO: 191230 - DNA, 2324 bp, Cannabis indica
atatttgtggactaaagagtgatcgatcccaacatcattattgtgaaaaatatatgtctaattaaccaagcagccttcaccactactattttggacactactgtgtcgaatgtgaaaaatgtcaaaatccattcattttaaacttgttaaaattaaataaagagcatatattgtcaaatctggctacttggagttacgtaccatttgataatttttaaatatcaatgagatgcataatatatatatgtactcttgagacagagactaggtccagtatacacatgtgtactgtatacaatattccaacgtgttagttacagtaatagacgacaaactactagatgttaagtgtgtgggaccacaaaattaccagttgcagatgcagtggtactcgttaattatatatcatgtactactgtgtgacatttttagttttttaccaattcttttgttttgttattatataaaaacatgcatggtctttgcacatgaaattattagtaggtgagaattccttttcatactctatcatgtatatatgatgtgtttactaattaattaactcaaaatttctgaattaattagttttaaaatatatttagtgttttttttttcaggtattatagtactgctaaatactaataataaatatcattatacttcttcagatcactaagaataatctgagatatggcaaactatattgcaggggcctactatttaatttttttcttgttaagagagagattggagggtaaaggcctagtggggtggctaaatatagttttactataatattattttgaactctctaatttataatatctacccttggtattattagctctataaaatatattcagttgtcatttataataaatagggaaccttatatataaatgtatatgctgaaatatatatcacttacgtacatattttggcaaaagaaaagtacatacatatcagatcattatatatatatttatgtatagtaatggatattacgatcattttttttgttaataatgctttgtggtcggctacatcatttgccaacctataattagtactaaaatgcttgctcaaattttatgtatgatcaacatgattaactcattagatattcgtatgttgagttaattattttctctcctataatgttataataaaaaattatagtcatgatggatgacaatgtaaatgtatatataggagattaatttcttattatgaacccaatataaattacgtatttttctacgcgattaagtagaatatatatttactggaagtactgaagcaatatatatgataggtgagtagttcaatttctcttaatttgtatatattatataaataatccaaattaaaaattaattaatatcaatgatcacttctctcttatataggcccaacaccattcctattatatataatatatattacgtagaatatgttggagcatgcttttgttataaacacaaaaagaatatatatgtggccatttattatacccaaaaaaaatgcatgtatacagtcatgtatggatctatgtgtatcaaaatatatggctctaattaattggagctaattaactattatttagtttatgatctatcggatattatatattgctaatatatagtagtgaaacgaaaccaacggtaacgtggtccatgttctcacttgttgatgtattatgttaattagtacgtaattattattagcttaacatatataattgttaattatcaaaattaaatactaactatttaatcataattatatatattatttttatgataatttaagtggaagctctcacaacatgggtgtgcagtgttcatgtgtcaatctggtggccctaatcaacacctaataaaccctaaataaataaaatatcgtttaattaattaattaattgagagtggttattttgttcttaaagacaaatgagtgaatttttaggggtaggctatcgtaggagttggcatataatttatatagttaggtatatatgttgttcttaattatttattatacattcctcccccacttttctggacaaatatcctatctatatactatacacgcatcattaattagtttttattatattctttacatgtatcatgtatatgtatccattaacaaaagacacatgcaataagaaaaggatataaatgaaatgagatacacaaataataatataaatacacagttgtcaaccattactacatataccattaccatgcacgttaagaaaaggaataaaaagccatgaggagtattattattgttacctggtactagtagtatcttac

SEQ ID NO: 191231 - DNA, 3484 bp, Cannabis indica
gggggtatttttctctttatgagtatcattgtttttcagagttttttttttgaatgaattgtttttcagaatttattaatttattgtaaccctaaaaaagatgtatctgtgcacattacttttcgctgtagttgattattcggttcggttaaacggataatttgattttattttttttagaaatctgcataactgtagctggcatgagcaatatgggatggttaactctttgtttggtttcctagaaaattagggagaggagaaaactaaaagatggtcatgatagagatttgaatgtgggttaatattattaaattaagtggatggtttgtttcagtgtgatggccaatccaaatataaatcaagatagtcaatgctaatgaagattataattccaaactttttattataggacattttgtatttagggttataacttctccatgtgttaaagtggaaggtatgcaccagtacatcctttaatgaagatttatttttgttttattatgtttctgatattgtgaatcccattgatatgtattttttacagaggaaaaagagatgcatagcaaggttaaagcttgcgcacaatgcactcgctcgtgttggttgattcatgaagggaaacctgcttgttctgcttcctcttttctcaaaataatgtttgatatgcaagaatttgaatgcccggtattaaatgcgtatccatgatatagttgtagggtcttggtttttatttgaggattggaacacccagtattacctgataatataaatccatattattattttactactttttgtttactcaaaagactaatttcatatcaattgcattagaagttgccgattaatttggggaactatgttctagttcaatgaaattatctcaagccttttgtagtgtggcttgcttagttatcttgtatataaataaatgtagtcaatgcaagattgatatgcataaatagtggtccagatttcagagaaatatcatgggcttgcttcattactttttgcattatggtcctaacaattataagtgtattcacatagatatattatgttaccagaacttcatttttcacataactaatgggtattggggtctataactattttaattttattgcagtttttgcctccaaagtttgttaaagagttatcattagtggctggtcagaaagctattcttgaagatgcatatggggagcaatgggatgtgagaatttccagagttaaaggctcccttgcttttgaacaaggatggagtaaatttgcatcggatcatgatttggaacttggtgattttgttttgtttcttcacataacagagactcatcttgctgttaagatttatgataaaacttcatgtgagaaactaaaatttcctcagagatcaagcatcttgactaagaggaaaagagatttaactacaacttctagtgggagaagtggtccatttggtaccgctgatggaaattccattgaccgtaatggtattggcacctcttttagttctcgtgggactgcaaaaaatgttagaggcagaaatgaagtgattgatgtagtgaaagaacccattgtctcacaaaacaagtctctttgggattataaaaatgaaatttctccagcagcccgcaaagtagaatatattgaagaaacatgctgtataatgaatagagaaaaagaagaagaggatcaaagaggtcacttggatttgtctgttcttgaaacgttgaacgatgctggcagccaaagaaaccacaaagagtccttaacagctgaaagatttcctaagctatttgattctcaaatgagatctcaaaaggccgcttgcttgcctaataaagatctagtgaccagggctcaagagatattaaatgcagcatcccctttacattcatcaaattgtgagaaaaagggatctttttctttcaaagattattctaatgtaaagacctctggtactcccataccatcgtctgtagttaatcctttcgaaaatggaaagaacacttttaatatgtcaaataaaggaacaaaagagtgcctggttgctacagctgcaggttgagcagaactctaccaagttcttcagttgtacattatgtttatgttattttatttttgaaaatatttaatttactattacaatcaccaggaaacaatcaggtttcacaacccaaagaacagaattggaacaatgagcatcctactgccaaaaatcacgttcagggaaccccagttacttctagtattttcactcactttggaactcaaaaattctcaatcttatttgtggttctctaattgttctcatttctcttgtttaaattgtttggtatctcctccaataagattttactacttctttgaacaggtaaactaatgaagatcactaaagaagagcctgtggagattgaatcagaccctgaggaacctgctcaaaaactatctagtaaagtcttagttcttcaaccttcattacgttttctcttgtagaaatctatcaagtacacattattttgtttactctctattttcaaagctttgtatttgtatgcatatacgaacatgaatgatccaaaaaaatgcaggaacatcatttcagaatggttttggtgtaagtaaagatgataaggttcagccagtggtgaaaactgaaaattttgatttcgatggaggtcctacacccagtttttcccctgttctggcgacaaacagtaaagcttttattgtatgtcaattgttttccttttatgagcttttactattttgactgctgatatggttttcaactgaaactcattcgatttaatatgtttatggtaggctaaaatattttccatgtgtgaaagggtggactaaatatttcgacgtccttgtttttcttcatctgtctaactagttaaacctcttttctcgtacttttgcaggagttgccagaacgtctgccatttcccgttgtgaagggtaagtatgggtcggaaaggaaattagtatatttacgcagctcttcttcacaattgtggccagtgatttaccatgagaaacttaatgtgtttgttatatcaaatggttgggaagctttttgcaaggcaaatggcattcagcctggagataaatgtcttttcaaggttgtaagtaagtctgaaggcacatattctgtaagtgtagttagacaataggaactaactaggaagataactaagttcttttgtacatcattggtactttatgtatctgatctaagactttgtggtacaaagcttatggcaagccctttttgtgaatagtcctaacaaatgtaaaggctagttttgttgacaaaatgcctacctcaaggataaatgaaactaaatgaaatttcttgtagtagaaagattcatattcttgtaaaatgccatcagccataaaccccagggtggtctaggggtaagcgggagtgttcgaaagtccgtgcagtcatttgtttcaagat

SEQ ID NO: 191232 - DNA, 1997 bp, Cannabis indica
atatatatatatatatagctctaaaagggtacactttgttgggggatgatgatcttgatattatatgtatatatactcgtgtgcagttaccaatgagttttttattaagaaatttgttttaggtaggtagggtccacaataagagccaacaagggaagtgttgcttttttttgttgatcccttttcctaaaattgggaaacgtggaacttttcactctgatccctaatgcgcaacacacactatactattattaatcaaaaggctctgctcagtgtggaggtggccaccaagtgggggccgggagagaaagctagaataaaagatcaaaagctgggttgaatttcatggcagaattatttattatatgtacttgtcttctttttctttttcttttcttttttgtaaatgcattatgacaaatatcaatgatcacacacacatagagtttatatttataattatacctatttgtgacaaattaaagtaagttctgtagaccatatataattaaatcattgattgtagttttaggaaacaaagacctcttaagctctgttaagtggtactatattattaacttaaaaatacaaaaattatgtcaaacttttcttccccatacacgagttgttctcacctatatataaaaagataatagtaattatgataataaagttttatatctgcttttaattgtttaattattttgcttgacaaaacttgtttgccttctttttattttatctactaataatataaattgtagtagtgtagtctttaatagtgtttctataaatttggaatcatgagttggcatatatgattatttatataatggcaatcaaatttaattctcgttgagatatgcttagatcattaattaatttagaagaataataacaatcattttaacaatttaaaaaaaaaaaattagaagaaaaaagaagaaataatggatcataactattgagatacagttaattaatgatatatatagatctctttgaatcactatatccttttgccaaaatactattttcctcatgatttgggagtaaattttcttgaggaagatgttatatatattatatatatagcatggggaccattatgtcttctataggccgacactttaagcgggtttattttagtttctccaatatttaattactctgaaatctgaatcatgattcaactatacatacatatacacacatgtcaacataaattgttctgtttttatcttggtcttcttttcttgaatatagaactagttcttattttccttggaatccaatcaatcatttctggagtaggtaagttcgttgacaagtcaccttttttagggtttagcactgattgatgaaatatatgtacttggaaattaaattcgcattcatctcattaaataaatctacgtacgtacgtttttattatcagtcctgtaaattatgacacacataaaaatattatatatatatttatataataatgatggtccatggtctatatattataataagctctagcttgatagcgtcaacagtacatatgtacatgcacatgcagaagaagctatattaatcgacgcagttcatcaatattgacagtagtactacatttttgggctacgttatagttagtatatatatataagtttgaaatcataagatttttgtcaaaagaaattcgaagtatctaaaaacaaaaccccctaactagtacttatgcctttggttaaaaaaaaataatgatttacacaccttatgcatgattattaataatacatatgagatatataaaggttaatgcatatataaaaaccaagtttagaacttctttaattttttttattcatttttaaaatatatatatatatatgaagctaaaactttttctaggtattttgttatgaaattctaataattaattttaaagtgtacgatgaaattagtttgtttaaacgaaaacaaatcgaacaaatacatatatatatata

SEQ ID NO: 191233 - DNA, 4149 bp, Cannabis indica
caatcgtcctccacgcgccaccacaaattgaaccctggaaaaccataaggcggaaccccactctcccacgtaattctcctgctctgtaggaatattataataataataaagaaaaagaaaaaagaaaaagaaaaaaccaattcatgtcaagctttcatatcctttctcaagaagccagtatattaaacataagattaaaataataaatatacatattgggagaatattatacactttccttctctaggttgtttttaattattattattataaaaataagtatataaatttttgttgcagctttttgttttagagagagaaaactgtggtcttttcatttccatttccatttcactctgcgatctttacactactcaatacgtacatcttatgtaaacccaatacagttttgaatctctccgtacatctctctttctctctctctcatcagtatcgaagctctccattttgtccgtacgattttttgcgatgatggcttggtctggtgctgagtcaacacagaaggggactcggtcggttcgttacattcctccacacctgaggagctttaataacaacggtggcagctcgttcgttgacaatgcggactcctacgggcctaataatgccgagttggctcaatacggtttccgctcttatcgctctggtggtagggaatcgggagggagtggttcgagccgtggtgggcgaggatatgggcgcggcggacgtggcggctccgggcgtagtggttacgagattggtcggggatcgaacctgagtgggaatcaggacgttaatgaggttgctgataaatttgatgagttagaggttttggaggatgatagcattggcgatggtgggggtattaactttgatgcatatgaagatataccggttgaaaccagtggcacggacattccggcgccggtgaatggatttagggatatatgtttgggtgagcgtttgcacgataacatcaagaggtgtaagtacgtgaagcccacccccattcagcgccatgccatacccattgccattgctggacgggacttgatggcttgtgctcagacaggttcaggtaagactgcggctttttgctttcctataatcagtggaattttgaagaacgtccatcataataagcagtcacagcctcgttatgctcagactgcttttcccagtgcgctcattctctctccaaccagggagttggctggccaggtctgttggtttgagtctgactatcagttcttttattgattcaatatatttatgattttgtatcatctctattttgtttgatagcactttttgtgctcattatttaatacattgacgagggttatggttttgatgcgttgaatcttgggattgttgttttctgtagattcatgatgaggcaaagaaattcgcacatcaaactggattgaagattgttgctgcctatggtggggcatctatttccaatcaggttttgttccttccaagtttttataatggtttacataatttactatgcatattgtaataagattagaccttgctttgattcgttttgcgctgcatttgcattttaagttgtttttcttcttctgtgtttgtaatgtgctcctgtttttggctttgtggcggttgtggttgtagtcttgttgatttgcttatgtaactataagagtaaacatgaacccttagtaacaatttgctatgttttgctgtctttagtatccttaatgccttccctgttcctcagctctttagtttggaattttggaagtgattatcttagttgcaacctttactcacttagtagacatcatttaaagaagagtctcattgagattgataaaatatttggcatttgtggttgtactcttgttaatttacttgtggtgtatttagatcactttatccgggactaggagatcaactctttgtcataagttgcttctgctcttttaatcattgttattcttttgcatttgttttctctaaactctgtagcttcggaatttggaaagaggagtagatatcttagttgcaacacctggtcgtttggttgacatgattgagagggggagagtttcactgagatcgataaaatatttgacattggatgaagctgataggatgttggacatgggttttgagcctcaaattcgaaagattgttgagaaaatggacatgcctccaccaggaacaagacaaacaatgctttttagtgccacattccccactgagattcaggttgatcttttctttcatctcatttcactgcttattatttgtgcaaagtgctaaaatgtacctgtaaagaaatgatggaacaattaggtttagggtgaatgtttgatggaattaaagtacatgagctcatttttcttgctttttgattgaggcagaagcttgcgtctgatttcctttcaaactacatatttctggcggtaggcagagttggttccagcactgatcttattgtacaaaagattgattatgttgaggacatggataaaagaaatcatctgatgcatatccttcatactcatatgccaaatgaaatccggggaaaggtataatttgtcttattttctactttaaatttctgttttggtattttttgagctgttaaatggtgcttgaatttctcagatcttttgatcggttttagtgtattttgtgatatttacatgcagcagcttgccttgaccctggtttttgttgagacgaagaaaggagctgatgcactggaatactggctgtgtatgaatggctttccagcaatagcaatacatggggacaaagttcaatttgttagtatcttcattctttttactcatttatcatatttctataaattatatttttctccaagtaaaaacctttttcatgcttaatgagaccttacttggagttggactttggagtttagcaaggaaaagtttatgatgaaaaataggagaaaaatgttttccgcaaatttgataggaaactttttggtgcatattataattaattcaatctatccatgagaacatgaaaaatcctttggaattcaattttcttttcctcttcgaattcaaagttcaaacaatgcctaaatgttttgtgttgtcacttcttttcaacccccagatgctcatatttgcaatttcaaatcatagattctaccttatatgaaattttgtttctgttgtctgtgaaagtattcatgcacctttatttcttgttttcatcataattggtcttgaaaatgatgaaaatttgtagatttatagaaagtgatatggttgactagtttcagtattttatagcatctctctgattcctgttatatcttaacatcattttaacaaattataaattatgaaggagagagaaagagctttgaaatcattcaaaagcggccatactccaataatggtggccacagatgttgcttcacgcggtctggacatccctcatgttgctcatgttatcaattttgatttgccaagagacatagatgactatgttcataggataggaaggactggacgtgctggtaattctggtcgcaacggctttcttcaatgagaagaacttgacacttgcaaaggcacttgttgaactcatgctagaatccagtcaggtggttccttcatggcttaaccaatatgccgatagctcgacttcctttggccgaaaccaacgctctggaagcagcagccagtttggagcctatgactaccgcagtgctccttcaggaggagagaactatcaacactacagcccctatgttggtgaggagtcaaagatcgatgctggcaatatgaacaactattcgcataatgtttctactgatctctcggctgatgcagaaccctatgttgctaaaccatatgaatatggagaaagttatgataatatagttgccagtggctgggactagatgctggtttattgtcattggcgactactcatagtttctataataatagtttaaaaatacgaaggatgttagatgaagactaactacagatttgaagttgacacatatccttgtagttagaaattcgtttatcattacaattacaataccttttttcagctggaggatatgtcttttgtttgttaattaacctcttctgatcaatgaaattgtagcatctt

SEQ ID NO: 191234 - DNA, 4873 bp, Cannabis indica
cgactagtttctctcaggccgggcctgacccgccaagctaaaagaagtggtcgggccaggccggatcgtgccaaagagatcatgtcgggccgggtgaagcctgacccagcccgattgacattgctatatatatgtatattttactctatataattatttattattgttgattttttataaaattatatgaaaaataataaattaaaattattttaatacttaaaagaaaaaaaaagtattaaattattagtattttacaaaaaataaataattattactgtaaaaagaaaaattcacattctattcctatgacagtaatttttatattctcacccttatcataatattactgagcacaatcaaatacggtaacattgcttttctaagtttataattccttttatcaccctcaaaaaatgttaaacctatgaaatgaaacctgatagatttggtggacaagcattgtaaatgtaaaccctcatttctacaaaattctggtctaatattagatcatatcaagaagctcgatatacgagccttcttacattttcttgtatttcttgtctagcagcagataacttgtccattgaacaaagttaatttatataaaaaaaatgtcagatctgtgatcggtcctcgctgactgacatagttatgtcctactcatactattcatgcgtttagtcttcctcatattcttaatgaattggtactttattttattgaatatgatcaatgtcataattgtcaaagaatacatataaaatttcagcttactcaaacagagtggtggaagactagagaagaaaatgttcaagccagcatgtattctcaacatttttcttttttattttttactttcaactttggtgtatctaacaactttttctaattaacaactaatactttttacagtatgctcttttgtttctcttcacatcttgttctcaaagcatttttcttcaaccatctttttgctttacttcaaccaaggaagagaatgagatcaaaacctatataagacaacccttctctccttttctttctcatcaagaaacccttctcgtggaggcagtgattagtctcagagcctacttcactctggcattgaagacacctcgctgtcaatctgggatgagacagtagtatcagaggcagcatcatcaatgctcaagtttgaaagatcaccacctatggaggagctctcatcctcaccactgatagatggtgctggggatgcgtcagcatcagatgataacccatttgcctcgtcaactggctgctgaagactccagaacattatgctagcagttagagtgagaatcatcttttggttaacctgcaagataaccgatcattcagtttcaaacattctaaaagctcaaaaccttacatgaaagagaaacatgtgcatcaatctatcctgtgtcatattttctgctgatttaatcttgatttcttcagccaagaggggcgaaattacatttcttacgagtcatttacaaaatcaaattgcaacaaaatgctacctctgcgcaatgaattaaaagtaaatgaatattagacatatataacaatccacttgcagtctcacctccatgacgtcttctggtagtaagaagatggaacagcccagctttcgtgcaacactgattatgtacgtagcattcaacttcttttcatcatctatcatttcaagagaataagaaagccagtttatttcatctagggttttaataaattaaacatactttgcaaaatcatgaaagactgcaagcaaatcgtaccactttcaccctttgtaacaagattccagttgacaactctaggctccacagcactaagaagctcaagaatgaaaataccactcgaaaggctcttatcctgaagacaagtacaacactaattatacaacccctttataacactcctaagaaatttatgggttaataattatgtgctaccttaaagctatccatgtgagaagctctgcctgtgcttttgactttcttattagcccatttaagaatatcagcatctgtcatctccttcccttgggaatgagatctcaagttcttcaaaagttgaaggatattgaatctcatcaactgccacaagaaagctgcaggggtaacaaaaaattcagccacaaaaaaaaaatctttagaaacatatatctacaatcaacatcacgcaaacttaattcaggaaatggaataataaaagctcaatttctctgcccagacagtactcagaacaattattagctttgttcagcttcaaaaactttgattcacacgtgaagcacaacaaatagtagggattgaagccagcagagaaggggcaaaacaacttattcttggtatataaatatatacctatatataaaagaaagaaagacatgtaacacaaacaataacaaagtaaaatttaccaagtatgagcttcttatttccttgtacaaagtcatttccagccacatttaccagtgaaaattttagttgctttccaattctaataatttggttgcaattctctacttttctaaatggcattttaattggtggctttgatgcatgcttccaatgaactgatcctggagaaactttatcaagaacttctagaagaatccacctgcattaaatcaagattaagttagatgttgaggtataaaaaattctactaagaattttgagtacattgattcaaaaggtagttattgactcaaaacttagtcgagaactttcctagactaatgtaattgcaaaaattagagacttacccatttctgacatcctcaaacacattattgacataagtagcaatgcctagactattgatccacaatcgataacatctctcttctctagatgtttgcacatcttctgtcatcatctcagcataagaaatttttttgttgtctgtagaaaggccatttctgcagaaggcatagtctcaagtcaacttatgtagaagaatattcaattgttttcagcatgcaagagctactgtttcctgattacaaagaagaataaaataggggaaaaagaacaatctaaaaatatgagcaaggatgttagatttcaatttgaaacctttcgtggaatatttgtgccacaaatgctagatttagatttgatgaaccctcaacaatgtcctttggagataagtatcttttacaattcattctctcggcatgatcaagaaccaattttgccctttcggttggatccttactatccaacgtggttggactgcagtgttctggggcaagaacatttagcaggtaagcataagcctctccatcctgcgcatgcattagcaaaaatatacacatcatttttaattaaaatcatgataagaaaaatcagttcagcagaaaaaaagttaatctaatttcattttacttcacgagcgggcatctaactttattgaagtgaaaaatagaaaaagagtaccaagtagaaaaacctatgcatagttcatgacctacaccatgagtttttaaggtgagacattatgtctagtaagtagtaactgcacacctgactctaagacaatttcaatctgcattttaatcttttcctaacatacgattatctatttcttgaaaaattattaaagcatttttaactgaacctttaggtcggagaaaaattattgacaggtttcttgtacccagctttttgtaggtggaagttcatccatttcaataaaaccttatcaggaggtaaactcatcagctcttctacatcctgccataaatgaaaaaacgtgagacaacgctatccttaataaacaaaacagaaaacttgaaataaacatgctaatgtttttagaagataaaacttggaatgaaaaaaataataataaataataaataaacagaacttattaccttgctatcatcaaccaattccacaagctgaggagttttcttaagattgaggtctgccaacagttggatctgtcacaaaatgtgaaagtacgaatagatgaatccccatgatggaaatcccattatgcagtgtcaaaattaaagtctagctccctacctttataatttgggaaatcaatcctaacaccagatgaggctgcaaaaaaaaaaacagataaacttcaggttacacaaaggcacaattatgtgtctttattcgtatgaaaagtaaaacaatataaactcactcttccttcaaccaagtcctgggtgccaatgtttacaactgtgcagccaattgccttggcagagttgaggcacagagtatggttctcatttctttcccaaagattaatgattcgtttggtgttaatagcacgctcgtcaattgtcccaggtaccgcaacatttattagcttactgcattaatccatgaaattcttttagcacaccataatatcagctttaaggcataactatgtataataatgtataccatgttcaataccataaaagaactccatctttggctagatcaaaatagatcatttgtagctgggtctagtggaagatatttctttaaaaagggatcatccccaagataactgtttatgtgagcaacatatgatgctttctcagattcacttattgtgtgaagaagggtagttgtggtggctttcaagaacgatgacgagttcttctgatcacccaacttttctgtagtttggccttgcaaagtcagatacacctgaaattagatgcattaaattatcagataaaccccttctcaatcaagtcccttgttcatatataagcttaactggttttaatgcctgcatcaatttggctattacagtttagttgcccacttcaatgtggctctaatacatgaattaatagcaataaagtataagtgtaagagagagagagagagag

SEQ ID NO: 191235 - DNA, 3904 bp, Cannabis indica
ctcaataatcgatagagaacgtcctagtgtgaacattacagctttgtttatcagtttaaccagataattgtgttgaagatttgtaccttttattaaaaaaatatgggccatgctcaataatggacaaagtcctggcgcgaaccttattgttttgtttaccagtttaatcacgtttatcattgtcttgaagattttgactttttaaatcgaattctgatttttgaagtagcctgaaaaagaatttatctgaaatcatttcagatatgtcaacactgtttaacatcctaaatcaaggtgttatcatatcttctagagataaaagtactagtcaaatcagattcatgatatagaattattgtattaggctagatcagataggttcctgggacctagacatgtagccttaggtattatggcgttccccatccaattttggcatttacttttaatcatactagccattggtgactagtcatgttattttttctttttaatactcaatttttgtaatttatttgaataacagttggtatccttgttatttaatttttcttctgatgggtggttgttatttctgttcttttgattagtgatgggttcaatggagcgttccttattaagtttatctgttgatggctcacttaaagctgatggggaaagctttggggaagatttgagaaaacaaaataccatttcaaaaataggtcctgggggtggctctggtggaacgattcttttatttgtgcaaacattgacacttggtgattcttctaccatctcaactgttggaggacatggcagtccttatggcggtggcggcggtgggggtggaaggattcactttcactggtcggaaataccagtaggggatgcatatttaccgatagcttatgtgaaaggagaattcttaccgagtatgtatataactcattcacacacacacacacacacacacatatggtacttcataaccattgcttcatgaagccacttcttgtgaatcattatgttgttatatgctgatttgcttgtaagacacaccgttgtcttagtaaatggcttgaatgaaaataacgtattgacatgagtgcttgtattttctagaccattctgcaaactttcttttattacaagtaaacataatgctctctagctgataagaacggatcagtaaggagaaaggatattttacatcatatcaaatgggacctcaaaatttatgagttgttgcatgtggaagaaaggaccagttgtttcttgattttatgcggcaaaagccttctttgcatttctatctcatttgataatttagttagctgatgcttctttcctctgtgtggcaggggaggatttggtagaggtcatggtcattctggccaaaatggaacagttactggaaaggcctgcccaagaggtctttatggtatcttctgtgaggtagcttttatttgtcaatggtctatgctcctttttaggctcgtctggtttttgttattgaatatgataaattataaacttgcttttgatatttaatagaaacattaagctactaggttggtctagggaggtcgggaagtgggggagacaaggtttgaaccttggatctctagatattaaggttcttatggcctcaattaattaccaagtgtgctgatattcatattaaggttcttagcaatatactatacataaatttcccctggtggttttatttcaaaatttccttggttagccattttcctccactatattctaaaatacttaactatttactgtggaggatatatatctttcacccatattatattcttagtcttaccttttttttattttttttattttcactctaaatatttgagcaattggatttcaggaatgccccattggaacttataagaatgtcagtggatctgatagagccctttgttatgcttgtccattttatgaacttccccaccgtgctgtatatgttactgttcgaggtatttctcttaatatataccctgatttgtgctcttcttttctaagaagggtggttttatcattgcttcatgtctctctggctttccctctcttaaaaggttcttacaatggtgcctgctacagtttcatgaattatcacgttgttttttacaggtggtgttactgatactccctgtccatataaatgcactgatgatagatatcacatgccacactgttatacagcacttgaagaggtcgtatacacttttggtgggccatggttatttggttttattcttctaggtattctcatcctgctagctctagtacttagtgttgcacgaatgaagtatgttagtggggacgaggtaccagctattctgcctgctcgccatggttctcaaatagatcattccttccctttcctggaatcattaaatgaggtcaatgttctaatttcatttttgagttgtttgtgcttcttttatatgcaattatgttaaaaatactccttcattttgtgaagtattgtgaacaaatctttactttcttcaggttttggaaacgcacagaaatgaggaatcccgaaatcatgtgcatagaatgtatttcctgggtcctaatacttttagtgaaccttggcatctgactcactctcctccgcaacaagtaaaagaaattgtgtaagctctcctttaatggtctcacctactttttggcttatatagaagaagctttgtgtgtgataatttagggtttagtttcatatgttgtagaaggttattatacaaacgtatcttgaaatataagtgttttgccttatatggcagccatgaggatgcattcaatagatttgttgatgagattaatggtttagccgcttaccagtggtgggaaggatcaatcttcagcactctttccatccttgcatatccacttgcatggttatggctacagcgatgtcgaaaaagtaaattacagcagcttcgcgaatatgttcgctcagagtatgatcattcttgcttgcgttcgtgtcgttcacgtgctctctatgaaggacttaaggtttctttcttcctaaacttttgaacagcttgttgtccacgttatcttttgtttgtctgtttttagggtgttcgtaatttggttctggaatagcatgttgagatatttgccatatactagtaaggatgatgcatggctcaaaaatatgtgtatgaatgaaatgcattttcgcatggatttgtttgataaattaatgtgctctcctagtactcttggtgaaatttcagtcgatgttttagataagatgtgtttactaaatactgtcccaagttattgttacctggaagaactttgtccagtgttttccagctgtatttcatttgagtgatggtgtctatacacttggatttcacccgctgaagccactataaatttatttgttttccgttaaaagtattactagtaaggagaaaagagttgatactgatccaagggtgctatgaaagtggtggtgttgcaggaagtctttggatggaaatggaggttccagaaggtcatttattttctcatttgtcattagggaaaaaagaaattgataaaataaacatgtcagtccttgattgaaattgaaggggcggaatgcatattgtctccttgcaacttgcagtgtatgttagatgttaccaacattgtaaggctattgttgtttttgttgcaggttgctgcgacttctgatttaatgcttgcatacatcgacttttttctaggtggggatgaaaagagagttgatcttcctcttggtcttcatcaacgttttccagtgtctttagtttttggaggagatggaagttacatggctccttctctctccacagtgataacatcgtaacaagcctcatgagtcaggttggctactaaatctttgaatttatga

SEQ ID NO: 191236 - DNA, 2865 bp, Cannabis indica
cagtttgataatagataatagtacctttgcatggcagtctttaattcaattatctttgactctgcatccaaagcctgctttaaccgctcttcactaagcttgctagattcttcaaacttttctctgtttcatcaattttcttttccagtgaattcaccatggcctacaaaatgtcacagcccgtgtaacgttattaagcatcgatgataaagtttgtaagcaggtcacttgaaatgctttcatttggagcaggaaacggatatgtgtttgataaccctaccttgagctgctcattttcagcagcaagcttattcatcaattcattatcaataaccggaacctcctggatgacagggacctcctgaatgactggagcctgttcagctgctaactttaaagcctcgcgctccttgcaaagaagttcttttgtttctttaaactggacttgcatttcttgcaaagcagaatgcagtttcgcattttcctgtgttttagcttcctcaaggtcagcctgcattgcattgatgatacatcaattagaatacaataagaaataaggtaaagtttccagataagaggaaaaaatgaaactccacaaatataaaccattttcacataaccatcttttaccaaaatttttgttttcaaagttcaaacatcagcatcttatagtgaaattcttcatcaacccaaaggctgacaatatatgttaatgataatcacacaatttaaacttcattgtaggcattagacaagcagaaaaagaaagaacaatactcaatttactaaaaccgttatccaaaattaagttaagaaaaatactttcatttacgaaaaatcagcataacgtgattctttatcatattcaaagaatcaaactccccatataggttaaaaatagtagcttggagaggtaaatgctgacaaataactacagatgacatgtttagggatagcatagagtaacccctcgtttggtggattggagatagtattaaattagaaaaagaaaactatgacaaaatattaaaattataataagttgttcatttgcattaaaagttgcataaattattctgaagtttctcaatggaatttagttatatcacatgctctgtggataaagttctaatatgctctctgatgacaaagccaaaacacatgataaaagtatcaaactcaaccaaatcatatccattatttcaatcaaatatgatataagtaccataaatatcaattaatcttgaggaatataacaaactaaaaaaataaaagaataaaaaataactaattaaaaaaaagaagcaaatcttaccctcattcgtttctctagctgcagacgccaggtcaattcttcaacttgcttttccagcttatttttggcagcttggagagcaccagtttccttagcagcctgcaaaagattggataaaatcaaaataatattaaaaaagcataaaattactgtcaataaatgagacgaggagttccaggtctaaaatcaggaagaatacaagtttagcaagttgtaacctcaaaacaatttcttaaagtaatagaacaagcatgacattaacaattaacactagaatagatctaatcatgaatgagaaaaccttataaaggaaaaggagataatgaaaaagaaataccattttgagctttcgtaattctctgcgtgcaacttttcctctccaagcacattgtgtggtcactgttgctttctttatcgttaaataacgacggcgatctaagtatttccggcattgactctgacacaatccatagacaagaataagtcagcatagacaatataaaaaatggaaatacaaaccacagtgcacccataaacaaatagacatctatttgacatattgctcaaatttcagttgaaatagctcttcattgttcatagtaactgtattccaattacacatgctatctttacctggataacaatagcagctcttgtctgcttcctgaacttaaggtcactacgtgcagccatccctcgtatacatgtttgaattagaacagctgacgagtgcagcttttgatatgcattcctagaaagacacatacgataacgagtctggattttgatagaagcagcctcccttctcttgtattcatactgataacgtgcaacttgtcctgccatagatccgaagaaacataacattagtcatataaaattttctatcaatgtggaaaatagtctgtgatcgaggacgtataaagtaacaagaggatactattgtatacctctacaaaaggcttgaatttgaatagaagaaacccgtagcaagataaagcttttccgagcaagatatgatcgtactttcctctgtatgacacttgctgatcttcctaagacctcacttcgacaagcatccaattctgccatttggccagctctgagaaaaactttggttttaccaatctgtcattgaaaatggttaaaagacaaaaaagatcaaacgattttctatttcaagtagcttctaacctcagcagtagaataagattagtttacaacattcgggaacctatgaaactaaagctgcaatgctaaggaaaatacaattgggggtaggtaattaagaacgaaattagatcaaaattaaaaacaaaaagtgatctactggtgcttacctgataacccttgagatccaccttctctagaagccgcttacaagcagttacttcatcacagctaaaagtagacaatttaaaatatataaatcactcccgtaaatccaataaatatactaaattactaataatcataataataataataataataataataataaataatgtcctggattctgattagcctacctcccagcaaagacatta

SEQ ID NO: 191237 - DNA, 3069 bp, Cannabis indica
ctgctgaatgcagattgttctttatagtttcaggtacataacatttgcttctacatttaactgcagatatggacttggaagatccacgatcggttgctgaggcactagtacgatcgaggcaaggtatgcacggtttatttgttaattgaaatgataacctctcttttttactatatgaactcaagtctcgccttggttttattatatttgccccactggtttagtagagaccgatgaggatgtgacacaggagagactcgataggctttctcgtatgactgaaatagaagatcttcaagcacctcatgatcatccttttgctcctctctgcatcaaggttttttcaccatcattactagtagaaacatgtaataaagtgtatattttatctgttgtattttgtataaatttattttcttgaaaacaggatcctcgagactattttgatgcacagcaagctaatgcactcaaaacattggacgatatacgaaataaatccgaacaaaagaaatgcaacctcagtatcggtgaagcttatcactcattgagggattccatatctaaaatcaagactttgggactgagtaatcccattgttaaacctgaagttgctctttcggtaacagaaatctgatcattcaagtgataatatatgataggctgagttttagttttatgctgaaaagtataacttctcatctctatggcaggtttttaatggattgacccaaaatatctcaagcaccaggtaccaacttgggaagaatcctcatgagagtattctggacagtttaccgagcacaacaaaagacgaacttctacacgtgagttcccaaaacatagatctaaatgcctaaaagtttcttttttcttagttaatctttgttagagatgttatgtcttatgtgaaaatctctctcttgacagcattggatgtctattcaagagttactaagacatttctggtcttcatatccaattacaacaacgtctcttcatacaaaggttagtcttgaaccgcttttctttgaatctatatgccttagtattgagattcatggtgtcgatactcgatatacatgcaggtaactagattgaaggatgccatgtcaagtatataccggcagctagaggtatagtattgttgttcattagagtatctgaattccattttgccaatgtcccgaaaaaacaaaatttcgctacctagttgcaatcatgtgtcatgggattagaagtaatgattttttgcattttgtgagtaataacaggaaataaagataaagccttttgtgatctccttttgctccaaacagaaaaaaaccgataacaaattgtgtcaaaatagtttaactcaatcgaaaccgaaatgccttctaggataagcaaaacatgatgtggataatgtgtgttagtagtaataatgatggtaaggttttttgtggatgaaaacaggaaataaaggagtcagtgccatcagactttcggcatcaggtttcgctcctagttcggccaatgcaccaggtcaaaataaagccacacctctcagtagtgatttccctatgtttaatgtttgtttgtactatgaattagctatcaaggaagagtaaatttgttgtttataagctcttctcattttccatttcggtgcaggctcttgatgctgcatttcaacattacgacacagaccaacagaagagatcatcatcggctaaaattggagaagggccaaatggatattagtgtagtttggccttgctataatgaggagtaatattttggctcataatatgatgagtacaatttacttatatcaattcaattttgctttgagtttcatcataatgggttgttttttttcccccttaaatcccattgttgtaaaattgtgctattttcttaaaagtgaaagaaaaagaagaagaaaagtacccaattacttttttgtgttccttttcattactcataatcttggaatagtaacaagattgtttagctatagacccgaaagagtgaactcaagagtcaagcctttctcgagttttattttcgaagtaaactcgagaaaggtaactcaaaccgtcaagcatgtaacattacctttctcgagttttcttttcgaagtaaactcgagaaagataactcaaaccatcaagcatgtaacattttatggcgcaatataaaattataccaataacattaagacataaaattaagatccaagacctaaaaaatttgtcactctcataaaagttgagcttcctagtttctttttttcccttcatttttggtaattttattctccaaatattagaatttagagttatgcagctgcagccaactttataacctctcataaagatagggaattggtttctaagcaaaattaaatcaaccactttataaacttgaattcaaaaatcccttttctcaaattgccaaaagaatcaattttgaatctattgcataccaaaataaagcattgattgaaacaaatagaaatataataacattcaatcaaatttatataattaaaaaaaaaaacataataaagggaaaaaagaagccaaataaaagaaagaaagaaagaatctttaatacaataatgattgattaattagaaaggtggaggagcatagtaagggaagaaaggtcttccatttgcggtggctccggcggaggaggaataatcgacagtatccttaatcttgtgaaacccattcttaaaaactccgaaaccgaacaacaatccgatcagaacaaccaccagaattacacacgtgcaaaacatgcacaccctacttccacaacacatcttcttcttcttctttctttggctttttgatagtaaagatcggatctttatcaatatatatattatgggatttgaatgaatggaattgagtgttgtgtttgagagagtgaaaatgtttttaggtaatgttaggaatgcttggacgctataacaattttgggattttgagtttggcttatgttttttttttttggtttggttccttttaagtaaggaactttttttattatctcttctttttaagaaaataaaaa

SEQ ID NO: 191238 - DNA, 571 bp, Cannabis indica
ataaatatttatatatatttagtttatactgaaatgggttaccatgaactttagtcctcgactagtcaagggtcccacacacactaagaaaacagacactgtaatgtgatttatcatattataatttaatttccacaccgatcaaatgattagcagcagtgaagactgaaaagttataagtctgtgcacaagttgaaagtttcagaattatctttgcttagagagctagtgcttaattttgtacattatatacttttcatttctttaattaattaagcaacgatccctaagtttcagatagtaccgtctaatttataagaacaatagaaagtaggaaacatttcttagtggacaatatttttgtacctataaaaaaaaatgggtatttttgcccactcttgcctaccacattttcccccaaactctataaaagttaagtcaattaccaattctagcaacccacaaaaaaaaaatctccacctcgctaacttaaaaagaaaatactaaattttgtaccgtttaaaagtatcacattttttcacacctaacatgcacaaaattgaaactgcaa

SEQ ID NO: 191239 - DNA, 2828 bp, Cannabis indica
taataattaactttatttttatatacattgtatctatttaaaattattaataaatttttaaataatttataatataaaattaaaaatagattaaaataactatattgctttccttttttgcaagcaaaataactatattgttatttagaatcacttctatttttttttttttttttaattacaattatattgtattttacgataaataaaaatattcatagtaacaacagggaggaacaatttgtcaaaaatgaaaatataaataggaacaaagtgacgccgtttagcagttacacgtggaaacccatcatctgtttttagatgagaactcataagagagagcaatagatcatcagaagtagtgctacatttccctctgcccctgagatttcagggaaaccccacaaggccggaaccctaatctctcggatttcgttctagggtttttgtataacatcaccatggacggagacgacgaccactcggccaagatgattgacgaggagatctatgccaacggcgtcggtgaagaagagaaacgtaaaagaccaatcataagcggggagcagctcgacatcgaggcctacgccagtctctacacgggtcgtaccaagatcacgcgtcttctctttatcgccgaccactgccagaacaaccagacgatgcaattggaagccctaagaatggcgtacgatgagattaagaagggcgagaacacccaattgttcagggaggttgtacagaagattgatggccgtttgggcccggattatagtatggattcagcgtggtgtgctactgtcgaccgtagggccgagcagaagaaggagaagcttgagaatgagctcaatgcctatagggtaaccattttttttggtttaaactttgctatctcttttgagtatttagtgggattttcatggcatcttcggtattagtcgtttttttttttttttttttcttggatgttttctcatatgcaatttcatatactcaatgcagattagaattacgctgttttgtacttgtctgatttaaactcatcgctgcatactttgactggtcataattttgtgatactattgagtgtgaaagtttattatatgcaaggggtgttgggttttcgttgttttaagtgatttaggttgctgttttcacatggttacgtctatctatcgatttttacatgaatgataattctatttgacgcgagacctgcttgctgtgatgtacattctgggttgatacacgacagtgggtattgctttacgcttatcaaatgataataccctagaattctctttctgacagacctgtgtatatgtgtcttggtaaagtagattaattatgtataaatttgttgtgagttgtaacttctgttttgtcttgttgaatcgtttaaatgatacttgtgcagactaatctcattaaagaaagcatacgaatggggtataatgactttggagacttttattatgctcacggtgctttaggggatgcttttaagcattatgttcgaacgcgcgactattgtaccacatcaaagcatataattcatatgtgtatgagtgcaattcttgtcagcatcgagatgggtcaatttactcatgttacaagctatgttagtaaagcagagcagtcgcaggaggtcgtagacccaattgttatagcaaagcttcgttgtgctgctggtttggctctgttggaggccaaaaagtacaagcttgctgctcgtaaggtttgtgattatgtcttactacttctgcttgcattgtcaaagctttgtaaatgtaattaagaaatatgagaacatttcggaagtttatttatgagcatctcacttgagttacaagcttaaagcaaagtaaaagaagagagaattatagtaggcagacacaacactattttttaataaacaacatgataccatgatattattttagagcttgtttgttaaatggatgatgaaattcaaatctaatgttattaatatgtaagaaaaccttcatttttctttcacttgtcaagtcaactgcaatgagtaattcgtttcagacctcctcactaaatgctcttagatacaaatacctttgatcttgttatattttattttccttatctcaacaatgtactacttattagagttattattttaactaataattgagagtatggctggtgtcctacttgtttgcctccagcaatataatgagtagatggcagttttttcctttgtcctgcaacaaattacattatgagcttatagcacttagacacttgtgaattggaaaattatatagtcctaattaaatatttgcttacatgcttaattatctctgtataatcctgggaaaatcaatttattattgatatgttgggttgctatgtaatgattcttctgttcagtacttgctgaggtagttttaattttaagatgagttcaattaccttaaatggctcgtgctttaacctatgtgtggaatagtaattaattttttgttctatttcaattttattgttatgataaggtttgataatgacattccatcatgtcatgcctaattttaaagttttattccttcccattgacactatgcagttcttggaaactaatcctgaattgggaaataactataatgaagtaattgcgccgcaagatgttgcaacatacggtgggctttgtgcacttgcgagttttgaccggacagagttgaaggcatttaatttttcttctcccatgtctacagatgctgaagcttttatttctaaatgttcatttttagtttattttgttctagttgagatgttttctctgattaaatattttt

SEQ ID NO: 191240 - DNA, 928 bp, Cannabis indica
ataatgtatacattagtgtaaataaactaggttattattttatttttctgataaatgtgattatgaaaaaagataccttcttagacaacaattgccatgcataaatcataattacagaatactcgcttataattaaatttaatgaccatgtgatttattaagaaatacatatatatcgatcacacagtcacgcgggtttggttgggcgccagcccagtgtttgataaaaaatttccacgtgacttaaaaaaataatccaagcaataatttatagttacttgtacttttccttacgaaaaaaacaaaaaaaaatcaaaaacacaattattttatttctgacctgtattattattataatggtactataattattaactgataactgtggcttttcacttcttgcgaaaattctaggttagagcaaaatgaataagaaaaatgtttcaattgtgaaactgaaagacatgcatggaaaatttagacgatttggaataatgcaatcgattaacatagctaggtacgagacctaaatctctatgatatttaaaaagtctcaattggtgtgctttctattttttattttaatttttattttaaggaaatagtgcccctattattagtaagtgaaaactatcgttacatcttctacaatgaatgatatattcttaaccaatgcaaataatacaaatataattttaaaaaaagactaaactaaaaacatagtccatatattttatatttttcctttaccatttatttatttatacaactaatatatatcacaatgtgtgttttttttgcttccccttttttctggttggtgcagatcaatctgaatatgctgaatgtgattgttagtgaatcatatataaacccactagcaagatgcaagtctctctctctttctttctttctttctttttattta

SEQ ID NO: 191241 - DNA, 3913 bp, Cannabis indica
caaatacaagttagcaacagtaaactaagagaatcaatgaaacctttgtcatatactaaaaaaccaatgatgagctcaccaaggaaagcctctgctcacaataaagtttgtgacattctgcaagtagctgaatatactcttttcttgatgatcactttcaatttccttcagcactggcttaagctgcaaaacttcgtatgttagacatggcaaacaaaatatctcaaattgagaaatccactccacccaatgtatcccacaagaaaggattttgattttgcttcctatagcacctacttattcaatgacatcattcaaccaaaaatgaaacagtacctcacttgctgctgccttgaaacggacatatataacagatgcctcaacaccctctgcaagggatgtcttgctgctactattgctccggattgctgactgaacctgatgaagagacacaataccaataaagtaccagaacattttcttttttaggtaacaaatagagcacttgatttaagaccaaaaggaaacagagaaatcaacccaacaaaacagtacaaaacaatggaggccaataattcaacccctgcattattttacctgtgaagacgcacttttgagtacaaacagtacatgagaacgaatcatacccaacgctcgagactgtcataacaaaaaaatattactcaattattgaaaatggaaaccaatttcagtggtggaacaaaaagcaaaaatataatgttatctgatcaataatctgcataaatttgtttctacctgcagttgtcgaaatttgagtaagtaaacgccagattcagcatactgtggattgttttctacatacctaaaataaagtagataatgtataaggtcataaagttgattaagaaaataagtgtctcgctctcaatataatatgctagtagttccctaattaacaaatagaataatgatactacacaagtaataaatgatgaatgcaactaaagcagcaagaaaaaaaaggtgatgtaaatagcatccacttacgctatgcagtcatcaaggcgtttgagcagagggaggaaattctcatttacaacattcatatttggagaataaaaattggtagaaatctgcaccaggatagacaacaacaattaaattatttcgtaataataagaactgaatagttaagtttaatacactggaagttttgaatctaacaatttgcagttcagtatatatttcaataatcagctccccccattaaacttgacagtacactagaactaatctaaaaaattcaacttttgaactaaaaaaatacaagcaaataaaaatgtcagataattcaaatgcattattaatttatattgatatttcattgcaaagaaaaaattacaagcagtatcattaatcaagcctacaaacctgttaaaatgtgcttaacttataaagtttttaaaaatggtgccccaacctctctttttcccaacccaacaaccaaaaaacaatatggggagaaaaaaaatgctagagatgaacctatatgaaagaaatattatttgaacaaaagttcaaactctaggtaagatagcattcgaaccttacattctccaattcatcaaaatagttgagcttactgcgaagtgcttctgaaaattcaatcagcctttgcttctcaattacctgaaaagaaaggagagacgtgagatatgatgaaatgtcaaaatcaaaagcagcaaccaacacaataggataaaaaaaaaaaaaaaaaaactccatgctgcatccgggatcaaatattctcatcttactagagaaaaaactaaaatggcaactaacaaatttccttgagacctaagagttgcatacccatttcttaaaatgctaaaaaaaaatttcttttaataataataataatagacaacaaagatccttcatacagaaaatatatatgtatatatgattcaggtattcactttataggccaaggtaagtaaagataagggataaatgaaagaaaccataccaatcgatcgcatgcatcatgaagagtttttgtctttgttgctactgcttgatgttgcagctgtaactcattaaataaatctaaagtgtcatccacctgcacataagggaactcagcgttttaaacaaaaatgcaaatgtctttaatggatcatcatcattgtattcatgtacaataacataagatcacctgatgaagtatgccgtcacatgtctgtatgcgctctgttaatgtgttcacatactgccgatacttctcctctgtctaaagaaataaaatgaggcacactgattaaatactgataattaagcttataaagaaagagaaaaataaaaaaaaaaaatagatccagtgcactctgagtaagatatacatttaaaatatactaaatacaccatactgatgaaaagtacaagcttccatttcaaataataataatacaaactaacctcagacttcatggctgtttcaagatccgtgaaccacttataaaactgcagcaaaacaaaaattattaaaatcaaaacctaacttcagaaaaagagttgtagaaacacaaatagcttacccaagtccattttctctaaactataatatgacggacaaattcaaagtgtccaaacagtactattaattaaggaaaatatgctccattgataaagtagcatggagtatgaccgaattccaatacattaataatatatatccaggcagaaaatgcccaagtacttcaccaatcccaaaatttaagttctatgtattctctccgacagtgctaaaccatatccaaatgccaaaaaaaaaaaatcttacatggcctaaaggttatcatactaacataccattatgcatagcaatgcaaaatactctatccttgacatagagtgatgaaagatcggcaattcataagaaaatggcgataaaattaacaaactcaaagactaacctgatttgtattgacgagaacagcttctatagctccagagtgctcaaatcccaacgagttttccttcctggagacggacaagccattatcttttccagagattcgatcttgagcctacaattccccagaagccctagttactctacatatcaaatgaattaacataaaagaatttaaaaagtaactaccatctcaccaaattgggaggaaacgggcgatcagcgacggcatgagaaagagtaacaatggctgcttgctgctgctctgtcaaaggagcattctgccaaacaaataaataaactccatgaaatcaccaaaatacaaaatgccgcgtgagcagatctaatgttatctgatccaagcctctcaattacaattaccagaacacaaaattcaagacgaaatctaaagctactgcaatgaaaaattcagctctgagatctgcttattactagatctgaaataaaaattctccaccatgattgaagtaaacccggtacagcaaatataattaaagaaagagagaaataggattgaaaaatgagacctgttcccagtgagaagcgaaattatagcccttggaaatggctcctccagatttagagtgagcggtggaagaaggacttgatttggtcgccatagttggttcagtttcacagcattctcattcctcagtcagtcttctcctctgctctttctttctttctttctatgttatctctctcgcctcgcctagttaaagacgaaatggccttcaacagtaggaaagaaaaaacagcaatgaaacggtgcgtatcaaggtttttagaggagtttttatttatattttttttttttttttgcagtcaaacatgttcatttcatttcttttctctttttttttatttttgaaccttacctaagtagaaattactaattaaagtcagttattgctgatttttcttattagatga

SEQ ID NO: 191242 - DNA, 1480 bp, Cannabis indica
attgaagtacaattgtaaatagtgagtcaaatttagtataaattttagatcttgtattgaaaatgatctaaaagtaataattttgttagagcttggtgtggaataaacaatctattataataattattaaattaaaatatgttagatccgttattaaattacacaaataacactagttgtgatacctcatttaagatttgtgttaactctttgaatttttgtgatttgtaaagccaacctagcaaattaagaggggcgaaattcgagaaaaaaaatataattgggccaaaataaaaatttcaacaaaaatcatttttttttctaacttcttatccatggagatggggagatggttgcctacttggtttgtgttaacattaaattattgtatttaaaaagtgattagtgctaattccaatttgtccaatatataataaggctttataaattttatgtgtggatttttatttgtgtattatttatcatttattataatagttctccaatataagttgtggtgtttgttatcatatttgtattgattggttcacttcttactagcaaactaaattctcttcatacaaaaaaatgaatagccattagtgaatgggatgatgagagaggttgagtttgttttaaccttttctacttttaatcttcaagtaattaagttagtattaaattaagattgtgcatagtacttcaattctaaattatatacctttttttaaaagagaaatgctaaaggataccagtagtgcctagcactctcctacgcgttaatatcgttattggtccaactaagtatcggatcccatataatttaatataataatttttagagagtatcgatagccaatcacaatacgatatatcgagaaggtattaggcaccactagtgtctaatagcaatgttctttttaaaatgttacttagaaataaatattagaaccaagtttttaataaagtgaaagtgtgatttcttgtatccaaaatatatagtaaaaagcaaagtcataaaagaaaataacccattagcaaacttaatctaaatccaatttattagtatatgtttaataataaaaaagaaaatccccattcatttattattttacaataaataaaccaatgccaagttaaaatccctgtttaagaaagtgacaatgatccaccaaaaccccctccccccaccccaacaaaaaaaaattattaaaggatttttttctttctcaaaaaaaattttcaaactcaaaagggtgtgtaaaatgaataacaaagataaatttcctgataaaatttgatcaaaatggatatcctatttatctgaagatatagagaaaggcttcattatgacccaccttgatatgaaacatcattttccatagaatgaaacatcaaataagtgatgtagctttcaactttttgggtttgggttcttttatcaagtttatttattttcttatttctcttatcctcttca

SEQ ID NO: 191243 - DNA, 2923 bp, Cannabis indica
atatcagtggttccacgtgtcactctcttattggttttgagatgatactttttagcaaacgagttttgcctacccaaccaaaacatgaaaagaaaaagatcaaacatgtccgaatctgcgaaacatttcccagtttttactattctgccccaattaatttcaatgataaaaaatgtcatattattgccctgtgtgtcaaaaccaattaatatggatactattctactagtgattttagtagttagatatttaatgtatagatatgtgtgcaattgatatgatattgtcaagtaattatagttgcgttttatttgaatttttcttttaataaaaaaaaaggtgatgatgacagtttgaacatcattattagccatatcaatctcaatagttagatatgagaatcaaattgattatatatatgtactaattattaatttaagataaataatatagccaaaagatttaactgattaaacaatcacatgattaataagatgaaacaaaaatgtctcaggttaccctccttaagagtaaggggaaaaaaagtcagtggtaataaacaataacagtgaaatttaaaaaaaaaaaatgttaaggaaaaactagagaagatgttacatattagatttactaaattgagttgttggattatttagaagaagtaaccacaatacaaattaatggctgttcctcatcatccttacaatcgatactaggtagaatgttatcttcacagctagcgcatgttagcatttgggccctcttagcttcgaaattccaatctgtggtcccaactacgtagagcataagcccagcacaacatatttgggccgccaataaccccatccagagcccacaaaacccaatcccgacccaaaagctcagcccaatcgcaacaggcatgcccaccagatagaatgcgctaacgttcacgttagcagcggtgcagggacgcgcactccccctgaggaccccacatcccaccgtctgcggacagttaccaagctcgcatagccctaggattggcagagcagccgacgtcagccgtaggatctcggcatcactcgtgaacatcctgccccacgtgtccttcatcccgtaagcgaagctcatcgctgataggcccgtcacgaaagccaacaaaactgccaccacagccgatagcttcgctctgtatggccggtttgccccgagttcattcccgacccgagtcgatacagcaaacccgagcgaagacgggaaaacgtagatcaacgacgtcgtttggataagcacccccatggaagcgactgttgatttggggtccgctaaaaaaccacacaacacgatcatgatctcgtaccaccaccactccaaacaaacggagacacagctcggcgcagccaaacggagaagaggcttccagccactcaagcactctcgactcggagccgaccatgccggctccagcaaaccggaatcccaccagacgtaactaacgagacagaggagtacaaaaaggttaaccgcggaagaagctgcagcgacgccggctacgccgagctggagccgagtcacaagaagaaagttgagtgggaagtggagaagtgtcccggcgagggatgctaaagtgagcgggactgtgatcccttgggagcgaaggtaaatgcggattgggtgtatgaatgagttggtgaagaggtcagggagtgagaagagaaggtaagtgtgagccatagttgtgatacttgggtcctggttcaaacagaagaggattctggacatgttgagccatagaaacgaaatgggtaaggaggaaacaaggaggaagatgattgagcggtgtagggtaatggagaggagtttcggacgttgggccccaaaagcctgggaacacaggggctccatacccaaagctaaacccgacaaaacagagtagcctgtgatgttggcgaaggcgatggcgagagcccctgctgcaagttggaaatcgccaaggtgtccgagaaaaagcatggagattattgagcgtgagtagagaatgagagctgtcaaggcaataggaaaacccaagttgaagagagatttggcttcagagattatgtcagatgtgaaactgttcggttgttggtagtgatcatcatcaggttttgccgaggtggtcttttcttgatctttaatattggtgttggataaggataaaaggtcgagaaatagatgggtttgtggctccttaatattatgctctgtttctttggttgttgtagaactagtacaagtattagtagtaggattacacataatgatgatcgaaagaaactcgaagagtagttttgatggaattacaatggcgtttttccactacacttaaaagagatactctcgtaaagagcactcaaacactctctcttaatcacactttgacttcctcactcgctcctatatgtgtttaatgaatgggaaataaagtttttttttggtcttcagagatacatagacagatagataggttgtctccgcatatgaagagcggggttgtattaaatagaggctgtggaggtggggtttcttctcttttataaaaaacaaataattaataataaatatcaaaaagaaaagaaaaagaaactcttaatacttgtttataactttatactaaatgggatcaaattcgtttttcttttttatttttttgcttcccttcccctgttttcttttcattttttttccgtcccaacaatgaaatgataatatttttgttattttatgtggcttagagagaaagacgtcagattgtcagaatttcctgagggttcaatttcccataaatgaaatggtgtttttacgagagaaaaactgagaactgagagtgagatagagagagaaaagatcagagaaagactggcttctttttttttctgaataatttttttttctcatttta

SEQ ID NO: 191244 - DNA, 2298 bp, Cannabis indica
ttattatttttatgtatttatgacataatcccttaataataaatgtaaatttaccataaataagaaaaaaatcacttctttaccagaagagtttagcaatgcataaaatacaagtttattctttttattagaaactaattatgcaggcatttttctagttggaactaccaaataaaacgacaccgtataatttccttcatgtttataaattcaactctttccatacatatataaattataatcataagttaataacattcatagcctgaaacaccaagatcttcttaactggctccaagatttgaaaacaaaaaaaggtggattaatcaagtctttgaagttgggttttgacattaagctgtgtactcatctgggtataagccaattcttgctcatttttcttagcctattctaaatactattctactcactcacaatcacattgactcaaaatcatcatattctggtcttgctgattcttggttaagatttttccatttggtatgtaatcaagtcacccttttatttattttctactttaatctttatcatctttctcattaaattttctctgttttcccttttttctaatgaagttaaacacaatgtttggttcgaatgaaactgaaatttctttgggtagaaaacttgaagagctaattgaatgtcctgtttgcaagagtgtaatgtatccaccaattcaacaggttactttttttttctcttttcttttcattttcttggttaccaaaacttaaagaatgttcaattaagataacttgttacccaagtcacattataacattgttttcttctctgttttcctctgtttttctctgttttcctctgtttttatagtgctcgaatggccacccgttatgttcaagatgcaaatcattcgtaaatcgctgccctacatgccgaagggcgctcgggaacataagatgcttggtactagagcaaatggcagagtcatttcaactctcgtgtgcatacgaattgtttggttgcaacgccaaattcccttacccgaacggtttaaaacatgagaaaaattgcgaacatcgcctattcaattgtcctaatcctgttttaggaaaatcttgttctttcagtggtaacatctcatctcttttgaaccatcttaaaagtcatcacaaagttccaatctaccatggacaaatctacatggttacctatgtcggttttcatattcggcctccaattcctgcatggaaaatgattgtatgttcttcccattttcactcaaatcttttcggtttctcttttaaagtactaattttaatttttgtgacacaatgctgcaggttctgaggtgttttgagagctatttctgcttgtattttcgacaagtcgagctttttcgtagagggctttgttacatggcctttgttcaattcatgggggacgacgatgaggcgactcgattcacattcaaaatgcgcgtttctggctacgaaagaagcgtgtcgtggaaaggaaagccgcgaggcatccaagttagtcatcgcgaaattcataacaacgaaaatggaatagtcattccaatccaattcgtacactacttgttggcgggtggccattctttgtcactgagagtagagtttagtatggaaacattttcttcaactaaagttatcaagatttcttagctaatttttttttatctatgtatgaaacaattataatttgtttgtttcatgatgtataataccattttgatcttaattcaagaaaattcatattttgtttgctcattgcattgttggaaataatcattcatgaaaagattggcttaatatataaattacaatgataattcatgaattttaattagaaatacaaaacatgaactacttaattgctcttcttgacattcttgatcttaagtttaatatgattagatatctgattttaattatagaaaatttaacgaaagaaaacaatagagaaagaaaagtgaggggagataattcttttctctaattttttaaaacatagaataatttattttacaaaattttttgctttggcatgattttaagttttttgttttacaaaatgagaatacaaaattacttctacaatgcatcttttaaaagtgttgcggcatttgagataattttttagtctaatttttcttatggtcatttacgttgtagttatttaagatatcctgcaaaattttgagaaattcaaaaaaaagaaaacactccaaaatagtattcaaacaatctgttacacgcgagactctttttattttatacatgtatgaaa

SEQ ID NO: 191245 - DNA, 955 bp, Cannabis indica
tcaatctctaagggaagaagaaattagagaagaggtggaattttcgtccagcgggaaggcgtcgggtgaacttcagagatcggccggcgcattaatggtggtttctcgacaaaaggaaccaaggactctcccttctctggcaacggcagggccaagcaacgtagggcgattcagggaaggagagaattgtcaaagaagctaatttcaaaaatccaattaccgtgcaatgatgaaggtacgtccctcgagacagatagccgccctagtgttgtagaattgtcgtcgattaagattcccaatgaagagctacgtgattataggaggtcggttcctcttcaaaaggtttttcaccgtatctggagaagcctgaatgagccacgtgtgggtgctctctcaatgccaactggatatttaaatttaaatttgttgtggcagtcggttgaaaaagatgtgacttttgatttgggccaagacttaatgggccgaccacttagggataaagtgggtcaaatagatgctggatatacaagctttaatgagatggaatgggactgcctgcgcctaaagaatagtagcaaaatgggtttgaaagtttatatgcaccaaggaccctacacgctgagattgattaatcatgaacttcagagaagcaggccgattagagtcggcaagaaggagtcattatctattgttagcaagaagaacccaacctagatcatctctgaatattttgatggcttcctcaagtctgtcaagccaaaaacaagacaaaaattcagaagtgcaattattcaattctgggaagaattcgacccgagagaaaaagattattcaaaggcagtgttgaaagaatcggacaaatcccagtggaggacgaactagtaagcaaacgcaatatcgtaacgtactttagaaaaaggaagtctacatccaaacgcagtagagaagaaacaat

SEQ ID NO: 191246 - DNA, 3065 bp, Cannabis indica
atttgattgttcatttaatgttcacgagtcatgacttgttttatattggcaataatcagtctttattgaaatgtctacttaattaatgttacaacttatatagaagaagaataaggaaaaaattaaaaaaaaaaaaaatagaactgttcttctaagtctggaaatgagaactcaatgtatatatattataacaaaccagttaaaaaaatggaaaacatggaaaaccgttgtaccagatatacagtttgcaaaaattatttatacagtaaattaagaatgccaaaatccagtcaatatatttcggaacctgtttgcggacaatttcctgacaagtttcttggcatcgtaaacctctgcatctgctaatttttcaatgttcttgagatgaccagaactcgcaatctttcttctcccactattgctactggtcaacgacataagtattgaaagcaacaattttttgttacctgaatgttcttgttcagggtcaagcaattggagaagcagggcaatattccgatcgtcctgtacgaacctttttcgatttctgggcacggaaaccatgcctgagagggcctcaacagccatttctcgaacctcaaatgattttgaatcgagaaacttaaggagctcaggcatgaaaccggcatcgcctaatgctttcttggcttcttccgatgtcccagatagccttacggctacttttaatgccaattcttgtactgaaacttctccgtttcgaagaaaaaaaatgaggtggtctacgaacgagttattaagtagaaacccaattgagcttgttgatgaaaaacagagattttctattgctcggagagctatctctctggtcttggaactacaagtcgatctgggctcgatgacttttagtaaggttcgaattcctccttctttgactaccgtttgcctgatgaactcatctccagacgctatatttttgaagaaatttctatggagttttacctgtacagtttcatccttggaccgagaaagcttgacaaatgtcgaaatagctccttcttcgaccataaatcttcttattcttcaacgccggcgagatttttcagaaccccacaagctggacctatcaattccgctcggcaatcacttaaagaacaaatatttagtagagccgtaactccgccgtgagcagaaaccgaccaagcgttatcagaattctctgttattttttttaagcacctagcagaagcttctttccccaactcactcccacattccaaaacccgaatcaatggcgctatagctccggctccgacaagaaaacctttatgggaatcaaacccagcaatgacagatactatttttgcagatccttcttgaatttcaatctccgacgagtccaagaagttgacgagtacattaacaacgtcgccaagttcagtaatgacgttaacatacttctcgtcttcaactaccgccgcgtaaaagttactcaaagcttgatgcttcatctctatatcgccaatcttcatccgggtcaccaaatctctcacgtaaaatctcatgtcgtctctgcaagctccaaaaccaggtctggaaacgattaaggcaaacccttgagtcaaaatcccagcgttataaatttccgttagctttcttgaatgggcatcgaatttcgcagagatcacatccaaatcactctgcatcagaagctttccactataggaaaaatcaacacagcggcgagcaagatcgtagcactcagtgattgtaaccattaaagacagaaccaagtcattgatttcttggttctcacttgaattgcaattttcaaaggcaatcaggccagagttaacctcctcgagcttgctccgaatcgattgccatttcccagaaaagactttgatggaatgagacagtaatataagagacgagagaaaatcaatggcttgccgtagaccggaatctccagtggaagaatccggcgaggtttgatcgtgacactcttctcccattgtgatttatcttttttttttattattttctacttattaaccgaaaaccccattttggtttccggtcggattggtccggtgagccggcgggttgtgcggattttccggtgagtttgatcggaataaggggagcagggtggaatcttaagctgtgttcttatcaagaactagagggaggtggttctgtacttattatccttagttctcaaagctgaatcactaaatagtattttacggaaatgaccttgctatagtcaatgtcgtgtcagcatagtcagtttcgagttaagagggcactactgtctttgtgttcagtgaataggccgtgtcaaattgttggaagttggaacgtatttaagggaaaggaaggttatttaactcttctgatgattgtatacgtgaatcgattttattttagttttctttttttttatatgtaaaatataaaaataatattttattaaggttcttggtgtgtttgggtttctattctgttgttcttttgttaggaaaaagtaatacttttacggtgttttgcgattagaatattactttttaatgggaaaaagataatggagataaaactttaaagcaatgcattttgttttgttacttaataagtgttgtacaacttatttttataatgaaacttttgagtgaaagttatttattagttagttcaatcatcatgctgcatcagcaattttgcccctcgaataggttttgtttgttttcttttcttatttttttttctaaaaagttgattcctttacatccatacatatatgtagatagatatatttataaaataggaagttgagatcgatttagaaggtgaaattttagtcatttttttggtagtgctccaatttggtctgattcattttggagtaaacgtcttggaatttagcttgtggcctttactggccaatataaggtaatcttagttaaatttgagcttttcgtatttgtcaaggtaaggaaaacgtaattaataaattgataggcttggcttttggcttttgctaaaacgggttatgtaaacatattcaataataatcaataatgtaa

SEQ ID NO: 191247 - DNA, 1689 bp, Cannabis indica
ttttggagaatcaaacctgatagaatggaataatctcacgaggatcaatcatgttgatgaatgcataacccacattgcacttgttctgttaaacacacacataaaatatgagctcccgcatttaggaagaaaagaataggtcacaattttacttgccttgaaatcaattggcaaatagagaaagtcataagttcctcgacagtactcatcaattgcagcaagaagcatctttgaagtatacctgggaaattgttaaattagtttcaagtacaaagtaaaaaagaaggtatgctccatatcaaaaaatgtatgacaatctaatgcaatatggttctcacaacaaagtggcatagtagccacaattgcattaagtttgcctttttcgtcatgtttgcttcataactgtcattgtttgtgccctggctaaattaagagcatgtttatagtctaggacgataaaagaattgcagttttgcaagaccatgactgaccatcatcattttaacaaggagaatacgtacttattaggaatgtttttgatcatcagtgtggttcggcggtcctccccatgtaatatgcgatcaatatcgagttcatattgcctcttatcaacgttattagagttcgcttcattcctacggtgggacaagtttctagcactttcatgcagagaatcaaaagatgcgggcatcggaattactggattcctcccaggaaatatgtgaccgttacggtgagaagagtgttgtgcgccattaacagtcatgtctatgcaatttccaccaaccaacttgagaaaatattttgtgagaagaaatatccatgaaatgcaattgaggactaccaggaaaaccagcactcccaagagaccccaggtgaagaccagaggtttcaggagaatacgcatgcctttcccagagtgagggattaaccgctggtgctgatccaatgtgatgaggtaaaggtgaagaagaattcagcatatgaggtgatgttcttgggaatccctgagtttgtggaaagcggtgtgcatgaaaaccattgacaattgttggtgaattgtgccaaggtgaagaacttgaaggaggttgctgatatgagctggagttgttccatgcacaatgctgatcatgaacaggacttttcccattcccaaaagctacccccaccaaattaaatgaaaaaaaaggtttgtcaacaccaaatcaaacaaaattatgatgaaaaaacctaactactcttttggtattcacaccagaaaactaaataaaatgaagaactcttgctctctcattagagttgatattccaaaacttacatcaaataattttaaaatataactatagcaaatgtatgtacctcctttaagttccactggatgcctatttgcactattcacaccatgaacatgactgatgcatccatcccttactccaagacccagactagtcatgttggtaatagaattgggagacaaacttggaatggcatgagctaaactatcatgattctcaggaaatgaatggggatggaaaccatgcatcccttggttagcaaacttcatttcatccaaagagttattgatctcactaaaaccgaattgtttgctagcagatgtcattctcattggagaaggcatggtcttgggaagacttgaactctgatgagagagagaattttcaaacgaag

SEQ ID NO: 191248 - DNA, 2169 bp, Cannabis indica
aaaaattggaaaaagaaggaaaacacaaactatcataaataaataaataaaattttgttgaaagcaatatcactacgtaaaaggtaaaatatacttaacactttaaatatatgatgttgtatttggttaaaagtaatcaatatgtataatatactagcaaaataactacaaaacaagcttaaaaataacaataatagataattattttgttaattaatattttcattttatgttgttgagtttgataaattttcttttttgatctatttgtacaaaagaaactaataaataaatagtgtcacctgcgtatgagataagcaaagcaagctcaataaggaatagtagtgagagttggggaataatacttgactttttggcatgttgttctttaattccaagatcgtgtttggaaagagggaagtggccatcatttttgtatgggatttaagtcctaacatggctatgttagataagttttgagtcaagttttagttatggttggtttaaagctagctagctatttgcatgctttgatcatttttggtataaaatatagaagtttattatttgcatgcatgtattccttgtgtgggttttcgttttcaacgttggatttcaaaattcagtttgatatttggtttggtagaggttggattttgctactaaaggcgaatgtaatccttttatgatgtaaccacaactctctcattagggtaatataccattttagccctttttaaattctgaataagaactaatatttcaccttttttatagtttacttaggactaaagtagcaatattatcgatgaatctaactcatgtatattattagtgaacaagtttccattatgcaaaaaaagacttagttaaaaaaagccaaagaggtataaatgacttaacaaggatcacttgcagaagcataaagttaaaagatggagcatctaattcacactctttaaattgcctgtaaattcaggggcccaagtaccatctgttttgattaatatatttatataattttcatccatgattgtgctaatcatatcaaaagagattagaaaaatcaagctcagtccactctagcagaattattcttttgagaaaggaaaaggaataaagaagacaatcagcccatgaaaaaaatgctaaagcttatcattgcgcagatccctaagttgaacctcataataatctctgtttctaaaaatattttgaagttagtaaatctttagaccaaaaaaacccaaaaagcaaatttggtttcttattattaataagcttttgtttgctttcacattctacttttgtagataataataaacatctttgaatgacttaggtgagttgtacacacttcaaatttattactataattaaagttattacactattgaaagttgaaaccaagggataattggttttaaacggattaagtgaagcgatcgtttgctttaagaacttccccaaactttgtttctttgatttaagctttaaaagattctattacatatttataaattataaatatttatttatttattagtatttttatcttcttaatgggttctaatataatagtttgccaagatattggccacaagataatactaatcatccataattcgtatatgcattacagtatgcactagtacaatatattaatatgcacttattataatgagaatgagattatctgtcaacaaatgcaactctttaatggcttttagggaatattagtgttgtctaaaggctccaaaatgtcactttctctccatacaaagcaatctaattagcagaagctccttccgcagtgaataaaacacaaggaatatctttagttgtctcactttaataaagaaacttaactaaagtaattcttttgttttttatttttaattttcacaaatacccaatataatttaaacacctcaattccattatacataaccacttcttacaaggaaataagtcttgcttgttccatgagtaaacccaagtctccctttgttctcactcaaagaaccaacccccaaaaccactagtactaaaccaaaatcccttatcctctcttctccaaatcccaaaacccaattctcaaaagatggccactttgcaaccccaagtgcagcaagttcctcagcctcaacaacaacaacaacaaccagt

SEQ ID NO: 191249 - DNA, 1865 bp, Cannabis indica
catttaacatgcgtttctctcttttgatcttttaaatcgccataccatttgggagactgaaaaaaatagtatactatcaatatttttaattattatcaatgaggataatataagacctcttattatttgattctaaatttaatttgtattttttgctagtcaagtgtgattgccatatgaatgccttccaatgatttcctcgtcttttgtaataaaatgatagatacactaaattgaacatctttttgtatgtcttcgtcttctgatatggtttacctgggtttcaatcatttgcatactgattgatagtatggtacgtttcatactaaaaatcttaagtgtataaaacaaatatttgtacacattttcaattagttgtacattgcacgtgcttagtgtaaaggctttacatgtgttccagttatattaatattagttaatatttaactctctttagtagtgattacctgacaatagcaacaacacggccagagactttatttggtgatgtagctgttgcagtgcatcctaaggtagggtacctttgtgactcattgagctagttcttgactctcttggttgggatatcaattaatttggtttgtcaccttggactggtgaaaattggtttttcctattttctaatttcattatgcaggatggtcgatattcaaagtacattggtaaaatggctattgtaccgatgacatatggtcgacatgttcctataattgctgacatggtaaaccttccctatgctccttttacaatgaagcatctaatccatactagtgttgtttcttaagagatgaaaaagaattcatcccatggatcccttagattatttttcttttatctcttctcccttccccttaatcactcttggaaaattgacttatgtcacccaattatacatttgtttgtttattttattttgaagcttgattgaatttgagattactttactgattattgctgtgtggcagcttgttgataaagattttgggactggtgtgttgaagataagccctggacatgatcacaatgattataatattgctaaaaagcttggtttgcccatacttaatgtgatgaacaaggacggaacacttaacaatgttgccggactgtactggtatgtttttttgtttactgggtttgttatgctttacaacacctttatgttctgttgtctttatttttggaatgatatgtcttgtctgatatcattagtgggcttgatcggttcgaggctcggaagaagctgtggtcagatctggaagaaacaggtctagctgtgaaaaaggagccacatactttacgagtacccagatcccaacgtggtggagaagtgagtttgttttagttaccagaggattcatttggatcctaggctggatattgtttgatgaaatacatcagccatttggaatcttcgtattgctcttattaacattgtattctgtatttttttgtgcttttattttaggtaattgagccacttgtaagcaggcaatggtttgttaccatggagcccttagcagataatgcccttcaagctgtagaaaaaggagatataaaaatcattcctgaaagatttgagaaggtttgtgaaatcatgtattttgctgtgactaagtcttgcatatatataccaaaatggaatggtaggaggaaaaatagaaagaaagcagtatacaagagaaagagacattgaatttagacaaagcataaccaaagagggagatatcgatattataaatttatcaaaatattggagatattttccatatcgacagaaatttaagaaaactcatagaacagatttttgtctagaaatacaaaaattaatgttgaaactttta

SEQ ID NO: 191250 - DNA, 1575 bp, Cannabis indica
tccatatctaattttatcatcatgaaccctctagtccctctttttttcttcatggagtgaactatttcccttgccatcattgtgttttcagctatatatctccctcgaacaaatgcagcctggtttggagagatgagtttttgcagtagatcccttaggcgagtagcaatgatcttcgagatgattttatacgtcacattgcacaaagcaatgggccgataatctttagtataggtcggggaatccttttttgggacaaggacgatagaagtgtcgttgatgaactggggaagttctccgttgtggaagaagtatgataccatttcgaacagatctactttcaccgtttcccagtggtgggcatagaaactgggtggaagtccgtccggtccaggggccttgtcttgccccatgttcttgatagcagcaatgatttcttcctcactaggaatagtattgagttcttcgatctcttggtttgttagggtcctggtgaacagatcatggggcatatcagtgggatgcgtttccccccgtttgaacaaatctctgaaattccttaggaaacaattagcaatctctggttgattctgaatccagtcccctccctcagtgttttttatacattggatgaagttccttcgtcttcggacaattgtcgaagccataaaaaatttggaacatctatcgccttcttggagccattgtacccgtgacttatgtttccagtgtatttcctctcgtagaagtgcttcattaaggacattctttgcttcttgaatggcatgccaatccatcggatctctactctcttcacacttcagggtagcagtcgcattgttaacttggagactaagcttcttaaaatgatttttgttccacacattgagtttacgacaagtgctttttattttcctgtggaagtttaccattgggttgtgatgtaatcttttagctcaggcttccttgacaacccaaaaacaacgggggtcacgagcccacatgttttcgtacttaaagagtgtattccttccgatgacaccccccgttgtgtcgagaagaatgagtctatgatccgaggtggctgaggacaggtggtgtatcactgcatttggaaaaagcactctccaatctgtggtggcaatgccacgatcaagacggacacgcttcatagccgtagctctagaagcattcgaagtacctttcgcccaagtgaagccagggccgagataccccaaatcaataagacccgccctgtttaccattcgctggaaatcgaatgcatatctagatgagttgcctgggctcgcatgttaaagcattcgttgtcactgagggtaccattcatgtctccaagaagcaggaccggtcgtctgtcacccaggaccatatctcccatctcaagccagaacgcttccttatcttcatatctcggaggaccgtaaatgccatggaaagaccatggaattcctggagggtcagagttgatttgcagagagatcacgaacttattcgaagagctaattgagcatctaactcctttcatccaacagatacccaagcccccgaccggcc

SEQ ID NO: 191251 - DNA, 1459 bp, Cannabis indica
ctaacttgaaagtgaaaaattaggctaacctgattcatgtatggacgtttagaagattgatggtgaatgcacatggaagctgtcagcattatttgtttcatttcaattgagtcgaattcattgcctaatctagggtctgcaagatccctaacattgtttgtgtccagcataggctttgcctgttgttaacatgaggttacttgttgattaagttaagtaactaatttgttaaagcatattaggctcaaaatgacactttataactgccaagtcaaaaagtgattactggtgagaataatattagttgaattagatcataagagtcatagatttttacccagatcacaaggctttgttggcttgaatcaactgctcgacgaccagttatgagctcgagcagtaaaactccataagcaaacacatctgtcttctcatctacaattccatgcatgaagtattctggtgccaaatatctgaaaccatttgaaaaaagaacaaatccataaacaaacaatttattgcaaaacagaacaaattaattgaagaaagaaagtgtggtgatacaaagtgcttgacatacccgaatgtgccttcaattgggaaaacaatatggtgagtccatttttcaggaagccattttgcaagtccaaaatcagaaatctgcattaattattattatacaagcaacaaatcaatttcaaaaacaaatgaattaattgagagaggtgtgcattggattggatttgattgggtgagagtaatgaaattaaagtacctgagcctcataatcttgagtgagtagtatgttagaggccttaatgtctctatgaataattcgtctctggcaaccttgatgtagatattgcaatccttgtgctaccccaactgccaccttaaatcttattttccattccaaacactccaaacctgaaaaagaaaattatgtaaatatttcattatgtgaaaaattatgaggtcaattgagtctagttatagttaaagagaaagatagaacaccaaagagaagggaagctaagctgccatgtggggaaaattgaaggactaagtgaaaaccgccatcaacaccaaaaccaagcagcttagctgcatttggatggtctatgtgggcaatgatcccaagctctgataagaaatcaccaattctttcctcgttttccttctcttttttggtcaaccttttcaccgccacgagttgaccatcaggaaggcaccctttgtaaacctctgcctgcccaccttttccgatcatgttctctgtcaatttttattattgataaataagtcattctttaaggagtgaaaaattgaaaaaaaaaagaacttgatgtgacaaataataagttgtgacaaaatcatatgaaatatgtgcaactaccattacctatattctaaattaagacaaaaactgagggttgagatttttatgttcaaagtgttg

SEQ ID NO: 191252 - DNA, 1699 bp, Cannabis indica
ttttttttattttttcaaaaaaatctcattaaaatgaaaaagcgaaaatgatcatctgtcaaagctaacattagtcgacccatgactggaaagcaaaagacttgacacccatctcaaaaccgtatcatgtcaattaccaacatcttttaagagttgtgaatccccatatgttatgctttggtctatcacaaaccacaattcacaaatatagggcacttctcctgcatataaaggtatgcataaaaataataactaaatattaggatttatttgtaaattactatttgttttatcctttattttgtcctttactaaagcaactaaattatgagacattaacttttggtagtggtagtggaagatttgttaataaatcatatttgacctacttttggtccctcttggtctaactgtctaactggcaattggtttgatttcaataactaatcaacttttattttattttatatatgtttagattttataaaatgtcgtagaaagagtccattttcaagtaaattgtgttcacacaaatacacaatcagaataccttgcatgtgaaattatatcacaatcattgatttttatatttctagcttttcgatacacatttctctatatcacaattttcagtatatattcgaactaaatgataattgcataaagaattaagataggagttcatactttaataaatctgtttcccgcattttgaaagtaatagttatatatgcgtggataattaagtataaaaacacgaacacttcagttatattgtctttccaattaatatcgacacaactagttatacttgtgaagttgtctcaaagtttctaaaaaattttaaagttgtgttgttattagtattgatttggatatatctttattttcttttctttaagagacaaatatattagatcgataaatcgtatataagttaacactacgaagcttctcaactatacttgtcccaaaaaagtcatcacagaatcaatccaattcaaaaagtataaaaacacgataggtataatataattagtatataatataggcagactagatttttcctaaacgttagaattagtatttttttttctacaatttttatttaacacctagaatgacaaatgacgcttttgtaatgatcacaagtccgacattgatagaatattacagaacatgactagatctgtatattcttataattacttttatttatttttcaagcaggaaactggatctatgtttaagacctccaacaaatttattaaaagaggttttattaaacttttactatctttatgtattttaattttagaaaaaccttcaaattttaaagatttatcgaattcatatattattcagaacaatatgataagaagtgtaaggacctcaatacaggccctaaagtaattaagtaacaaagttaatattatttttgattaaaagaacacacgatatcagtcatttgtgaaactaagaaatgaagttgatagtggaaacatcaattggcccccctccgaaaagaaaacacatcaattattaaagaacaatgacattcaagctcactttagtaagtaacactaattcaatttggaaggttgagaatattatatatatttatatatattttaccctccagtccagaagtagatatattgaatacaatttttacattcaatattcaccaagattgtcg

SEQ ID NO: 191253 - DNA, 1224 bp, Cannabis indica
taagtaaaaataaactataaaataaccaaaaaagcagtttttatttttactaaagaggtatttttaaaaataaaaaagttcaaagtgtaaaaaaaaaaaatattccgtgttgatgtatttttgtaatttttttttttttaaaaaagttggtctattatgtaaatttttcaactaataaatcgtgttgcgtgttacaaaccaaaaaatattaggtaattatgtcccataaatataaatagcggacataatactacttataatgtacatacatagaaaatagtaaggacacatatagtgcctagcatatttataaagtattatatcattaagagttcatttggtaggtcatataagggttgtactgtattaaataacaaataacactatacttaaaaaatgtattgtgttaattattacgagcataaattttaatacaatgtgaattgtattatttgatatataacaaaagatccatattaatttgtattataatatttataaagggtatgggtcagcctaatctccgacctgaattccaagacctagacccagacctggatcatgattcgaacttggaacccaaacacgggagtgggatcagactcgaactcaaacctcgacacaggatccaaactggactcagaccctaatctgaacccgaacctcaacccagagtcaatcttggagtcgaatttattaaaaatatattataattttatacaacctattaatacaagttaatacacaccatagtattgttttgaatatcatattctacctattttactcaaaaaataattacaaaaaatcattaacgatttataggatactaccttataaaggtactaggccggatagtgccatgtaacaatgattaatgtgcatccttataaaaataaataaaaatgcaaaagttgtcaaacataattcatgtaaaatcttcttatatgggtgcactcttaataggtattacccatgaatattatatggactaaaattgttccatcagctgaaaaaaaaaaatataattttggcaaaaaaatgataaatgaaatttgagttaacttaaatatttttcatataaatatatttttatataatgtaaaaagatatattttttatatattttctttaattaagaagctaaattaaccatggaaactcaaatttatattttatattctctatcagatcaaaattaaatggttcaatatttttaaaatt

SEQ ID NO: 191254 - DNA, 3142 bp, Cannabis indica
ttttcgtttctgagctttttgatgcttgatgttcaagttcagattttggactgtttcacacctgtatcgtttcttttccttatttttctctcttcattttccttctcatcccttctcttccggcaaaaaaaaaaaagtctgcaataaataataatattaatatttttgtggtatatgtcttgtttgaagattctccatagggactttatttcttttattttcaatatcaattcatctatagaaattttaattttgaacctttagtcccgacagagataacaataaaaactttattatatatatatagtaatttctaaattaaatagctatagagctagctagcctcatctacttttatttatttttttcatgtcgtttttcttttgtttcttccgttgcttaaaatattcatattgcttagtaatgcttaccaattataaaaaaaatagaagcattaatagttgggacttgtcttcttcctattttcttttgttattttccaactatttcttttgtgtagggtcaaacactatccaatgttcattttgatgaaaataatgatcggcatatttttgcatcctcacaattcttaattattttcacttcctctttcacaaacttgatatatataatatatatgtatacttaccactcgaagcagtgtaatatatttagagagattttataaacttgtataactgtgtaataatatcaaaacaaaaggcatttattgttctattctgttcttttcttattaattaattctctgattaatttttatgttacatagtcacatttatttattttgtttcctcaacttatttatcaacttgcatttatttcacacttgcattaattactgaaaacttaaaaaagaaaaattcttctttctgtcgtaacgttcttgatcatcaaaaaaatctcgtgggtggcaggtggaacattcatagtctggttcggagccacgggtcggctaaccgtatccgacccggatttgatccgtgaaattttcacatccaagtctgaatactacgagaaaaatgaagctcacccgcttattaagcagctcgaaggcgatggcctcttaagcctcaaaggcgaaaaatgggctcaccatcggaaaatcatcgctcctacttttcacatggagaatcttaaggtaaccacacaacgcaaatacatttccgtatttagtagaaaaaaataaaaaaaaatctaactatgcttacaaatttacagtcgatgatacctgtgatggcatcaactgtggttgaaatgctggaggaatggcggcccaaaatgtccgataccggcgagatcgaaatcgatgtttccaactggttccaaaccctaacggaggatgtaataaccagaaccgcttttggaagtagctacgaagaaggaaaagccatttttaagctccaagctaaacaaatgcttctcgcctccgatgctttccagaaagttttcatccccggttacaggtgtgtgtaccaactatgcttacatatatataaatatacgtacacgcggcagaataattaattaaccgccatttttatattcaaaatttcgttatctcttattgttacagatttttaccaactcagaggaacataaattcatggagactgaataaagtgataaggaagtcattaatgaagttgattgatcagaggagagggacgaagatattgaatgatgattcgaagaagattgaaaaaattagttgctatagtagtaatagtagtagcagttgtggtcctaaggatttgctggggctgatgattcaggcgtccgatacgccgtcgtttaagagcgctataacgccacaggacatagtggaggagtgtaagagtttcttctttgcggggaaacagaccacatctaacctgctgacgtggacgacggttctgctagcgatgcacccacaatggcaggtacgggcacgtgacgaggtgcttaaggtgtgtggagcacgtgacatacccactaaggatgatgttgtcaagctcaagacggtaaggagagctgtcttttttcttttatttattttatttttgtcataaataggacaaaaaattatggttttgtctcgtagcgcaattttattttccctgagaaaaaccaaactgccaccttttgctttattatgttgttactgatagaaactgcagtggtacttttgttattattctaagttataaggatatttcagtcaattgatgttaattgggctacgatttgatgtgcagctgagcatgataataaatgaatcacttcgcttatacccgccgacggtggcaacaatcagacgtgccaaaactgacgtggacctaggtggttacaaaatcccacgtggcacggagctcttgattccaatcttagccgttcatcatgatctggccacgtggggtaacgacgccaatgagtttaacccggctcgattctcagacggcgtggctcgagctgccaaacacccattggcatttatacccttcggccttggggtccgaacctgtatcggccaaaacctcgccgttctccacgccaagctagcgctggcgatcatacttcaacgattcagatttaagctctccccgagctaccaacacgcgccgacggtgctgattcttcttcatccccagcacggcgcgccgatcatattccagcgcttggaagaggaagagggaaatgtagtggaccccgcacgtcttaaagagtgaggagtgatttaatgaggggatgacccagttcgctaacggcacattatcctcttttgtgcaagcctattttgagctatataattctttaaaaaaagaaaaagaaaaaaaaaatgtagcagccattagtgagtggtgactctagatgattttcaatttgtgttagaagaatgaataggtgatttggtaaattgtccctttgtttctaagcagatcgacccaaacacgtccctggtttttacccgaaggacactaaccttggacatgtagtgaaattaaacccgtggtttggtttaagctttagatttgcctcagagtgatgagagtgtttctttttttatttttcctttttttctttctaggaaattaaagaaacggctaacaactaggtagctgatcaattttttttttattattat

SEQ ID NO: 191255 - DNA, 1356 bp, Cannabis indica
tttttttttaatttttttgggggccttctaataatttatagataaatatttaaataaaaattattaaaataaattaaaaagaagttgggagaacttttgggctgaggatctaattttatataaatttaataccatcataatatattatctttgctctaattaaaaagagcattattattggtactaatagctcagtataaatttggtacctatacttaaatataccgagaattatgatactaaagaaaatactaaacatcaataatattttttaacaaattcttttgtatattaattgcatgcatattaattcctaggttaataaaaaaccaaaaacactttaaatggttattgcaactttattgtcattatgttattttgtgaatattattctatataaagacatacatacacacatataagtatacatagtcctataatatatatacataaaggacagaaattaaagatcaatgcacttgcattgtcacttagcaataataattaatgcttgcattgaatcacggttgaaggttgtgtgtttattatacatataaataaatatactatttatatatatagaaaggaaaatctgggaaaataatatggattagacattataatataattcgaagcccgaataaaataaataggtatatgtttattatttttgaattatctcatacattaataaaaatttatatttatattaataaaaaataggagaatattatatcatatactatttttttaattttttgttttcaaatttacggtttggattgctccatgtaatttctatgtagtttgttatatggattttgattgcgatttaaattgctccgttggtttctataggaacatctgtgtgaaatttcgtaaaaatacaaaaaaaaattattttaaaatgtaaaaaatgaaaaaacttcaaaataaatatactttttaatgtgatttttattatttgattagaatgtaaaaataaatcggtaatataaaatagtacaccaaaagtgttgatttagcataaatataaattttactattataattgtcctttatatatgtcaaatattctcatttgatgattatgaacaaaattaattaatgttaatttaaattaattgaacgaaagctttctacaggaatagaatctccaataagatatgaagtacttctcaagatttaattatatatacacaagtacacaacatatctttatagcttggtaggtatcaagctaaagaattgtcacaccaaattgaatgatctcttgaagaatgaatatcttgaattttatttttattttagtccacaaaattatttctatatgttttaattttttacttttttttt

SEQ ID NO: 191256 - DNA, 2083 bp, Cannabis indica
atatatatatatatatcactaatgtgtataaatataattgtgtattattaatacagtgcaatacaatacctgccggtcccccaaagtgaaattacatcccatcatcatctatcctcatacataagtgtaattaattcaacttaaatattgcttttaattttctttgagctcacttttgtgaaatccaaacaccaattactcctccatccaattctgacctgctgacacatattgagttttaattatgagtttgtaacttaagcttttccatttcattgctttagtttggttaattggtttagtactatttacatttgaatgataaccctttaataactttttttcccctaaagcattgctgaagtttttatataattcaatcaatggcacttaacttataaaacaatcttaaattaacttgacctctaattcagaaattttgttatttaacatggcagcttctctcaaacggtcaatgcaatagtaattaaaacatttggaaatagaaaaagaaagaaataaaaagtggaaagtaacattatttaactaatgtagtcacatgtccttggacaaaaagaaaagaaaatggtattattccaaagaacaatactaatttagaataatgtctttactttgaatttaatcactttttatgttaatgttaggcatctcctcacattgcaaaaacaacaaaaacaagtcacaaccaaacattgtaatactgaggtagctgcaggcaaaaagggcaggatttgttgtagctaatgctacttagagtggattagtacttttcttcttctttctaataataagataatcaaattaattacggtttgatcaacgaaactaattaagccggctaatgaagattattgaaaacaaaatggccggcaaataaataatccaggtgatcatcatgagaagttttgtcaaagctgtgcctagttttggtggaccttgttaaactaaacataaactaacatccaaaacacaccttgtcttataataacaaagcatccacaatccctcacagcttgtatttatgtaccaattcattatttaatttttatcatgagcttaatgattcttttaactaatttaagaagataccattctataattaataattaacaataactattgtaggctctattactctggaaacttcttgtttagatttatatggtcatgtctacactatgttcttttcaccccctttaaatattggaaaacaagattaaatgaaaaatatttcaggaaaaaagaaaaaaaaagattaaatgtaaaaatatttcaacactaaattcattattttcttagtacctaattcccatctacagtgatttttctttattaaaacttatcactactaattaattactagggccagaaagcttcatcagtatgcaacataataaaaatgcctttttttcttcaataatataaatatatatatatatatatatattttatataattatattatatatattatggttgaataggatatgttgggctgccagccaaatatgctagccaagactgtgaaaggttactaacctgcccaattggctttccataggcaaagtgaaaagtttcatgagagcctccctaatcatcattaaatatttattttattcaagtccatgataaaagattatagctggaccatattggatcttggagaaaattaagatgattttttttaacaagtggaaattttggtgaattgtagagacaatccaagaaagagtcatatacatattataatgtaatgtaaatgtaatggtaagcactaagaaatcaaatgaaagatgccaagaattagcttcactatgttgccaaaaataaataatgagaatttggatgagagagagagagcttgtattcatgggagcttctcattgggctgaaaattgctcacacaagtagttgatacccaatatacatcacccaccaatcacacttcacagcacatcaaaaaaacgttttattgatacttaaatactaaaattgcccttggactttcatccaaaaatgaccaaacccctctgcatgctgctatatgctttggtttgtaacc

SEQ ID NO: 191257 - DNA, 1976 bp, Cannabis indica
gatttacacaaatataggaaaccaaatcaatatatgccagaccgaaatatacattaaataataaattatttttgtcaattaaatatgaccaaaaatggaattaacaacttgttactttagctaattttgtttcagcttttgatgttcttgattattttttttttcacaatatctttattgtgtatttttgtttgttttgtattgtaataatggtgtctattacatgatctgatgtgaattattagacttttttgtgtcgtttttatttgatctttctttgctaatttattttaggttggtttcgttgttctttctgtctgaaaaatgctcttgcttaaattctaaattctcaaaagatatccatgtctttagttgtccgttcttattaagattggcacaaaataatattagggttgggaatgggaagagactagatgattagcattgaatattattagtagtaaaactgaaaagaccttgatattttcatgatttcatctgttaattaatgggttgaaaacgtttgcattaaactttgaaatcattttcaaattggctgttcgctaaacccaaatgatattttcccacttaataattgcctaatcaacttggccctctaagcccaacacgtgtctcgattttatttgttaaaaggttcaacaggttgactgaccaagtcattcacgaccacgtaaaccggaatgactagattgctcttcttccccacaaaaaagattatatttcgtcgcctgagagattcgaactctcgcggggaaaccccatgtacttagcaggcacacgccttaaccactcggccaaagcgactttttgatttatcatggaaacgtataatataaaacctattatattagtaatctgctattacgcaatgcacttcagggagcattttttaaatccaacaatctcaatagttcaggaaatatttttaacgatcttaaaaattcaaagggcatgatttagtacatgtaaaagtttaaggggcaaaaatctcaattaatctttaaaaaaatattagtaatttgctattatgcaatgcactctctaaaactgctaaaagttgtgattagctactctaacttctttttcatattaaaaatttcaatttcaaatttaaaatattgaccaagtaaccaattaccatataacatataactgtgaaaattggcaacttattattgtgatgccttttcatattttattcaaaatttaacttgtgttttaccatttttaagttttattatggacaagtacctggtaatgatagtaaagaaaattggtaacgtttattatgagtcatgacatcttttccatattataaaaaaactcaaaacctgcaaagcaatatttttgtaagttttgttgcaagaaagtagcttacttggtaaccaataattggaaaaatagtagctggttacaatgatgtatttttctagatttcaaaattttgtgacgaattttaagcaataaaaactagtaactatgggaacatgggataagattgttcatatttgcttaattttattcactcatttcgtacttatatttaccttttctctttgttaatggtaatactatatttagttacatttattaagtggtgtactaacacagctctcaataagttatgcttacataagttcatccacaagttgaaatatcctcaaataaagacactcagattgttatctatagtctacaaatcccattattgatgcttacttattacttttgcaactatgactatgcacctagtaacatgtctcatttgatatttatctcaattagggtgtattgtgacgaagtttgatgtaattggtgaggtttttaattccggtttaaacttaatttttaatatcaaattaaaataaaaaattaaattgaatcaaaagattaaaagaaaacgatttctaaaaaaattgccatgtttaaagacaacttggccaaataacatgcta

SEQ ID NO: 191258 - DNA, 2107 bp, Cannabis indica
atatttgacattaaatcattaaagttattacactaaaatagtaaaaaaaaaaaaaaaaaatacaacagaatagtgcaaccattaagataatcttaaaaaagaaaaatcttgcatttacaatggcaaaaagcaatctaagaaatttccctttacacttttcttcattaggtgaatgtatttatttctgtcagaaaaactttagtgactgaacaagtttttttaggaataaatatattctttttttaatgataagctcaaaagggcattagataaaactttggtgataaaagagaaccattacaatgattgttaaaaaaaaaaaaaaaacaataattgtttaaacccacttagcaagaacatggaccaaaaatccttacaactcaaactctcttaaaccggaaatatagtctgaaatattgcatcaagtatttatgcatgaaatttaaccaaatcaatatcattttcttttgttgatgatacaatattcattaaagaaataaacttcacctacaaaagtaataatgtaatatattgctcttgtctatgtagttcctatgatctctaatcatcatgtggaccattcctatttatatttattgtaatcattttacttagtatctcttttaatttgccttaaaatagttaatagtgttagacactcattagccaaactaactgtttatcatttactgatgattatacttggtgttctaactagagcattgctattaagcaccagtagtgcctagcaccttctcaacatgtcctgttgcgattggctagtgatactctctaaaagttattatattaaattatatgagacctgatacttagttggatcaataacgatattaacacataagagagtgttaagcaccactggtgccctttaatatttttcctctactactcaattagtatctatgatgtctttcagaacaatattttttaatttatatattttgggcacctttttcctcttaaggtttttcttacatggtttactcaaagaggttataatgagatcttttttctcataaaaataaacatataaataatgtaatgtatttaaagtggtattatatttttcaatatttataataagaaaaagaatgtaacttctagttctactactctctttttcagaaagaaaaatagagttttatatacagtaattcttacgtaatttgcattgacaatttgggcagaacatattaattcatacatctagtcctccaatatcctgcaaagaaaatcgaatacaaaaattaatataaacactttctaatccaaaaatctttttgttttctaaaaatgttaaaactagaccttttaccaaaatattttatcagaattggagttcctcaactttttcttcagcgaacttgcttcttagaaaaagttgaagaactccaattccgataaaagttgattaattttacatacaaacgaaaacgcttctaataaaagtaaaaatttcagagtgaataaaaatgtctgataagttctgaaattctaatctttgcataaagagtattcttctatatgataagaacaaaaaatgaagagcagtgtcctatggtattggtacactcatctttacaaacacatttttatctgaatataacatagtgagtaactttacatttattccccatttaagtatataccatctcaggtcttaaactcttgcttttgacaagccaaaaaaaaaaaaaattcatatacacaaatgcaagtaagatgaggttaaaatgtacacaattgaacgaaaattatctaaacgtaaaatgatcactagaggttcagattagcataccttttagatcttcaattctgttatagattaatcaacttgaaatttagcagcacgtagcatttcaactataagggtcttcacgtccctgaaaatataacagatcgacatgtttaacatgaaatgaaataataaatagccgttggaacattaaaaatacaatcaaaagataagccatttgcggtgatctctcttttctttccttttcttgggtggaccaaccaaatcagattcaaaatctattagattctttgaaaatctatttcattttcattttgtaaatataaggac

SEQ ID NO: 191259 - DNA, 1993 bp, Cannabis indica
gcaagtttcgatggtgagttcttgctatggatctcatttcgttgcgaaactcaacttctccttcggctgtaactttctctagtcttttcactgcaatggttttctccccacatgacaattttcctttgaagactgtcccaaaagcacccttgcccaatttttcagcaaagccattggttgcaagctcaagttcgcggtaagtaaatgacctctgagagagttcttcatcagctattgcattatgaggaactttgtcataaggcttgtaacggtttctgcagagaaggaacagagaaaatagtaggaaacttaaagaaaaacttaaacaagcaaagccaatgatcaagatttcctttcttcttccacttccaccttgtttgattccttgatctgagtcttcattagtgaagcttccattatggaccttgattattgttatgtcaaagccttttctccccactttggaaaatctcaagggaaacttgaacttgtaacacccttcactattagaaaaagcaatttgacaagtacaatctctcaagcagctcttttcacaagtttccttgtccaccaatggcatgactgcataagagtctggttcccatctcatcccatccaattcgactatcgaaacctccttacgacagtcctccattgttgaattccttttgcagcctgaagtcctcttgctctgatcaatgtagtctaaaccaggaagacacaaacagactggctcttgatcaacaagctcacaatatgaatttaagccacataaaccaataggagcacacttattgctagttgaactccatacaactaaccaactgctgttctgagccatatcatgagagtacaatctaagtattccatcaacatcaattgtcaaacgacacataactaggcctctagcttcaacaacattcattacattaaaacctgtggaattgactaagtataatggccatttgaatcaagattcagactcaaattctctccttcagtgtctgaactccagtactgctgctcagccaaagatccaccttgatacactgcagggtattgccccaactctccattagtatgcagcatagccgaaatctcctgaggagcgattcgctcagaaacagatgagactaactggtttaccagccacaagaggctgccttgggcaaaaagggtatttgtaggataagcaaagctttgccaaatgatggttgaattcgagttgtggaggacgaaattccccgaatcgagcatggaagctgaggctgcaagctcagtggaattggcaatgatggacttttgctggccttgtttatctagcaaaacaagtcttccttcactgtttagaagcagtgtatcatcaatggacaatggagggctgtccctattggctgtccatacaactgttttctggtttattttctcaaaccaaattccaactgcaaagccattgttttgtattttgtagaagccaaatgcaaacttgccagtttttgataaccaatatgagttattggtatttggagtgagagatgagcctaagctgattttgttgtctctttgttgagcaaatactatagagactttagtcactataagaatgaagaaaactaatgttaatgctcccatttttggtgtatagagttctgagagttttgtttatgtaactatatattatgctgtgaagaagaaataactcttcatggactgattcattggtggcactgatatacaataaataagctaaaaagaattgttacatatgtatggacaaacaagctaaaagaaaagtcaacttcctagcaaaaagaatgaacagctggctagaataaaatcaaatagcatttctataaagctcaacctacatctttagttttaattcatctattttgtctttttgtatggtcattctttttttttttccccatcaataggtcaatacacgtaactaaagaaaaaggggataatttcccagatgaaaaaaaaaaaa

SEQ ID NO: 191260 - DNA, 1318 bp, Cannabis indica
tatagcttctttataaaatgtaggatttatttataagaatagatataagttaatggtactatattgttcgaatcttgaaatcaacaattctaattattcttcgttgttgttttacaaattatatgtttattaatatgtgtgtgtgtgtgtgcgtctatatttaaatggaataaatacatttagcttttgtgggtatcagtgtgtaaaaagaaattgtgtataaagaaaagacaaaaaaaaatttacacataaatctctagttaagtgtgtaaaaaagacagacaaaaagcctaaattaattcatggtttttttagtcctgtatttaagctgtaaaaattctcaacttctctgactagtagggagtataatagctttaattatacttgtaaaagtgctagcaaccaagatcaactaacagattctactacagtgcggtattccatttctgttatagaccttatgccattttcatcaggaaccacatcttcttccataccctctttcggagggaagccacgcactcgcccaagggcccattggtctatgaccccacaatcaattgcatacctgattgtgcgttctaagtatcctttatcagtaattctatctggttggacactcaacattctcaagaaagctgcaaacaagtgacaatgagattaagtatctttctatagttttcatatcataaataaatgctgtgctactcatttttttaactatttccaactatatatttagtcatcaaaaccacaaacaagaacaaccataaatacaactgaaagtaataattcttatagtacctgcaacaatgccatctccagatgctgacatatcaccagtaaaaggagtaagaagagggtcttccatcccattaatggcaccgttgtgctctgcagtgtagtagtggatcttggaagtcccgtttgtcacaaacaataccttgagattttcatgccaaagtggtgcaacaacttctggtttgtaatgagcaaatttagatttagcattgtttttggtgtcgaattcctctaagggtgttatctcgcatagaaattcaagttcttgcttcgtaacttcaataatatctgcaagattccacacttgttgtatgaaattcttggcttcttcactagagtgccaaaggggcaatggaagatttacgtcatagaatataactcctcctaatttctttgaaatcttaattgcttgcaatgtagttgatctcatgttaggatcgagcaaggaatgtgtgctgacatagaacatctttgcctgcacaatatgttgtcaaaagtcagagaaatcatagggaaa

SEQ ID NO: 191261 - DNA, 3535 bp, Cannabis indica
tatgtatgtccaagcatcttgttcttcttcttacctttgattaattggttaataatttttatgcaacaagaactaaattacattaatgtcttttttcttttatgtttatctagctcttattgagagcttactcacaattttctttgcaatcataatttgggtgcatgtgccaaagtggtgttgtgattaaaaactttcgtgatggattaggataagctaactcctagtttttttacatatatgtatatcattttatatttttctctctgttaatgtgtatccctcagaaaattttgtcttaaatatagaaggcacttttaaacaattgtttttgcttctacttgaattatggatccgtcttctactataatggattctcctcttctgggattagtgcctgttactgtattatttactcttaaggtttactggtccataatttcttttttcctttcagattgcagttggagcccacatttatcctcaaaatccagttcttcccaaaggaagtcgtgttaacttcagtatagaaggtggactttgtctaagatttactttgatcagtgacttgtaatttttggatagttcaataaggaaaaatagcaacagattgtgttcgttgaatgatcataagttaaccatgcatttacaatgagcacacagttaagatatttgttctgcatgcttctggtcagataagctcacattgattattttaatatgctagggataaatgatcatgttcctggtcactgggtaactgccaattcaagtgtaatatctgtcgagatgctgtcaggaatatctgaggcagttggggagggtacaacccaaggtaatgggcgaaagatagcttaagtatccttcactgcactgaactggttttgcacatatatcagtatcccctatcctttcctatattgatagttaatagttttgatttgctatgtgcaaacagtgtatttcgaagcttcaagtttgaatctgcgaacaacagtgacagtgctatcaagggatgtttctgtggatgctccgaaagagttgctaacaaacgttccttcacctacaaacggatatagctttcttgtgaagttcaggtttgtacacatggctttgtgggtatggttgccgggttggacaactcattttcttttgcctgtaatttactgttacggttagtgtgtacatgcagaaaaacaatgagcaggataattttcgtaaagtaactagttcctttgacgtaataaatcgataatgaaaatgtattttgtcctattgaaatttcttgctgcaggcttgtttacatcaccaccttgatctcttaaccagtgttgaacagtctagtagaatttttccactttgatggaatgctcattagtccaaagtccattctgttgattaaatatgctataagattatcttaaaactatcatctgcgtcatcattatgtttcatatgatgtgaagatacattggatgaaaagtgttgtcttgttagtttatttctgatttcagactgcattttgctcattacttttttctccttttgtattttggcaaacaaaagtaattcaaacagcaaaagggctataactcatggagatattgatgcaattgcatatgactgcagagtaaacccttctttcttgggtatgttccttgtcctttttggcatgtttggctgcttatagagaaaaagtctgaactcttttggtattctttgcttcatgtactgaaggtatgcaaagccgtggttggatcttagcactggtaattcatattgcctgttttttccctactcgccagagcatttggctcatttgatgcctaagacaaatgccatgaagccaaaaatacctatctccatttatgcctcattgagagaagctgatcatattcaaggatctgcatctgctctttttgttggaggcttctccatgttggggacggacaaggttaaatgtcttacatgacagtattaagctctcatttctttcgtcttaaatctaatttttttgaccaatggttatttgaaatatatagcaataagattggctaagaattatactctacgaaatgcgagtgcttgtcaatgaacaaagtagttttagctccatattaggatgttcatttcctctgatatgaactaacattttgcaatgcaatgcagttaaagctgacagcggattctaacaagactgtaataaccgtcttggggaatacaggtgacatttcttttgctgagtagctcactatttctctgcagttcatgtacctcacatttggttcagtaatagaaatcgtggactgaggaatccagttccacttttttttttttttttacaatcttctactttgtctctctttactgtgaacatccatgtcccagccccaaaacacaacagttcatcagtgtgctagttggaacaattgttttgacaatgatagccgtgcatgtgctcacgatagtatatgggcaagaagagggatgggaaatgttttctgttcccaagccttttcttgctaccatcatgatgtatcatgtgcttgtaaggtgacccttgtatataaaacaccttgttctgagtctgatatgactgtcttctaattgcaggtgttgacatttattggcgtgagcgggatttattactcatcagtctcatccataaagaagattttggatctgggagccgtgctcagtatgaggtcagtgcagttattatacacttgtttttggaagtgctatatgcatcattcaactaaaactgcaatattattcttggtggacatagcagtccaccttccaagtacagatttttactttatctggggatctccttttcctttgccttgtttttcaggtcaaagtgctagtaagcaagaagtttaaagataaaatcaccatcagccttcctgcaaatggtgagcctagtactttttattgctatggcactgatgagactcattgagggagagagggcgttaatctctaaattgttttatgacaaacttgtcatgtgtttgtgtctttctaatgcaggccagaaagttgaagttgatgtgagctatgaacctggagaaagaggaggacctttgaaacgctccataaatatatccctctgggcaagcatacttggatgtgtagctgtactagtattaacattggccattttcatctgtttcttagataagcctggtagatctcaggccactcatcctccccctccttcaaattttgtacctccggtcacaccagatcgcagcagcactcctactggtttgattgatcagtctcctaaaacaccacagcctttcatggaatatgttaggaggacaatagatgagactccatattacaggcggcagcagagatttaatccacaaaatacttactaaatctgttacaattattacaagtaggactaatgctgtagcggtgtacctcctacccttgagaaatgctcctttgaaattagaatttttgcatttttcttgggtcaagattttgttgtgttttatgtaaattaagtcagttg

SEQ ID NO: 191262 - DNA, 833 bp, Cannabis indica
atacaatatgactcactatttgttgggcaactatatgaacaatacccattggagttgaccttaggtactttatgatgcccaacattacactaatatagtgtattgtgaatagttagcaattttttatataatttattaaatcaaaatgtgtaaaatccaatcttaaataataacagttgtggtgtttggctttaatttaccccgcatttcactatataataacataacattgtcattaatgtttataagcataacattgtcattttgttaattaacaaagccaatatattaatacatgatggatcattgaattttatatttgaaataattaattaaacaaataatatgtagggaatatgttatgtatagatccatggatatcgatgaatatagttattaaaatattagaaagaagaatgaatctaaactcaactagctagctatggcggtaatattaaaaatttaaaatattgattgattgatgagtaattaattaattagtaaattaaatgagatgactaattattattacaaataatcttgaaatgagagagagggagagagagtaccttgcgagcaagagagatgtcagaagaagcggtaaaatcggtgaagcagttgtgagaatgggcccaggaaggagcattgacagtcacgggcaagcatttgcaacgtggcattgacttccgatcataagagagtgagtccactcgcgcagatgatgaaaatagcggagtaggcgtccccggcgttgcaggtgccgacaccctcccattattatctccctctgcttccgccatagataatatatatctcttcttcttctttttctt

SEQ ID NO: 191263 - DNA, 888 bp, Cannabis indica
aaaactcaatttcaatcgataatacatactaaatttggttgtataaattgaaaaataacatttcatgttattcttattctaaaaataataataataataactactaatcaaataataaaattataattttaaacacacatatataaataaactaataatatactaattaatttgaaaataaaaaataaaaattaatatattagtgatgcatatgggtgaaatgtgaaaaagagaagtaaacaattggttaagatagttaatgattacatgcatgaattaatatttattatcattaaaattaagaagacataacaaaagttaggaatacgtcgttgaagcctgtctacatataattaattacaatattgaaatggtcaaaagtagggaacactacacatatataataattaattataaattattcattatcactatttttttttttttggaaataaattcattattactattagttttttttttttgagtatgtactattagttatatgtagtacgtagtacgataagtaaagtaattaattaaatctcagccccccatcaaaaagacaaagtatttattttatttatatattggtaaataggtcatttaataatatatatttatcacttgtaagttaatatatatatgtctttttcatataatttttatgttgtgcatagactattaattaattaataatactatattgatgtcacaaatttaaaattctctacctgtccaaaaatttcccattatccatgtacatatatgtatcaaggtgtttggaaggttattttctaaaaaaaaatataaattaatcggcatatattgatgtgatataatataattaggaatattggtgataatactacttgaataatttatttt

SEQ ID NO: 191264 - DNA, 5373 bp, Cannabis indica
tttctttaatggccttgagattgagctcaccatggctctctcgcttctcttcttcttacccaactttatgtcttcctggcaataacaaccagttcggaaacacccacactctgttcttcaaaaccttcactctcaatctttccaagtcttttcgggtaaaatcttcactgggtgagagtgaacgctctaatggggttttagatgttgagttgttgaatctagtttcggctgctaaagatgcttatgaggtattggagatgatcgaggaaaggtctgagagaaatggtggtggtgttgtttctgtttctgattgtttgatgatcatttccgctgctattgaaaggaacaatcttgatttggctttgtctgttttctatgcaatgcgttccagtttcgatcaaggtgggttttttatttggtattaactgtaattgtgtttaaatcaccataactaatattcttgttagttgttaaaacgtattgggtttctgatataatcttgttaagtattggtgataactacacttaccaaaaatttgaatggaaaaattatgtttcttttcatggctcactaaagagttcttttttgcttgttcttgactactaaagagaagttcaattgacccaaatccttagaaaggtttcaaattaagtgtaatcttgtttaaattaccatatctctacttgttaaagggagctctctacatttaatgagctacctatctatccattattgtagagagtaactttttgtatggttaaagctcattctctattttagtctctattgtttagctaaaaaattaaatagagagccatgtttagtcttaatccacttatattccctactttagttaggattagctattttagtaattttagataaaaaaattaaaatagaaagttttttttattcttactccaattatgctttgttaggattgattattttgtaatttatatattttgaatttgttaatataaaatgattatataaaataatagaaaagtaatagcttttgattaaaataatattaaaaagttttgtagaaaaagtagggagttttttatgcaatctctgttataaaaattcactactttttgtatggttagagcttgttttttcaaaactcactccatattttagttaagaaatgtttacatataattgttgttcagaatgtattgggtttctgatataatcgtgttaagttgattttggaaaaatttaatgcctcaaaggctgtttggaagacagtattaatggaaaaagtatgttcttttaatggctaactaaagagtttttctgcttgttcttgactactaaagagctgcatttgatcaagataaacaattgaattcgcctgtatatcctgcaacaacactagaatttaagttactagttgtttttaattatctatatattgtcttagtgaattagtatcatttacattcttgttctcgaagcaggggttacagaaactggctcttttgttgagagatggaagtggtcgaggccagatgttcgggtctacactacactagttcagggtcttgcagcctcactaagggtttctgatgctcttagaataatcaacaacatttgccaagttggagtttcaccagctgaggaggtaaaaacaaattcagttgcaattttttttccttgtcttactaaatgagctttgtattgagtccacttcctagtcagctaaccaaatatttgataatgattggaatttgttaatgttttgcaggtccctttcgggaaggttgtgaaatgtccgagttgtatgatagctgtagcggtggcacaacctcaacagggtattcaggtatgacttgaacctcccttctttaaatgagttaagataatgtgactgattatttcctgctggcttgtcaaggactctgaatatagtttcagttgcatgataaacgaaggcagattcggttaagatgttactcttttgttttagacattattgtatgatgctgttctaatccagcatagtccttatggtgcagatagcatcttgttcaaagtgtcgctatcagtatgaacttgtttctggaaagataattagcattgaatcggaagaaatcaggtgggacagcttccatcttctcttgtgtcaatctagaagctattttttttatacaattgaaattgtatcaatgtttatactaagccaatttgggaaatagatattgaaagctatcacacttatttcaatgtacctgtgtgtggtgttgatcttgggatattggccttctctaaggatctcatcctgccgaacgcagcatggatgttccagcatggcaaagggggctcagattcctgcaaattaagaagcaaagcattcctgctgctgttcattctattgtggtatactttttgttcatgttgaatgtctttatttttgctctaaacacattgttacataaaattctagttcagatcagaatgagcttaaactgtttttgtgtatacttttcttattttcaggttcagacccctactggtatggcacgaacacaccggtttgctactgaaaccgttgatgtcccagcacaacaaggagagagagtaaccattgctttagcagctccatccaatgtttatagacaaataggtcctttaaaattcagtccgaaggccccaaacttttatcccggagagcctatctgtctaacaaaccatgaagatgacagagaatcacaactattacgcgccccagctaaagataaaggctcatctttaaccaacccctcgattctctttcccatcattgcattactagcaagtggagatgtcgcctcgggagttatagaccccagcctcccacaattcatttcggttgcagcagtagcatctgttgctgttggaactactcttaacacattggtttttccacaattgagtaaggtaaacattcaagcaaattttgataaggttgcttctatgcattctatacttggcacacattgaattcaagttggctaaagttatcaaaaatgttgtgtgttaacaactactctcattttcccacaaatatttctttcattcataatttgttatggtgttagcttcctcaaaaatcagcggatgcaatagctatgaagcaacaacttttatctcaatacgacgttcttcagtctcgaattagaggcctgaaggaagctgctgaaaaagaggtaaacttacaatcacaagctgtggctctggaactatcatggcacgttagttaaaaccgagttttatgctgatgaacatgcttgcttcgtaggtttggatgttagctcgaatgtgccaactcgagaacaaaatctttgctgtaggagagcctacttaccggtgaaaccttcttaacattattaccttgtcgtgtttagttgaattctcgaaatttgctgtcctcattcgatgttgttgatttgttaaaatacatacagtgctcgaagaactagagtcaaacgagttagagaaggactggaaaattctctcaagggtaggattgaactgatcgatagctatgcaagagtatgttccattacgcttaactcattatcccagaaactgaaatcggtatagattccataactctggcttctcaatgttcagatatcttcgatgattgaaattgaggtagaattggactccgacgttcttgctgctgaagcagcgagcaatgtggtatgcatgaagtggttcatatacatttcttccaaccttggaatagtaaattctgaacactctgattttcatttgcaggagagtattgctgaacaaatacaacagataatggagttggaaaatcttgaagaggcatgtcctcttaatttggtcttataagttgaaacataatgttattaaattcacccttgagttgagatactccaattttagtgtttgtttattattaaagccattccctttttatctttacagagatggaagttacaagctgaagcaaatgatgaggcagaaaggcttcttagttcccaaccaatgccaacagaacaggtttaacatcaaattaaatgtctttttatatcaaatgattgttcagcaagcaatgttgaatgtttctgaaattttcaagatcagtgacatagaaactagggtggttgttcatcattgagccggaaaaaaccgtcgatggctcttagaattaggcttacagaaggcttcttatgtatattggggtaacagaaatcaaatcaattgatcacattttccattaagtgtttttgtatcataattgtacaataataactctacctattctttcatgtgtgaatgattcaattcatatgccaaatcttttaaactaaataggatgacataagattccaactgattttcatatgggatggcataggtgccacaaaccgtagaagatcaggcttcgagctaactgtagggtctcggttttctgattttctatcgaaaactacgagaaacttagcaatgttggggagcacaagctctctgcaatgcagatgcaacaaagggaccttcgatagaacacttcccttctgaacatcgagaccttctggcctacgcaacttgtaaggcttacctgttgtcggctcaatatcaacacgcggcatttgtttccacctttggtgcacaaaccatccatatttatagtcacccacaattggggtgccaagagcttcggcacaatggacccgaagcttcagaaagaaaagaaaaaattggttaccgtttgttttgcaactcggttactcatgcaaaacataaatttaaattcaacagtttatagaacaaactctgtacctgatgcttccgactagtaagcggacgtaactcaagccatgaacatccatttattgttggtccgagcacacgatattcagttattgcttcttgagaagactcaaaacctgattgatgagctatgatgaccctttctgtctttccatcgttaagaagcacctgcattgataaatcaaacaaacaaatcacatattttccaatcagaattataggccccagttggctaggcttttaaaagctgttttcgggcttctaaagctccaaaaacactcacctaaaatcagaagcagaagcccagccaaacagaatctaaattacatatatcgaaagagtaatgttaagaaagctaaggaaccttagaaagaggagcacaaataaagccttccttttccttgggagaacctataaccaatgcccagtactctgatatgtagcatcacatgcttcattccaagcctaacattacccattaagcatatcagccataaatttaaagagcaattaatcagtgcagatctagtttaaaaattcacggcctttgtctcaattgtcgaataccttacacg

SEQ ID NO: 191265 - DNA, 1886 bp, Cannabis indica
aaaattcaatattttgtaaaaaccctttaaaaagggtattcttattggcatcagttgcgtggatggccctgagatccgcccttaatggggttaggattctcatctaaatagagaataagtattattttttgacatggaatattaaatggcgcaggaatggaatgacactctcttctcgttaaatttattaattaattttttatattttataatatgtatttgtattttttttagtatattagtgtcatttttataattttttaagttgtgtgtttgtataataatttgtaagttggataataaataatgtgtaatatttgaatttttatgtaatttgataattttatacatttaggagatttcccgacccgtcatggtccaattagggaaaagtgagaataggattaaaatatttaagatggggacaagggaacactcccagcaaattttccgccccatgtgcatccctaccaacactaagtagtgtcctacaattagttagcaatattcgttaaaactattacattaaaggaaattacgacataagccttcaaaaacttatgtttgatgaagataagttatcaacctcaaaaattgacgataatagtccatacaaagtataaaattttctcattttccatttgaatctcatggccatgacctttggtttcttcaaagttcttcaagagagacttttcataagtcacatgaatggcagtacacgtacgtatcacaccacaatcattgaaccttgccatgtattgcattgacctcactgaaggttgcagccaattcatctctagtttaattgaccttaagatttgttgaaggaatccttcctaaatttcaattctcttgcaaagtgaccacttctcccacaaacaaaacaaagtcctctcacaccatagaatttcactccatctttctcaggacctaagtggttttctttcttcttttggtgcttcttgaaactctttcatttggattgagtaggcttagtagtcacattagccttagaggtcctatctttggactcatccacacttttatctttaaagcgagattcttcctcaatcctcaaatatttgagaatttcctccatagaaatcttttcatttgtgtgaagaattttcttcctataacctctccaagcaagaggtaatttggctataatcgtaccaataagaaaagcttcgggtattacaatattaaaagtataaaatttattaacaatgatttgcatctcatgtacttgtggtaaaagagatttttcatcgtaaaacttaaattccatgtattgagtaataaggaacttctctgtaccttcttctttcgatttgtactttgaatttaacgagtcccaaatctcctagccatcctcatattggtgtagagatcataaagacaatccaaaagagcgttgagaatatgttcacgacatatgagttcatcttcttcgaatttcttccttgtgcttgtaactgctatggattctacttccttttatggttctaaaattgataaatctttatctaagatgtaggaaactttcaatgctgtaagtagaacttgatcttatcttgccatctcacaaaatttgaaccatcgaatcgatcgggtcacacaagatcttgtgtcatgaattttagagaaaaaattaaagatccttcatccattattagtagcgacaaataacacaacttaaaattaaagaaagattaatagatttcaaattagagttcaagaactcaaagaaattatcaagatcgaaaaaactaagtgtttagatacagtatttctttttctaagattagaatcaatataaggaaaaaagtttagagcaataatacaaatttagttgtggagatttaatttttttttttttt

SEQ ID NO: 191266 - DNA, 3109 bp, Cannabis indica
aaagagcgatgaaagagcttgctgatcctttagtgaagagtgtgtaatcggcttgagattggagaaatccttcttcaagcaaggcttcggagagctttgtgtaccattggcgagaagattggcgaagaccataaatcgatttgtgtagtttgcaaaccaagggtgtacctgcagcagaagaagaagaaggagtgaaaccgagaggcaattgcatataaacttcctcatggagatcgccattgaggaaggcattgttaatatcaagttgtaatatgtgccaatggttaatagtagagatagcaagaagcaatttaaagtgaccatcttggccacgggggaaaaggtgtcaaaaaaatcgaggccctcttgttgagtgaagccttgagcaacgagtcttgctttatagcgctctacactgccatctttattgaacttgatcttatagacccaacgacatccaattgcctttttatctggaggaagtcgaaccacagtccaagtcttgttatgtattagtgcaatgagttcaacattcattgcttgaagccaatgtttaaaatggatggctgataataattttgtggttctttttctgcagaaatagcaaaaataaaggcattatgtaaagtggacaacttatcataagataaaactttagtaagagaatgaggagttgagagtttggtatgtatatgagagtaacactcatagtcttgtaaatatcttggggttttggttggtctgctggtgcgccgagtaggggctgctggtatggtgggagatgatgtgttcgtggtggaaatagtaggtgcatgaggacattcttcttgctgatctggggacagcaaggaagaagtggaagtggcatttgtattgtcctgtggaaaatcatcagttgtggaaatagatggataatctgcaataggtgtattagtgacagcagtagaaggtaaaactgagataataaagggatttaaacaagcagtagctgtgttgattttagaaaaaggaaaaatatgttcatggaaaactacattccgtgaaataaaaaattgtttggtgtttaaatcatatagtctgtatcctttaacaccttggggatatcccatgaaaacacatggtgtagctcttgctgcaaacttggtcctgtgggcagtgatagtagaagcaaaagctaggcatccaaacactttaaggttagtgtaatcaggttgcttaccatataatttttcataaggattagattaccaaggttgggagtgggggttctatttattaaaaaaacagatgtcattatacattcagtccaaaaatgaagaggaatgtgggcttgaaaacataatgctcgagcaacattgaggagatgctgatgctttctttcagcgatagcattttgttcaggtgtttcaatgcaagtataatcatgtaaaataccatgtttgagaaagagatctttaaaaaccaattcaggggcattatcagaacgaaagcatttaaaaacacacttaaattgagtttgaacataagataaaaattgagggataataaaagtaacatcagatttttgtttgagcaaatatatccatgtaaaacgagaatggtcatcaactaaagttaaaaaatatcgatgattagagtgagatgtaacatgatatggtccccaaatatcacaatgaatgagatcaaacacatgttcagaaaaggtagtgttattaggaaatggcaatcttttttgttttgccaagggacatatgtaacaaggttcattcttgtgagcagttttaacagtacattgcagattattactaagaagatttaaattcttttgagacaaatggccaagcctagagtgccatgtctcagcagaaacagcaaaaacgtgagaaggaggatgtgtgagatccaagatgtacagcccattaatggaatcacctctgccaatcatcttctggctggtgtgttcctgtatgtgaaaactgttagaatgaaaaagaacttgaagagaggtatgattagtgaggctgcttacagatataatattatatttgaagttgggtacatacaagacatttgtaagagttaactcagaacagagagaaactgtgccactataactaacatgaagacaatcattattaggtaaaataagtttagttgaagcaattggactaacagattgaaaaagtttaatgttagaacatatatgtcttgtggcgcctgagtcaattatccaagaattgaatttaggtaaaatagaattgcatgaagaaacaataccaatgttacctcctgaagtactaggatccaagacaatattgctagactgttgtgttgccaagagatttagcaattgttggtattgagtagcagaaagctgaggaagaaaagtattgttgtcgacaggagcagtgactttttcttgttcagtttccacttgatttgctgctgcctctttggacttagccgatttgttgtatcccggaggatacccgtgtatcttgtaacacttgtctatggtatggccatgaatattacaatgggtacaaaatggtctatttctcttaggaggattatttcttggaggttgaacatcagatttattgttgggtgttttggttccttgaaaggcaaaggcaagattaggattgggatcagcagtagaggtggtgtttcctctctggttttcttcttgagaaacaagatgaaagaccctattcacttcgggtaaaggatccataaggagaatgctgcttttcacttgcgagtaaaaatcggataaacccataaggaatgacataatatattccatatggtagtgttcttgtaatttcttgacacctccacacgtgcagccattgcaggtgcaagtcggcctgtaattggagagttgttcccatatagttttcaaccttgtaaagtacatactcacactctgattgtcttgcctgagattcataagatctttcctgaggttgtaaatgtgaggaccatttcgttgatgaaaacggacctttaagtcagtccatattgcggcagcagattcatcatataatatgctagacgaaatttccttagacacggagttgagaatccaagaaatcacaatatt

SEQ ID NO: 191267 - DNA, 1150 bp, Cannabis indica
tctctctctctctctttcgtcttgtcttgtcggcggcgtgaatggagtgagaactaagaagtgaacatcaaggcaaaggattaggttaatgtcaaacaatagtattattttgttttttaataaggtgttatttttttttattatttgtatttggctacttttaaaatagacttgattagaatgagggtaggctcatgaattatgattaagttattgagtgagggcttttgtgaattggactttaataaattgagtgaagtgaattaatatatgtatatatctccatgtgaaaagtttgatgtatatatttgagtgaggacttgtgcttacatatgggctaaagtctctccgtccctatcgatgtgtagttatttttatccgtttatgcaaaattgagcttttggaaacagttttggcaactcaaaattccatcaaaagtcaaggatctcatgtagcgggcggtgtctaaatgccttccatcacatatgaatcttcaagaaaaatacgcgtatgtgcccatgatctgtcccgtgtgttgtgtatttgctgagacgaatttttattgtcttgtcttgtacacccatttgcttgggagcgttggcgtttggttgggtttggatcgatagggagatatattggtacagtttgagcttggctgaaagagatcatgaaaagagtttacgtgggtcgtcttggttgagtttttatgctttgttgggctttgtggaaagctcaaaatgagttggtatagcaatctcgtaagagatctgagatgggcattcttgcatttacagttttatcacttgaccaatgggtaaaggctcaaggaagaggtaatattcctccgttgtgtccctggtgtgagggggacagaaagagctctggacgaaaccagaaattggcatcaagataaacatagatgcaacagtttttgttgagggagaaagcttcaggattggatttgtgattcaggatgctactggttttctagtggcgactcaagcgatgtgttttgcggggaaggtggcaccaggagtggttgagacaatggggataaaagaagtattgagttagttgaagatagattatcacgcttatgttacaattgaaatggacaatttagtgatagtgaaagctgtccgtagtggga

SEQ ID NO: 191268 - DNA, 4125 bp, Cannabis indica
tctaacatgagttatcctcatataaaaattgaaagttatatatgagagggtataagtgaatgaatttaaaagttagttacttcggtcacaaatatggaaagttaaatcaagttcgttcctcatatagctttcatggacagctgtcattcagaaagagcgagtctcccttttgaatatcggcaattgcgggcaccaccgcccactttgggtcacaacttgtcgtttgtcccttccaactcaattggacaaaatgggaaagtgaccattcttacattttaaccccatgtgatcgataaataccttttatatttttttatttaaaaataaatatgattccgtaatttcttcgatccaccagggctattttgggcgaaaaaaagtcacaatccttgtgatttccttcgggtttcgtccgcgtaacctcatggatccaatctgagccgtccatcgtttcacaatatctgatctcgaaaccctagttccacctccctccttcctttttatagacaataaattttcaaatttgccgttcaaccctctctcctatatctcaaaatttagtccgccattacaaagaaaaataaagagctcagagttagagcctagcctctgtccttcgatttagggtttaatccatttttttttttttaaaaaaagagacaaatcaaagcccaaaggttttggctattgaaattgaaattctagaatttttgctggagtctttttcttcttcttcttctacatcggatatggagaggatagcagcggcggcgcatgccgcgacgtcgtttgtgttcctgagttggcaggaggtgttcgtttctaccgataaagggaagagggaggtccattattatctgaagcgaagcaatgggacctctgatctggctgttatagggaaagagaagagctcgaggcacatgtcgtatcactacgctttgaggaatcgttcgcctttcgtggcccctcttgccaaactaaagtctcgaagagaggtcattgattggcttaattccgttgttgcaggtaaatttcgcctttttcaattttcatttttaattttttcgtaatggttttctccaatccaggattcggtattcttgtttttttggggacgggacttcttattcaaaattttcttctattttctgatttgtgggttttcaatcattttgcgctgagtggagattttagattttgggaggagacttcatattcaattgttcttctatcttctggttgggatttttaattttgtggagggaacttctcattcaatttggtccgtggatttccaatcattttgggttttgttttgctttgtttcgtggttttcagattcggttaatcgtaaaaactctaaataagatggcttttcggtctagtttttgggtgttttgatttggctttttagttggcaaattcatttccagatttgatttggtttaggctgatgtattgttatactggcgtttgaatacatattgttttctcttctcttctgtgtgttggcctagtctgttcccctctttttaaagttcgataacttttcgtccatgtctatatattttcaccgttaaatcggttgcgaaatccacccaggtgactcttggccctcattatttcgatgaagggtttcgttgactctgtgagcaatgtttttcttattctttcttcttcttttatctttcagatctgttggtcctgaaattccttaatattattagcttctatcttaatttcccctgggaatcccattgatagatttgagaacataaaagtcgcatgattttaatcatgtttctatttccccactccttcaacagtttttgcttttactttagaagagaattctttctgggatcatagcctagttcggtttcttctctttatcctcgtgtcagtctctgcaatttctcacttgacctatggatttctagtgatcctgtttctgttaactgactatgctttgggctgcaggattgtttattaaattgtaaagagccggttgagagcatcggaatccttatgccctcaaattttctaggtcaagatccttcatggccaacttattgtgttttttttgttaatgatctttgttgaaagaaatccttgctatctggatacatatgttttatcttgttttgcaagcttatattgtataattttgtcttacttatattggttatcctgttatctggtcaaatatgtaaatttaaatatatgataagctttttcttgttacgaagtcattccttttggtattactaaatctgtacgcaatgtatttttctaataaattttatgcactcttcagattcctcaaccaacaaatcttctcatctagacgtgggtactttggactgtagaaatgcatgcaagttggatgttgaatcttgtaaggtatgattgtgttgtttatctactcttatattacagtcttaaattatgattttactttttcctttttgtaaattttcaatagtaggggatgttccacaggagatgcaattacggaaggtgggccattgtgctaatgattttcaatggttgggttcaccattgtcaagcagaaaaaagcggaagcattatcagtcttttcagtgtaatggtgttagaatatctgtgagtgaagtttctgttttagatatttttttgtatgttaatatttagtccactgtgttaatattctgctgtcccttcaatctcttcaggttcatgactttgtttatgttttggcggaagaggataaacgtcttgttgcttacttggaagatatgtatgaagaatctagaggcagcaagattgttgtggtacgttggtatcacaaaattgatgaggttggtattgttttgccccaaaattataatgacagggaaattttcttttctctctgtcttcaagatctaaatattgagtgcatagatggattagctactgttctcagcccccttcattacgagaagtttcagaatgaggcaagacacacacaattggaaccatttgtctgccgcaaacaatttgaagatgatgatgttacgccttttgacataactcaagttaaaggttattggaaacaggatatactcagatacatgtattctgtttctttagaggactatgatatttctcaacaatctaatgattctcttttggaagaaaacgctcctgctattggtgtaaggcctaaaaagaggcaatgcactgagagaagagagatgactggtgctgtatatttggagccacgtaatttagttaaaagtgggattgatttcaactgtggaaatgaaacatgtgatatggatggaggaaaatatttttcaacgttgtctacgaaagtaactaaggataactcttcacagttgtatgaagtaggttctgaggttgaagtgctctcccaagatagtggtatcaggggatgttggtttagagcctctattattaagaaacacaaagataaagtgaaggtgcgatatgtggatatccaagatgcttctgatgaggccaataagcttgaggtatgtgttattgtagtttgtagcatctcaaaattttattgtttgcaacatttatttttgaacttcgggttagcttgtattagtcaacttacgtgtatatctttttgggtgtggtttataggaatgggtgctgtcttctaaggttgcttgtcctgatcacttgggttttcgtatggatggaagagcagttgttcgtcctgccccgcagcccaataaaggtcgagtttcatgggtagttcatgttgggactgttgtggatgtatggcggcatgatggttggtgggaaggcatcgtgatccgtgtgtctgatgatgaatttcatgaattttttccaggtatgcatgatttctcttggaaagtagttagtacacagtttttttccccttttcttatctatttttggtgttaatatatttcaatgtctttactttacctttgcagctgaaaagcaggtagtctttttttagccgtcttgaattgagacattctcaagaatggttaggaaatcagtggattcagatgaaagaaagggcagaccttgtgcctgttgtaagttccagtttagaatttaagagagtcacacaatgtccgatcatgttctgccaag

SEQ ID NO: 191269 - DNA, 1243 bp, Cannabis indica
ttaaaaagaagaagaagaaaaaacacaaataattacttaaagcaccttaagaaattaatgatcaattattgttttctatattaatgatgaaaaaaaataataataacaatagctttttaatgatatataatatatcatggaacttttggtttgtgctctggcttgtgagtgacatcaaagtcaacatgaacaaatgctctctcgacttctggcaatttttcaattttgtcttgaagtgtctctccaatgaaatgtgcattgcttagagacatttcaccaggtaacactatatcaacctcaacaaaatattcagttccaaatttatatgctttcacagtctcaatttgcttaatttcttcatgatgattccatattaggtatgtaagctttgctagatactctggtggtgctgtccttgcaatcaatgaccaaacattctccattactgtatttgaccaattacccattgtgtataatgcgatctgcacgtataattaaacataattaataagaagaattgtaagtagttttgattggaaattatattatcaactatcaaattaatttgaagtgttttctctcttccaatctcgttgcttgaatggggttaaaagcacgactttgtttggaagtgaaagttattatatgttgagaatcatggagttccatctatctcaaaatcaattggcaatgagtggagtagcccatgtaaaaaaaatatttttcatttaaaattagacatatttttagtaatttttgaacatactacacattttttaaataaatgacacaataattttctttttcttaagcccatctaatttcagagccggtcttgaattctttcagttgggtgaggttttgttctaatgggttggctcctgtttggcgggtgagcttctacgtgttgggggtatgggtgtagtgtcgggataattgtggtgattaacgagtttagtgtggttgttcggcctagattctggtcggggtggtgttttacaggcttaagctttattggatagttcagtctaagaatggttcaagttattgctttgttcttgtacataatgtctaattacttatcaatacattttttttagctttttacaaagtaaagaactatcataatttcaattttcttttgaaattcattcataaaatctttaaaaaaaataaaataaagaatagaagtgtatcaaaatacttgttttagaataatctaaattataagtacttacaagaa

SEQ ID NO: 191270 - DNA, 7002 bp, Cannabis indica
gacttgttcgcatcagaagtattttttaattttttattttttttcatattcacgtacgttatagctatttaagataacttataaaattttgagaaattcagaataatttacaatataaaaaacaatgttcaaacagtctattttacacgcgtataaaataaaataattacaggtacaatacactgtttgaacgtatttttcggtgtgttaaacttttctaaatttttaaaatttttcaagatgtcttaaataactataacatacataaccataagaaaatatttgactaaaaaattattttaagtgctaaaataaatataaataagaatgtatcaatatatttatttgaaaggatgcatttgtataattttcatttaatatttatacacacttttgtttattttttatttttacatcccaaaattgagtaaagaatcttcaaaacttccaactaattcttcttctccaattccatgatctgctaaacccaaatattgttcttccccaatttcataccaaaccctaaattttttctctaccaccccaacccacttcaccacttctctgctctctctgcccttcgtcgctgcacggctgccaggtatctcaatcattgattttccatttctatgtgttgattggaaattgataaatgtaataataccgagcttagattcttgcaactaaaaatgaaatcttgattatcattctctacacctgtttttaaatcaaaattattccttggctgttgaaaatgtaaagatccattctttcatgtttttggaacataactacacaaattcatattcaaaaaaacataattacacaaaaagaacttttatggattgaattgttattgttgctttatcctgtttaagccttaaaagctaacaaatgaggttgcttagaatctaaatgctaaattttcactacaggtcttacttgacaatttttatggattgaattgctgttacacatcaactcacacaaagtcacattcaaaagaacatatttacacaaaaagaacttatatggattgaattgttgttattatgctttacactttaacttgtttgtttgagccttagaatctaaatacttaatttttcactacaggtctttacttgacatttgttgggcatggcaacaaaacgcagtgttccatatagccgtcttcctactgatgacaattataatgattatggtattggaggacaacatgaccgtaggtttgattactctccaaaagcatttgacaaaattccatggaaatccatactcttggctcttttcctgctttttcttggctcagcccttctttttctttcttacttcatttttactggtcacatgggaggagagcggtcccaagcctatggccttttagctctaggcattctaaccttcctcccaggtatgaaagcaaacactttctcttttcttacttgtttctcattctaatataattgaagtgtgaagctaatttagttttgaagaaattagttgcttggatcttttttgggaatccttaaatttgtattatagatattctatagtttgtacttttgagctggtgcacactaggctaacaataaaagaagattaaaaggtctttattctattattcattaacgtaaaaaaagtgaagggtattttattgccaacattacataaaatgtgatgtaaaagttatatttcgagggatattgttaatgagccgcatactataaggagcacaacttggtagtctaaaaagtttaggggcaaaaatgttaattattctaacttttttatagatttgcataatatgtcttgtcaaaaaaagattacaaaatattttaaagaaagagttaccatagtctcactgtggttgaattttataaaagaatctgtacatgtgacatcattgaatttgtgcctgtgaaatacagcatattttttatctcttgtaaaggcaatgatgttctatttgctttgttcttcaatgaataagcatttgatttttttctctagtatcttgctttatttgaagtgttttgcttgtggggctatatttataccaatggaccatgtagtacatatggttatggattcttagaaaattttgaaccaaacataagcttgttcaaagcttgatctgactgaaatgttcctcaacttgtggctgcaggcttttacgagacacgaattgcatattatgcgtccagaggtgccaacggttatcgttttgcttccatcccggattattagagttttcctcctttgtaatcatccttctgtttttttctttttcataacatgtaatgtacctttatagccatttttggttttgtttcttgcatttcttattcctgatttcctttgttttgcctgtaaaatatgttggaatatcaaatatataaatactatattttgttttttcaattgtagcaaattggctctagtaaaacaccacttcatcatggaaaagttagcccattttgcaagcctatcagccttgtagaacaaacacagagcacttaaacaactctatatgtttaagggtataatttcatgtatttattattacacagaaacttcatggtcaccaaaacacaatctaaggtagcaacaagggagctaaatataatttgtatgtatttgggttgagtagagtagtgctgcaactaccaattgggtattttgacatgacatgaacttggcccgagcttagaaggtacgaaaaaatataggtataaacataatacaacatgatgctagaaataagtacaacaccacataaaaataccaagtttatgggcttaacttttaaaaatattggcatggctcggtatgattcatatttttttatggcaggttctattttttaaaagtatagaaaaatatgagccgaactagcacgacatgcatgaatttagagcactaaagtaaaatagacctttacggtgagattttaacttctgttatggaaaatgttaaagggtaccttaaagtgtcaatcaccacaagaagtggtatatcgttattggtgtaattcaatattagtcatacatattttcatttaataaatagtataaaaaactgttaattagttacaatgcgccacattagtataatattaagcattttaagttacttaatagccatattcttcttttatattacaatacaaaaataagatactaaaaagtgaataaatttgaaaaagaaataatatactcaattgagtttcctaaagaatatatatataaaaaaaacatagtggctgtcaattttagaatccaaacaacttataatgtggtccatcatgtcattaatcctacttgaggattaagataatcccatctttgatatctttttattcccatcaaagacaacccaaaattattgaaaaaaacaaaattaacaacaagaggacgttgcattcgaagatcattatgtgtataaaaagaaaaaccaagtaatggaaatatgttgttaagtggtcttaaataatcttagcaattaagattagtgactaaatggaaggatcaagtaaaaatggagataatatgttgttacaaaattacaagcttggaagaagacttggttttggtgcctctgctacagtcaaccttgcagagcatgtgttgactggtcttaaagttgctattaagatcattaacaaggctcaaatgagaaacatgaacatggaacaaaagggtttgtgtatatatatatatgtttagatatgtatgtatgtatgtttggttgattattcatgatatgagttatctatttttcagtgagaagggaaatgaaaataggaagattgttagtgcatcctcatgttgtaagacaatatgaggttattgaaacatttacacacatctttattgttatggagtatgctgagtttggtgacctctttgaatatgttactctttataaacaaaataggttcaatgaggacgaagctcgtagcgtgtttcagcaggtaatgagtggagtaaatcatgtcaaattttatctttgttacttaattagtactatttgatttaataaaattgatgtttttggttgaggcagatcatttttggtgtggagtatattcatagaaatatggttgttcatagagaccttaagcttgagaatttggttttggattctaattacaatgtcaagattactgatttcggtttctgtaatgtaatgcgtgatggccattttcttaacgctcgttgtggtagccctagctatgcttctccagaggtacatatacttgtattaagtaaggaatattttcataaatatccacaatagttcaaaagacttacaaaaatacggttgtacagaattttaaatatttttatgatttataagtttttatttacaaaaaatacgaacaattgatatttgtatattatttttgtattataactttattatttgtatattatttttctgttactttcatgtggttatattttttttctatttcgagctagattttatttggtaagctgtatgttgggcctgaagtagatgtttggagttgtggtgttattttgtatgctcttctttgtggaaaacatccctttgatgatgaaggaaatatttcagacttttatagaaaaataaaggtattgcttattctacttagcttaaattcatcattgaaaaaaatattagcttatattatatctacatattttagcatggcatatacaatctaccaatgtctttacctcctggtgcaagagatttgattagaaggattcttgtagttgatccaacgagacgaatgactattcctcaaatttgccagcatccatggttcaaggctcgtcttccttgctacctagcagtgttcccaccgagcacgaatcagctcgcgaaaaaggtcaccttttatagtatatcatgtgaattgctatcataatctgatatcctataattaagcttaaattgttgttatcaccaaacaagtggcctagtggtaatcgttgttttcctgaggcacgaggtcaagggttcaaacatgagtggctccctccaaagagtcgtgataatgcctagaggggagccacaccggtagcccccctcctcccctttcttctactgaagaagaaagcttaaattgttgttaattatgtctatgcagattgatgaacaaattcttcaaaaggtgattgataaggggtttgacaagaatcaactgattcagtctcttctcaatagagttcaaaacaaggtttggttcttgaaaatcacagttctttcttatataaaatcaactacaattcttttgtcattgtctcaacatatcatatcatcaggccactgttgcatactacttgctattggatcatcaataccgcaattcaagtccatatcttaaagctgaatttcaggtctttttttcttcttttttaatgcttggagttagtacaatttatacaggacttgatcaattgccttctgtttgtttgaattaggaaagtggtttcaaccaaataccattaccaagatatatgaattatcaagaaataggccaaaggccagagtttcccctagaaagaaaatggtctcttggacttcaggttaagtaattttgtactatttttgggcggtgtttggacgaaagtaatgaaatagaataaaacgaaatgtattgaaatgttatttcaatggaataatttttctatcattctatttcgaaatggaaggaaaaacgatttcaatgcatgatgagaaaaaatttaataattttttttatgcgttttaaatttgattctattctcattctcgttccttccaaccaaatatcaccttatagtaattagttacttacttctaagctatgaagtgatttaataacgtttttattatttatttccttgaatttcaacagtttcaagccaatcctcacgaaataatgacagacgtgcttaaaactttgcaagaattgggagtttgctggaaaaagatcggttactataacatgaagtgtagatggatacctagaatccatgccactgccatgaagccatccaatgtggtcaagtttgaagttcaagtaactctctcttatacacttcttcttgcctaatttacaattttacaaacactacactcaacttttggacccaatgttatatgatatgttgttataatgtacaagttttgttttgatatgttttctaatttggaaagatgttatgatgttgactgtatacagctctacaaaactcgagaggagaagaatctactagatttgcaacgagtccaaggttcacagtttttgttcttggatctttgtgctgctatttttgcccaactgtgtgtgctgtgaaggaatggaaattgtttagtgtgacaatggtgaataaaaaaaatgaaagaaataagaatatttgatgagctccaattgcaattggggttccaacattttgtacataggcactggttagctcatagttgggcttttaaaggttgtttttgagtattttaagctccaaaagtatttttgctactcgttaggtaaccagtgaattttagtttttaattttggaaaaattcttttagtagaaaccacttttaatagtttctcaagaaaggccaaacaagtcatactacacactttgtgatttttcttttgacattttttttatgggtttgtgtacattaaagtttctttttatgtgttactaattgttggaaattttatgcagcttccatgatatgctaatgtaactttttaactaagaaaatttacatgtaatataatatgcatatataatggagtttatatatttatactccaaatattataaaaagctctattttcaaacaatttcttattacaaatttatctttcaaaaaaagaaaaaaaaaccataattctcttgagagctttaagcttgattaaaagaacaacaatggcagcaagtatctcttgagttgagaccaattttcggtagttcaagcattaggtagttagtgataatggtttcttcattt

SEQ ID NO: 191271 - DNA, 1376 bp, Cannabis indica
gttttacaaaataaacaaaatagtataataaaaatagtagcttgttatattacatggaacctcattaacgtcaaaatatgttagatttaactgacgtgtcacatcaataatagtagtattgttattattgtaaatttgatgtaaaaagtgtatattattctaaacttcctaataaataattagtttgtaaattttgtgtgaaccactttaattattctttttaaatttagttaaatgataaaattttatatatattttgtaagaagccaattgattttatgatcatattggaaacctattatttagaccaaaagatgaagataaacttgttttaaatcaaaacttactagaacattttatgattttttttttcttcacgcagacttgagtactatatagttttagtataaactctacataagtcatcacaaaacataccaacaaaataacattagcaatcattttattatgaacagacaaacaataaggttaatctaatgatcattaaaattaaaagaaaaatcctagttagatgcgaatttaacttatgtggtaaaaccaaaaggaaagctaccagcttagaatattcatccagtgcagagcaagtattctaagtattcctcttcctttattctaacgttgaatctttactataacatattaaattagccaaagctccatcaattgtattaattaaatttaaattaataaacaagtgcatattaaaaaattggtatatgaatatgatgccctctggtagagggcgaagcatacattatatatacaatttttttttctttcttcacaaaaaacaaaaaggggaaaaagtccaaaatgcccacaaagcaaaaataaaaacaaaacttaaaaaaagagaaggtttgactcaagtctaggccttgccttatccacaagtaatatggttaaagaaagatgataactggggaaagtgcagaaagcaaagcaaattagtatagagaaaaaaagataaaaagagttgagttgagttgagatattattagattctcacaaacaaacctgaccaaaaaaacaaaagcaaaatctacttcactttctctgactcttcctcactctttaacttactatttacaaaagaagaaagaatcccagttccaaaccatagattatataatttcctttttttttacttgtttagtatttttgccgtccaaagctgacaaccatcctcaatcgtcggattattaaaaagctcatcaagtctagagtgggtcccttctttgatgggaatggaccccactgcaatgccattccaaagagaaagaaaatgaatttttcttccttccctttttccttccttcccacacccccaacctctctctctctctctcttcttc

SEQ ID NO: 191272 - DNA, 871 bp, Cannabis indica
aagatatcaacattatcctctaatcacctccaacaacactatgttccattcattttatgttagtaaaaattaattctcttttaaaaattttacaatactttttatattagtctctaattactatgttatttgttattgttattggtttcttaattattggctctggattggttattggctattagtgaaccatgccaactcaaaaatttgtggacatattactagatcacatgtcaaataaatattatttataaaatataatagaaaaactaaattaattttctatcaaaaaagacttttataagtttaattaaattaggttttttattttttttttaggtatgttcatataatccacaatctgtgattgcaaaccatactcaatacagaccaaaccatatgagaccggaccaaatgaatctagtgtgaattttttgaatttcgaaccgtttaaaattctctgattcggtcacggttttagaaatctcatagcggttcaaattaaaccaatccatataattattttatatatacttaatatatattttttagaaaaatattaatattaagaaacaactttagatagaatattgatattaatttaatattattatgataatgattttgtattgttatttatgtattataaactaattaaaagtaaaaaataaaaaattatcgaaaaaataacaccaatccatttttgagtttggtttagtttgtaacaagattatatacttctcttattagtgtcctgtgatggtataaaccattttattagtttagtgttctttttaggttggttaagtggtttttcctttgttgttatttctgttatttttagtcccgtgttttctggttctcctcaatt

SEQ ID NO: 191273 - DNA, 1291 bp, Cannabis indica
taactcctacccaaaataaaacagatcatctatctgtgataaatgaaatgaattttggtttaaagtatcttgcagctgtttaaaaacaaatttgcctgcacaattattatgaatttcttaaccattttattaattatcctgataagaaaatgaagccagcatggaatgctaccgtacttctgtctcttcttcattactgaatggtagctttattgtttcatttacaccatttggcactgagatggaaataggcttatacaatcttcttaattaaaaaaactagctgttatagagcttcatcttaatgtaaaataatgcacacacatttgttgctacactaattgattcctttattttttttggagttgccaaatgatattttctgtttacattttttatttgatgggttgagcattaatttattcttcaaattgactgttctctcttctttgcttcatgaccaaaactcaaagtcacaactgatgtgtaggtgtaaagagagtgactatcctctcatcctgcttgttgcttgctctctcacttgctgtcgtaaaattggaaatagttccaccatttaccgaacacatttccagaactgttaatgtaagtttttgtgttcactcttattgtgttatgttagattttgatgttccgatttctttacttcatattaaagagagatggtcacatggccattagtgacctcctcccgagtatattgagagccctaaacctattgttattgagcaaagtttaatgtatgtatagttgtactagtgaggcactctcacattcagtttttagatttttcaagttaaaagctttagcccataggaacggtaggcctccctccacccaatctccacctggcctggccgtcgaaaccattcctaggttcataataaaggcgaggacagaagaggtgcatttgactgagtgggtgtttttgatcatcttgttacctgcataacatggataatctcattttgcctatgccaatccttttttttttggtgtgtatgcgtcttcaatctttttcttaactgtgaattacaatttcgtgtgttgctcaggttgtgcatgttgtggatacaacaggaaagcaagatcctatctcttttgtttctatgttttctgcaactcctggaaagttgacaaaagaagttgaacagattaatgaaggctttgtatgcggaaggaacaatgtcgtcgattttgttactttctcagtcaaatatggttgctggacccaaaatgatactgaaggcggatggagcaaatcagaattgcc

SEQ ID NO: 191274 - DNA, 2998 bp, Cannabis indica
agtctcttggttatgtgctcatgtattttttgaggggaaggtatgatacttatgtgacgtgcttgaattgaatccagtccactttcggttttgtttcattgcttagttcaccgtattatttttacttattttattctctttaccagtcttccctggcagggattaaaagcaggtacgaaaaaacagaaatatgacaagatcagtgaaaagaagatgcttactcccattgaggtatgctgatcttcagcttttgcaaatagtgtatagtatggtataggtattactatgagctcattatagatggttggtggtggtgaattttgtagctcggttccattgataccacgtactgttatttttgaatgtcgaggcacggaagatactaatatgctacactacattgacaggttctttgtaaatcatatccctcagaatttacatcgtacttccattattgtcggtcattgcggtttgaagacaaaccagactactcgtacctgaagaggcttttcagagacttatttattcgagaaggttaaatgaaagattcttgaaggctttcaatttcacagtctttgttgccaatgtggtgcattattagtcttttcaggtttcggaatcttttgtgagttgctctaatctgaatgagagttttatttgttgcagggtatcagtttgactatgtatttgattggactatactgaaatatccacagatcggatctagttcaagatctcgagtgcgtactttatttaaaaattaccaactagtacttatgttctcatttgatgtatattcttgtttatatattttttatttttgccttgatagcaaccaagcgggaaaccggttctaaatcctggaccatctgcagataggccttcaggtttgtttttttagtcacacaaaacactttgaccgccaaatttttgacatgttttctccttgtttaatgctgattactttatgttggaatgttccactagtgggacaggagatacgagaaagattctctggtgcggttgaggcttttgcaagaaggaataactctgggcatggtttgcatggagaccattctagacacagatcttcagatgatgcgccatcatcaaaagatgtggtcggtgcatgaatttcactaatgcttttgtgcacattgtcaggtttccgaaatggattttcattgtgtttcctttttatttttatttcagcagaaacatgattctgaaagggctaggagttcttcccggaatggtagtgcttcaaagagacctgtttatcaagtagccgaccaagctcctctggcgagcctagtgagaatcgttcaagtcggttagtctcaagcagcggtcgcctgtcaacaactcaaagaattcaacccgggttagagtccaaaaccacttctttcagccgcaattctgcagcaggcacaagaggcagtcgtgacgatgctcttagaagcttcgagctcctatcgattggcacaggaaagaggaaataaataaaaacaaaaacaagtaaagaaattgtgtcaaagtttgaagattccagttagagctgaacagaaccagagcaaccaaagcaaagatgttgtttttcatctgcaacaaaacaagaaatggtggttgttggtcagtaaagtctgtatatgtgtatccattgttgggttccattcacagattttttttttttaattctcttattaaaaaaacattgaatgaagtttctctctccttgagacaaaaaagtcttgttctattttaagtaacaacactactttttcttcttcttcttctatatatatattaatagtaagtaatccaaagtaagagatggaattatctctgactaaaagggaattgtttataatcttctgagacacaactggtagctgtactaatgatgacaatgagtaccaccacctttatttttgagttttttaatatttcagattaagaaacaaaaagatggttactttgcttcaattcaattatgattggattagagaattctgagttgggatttgtttagtgagagtggaatatgcatgagtgactatgttatttgcttttatcattatcaaattatcattactgtctcctttctttggtggatgatgattattttgacggctctctttttatattccaacttgtaatttatgatgttaattcatagttcaatgtctttgtgtgttgcatgtctttaatgtttatgttttgatatgaaataaatggattttggtgaatttaaattcgattcaacatgactttgttatacaacttttaggcatcgtttggtaataggataaagtaaacatattgcgggcgagttccaggtggtggtaacgaagttattggtgcttcaattggggttgatttgggcatctaataatttgggatttaatgtggagaaagttgaaactgattcctcaattctttgtcgttgagttaattgtcctgactctaatattgtatttaaatctcctattgatgagattaattctcttttagctgctcttagttgtggttcgtattttgctattttatgtgttgcgaatggtgtagcctatgctctagtaaaatctgttactagttcagaaggattttgtatttggacagacgtttgtcctaaattcttaagtgctcttgtaatagttgatttcatttaataatataccacaaaaaaaaaaaaaatcaatatcacatatagttttacataaaatatacttcaatataatatgatgtaacaaacaaatcaacataagggtcaacacttatgtttattaaatgtgtttaattaagcaatgtattattatttttagtttaattttattatttttattatttttgggggtaggggagaagccgggggggggggggggatttagtagttgtttggacaatagtgttaatttttataaataacatgtcaaaaattaaataaaaaatgagataaaatttaataaaatgactattatacttgtaatttttttta

SEQ ID NO: 191275 - DNA, 1927 bp, Cannabis indica
catttcctcatacatttgtgtgatatgattaaagtctctctgcctatgtaaatggaagggctttatttatatagtggaagttatttcaaggagtcatcatcaatttacaataaaaaataatcaatcttaattcttagaaagatagaccattaattccattatattgtaactactctaaatattattaaaatatgtactaataaaaattccaatgaaaaataaaaattgtccaaattctaccataaattgtaattaaaatcaaaggtatagccgcctctctctctctcaataaaatttattatgtggatataattaatatttaattatacaccaatcaattctaaagttgtgttagacatcttgatgatcacctcctataacaatgcttataaatttttattttttgttttgtcaaaatttcaaattaaattgattttaatgtcaaaatataacaaacaaacaacctttcacaaaaaaaaagtcaaacacacctaatccttcattaatacatatagttactctgataaccaaacattgaccaaactaaatgatcaaagagattttttttggtaaatatatatttaactggttttaccaatcatctacttgattatatttagagtaatatttttttattatctactataataggccagataaaaattttatttttaaactcaaattaacgatatacttaaaataaattaattttttaattaaaatatttaatgatatatttcttaccattaatatttataaatacttttttattcataagcaaataaataaaatcaggttagtataagttataagtaatttattaattatttttatttaatttctaaattaattacacccgcttaacaatgatctaacgattaaaggtaaatgtaatattatggttatgaaaaagcaaaaaaataaaaagcaagatctaaaatggatagaacaattgtgaaaatgagatagcattgttgtaatatagatgaaaacaataaattttcaggtcattttttatatggtgctgctagttttgtattgcctattatggttgttttggttagtaatacatatcctgattcataaaaaaaatattgtggttatgtaaccattaaaacttcaataattattatattaaccaaaataaaattagagagggccatttaaaggtctctaataattgctcttaaaattagtatctatatatatagatataaggcgatgagttaatcgtctaaaatttctttaaataactcgatctatctatgtttttttaattttttttcttttttattttactttatttatttaaagatgattaattaattatttttttgttttattttatttaattagataattttttttaaaaaattaaagattattaattaattaataaataaataaattatataaccgtacatataataactaatgattcacttaattaatttataatatgatgattcacttatatatatacaagttagtacgtactgatcatgttttgatttattttacatacagagtaaatttattgggaaagatattaatggttacaagtgaagtactgtggtgacatcaactttaaatgtagtaataactataagtaagttacggtgatgacaattgttttaaaaatatatctttacgtattttcttttttttatataaaagaaattatatgataattttttaaaattcttttgtgttctctatataattatttttgaacaaatatatattttttaaaattatacatcaaaatatatttaaaattatttgatataattttattatttaattaatatttatatataattaaattttctataactaaaatgcggcctatttactaattatatacataatagaacataaaaattgaatatctcatctcaaaaaaaaaaaaaaaaaactaagtaat

SEQ ID NO: 191276 - DNA, 6099 bp, Cannabis indica
ttgataacaggcacatgtaggagcacgtagttttaatgatggcaggtcaattgaaatgatccttatttaatacatgcggtactcgaggtgggcaatgatgaaaaataaacactctaagcatgttttaaatgccatattttcaacttcccatcagtcagatcacatcaatttttttggagagagaatccggaccattgatttcaaatttcaaggattcagtcgaagtataaatacacttatcaaacccattttctctttttttaccacctcagactttttgaatactttgtcttcaaactcaaagccagagctcttgttctacagaaaacctttaatcttgctaccatttcaaatggtgaatgcaagaagttttcgattacctgattccatatttcttaaaagttcatttagtttgatttctagatgcaaagttagtaaaccccaaaatactccaccccagctggacgaggactttgacgttcaagttgattttgatcgcgtgattgactgggtacacaactcttgggcagattttcagaataacctttcattttccactcacaaaacaagtaagtatccaaacgctttgttgaatcttactattacatatatatgatagaaatgcttagttcaagctaggtctaagatatatgtggatgataaaatggtctctatagaatttacatttctaggatagaatcatgttaaaattatttctccaggggagtgctggtattgtccatagttagggtatgaccgctgaactttatagacttttgcatgcagttagggttctgaatttagggtttgaacaaggaatgatgaactttatagacttttgtatgcagttggggttctgaatttagggttctggtaatttttcttctgggttctcgatcatttagtttgagtcgccaggcgagaaaatgcttttggaataaggaatcattgaggactactccaagaaatttttgtggcggccttcctcgatacaaagattgtcattttgatattgggtgtctaattgctttgtttttcttttctcttcgtttttctagtgatggatttgaatgtggatttcaatcttagtgcggtgaacattaaagaaaacccgatagtttcccttggagaaggagtggcttctgaagaaatttcggcagaggctggagaattagaataggacactggaagctatactagaggttgctccatctgggatagttgcataaaccaaaggaaagaggaaagccaaaaccttgcctcctatgcctatatataatccttccatctgggagatagatcaaaaaatcaatagctttcataaggtattgtgaagatgtttgccaccaaagtaggattgcacaacaatccaaggctgatgttgcataggttatctatcgcagaagaatcgtcttccatgagcacagacgggttcagcgcttggagcggggcccatatttggagtgaggcaaaccaccccttaagggcctactttgtagagttcattgcacaaattgggatagtacccttcctatttatacctctggcttacaagctcctaggtggatggtacatcttctacaagatcaataagttggacgtgcctacaccggaggagattctatacttttattgtgtgaagccccacccaaagtgcaccaactgcaagaaggttaggttttacaagcgggaaaagtacatatatgcacattgccccactagctacagtcaacgctcccatgaccttcgagaatatatgttcatttcccctggttttctagtgaagaaggtgccttccctccaactaagcttccaaattccaggtaaatatttttatcaatgcttttctttctatcgaagtttattctagtctcactgctaattggacctttaaacttttcatttttgacagagcatgtgcctcgtaaaccctaaagctgaggaagtgacgagaaaggctacccaatacaagctatttactgaagcacagatgaaagttgaaggcttgatcaccacaaaattactccattaacacaggttgatcgccgatttccaaagcattgacaatatgagtggcaggggccaaagtcaggcttcaaaggaggtaatagccctcgacctggccaaaatcataattgttattcgtgtttttagcaagggacatgtgaattctaggtcagcaccaaaagcccaccagttggtccaaagaagataattttggcaaagcccgagtcttataagatcttccaggaatgcaccttagctccatgaccagattagcttccatgtacgacaatctgtaactggaagtagctctagtatcgtgatgctagaaagccaaacagcgtattccaaaataagcaagtaaatgctcctcaaatcttgacagaagaccatatcaagctacaaagggaaattacctaaataaagatcaagcaattaatctataattaattgcccataattatgggacacaattttgacagcatgatcgtatccaaatctgcctagtcaacaaatctatcctcttatgggctgagcgtcacgaagatagcctaactatatgtatttttcatgtaaactccccactagagggaaaaagggaaactgagtataattctcttaacaatataaatacccaaaaaatccttcagattaagtgtttaactctctgacaatacttgctgaggaaaaaacaaagaacttatgcttagtgttttcccaaagacttttctagcttaaatacataataatattaactcgtggactaaggtttattaatgccccaacaaagtaaaactttgtgtgttgttcaaaatcctttttctgaattgtttattctttcagttctaattgaatgccccaaccacgggtcctttttctaactcattgactaaggcttattcacgcaaggaagcttcctttaactgaaaacaagttgtctcggcagggccaatttaacatcataatgcttaaaaaaatgacaacaatggaggcttgataacaaccttgcccaaaggaaatcaaactgcataaacgcctccaataaatgatgctcctagaaagactgatcctaaagaccctggtacttctagtcctcataaggataaagggaaagagaaaataggtgaagcttctatgaaggcttcttcgaccaaacaacaaaagaaatataaaactactagacgacctccaataaaaagaaaggaaatcacgcctcaaggcaaggtgaccaaactaattctggaggcagagctggacataaagataaacttgatgctggaacaaagaagcctacttccaaaaaggacaaaagtcgtcataaagattctagtattcaaagtgatggtgtcaatgaggtgcatccagtttcagatagtgacaacagaagtctccgcataaatgacattcgaacgagattaaatgaaaagaaagagaaagctagaacaaagaaagccagacctcccaaagattatttgaggaatcacaccaacgatcgaatccacagacgggagtcttcaagtgacaaaaatcaatgcttggaatggaaacttgaagagttaatgaagctcacgaagaagatctctagaaagataaatggaactatgtctaattctgaagaagaagacacaaacccttgcgtgaaaaggatcatagatgcaccacaaccatagagcttaagaatgcctcagatggaattttatggtggaaggacaaaccttatggactacttatcaaaataaattgaatgatgtaagttgcataggctactgatgatgcaaagtgtctttgcttttcattgactcgaaccaaatacaaggaggactagtagaaaaggttatctcctagattgatccacaatcggagggacctataaggaatgttcaaaaagtaatttatagcagcgaagtcctttgacaaacaatgtatgatggatgttgctataaaaatgaaggtgactgatgatatgaagatagtggctttgacataaggattaaccacaagatctttgctatggggagaactcaaccataagagagcaaaaacattgactaactttttgtcaagagcccaaggattcattaatttggaggattcatacgctcaagcttatggagtgattccagcagcttccactgacacatcaactacccagactttgcagatgacaactccataaattttccctccggtagccacctttacaactgaaatttatggagtaagtgcttccgtgcagacagttacacatgctaaattttttgagtggtacaaatcggatacagtgcagctcctagacaaatgagctaataaagcaaaagctctagagtccaatataaccaaatcacagagcaaaaggagttccaagggtttaagtcaaaataattctacaaagaaagggaagacttaagaatcaagatactctgagtacacacgccttgtctatactaaagagaacgtttataaggaaacttgtaacatggtccattacaagaagcctccgccaatgtataagggcaaaagacaaaaaggagatccaaataagagttgtaaatatcattgtgatatagggcacaacaccaatgagtgtgactattaagaggatgaaattgaaggattagtaaaaaatggacatctatccaattcggtaaggataccagtcatatatcctcaacagggggtagctcatggttaacttttctttcttggagaacatcagtcatcctcaaggagcaggccatccactggttcttgaaatataggccccatgaaggggtacaaaatgccctggtaacaagacctactgtagcttctagtcctaaaaatccatttcctcctgggtagcccagcaagcactagatggtcacgtaaaaacaaattctagtagaccacacattgctagaagcacctgaaatgcacaaaaatggtacttgaatgaatttgatcaagatgaaacttgcaacttagtgcaatcacccgttcattgtccttgtatgatgaattttccaatgatttttatcgaagatgatgctatacatgtgcattttcctcataataaccctttgatgatagaagcacagattgtgaataaaaaattttctagaattttcatagataacgaaagctctattaacatcacttttaaagacacctcaaagccatcaatcttgtggaagcaaatttattaccttgtctaatttaatttcaaggatttgatggagacaacatgattccgatgggaaaaatacaacttccaataacaataaatggaccaatctcagggagtaatgcaatatcttctttcatgtacaacacctttatggtaggttattgtccaacaacttacagcatcattctgggacgaccatttcttgttgattttggggcagtaacatcaatccaacatctatgcctaaaattcctaggtgataccggaagtttcggaatgatcagaggactagaagagtgtaagaagctgctataatgttttaactaagactgtccttattgtccaggaaggaaatatagtagaggttggaacatcatctcagctagcattaggggtagtacgtgaagaagataaaatagatccatgggtaggcgtagaatgaataattgagcctctggaaagaggtggaagaagtatgcattaatgatgaggatcccactaaattcatcaaagtgggaaagaaaagatcatctccatagttaaagcaaatagtgatgtattatcctagagtgattctaacatgagtggaatcaatccctatgttttatgtcatgcactcaacatagataccaaggaagatctagttcgatagaagcaaaaaactctagatctagtgagagcggaagcagtgaagacagaagtagataagttgaccaacattgacttcctcacggaagctttatatcccatatggctagccaatctggttttagtccgaaagcctaatggaacatggagaatgtattaagatttcatagatctaaacaaagcttttccaagacattgttttctgcttctacgaattgatcagatggttgacggaaccttaggacacgaactcttaagcttaatggatgcatactcaagtt

SEQ ID NO: 191277 - DNA, 1824 bp, Cannabis indica
ttttttgtagtgcatttccaattagagcttcacctatgatatgtccaatctctgagtctcttattttatgatgtgatgacaatcttcgattttgtgcttcatgtgcgtatcaaacatatcgagcttgatattcgttttatttgagtgagaaaatttttgcgcattctttgaaaagtctcctcaccaacattaacatttgcagtgtgcaaaaaatatataagactctcgtactgcaattatactaagagaaattataaaaaaaaattgactctaaaattagatatgcttgctttattagaaaaaaaaaatttactcggactcgtaaaatccttatttattcaaaattaagagagtttcttattattattatttgctttagaacaagagtttcttattatttaatcaaagagaatcctttcttattctctcatctctctttccctcaaattctagattatttttattacgaaattaatgatgagattaaatattatagtattaatcaatttgataaattttgtaaatataggatacgaattatgatttaacacagaaaagatcatatatattagttttctttgtatgcaacatataaatttcccctgtgattcattatatagcaagatcgatcggccattaatttttgaaaagggaatctttgtaatataaatatatatatatatgatatttatttaattaatcaactataaaataaaatacatttgaatgaaaatagtagtatatattatatattgatggggacaagtgtatgtgtccggctttccaattataataaaaaatattcaaatcatcagccaaaacaaagttaaagaaagaaattaatgcataaacatatatttgggcatttgccctgattaattgactaatcatcaactgtttgtatattaatgcttttttcctcttctgacttttcaaacagcataaaaaattttatatcattttgatgctaatatataatttggacgttagtaaagctcctaattattattataattttttttaatggtaaatagaaatttttataattaataggtaaattaaacataatttattatatgcagatattgctttcgaacacaagtaagtctaaccaaactggttacaataaataggaaaaaaaaaaaaactctttaattaaataacacataaacagtcagttgtgagaaatacaaacaatactaaatttctatgtatagaaccgaccacacttactaaagaagtcagttgtactctaattaccaaaattttcacccttccaagtcttttggattccatgctaatcgaggctcatacactacaagaattactataaatacctactacattaaactaattattattgtccacacataatttaaaatttaaacttattattatagtccacacataattaaaaacctaaactaattattattattttcatcaattatctaaaaattctaaaccaacattcaagtttaatgggattgtttgtgcattatcccgagcttgtggtaatggctgtaaagggtaacatatggctgctttgaagttaacactcaaaaaattgtcgaatctgttatttgtcaattacccatttttctttagcctattcattgacccaagttttgtccttttttctagtatgactattttttcaagttcgaaggacatattgatctcagtctctatgtaatcatattagtgttagtgtgtttaaatatataattttgttaaatggattgatgatttaccaataaattcgtaatattgagttgccattaattttatgccttgagttgatgggtacataatttttttttt

SEQ ID NO: 191278 - DNA, 1788 bp, Cannabis indica
ttagcgtgcgagaggatgtgattcagtaatcataacatcgagatcaagagatagcatttcatcatttactgaatgatgatcagtcacactacggctgctgttgtagtcgtgtctctgagctaattctagtgccaaacactcctttaattcaattacaacctgactcatgtttagctttttagacacacaagccatgcctacttccacagctttccatattgagttgatttcgaaatttccctctaattttggatcaacaatacttttgacatctccattggcaagcataaagctcacccactgagttatgtgacctcgatccctctcatgaattactctgctgatggctggtcgatttgtaattatttctaataacaccactccaaaactgtacacatcacttttttctacaagtctgtgagtcatataatacctacaaacaaatatacaaattaatatagctaacaatattatttcattgactattaattaatgccttttcattttcaattaaattaaaataactcactcagggtcaagatatccaggagtgcctgcaggaattgtggacacatgagtaccaccatcagttgggaaaaacttggacaaaccaaagtctgctattttggcttgaaaattctcatttaacaaaatatttgcagcctttacatctctatgtactatggctggcttacatccgctgtgtaaatactccaatcctatataagtaaaaaggggaaataatgatatagaaattaattatatatagagcaaaacaataataatgtataaataatcaaatcaacttataaatgtaaagctaaaataccttgagctgcatccagtgctatgtggagtctttcctcccaactcaagactttagtacggctatcatctatatatgcataataaaagacagagtcaagtactttgttgatctactactttctcattagatagtttatatatttaaattataagaagcaatcgggagaagaaaaaaaaaagaaaagcatgttcaaaaattagttttttagttaaaaactcaaacctgaaagatgtgtgtccaaacttccattgggcatatactcgtaaataagtgccaagttcgttccttcgttacaatatccaacaagggtagttaagtttctatggtgaaccctcataagaagtttaacctgttatcatgaatataaactcacaaattaatttcaaatcaacaaattgttaatgaattatatatataattaagcccatgtaaaaatagtacctctgcttgaaattgttgaaatccctgaactgatgaagcagaaagcatcttcacagctacttgaacgttatcaatgaggccatggtaaacggttccaaatccaccttttccaagaattctctcgaagttgttagttattttaacaatctcagagtacgtgaattgacgttgtttgaactcaaacgaatcattctggaaattattagaatatgctgatttatcatcatttacacctgcagctgtatattaatatgtacatattaggaccaattaaggttaattgaacaaaaatgtaaatatatatatagaaatttaattacctcgtttctttttattcatgagaattatcagaataatcgctactactactatcgaaagaatgacaaaaccaccagctgatgcgactattggaattactttgctgctcttcttattcttttggcatggaaacgactcacataaatctgggtttccttcaatactattatccgcaaaattaaaaaaaaaaatgtgaattt

SEQ ID NO: 191279 - DNA, 3532 bp, Cannabis indica
ctacaaattgttgttgtgaaatctgctgtagcttgcaatctacacttgtttaaataggtccttgttactagagagagagcaaactggtttaaaattgatttcgggctgagaatttaaagagcttaaaacacagagaaaaaatgactttcacttgtaagggagaatttagaaccattattcggttctaacttctaaacagtgtgtaacataaggcaaccagttctgtggatataaaatcattacattcgatccaaaccatgtaaaaagctaagtgttgttgtatttctcatctaagttcttgtgtgcataatattatgttcgagcaagttaaactcaacagcaatcaacactataatgaatgtttatagacagacaaaacaacaaattagaaactcaccaatgaatttgcagtaaatcaatgtagtctgtattgagacgtttaagacttttctctacactttctttaatattagcagaatcaacccgcaaaaccttggcattctctcttatataagctgacctctctgaatagccacatacttttgttgcaacaacaacctatgcattcattcattccaatcattatcacattcaagtaggaattctgttacataacaaatgaaattgctttcacatcaaattatatctattatgaacaagtaagtaattgaattgaaccttatcacggggttgagacttaagccagctactaataaagacatcagttcttccttgtgtctccttcttcattggaattgggtactgtccaagtaataaagtaacataaagttcaaacctttatcactaatttcatacacaaaattcacccaatttcacaatttattctaacttacagcttcggcagtgtccagggcattgatcccacgctcaaatgcgtaacttagcatatcgtgagcttctttctctgtgttctgctctccaaatgtcatctgtacaacaagcaagacgaagaagcaaacgacatcaaaattgtcatacgacaacaagactttgagaaagagagagagagaggttttacttaactgttccgagtgtgatttcgctgatttcaagatctgaatccccaactcttctgtactccaaacctttattcttctccccgagcttggcactgatggtggttttcgatcgccgtcggaggattggggtggcggcattgaaggatagttgaggtggaagaggcgtgaaaaggcggcggtaatggcagcgcgtgtttccggtgaggaaggagaagcagggattggtgtgagagtggaagatgtggccattgctaaaccttttgactttatcttaaaaagtgtgacttaactcttatatacctttgccttttcttttttttccttttgggtataatttctacacatttctttgagtaaaattttagtattagaattagagtattgttatgggcacacggagtctagtataattagttagccatttttaataattttaattaaaacaatataagtggaagtcaataatgttaagcactataactaccacgttttagcatttctcttagaattagctagatactagggtgttcaatacttttaaagataagcccaataatagtaaaaatatcaaaatttattttgttaaacattgtgcaaataatatcacacattatgttacttgtaactcttgtttatattcaaattagggatgctcatgctgaacttttatttattgtaatagtttgagctatttgattaataaaattccattctaataaaaaaaattaaaattgtaacttttattcaatttttttcaatacagacttcattagtgtcttaaactgtatacatataaaacttagcatctaaatcatttggtttggatagaaacaagtaatattaattattacttctgttaacgcgagttttcgttaactaaatttaagcctcacaatattaattttgcacagaaaaaataaaaactatatcaaaataaagaatatgagcacaaggttttttacgtggttttgcagttaaaattctgcatattccacgagccaatcttattcagatttttaagtatttttcaggacccctttcatatgagtttttccgtcccttttttgctcttgtttatcactatttataattacatagtggacaattgattacaaagttgaccgaaatatatttacaacaattatccctaaaatcgtgggatttgattacatatcacgttgtgtaaatgcagtttatgatttgaaaatcgtatagctctgatttttccgcttttattgggtcaaaataatcgtgtgttaaacacatttttaactgttgtatctggagatgtctcgacaaaaacttggttatagtgatctcaatagcgaactgggaccattcttccttccgaggtcaatagtgtatgtcttgtctcgatcgcggttatttacaaagaatttttctgactcgccagggttgtaagcctcgctcccgttagttggaggaagctataggaagtcttcccatagcgagatggtcacctcgcttacttgttcttgagccgatccgacttttacacttagttttgcacgctaaagacttttacggttgatatgtgtcgctttctccggtgcctcgctattcgcatttagcgatatatggcttctcgctaatatactaagtgctagtttgtacattgattcctcgtctaagaccttacagtcagcgagttacaaatatgctttgactcttatgtaattaatgagttattccataagcaattgcattgattcatattcccttcatcctgacacgtgtccttcattgaggtggtagtcgaattttgggtataacaacttctaataaataactcaaaatagagtctgtattgacaaaattaaaagaaaattacaattttattaatattgaatacttatacctctaaacaaaattattaaatttatgtttgttacaaactcaaaactttagatgaaatttgatactaatgtaagagctatataatattttatagtagtgcgatggttcatggatgagtaaatataaaattctatataatatttagtataattatataaaattgtatataattttattagaaattaaaaaaaaaatgggagggccaaagcttctcttgggttgcacttagctaatataaagaactacgaaaaagaaaaaaaaatcggaagttgaaatacaaataagttgcagagatagaaaaagtatttattgatctttggtacttctcaatacaaatttttcaatagtgtttgaagcttcatggaagtaaatccggcccttgtggaggtggaggctctcttaagaatgtatgaattggtatcttatttggtggtgttttcttattcgataagaggagcctcattaaagaatcaatattatatgaccctttgggcgagctgtggcaccacgggcgaggcctagcaagccaacactcggggggtcagccctaagttaatgcagtgtacttaagatctattcattttatggtctaaataaacaaatatattttaaaa

SEQ ID NO: 191280 - DNA, 3834 bp, Cannabis indica
tgaaaaataattttttgaaaaatgtttaaataaccgaataaagataaaaatgtaaaaaaaaaatggcaaaaaaagataccaagtgtaaaaatccctattaaaaaataactaatggtaatattgtaattaaaaatatatatattaaaaattaatattaatggtcaatggtaaaagtgtaatttaaaaaaaaaaaaaacttaaaatatttattatgtgtcaaattttgcacaatactataatattgtaatttagaacttttagcatagctcaaactaatcttcttaagagtgctaaagtatagcactacactataaatgtagtgtacatgcatttttttagctaatgattataaaattaaactcaaatagtgatgtataatgtaatttaatttttaaacctaaaacttgtgtcaaatttgacacaataaactaaagtttacaacataataaattacttttctatttactcttttaccacttattaatataatttatatttgtatttatatatttaatatgaatttcaataaaaaaaattaatatttttgttgattgtttacatctttttattaaaataaaatttattttaaccctagagcactcatttcaaatatatttcctaaattgacatcaaggtttatatacgagcagctggagaaaattggtgagaaggaagcaaaagatcaactgaaaaattagcacttcatttgtgtgataaatctgggttgatgagctcttagacaaacttatacatgaaaaaacatcatcacttgtgatatattttgcagatttcatactagagcaacccgaaaactgaaaagtgccatgcttggatatcaaggcagcacagggtatgtctcactcgtttggtcttcctcgtgcaaaaggatagtttgtgtgttgtttgatcatattctaggagctgcacagaacaaaaccacaaagcgtcattgaaacaaacagataacttctctcgttccctacaaattcaatccaactcactaaaacattatttttctccaaaagatacacaaatttaatttcctaatacaattttttagcttcacagcacacttgttagtgtctagtctagcttacctccaccaatcgttgcttcaggcatccgctcaatcgaatacttgtgctgagtgatgtacataattggcactccaggaatctgccaacaaaacaaatttgtttgcataaggccatcatgtcaagcattgaatcgggaaattttatatgtacacaccttataatataaataattactaatataccatacaaaatttaatagcttaaataactaatttttaaactttaatacctatattttatgaaacttgatttatgtcaatatatatcattttttttaagcagtatacaaactcctttacaagaaaaggatgatctataaaagaaacaatggtgtttaaatctgaattatttgtttaaaagaaaaggatggtgtttaagtaaaaagtttgggtattcatacgcactatttgttctaattaaaggtaaaaaaaaaaaaaaaaaaaaaaaaaaacctcaatctttttgttataattttgttttaaaaaaaaggtttgggtgttcaatatgggatcattcacaatttttttctgtgttcattatggtagatatatggtggtatttgtaagtttatatgataagtatttttctactaattggtattcaaaacataatatgtactttttggtctctttttctactatttctttgtattgatacgtagttagattagattttttttagtgattctttcttattatttaactaattagtatttaagggataatattattttttagtctaaattatatttatttggtatttctcaaaatttgaagataatttggtgttaaagtttatcaatgagtaattaatttgggctgattttctactatcttatatttttttaatatttattaaaataagtttttgtgattctactattttgtacactttctatttattattttactaattggtatccagattgaaccactaaacaccatcaactatattacgtacatcaactactaatgaatatacattttaattttattacactaattaataataagcttggatttattatatgttatacctacttgtgaaaatccaaaagaaatattggttggatactatttgatactcttctttatttcctattacatattcactatgttttggatacaattaagtaggtttttttttaagcattgagcactattctatgtttatttcttattataaaattatttatttagatactatttggtattctattttctttattttgttaccatatgtatttttggtgctcaattgtaagttaaatttccttaattttttttttatttttatttttttaaaaaaaagattatcttctatcccgccatgattttggtatcaaaactatatacagtaataatatacatttatgtttttttaaagtaataaattatagaaattggttatgttatttcttaactcacattataatttatatgtaattatttgttctaataagtataaatgtgtaaagtccaagtaattactggctgcataaaatacctttcgaatccttctcttcaaatctcgatcgcatgtagcaacaatgaagcatttatgctgttcaaattatataagaatatcagttagatgaacggaacttcataataaaaaacttaaaagcagcagccaatcaggttcagctaaaataataaaagaaacattttcaagcacttcagcttcgcagtctaatgtattttttatttttatatagatacccaaaaatggtttacaataatagtagtaaacacatcatctaatactatcgtcaaccagattgttcatcctaaattcgaacactaaagacaaccattatatggttttcaacaattgaccactacaaatacaatcagaacagcaacaaaatctagcactgatgttatcattaagactaaaaaatccaggaaaaagtaaatacctgagtaactctatcaacaatacagtcatcagcataggttcctctatggatgcagggtagtctctcaaaacgaggatcctttgcaatccttcaaagtagaaaatgaatgttctctttaataaagaaatatttctaacttgatgaaaacaggcaaagatatttatgaaaaaaaaatgcaactttataacacttccaaaaaaaaaagaagaagaaaaagaagaaggtgaaacacgtgaaaatacctcagagccacacggtatttctggcctaatttctcaagctccgccattacacagtcagtaatacaaggtgtgcctatagtttccaagagagaaacaattagaaaataaaaataacaaatacaaaagtacttatggctcattatcttatagttcaccaacaatctaccaagtaataataataactaataacaatgtttacattcatattaagacaaaaacaataaaatcttaggacaaaataatcaatgatatttaagcttatcaacgataactagtataaggtgctgatcaaagcactaacattttgcatttaccaaatggtgcttatttaatttattactagaatctgcattcaacagcttctgtggatgttacaatacgaaacgtgcttcacaagctatatcaaatacatgctatgagtgtgattgaaatttgtttaagtgagtgatttgtgagatttagattacactcatagatgccaagacataaccccatgataggattttagtaattggataatgctaggagtgtgattgaaatttatatatatatatatatatatatatatatataa

SEQ ID NO: 191281 - DNA, 2403 bp, Cannabis indica
aaaaattcaaacatatacccacaaagacaaatgaatgtttaagcaatactactaattgtgtgatacgaaaaatatatagatacctgtttgttggaactgtaatatggctgtggagatttaagttgtgaaaggaatgaatgatttggtacaatgaatgaaccagaaaccgccatagctaatataaagttgtgatctttacgaggaggaagttttataggagacaaggacaagaaccaagtttatatatatagcagcaggctgaggttctggcactattaatgaagcctacgttatttaaatattataaaattgataaaacattagtaaaagaagaaaagtaaataacattagaattcactaattaaaggatagaatataatatatatatataatattattatattatatttatatttgtacaataatagtgttcaacaccaatacctttcatattacggttacataacgccaatccagctaagaggaataatgccaatccagataaccaaacttttttattttgtgtaacatatgctttcctataagacgaatcttctagcatcaaaagactacaaatataggaaagaattaatctgtcttgtaataaagataaatatttattctacccatatatatggcttgtctctatcttctaatatatatgtatgtgtactacatatgccaaaattaataattcctgtttaccataatctatacctagctaggtgttggctatatatattccgggaacgttaatttattagatgataaaaaaatgaccgagtattaactagtaaatattttgtttgtatttcttttgttggctatatattttctcatacaatttttttgtttgtattttttttttaatatttttaactgattaattagagaaatatttttttaaaataattataaaatattctttttaaggtttattatgataaggttttttttttgttattgttattttttttataaattatttgtattattgtattttttttgtatttttgtatttttgattcaagttgttataaatgaaatctaagttttaaaattttaatctattattaattatttgattattaatcaattaattttaaccataactatctcgattaattacttaaaattaaataaataaattaacgtaattgtcctcatatgattaatttaacctaattaatataattgaggattagagatttaagaagaaaaaaaagatatttaagatattttacaatataagaaaatagaaaaaataataatataagaatataacattttaggtgaaatagaaaattacaactcactcaattttttgacaaaagaaattatatgaaaataaaataaaataaatttatacacatttaagatttgtgtgaaactaacctaattaagtaaaacataaaaaataaaaataacttaccttttattactttgtttatcaataaatattcatgttctagtacacacaatctcacacatagcttttgaggcttcattcaaaaattacaataattactgatccaaccgaaacattttgcaaggctgaaagacttttttcacttttaaattgaatctcaattatggtaccaattttgtagtctgttaatttgcaaactttatctttctaaaataatcaaacttttcagtttagtcaaaaataaaaggttgtaaaatattatagattttaaaataatcataaacaataatgatgaaaaattaataatttatacttcaatcaatttctctataatgtaaaagaatgccgtataaacacccaaaacacaatgacaataatattttctgtgaaattacctttctttcttttatatgtatatataaaaaacttcatatcagtcaatttaagtagagaatgttgttggtacattcatgatttggtttttctaggcacgttgagggtttagaaaatttttgttgagaaaattctcgatggagatatggttttggtattttagtctttttttcctaaattattaatttttttttttaaaaaaaaattatatattaaaagccgttgtacttttttcaaatcacatatactcgagtactctatattaaaaacaaattaataatatagcaaaatatgaattataatcataatggtatctacaatcatataaatgaatatctctaacaaaatttaattatataatagatataaaaaaaataaactatataaatgtacataacttacataaattggatgaaaaaataaaacttatggttgatgaaggtgaattcatcaattaaagcaaggcttggtataattaaatggtagagttttttcttcttggaaagtggaagtatatataaattagttttttgataaataaatgcttcagctttaattatgttatcaattattacatgaaa

SEQ ID NO: 191282 - DNA, 3718 bp, Cannabis indica
ggggcttgtttcaagccatagagtgacttattcagtttacagacccagttttctttccctttctcttcaaatccttgaggttgagccatgaaaacctcctcttccaagacaccatttaggaaggcattatttatatcaagttgccttatgtcccatccttttgagacagaaattgtaagaactattctcattgttgaaggtttaataactgggctaaaggtttcaccataatctatccctggtctttggtgaaaacctttgggagtcttgctttaagtctctcaactgtgccatcggctcttagctttattctaaaaatccacttattcccaaccaggttttgagcatcagatggaggaacaagtacccaggttccattcttcttaagtgctacaacttctgtgttcatggcattgttccaacctgggtgtttaagggcttcttcgactgtttctggttcagtataggtagttatggttttggctgaactgaggtaaattttgggtttgaagatgccagctttggcacgagtcatcatttgatgagtgggttgcaaggctgtggcaagggtaggttgaggagattcagtttctggctcagggatatgagtatgtgtttcactggatggttctgactcgagttcctgctcaattgtaaaatcatcaaaattatcaaagtatggatcaagattaccagtaggcagagaattttgagtgttatcctcctctgcaggactggagtcaggatcagtatttggaaaaggagttggaacagcagaagatcctggtgatgctttgggggttgttgcagactgagttgtaacagatctggaaactgattgattttggtcatcaatggtagaaaaggaagtgttgaccatgttgaactatgaatgataacaggttgtggagtttgataattattgagaaaaccttgcttgaatggaaattcaagttcattgaaaacaacatccctagagatgtaaattcgacctgtaggagtgagacacttataacctttgtgagaagtgctataaccaagattgacacattttaatgaatgatatttaaatttatgtgtctaatatggtcgaatacaagggaagcatgctgtgccaaaagttttgagaaacttgtaatctggtttgtgttggtacagcacttcatagggagatttgttgcctaacactggtgtaggcaacctgttaattaagtacacgggtgtatggaatgcatctgtccaatattttaatggcatttgagcttgagcaagcaaggtaagacccatttccacaatgtgtctatgcttgcgctcagctcggccattttggttagaagtatgaggacaagagtgttggaattctataccttgatcttgaaccaaggctgtgaaaggatggtattcacctccccaatcaattctaaggcacttgatttttctatcgaatttgttttcaactaggcttttaaattgcatgaatgcatcaagtgcttcagatttgaatttgaggggatatagccaagtgaatctgctgaaatcatctaagaaatgtatgtagtaactataatttccatttgaggttactggtgcagccccccataggtctgtatgaattaagtctaagggaaaattggcatgactgttagataatttatagggcagagcatgagctttgccatactgacaggcatcacagaattgttgcatttcattcttagatttctttacattggcagactctaaaacaagatttaaaattctaggtgaaggatggcctagacgtctatgccacacattaagcctagatacagaactcctatcagcccttggctgtttgaacctagaattaacagaaaaacaagtaggacgactcgatgactctgactgaagtttatttgtgacttgaaactgactgtgatgagcagaaaatggaggttgttgatgagtttccaatctgtataacccgtctttaagcactcctcaaagcaccactttctgcgttaccttgtccttcaccaaacacatatcagaatgaaattcgattagtatattgttatcattggttaacttggatacactaatcaggtttttggctattttgggaacatgcaacatgtctaacagctttaattgattaccatcattagtatccaaactaccactaccaatatgagatatattgagttgagagccatcacctactgtgactttttccttaccaccgtaggattgcttctggtttagagtagatgcatctgaggtgatatgattgctagccccactatcagcaaaccaggcatcgctttcgagaacttcagggttggccacaaaggcattgtgattagtctgtgtagtcttgtttccagagttggtattgttggggtcagatcccatgaagttttcatcgaatctgttataacaaacagctgcagagtgaccatacttgccacaaacttggcaagttggtcttgaagtattggtgcgaccacggccacgaaaacgtcctcctgtacttccacgatttccagaaaatcgtcctccatttccagtgaattgattggttccccttccacgacttgcaaaatttcctccagagttgcttttggcagcaacatttgcttgaggagaagaggatctgggaggcttgttgcttgaattgagagtctgaagcctctctattttgctatcgaagcttagtaatatgtcctgtagttcttgccaagttgtggtgagtctggcttcgatttgcactacaatggacaggtattcagcatccaaccctgacagaacatttgcaacgagatgtgcttcaggatatggatccccagctaatgcaagaacatatgaccagttctttttctgtcttaggtactctgccatgggagtggtacctttgcgcactgtctgaatcaacgttctggtttcgtccatcttggactttgagtaagctccgtagagactttctaaggctcgccaaagaccagctgcagttgtagatcccatcacttcagtggcgattccttctgtcatggagctgtaaagccagcccatgagcaattgatcattgatgatccactgctcatattcagggtttgtttcaagttctccttcgtacttagcttcgcctgtcactggtatgaattctgggggacacatcttagtcccatttaagtaaccatgtagtctatgaccacgaacaatggttgagaccattgttttccacaatgtataattgtttctgtcgagtttcaaggagaagggctggttaagtgttgttggctgttgtgagtaggtgtttaggagatgagaaggaggagcaccatccctgttggtgctggtggctgagccaccttctgtaggatcatgaggagccgccataacgagagtgagaagggctctgataccaagtaaaattagagaggaaatttagggaatgaaatctcagctcattatccttgagcatgagaggcacatatatatatgtattgctgagaattgatacagaggaaaatacagagtaacggctaccatacaggtaagcaatacaaatctcaataaagatttcataggggaatattctaacagaatggcctaatcattatctcctacaatattggaccacaaggacacctgtcagtgaatgatgagagactaatcatgtgcagctcactgtagagagtaagcatacaccagcagccagattgcttatttctcaaca

SEQ ID NO: 191283 - DNA, 2765 bp, Cannabis indica
ggtagagtccacccaggcataggattcacaaaatctcagggggaagaatagaagcaactataatctgcataacagtaagaaatcatatcaatgtaatgtgtaatgataaatagattattattgtggaccttatcattacaggcttaacaaattgtatcaaccacacatagaagtataaaaaacattttgtgtacatttactccttgggctttcaggctccataagaacttcatctaatcccacatacgagccctggattccagtgttggaaatataacctcatggggaagatctccaaaggtgacaagcaagattacagcggaggaaaagatgtttcattgattcttcgtggttactgcaaatagaacaagaaatatcctcaatatgcatacattttccaataaccgccatgggaagagcattcgaaaggatactccactaaatgtacttgtgacgctcatgaatcttagaatcctataaccaattccacatggcagaggatacaacaatggaaggagcccttcctaaggcctgaataaaataggcggatttgggaaacaaccttacaataatctacataggaagaaatatactttagcgtttgtacttttttgttatgtaaatgaatatgcttttgatatagttttctcgtaaaggaatatgctaaaccctttaaacgaaaatatatatcagaaacgaaatttgagttcaaaatagcataaaccctaaaaaggaaaatatgtgtggatgaacaatggctgaaatccaaatttagccaagtccaaagttaggtaagcgagttaaaccacgtaatatcattcagttctaaagacccaaaagttcgacacaattattttacatataaaaacgcctttattgatgctaaaaaagcatgcagttgaaataatgaaaagaatataatttaaccaatgacgaagcatctaatggggtgataaataatcatcagccaatgacaatgaaatgataataaagacaaaagaaaactatgtatatatatattaatcaatccccacagctgcagcatcccagcctcagaatctccagcagtaaagactgattctgatgaagagaggccaatttcaagaataccctgaactattcaatataatatgaatcgttctctctaattggcttggctgccaaaagaattaatatttttcccaaagacttaacttatgatgaaatatccatttcattgtgtcaaaagctggattccagcttctaaatcctctaaggtaattgttcgtagttcttcggtgtctatgcagtcaaagttgagcctgagatctaagttctctctcgcatttacaagcatcggatctattatccctccattcatcccctgacgctgcttcactgtgtttctctctgtatcaattctgatatagcttctacactgcagaaagagtgcaacttaaaaccatataatatgctatcctctgtttgattattcatcttaatttgaagaatagtggccaattcatctgaagtgaagtcattaaattggaaaaacttggtcacccgtctgcagaaaccttcatttgaagcaattacacgtttcatcggttcactatacccagcaaatatgaccactatctttccactgtccatgacagacatgatttcctctaatgcctctaacccgtagtccttatcatccgccttctgcatgggtattagacggtaagcctcgtccacaaatagaatacctccctctgcatcttttatctgtgaagtgtccaaggtaagattctcatggtcaagttctatccctagagaaacaaaaactaaatgaagaaaatgaagaaataacactttaccctctttctagtcttcggtccagtatgacctacaaattcccctactaaatctgttcgctgtacttctgttactttgtcagtgggtagaattcctaccatatggagtaatcttccaagaatgcgagctaccatggtcttacctgtaggattagtaatgttaatctcagttttctagctaaccaagcatgataaaagacataaagtgaagaattttgttcacacgatccgattggaatacaaaggacaggagtgtacaattttggtatttctaaacccttccaccataatgtaatagttgagatttagagtgattcaagtaagatagtagaaaggtggctatataaaatgcacaatgacaacaggaaaaaaaaaaaatctacatacctgttccaggattacccagaaaggccatatgaggaggccttcgggtgccaactttcagaccgagggccctacgcctctcatccaaaagcattccttttgcccattttcgtaattgtgttttgagatcattcaagccaactatatttgacagctcattttctagctcatccatcttagccttagtttcactgcatgcttcaatagcttttctctttctttgctcttcaaggtacgagtataataattccctcaatttattattagcagaccctttggagagatgatttataggagttattccctcctgaaattaaaataattacagactattatcatttacatagcatgacctaccaaagtgaaatataaattatatatgcaacgcactgtacattgtcctcagcactacaatcagcattagactcgagcaatgttttgacagtagagcaatcttcatagagtagagagtaccagactgcaaggtgtaatggagtcatgccattctgcatggatggaaatagaaattcatgagctaaactg

SEQ ID NO: 191284 - DNA, 3422 bp, Cannabis indica
  modified_base (3379)..(3379): a, c, t, g, unknown or other
aaacggtttgattcaaagaggtgctgaagataaaggtcggtctgttgaagaaatcatcgtatggattgaaacggtttctaagacattacgtagtacttcaggttcaataagttcatgttaaaacaaaagtttaaaacttcatatgtgaatactatgctcattgcatgtgttggaattttaaactaaaatctgcaacctttagtttttttccaacacatttcaaagaaacaaaattaatacaatatgcaaaattgggattttttatgctcatggcatgacatgtaaatttcaaattaatctatgttgaccgttagaattttacgggttactttacataataaaccagttaagattatttatttaattaaaaagttattttattattttattttaaattatcaaaatcataaaaacaaagcagaaaatgaaatttgtgttatgacatacgatgtgggagaaatactaaactgatatgattagtttaacataggaattaattataggatatagttcatcctcaaaataggtgcatctatagagaaagaatgaaaatttacataaatggtgcatcttctgcaacaagccaaatttacttaagatgattctctatcaccactacaatcttcttcacatatagatttagaacataagtgcaacttctgaaaaaagaaacaatccaaatttttgttgctaattgtcttagttataatgaaaattaaaaaaaaaaagaatgaaacttacatctcttaaagcctttgaccttgaaatcctgtttcaatattccacttgccaatgaacacatttgaaatgtgttttactttcaagaagttctcatgttgacttccattgtatatagtttctgtcaattctacacccaaattgatcaaattaagaacttcaaggcttcttaagtgttcaattcctaatggtaatttgttcaccaatttgcaatctttcaaccacataattttcagatgagacaatgctttgtcttccacaatcacccttcttaacttatccatttcgtcaatataaagcttttcgagttttaagaaactccaagctttaaaacatagtgactccccatcataagctcctttgaaaagctcaagtgatactaaattgggcaaatcttgtaatgactttagtggatctacctgcaacttacaaccaaccaaacgtattttagacaagtttgtaaggtcttgtagtccttctactgatttctccacgcgtccacgaatgtatagtctttgaagtaatcgaagagatgacaatgatttaagctgcaaattaaagacttcttcttcatcttctgttcttgaatacaaatgtaatgagcgaagatactttaattcatgaagtgaagagaataatgcatccctatgctcaactccaagtttaaggatgcctaaatttgttaattgtgtaagcttttgtatggataccaaaagctcaatatcaccaagttttgcctcaacaaaacatagttttctcaaggatgaaagggagttcattccttttaaagccttaaaacctgaacctttatgatcataaatggttagatgttgcagacaatgtaatcttaaaatctcattaggtagctgtcttacaagagtacttttaagatctaatgtttcaagatgttgaagatttgaaatagagggtggaattgaacttacattggtatctcttaaacttaggtacctcaaatggtatagctttgtgatatgttgtggaaatgtggtcataggtgcatatgtacaatccaacaccttgagaagttttgacccctcttcagaaaatgaagacttgaaattattccaaacatcaatttctttggtgaaaacgagcaaggagcgcagttgtgatagttcattgtccccgaatggatctagttttgttccttcatgaagagataggcgtcgaactctttcaggcaatcttctattactctctttattagttactactgcaaaactttgttctttggatttaagaagcatagtttcccttaagatatcgtgaactcgacaacttttgattcttccatctctgtatctttcattcacttggcataaacttctgttaagaagctcattgaaacaaccatttgccacttcttctaatgttcttccttccatttcttctatgaaaccttcagcaatccacaatcgaatcaaaacattgcgtttaatcaagtaatcctctggaaataaacttatgtacatgaagcaatgtttcaagtggtaaggcaaatcattgaaactaagtgaaagtatggcttgcattcctttcaattttctattgccatgtaattcggcccttaaagaacggtcaacaatctcccattcatcttccttattgatgtcctttgtggccaacatgcttcctattgccacaatggcaagaggcaatccttcacatcttttcaagatatttcttgaaatcttctccaaatgagaaggacaagaactaccttgaaaggctttagcgcaaaataaagtccaagaatcatcattagttaaaggagttaagattaaggtcttacccccaagatctttggttgaagaagaagccacatctacatttcgagttgtgatcattactcggctatcatttttgttgtttcgaaatgaaactttcaatgcttcccaaacatccacatcccatatgtcatccaacacaaccaaatatcttttgtcactaagaaaatcaacaatggttttctttagcaaatgggtgtctgtggagttctcaacttcatcaggaactaattggttcatagctttgaaaaattgctgaataatttgcctcaaaacttcatcaagcttgaacaattgcgaaacagtaacccaagcttggagttggtgaaaatgattccttacttgtatatctttatatactgaactcaccaaagttgttttgccaagccctcccattccaacaactgcagccacttgtagttgggagcaattcgaattcgccataagaaaactcgaaagatcttgcttttgtgactcaatgccaactaactgagcatcttccagcaaccgtgcatcatttctaagctcataaagtagcaaggtttagttccatagctcgagctcgacccgagctctttgaaaccatatctcttgtgtccctcagaaatatcagtaactctgagtttgatacactgcaattggtatgcaattcgatggcgagctttcaagttcttgattcctcgaaccatcttgcttaaataagcatagaatccaccatgtctcttagattgctcaaatctatacaagaaatcatcaatgatgtcttctgcatcataagcaacctctctaacttgcttaaccaaactttgatttcctcatcatcatcttcggcngtatcagcagatctcaaaaaacggctctatacgatccaactca

SEQ ID NO: 191285 - DNA, 2360 bp, Cannabis indica
gtgcctactaatacccaatttactgtttccttgtttcttggacaccaactgacataactattttgacagttatgttagttatgtgcctttgctgttacttgtgtataaatagcctattggctatctagtttaaccaaccaattgtaataaagccaagtatcaataaagctttaattctctctcaattctgtctaaattgcattcgagttccttggagaggttcagttgttgaacctgggtctgttctggtgcatgaaagggacacctgctggagtgatcgaattggtgtttgctcaacattactgatatgttatctatcagacatgatattcataacatgtacggtaaacatgtaatcacatatgatattaaaaggagatccgtaattgataagattctaatcgtctttctcggggaagagagaaaatatgattcaacagtagcactttcagattatcaggatgtgatcaaatatttctgcagtaggagcttgagacataaagtgaatcaccttctcagcaatagaagaatcaaggggagaagaagacttggacttaggctcaggtttctttattttgaagctttaggttgctcacttccttcccctttttcgggtcgatatttgcaaaggcaaacaacacaattaaataaattaaagaagaaaggcatgcaggaaccaaaattatgaaattaaatcaaaaaaattagatgaaggggagtacttagaagaaggaaaccatatctttcattaatcaaatatcatcacaattattaggataaaaaaagaaatgataattaatcaaatgggcagaagaaatagcatctcttctattttttgagtgctctttgtctcaaaattgtctacactagatggataaacatgtccaagaagagtaattttaaagagaaaatattttcaatgtttatcaaccctggaaggcaaggaacaacaagatttgataagcaagcattgtgagtctgaatgtgattatttaggaaacaaaatggcaaagtcaaaaatgttttgcctaagcaagcaagttactcaaagacataaatattgttttgaattattataattagattttaatgattatacttgtatagaatacatacacaccttctaatgataggtgttttatgatatatgtactaattgtttgtttgaagtaataaattttcttgttcataaaaaaaagttaatgactagacacttgttaattatataatatcgttaatcatttatgaggtatctttaggtagtgcaataacactgttatactctaatgctccaaaataaaatatcattaaataactatataaatagtaatttttctcctcaattttgacatgtagtaaatcgtgctttttgaacttttttggccgttaaaaattttccctgaactattgagattgttaaagttaaggacttttgtctaatttcattcaatttacttttcagtgattgtttatgtactaaatcatgcttctcagactttgatatctaccaaatcatgcatctcaaattttgatatgtactaaatcatgccccttgaactttcatccatgttagaatttttttactaaaattagacaaaagtctttaaatttaacaataacaatagttcggggaaattttaatggccaaaaaaattcagaagacacgatttagtacatgcaaaagtcaaggaaaaatttactaattagcctatttataataagtaaatagttgcaaacctgctctctcaaaactcagatttttttttttgaattgaatctcaaaactcagatcaaatccaacaaaaatggttgcaaacctctcccacgccatcattataaaatttgtgttacttcacaacaacacatgcactttaaaaaataataataaataaataaaaagagagaaaaaacacatgcatgcaccatgaattaaacctgtctttattattatatatattatgtttaagattaatggtgggtttaacagagcacatttgtccttttttactataaacaaatcctcaaatttgagagagaaagaaaagtggttctgaatatatatcttaaataaatatcttacacagctttttcttattttaatacataatagattaattaaactaatccaaaacctatgaccaaaagcaaaagctcatgagtacgaaaattccaagtatacttagtaatatttattagtacttgctttttcacaaatatataataatatttagtccttaattactttttctgtttgtagaagggggaccaattaagctaaggccagcctgaatttttaattagtaagataattagtaacgagaatgacattatgatatttggtctattcttttttttttttt

SEQ ID NO: 191286 - DNA, 2799 bp, Cannabis indica
atagtcttgcccttgagcataacaaagaaaattactaaacctcttcaactgtatgttttatatagcacatgcaccaaacaactcacaaattcagattctagacaaactaaaaacattgtaaagctgagctctagctttgacaatcttcttcacctgcctactaatgaacccagccaagctacagccatttttgtcaaaaaataaatctgaatctatgtcaattgccaaatataccattattagtactatttattttcagtatagataatctaacacttatttagaaaatataaatttttttttctagattttaataaaatttccacaaaaaccgcgccacattaaaaagattacaatgccaataaaataaaatacaaaaacatgctctaaatggggtcaaaatttgcatttggccttaatagccattcctagctgatatgttaacaatgaacaggactaagtaacttgcttcataagctcctcctccatacacaaatggtgaagtagtttatgactcctgcaacaaccaactttatcaactcctctaatctatgctccactctttttgctaataaaaatattgagcagaaacacaagtcttacttaccgatcagtcgagatcataacagaacgaaccaggattagcttgccaaacaaacaatgtcgctttttgtataaaactcttctatacttcttttatatctccatttttcacaaacttaccgcgtttggccatggaaccaggagaggcttttttaaaacctccattctttcccatgttcgtatttctcttttggccacttggaggcccttcaaattttctcttctgacctctttgtgttccttgatcaaattttctcttttgaccactttgaggcccttgatcaaattttctcttctgaccacttggaggccgcccttgatcgatttttctcttctgatcaaattttcctttactaaatttattacttctatcaaatcgacctctcattgattttccattcgtgctagggccatctttattttcccttctctttccatgtgccgattggttcctaggttctgtatccaactcgttctgacccttcttctcatgcctgaaattattatttaagaataatatgaaagttcaaagttaaaagcaaaagtaatagagaagatataagaacatatttagtttcgtaatggagctggaggagacctcttggtagaatgttgtgtttctttatcagtgatgggttcggcatcatctttgggatttgtcttggcatggcgattctgcagtgtttaacacaaacaaaaaaaaaaacacagaaatatagttactcatcggacactaacacccaatttcggtacccaacatcgttcaacagtgaaatgtttcatatatatagaagaaagaaatatccaactttttttgacaaaaagtttgaaagagccaccaaaagaaaatcagagaacaggattcaagttacctccattacattcttcagaaagcgtctatatctatccggagcagctgatgtaactgaattaaacccacacttccggatcataatctctattatgacagtaacctgtggatagagtatgatgaattagatatatgaacaagtcaatttcctctccctaaaaggctaaacacacagaactgtctggtgttgcaagcaaaaatttggtgtggaattcacataccttcgatctgaaatggtttcttgaaacagcagaccatagtagaatttctttgagaatatcaggaagaagatgctgcaaatccctaccctctaagcaagaaaccaatactttcacaaaacccagaacagcctataaagtgcagagcaaccaaccccttagaacaaggaatgttattcaaaacaatattaaaacaactttcttcattcaatttacgagtattttaataagaaatctaaactaaattgatcataatgtagcttagatagcactaacttttacaacttcgacagattttccctgcagcaaagttaaaatagaggggataagatctggcattgaacggtaaatatctgtatctttgtatatcagcattgatagcactgacacagcaccactctttacatgcggagatgtaccggaaagatagcccattacctgaatttgaacacaaaaggcagtgacataaaaagggccttagagaaccatcttgaagttaatgtgataagaacaagcacatttaaaataaaaatgacaaatttctgaaactgaatgtccaatcaaacactaagcccagtgatgaactgtaatggtcagattgagtgggtactttctcagttgggttgataaaaacatctaaaaacacacactcatctaaaatttgtaaaaaatcaccctaatatatcaatttttgagtgtcaacacttttttctccttaaacagagcaatacaacaacatcgatggtcagttgaagtcactatgcttctatactcaatagataaagcaacacaagcatgaaagctatgcactgaccatgttaattagtttctggtaaggcgtatcagaagattcagaagagagagatgccatgtctctcaaggtggaaccaatctcaagtagtacatcatagcctgctttccttacatcttcttccttggcctacacattattacaaaatccatttcatgtgtcacaatcgtctaaaataaaattttcagatgatacaaaataaacaaatatacataaaagaaattaaactagtggtaataaaatattacaagtaagagtgttgaaaacaataccatacaaaaaaataaaaataaaag

SEQ ID NO: 191287 - DNA, 3311 bp, Cannabis indica
atttacaaaaaaaaaaaattagttatttcaataataattacactaatatattatttttgtactgaatctccttattaaattcaaaaaaaaaaaaattatactttctaaagttgttccgagtacgttatattattttgggtgagtttatttaataaatctcctgattaattaaaaaaataattagttatttcataaaaattattacattaaattatataaaaccgaatatttaattacactaatattattttttgtactaaatcgtaacctttgaattttttgagcctcttacaaatctctttaaactattaaaattatcaaatttaagaatttttatctatttttactaatattaaggatgtaccaaattatactcttaaactttcatctatatcatacttttattagtaaaattaataaaaatcttttaatccaacaattttaataattttatgagttttttaacaacctaaaatattcctgagattccgaaagtttctgaaaaaaaaaaaaatatttagccttaaataaaactataaataaagacgtaaactttcaatttgacccaattttcttcatctcctctagtgcgcatagaaaaaaggaaaccccaaaacacagacctcccaacttatataaatacaaaattatattaatctatatattattatgttaattgtgtaattaatcttttgttattatgtcgatcatattcatagtctcatagacataacggtcgtgagagtattcctaggctctaagcaacctaataagctaaggattagttctaataaccaaaaaccaagttcgctgacaagttcttttccaatacgtgatttttgcttgtaaatcccacctcacctcaaaatattcccccaaattaggtctcatttcaacctcactcaattctttcccatgcacaagtttttgctctcataatctcttctctactatttttacagcttacctgtctctgttttcacttttgaaaatttcaaccttggaatcaaactgcctatcgactaatctctcttctcttctctttttttgcttcagaatgaaataataattaaagacactaaatgaagatggatttaattgatgatgggtggcccaatattcaagtttgtatttctgtacatagtttgattttgtgaacatggcatctactgctactcctactgctattactactaataaaaatcatgccttttttcgtacaaagatgcctcttttttctttttcctctttttgggtcactatttcctctctcttactcactctcttcagattcttccccaagttttttcacaggtaaaccaactgttcttctgatctttgtgttcataattcttttactgtttattctattattcatgtggggttttcttgttttttttttagatatattgaaaacgattctacccagatgaacaattcttctaaagctgagtaccaaattggttcgagtcttattgagccagaaaaagatgaagatttggatgattcgttggaagattcaaaaccccattttggtttcacatttaagtttccaacatatgaagaattcagtaaaagccatggtgattttgccagctcgagtgggaaccagttttgttctgaggaaccagaagtgaaagtttttagcaacaaatatgattttgtttctggtgaaaaccttagctttttcgttgaagaagctaaagtttcaaacttttttatcaaggagttatttgcagactctaatggagattcttcattgaaacttggtgaggttattgattctgggttcttgtctgaaaacgattttgggaaacaagaagaggttaatgtcattaaagaagattcttctaattctgggaaagttgattcagagaatgacagagaaaacaattctcaaaaggtacaagaaattaatgaggagaaaggagagaattttgtcagaaagtaactatatgtgttcagattctgactcggattccattacttcgagccatgaattctcatttatgagtcaatttattgattcaacaactgatagttttctctcagatatggattttgaaattgaaggtgggaactttgagtcaaaaaatggcgagttagattccaatgatgatgaagatgaagacattcttggtgagcttaggaaattagtggagtcccaaacagaggaattgggagccaaacaggggaatgtggaagacaattctgaaaatggttcaattaatgataatggtaatgaggattcgaatggattggaatcgttatgggaacatcaagaattggtggagcagctgaaaatggagcttagaaaggtgaaagccacaggacttcctaccattcttgaagaatctgaatcaccaaagataacagaggatttgaagccatggaagatgattgatgagaagtttaaccatggtgataaattgaatgagcttcataagttttataagagttacagagaacgtatgaggaaactagatattcttaattaccagaagatgtacgcattaggtcagtcaaagtttcttacttatctcttttttgttttcatctaatatctctattatttttactattattacattttggaatatgggatttacaaaattatccatccattttgttttcgtcaaatgataaacaaaacaatacttgagctcaatttaaagataatttttaatatgaacaaatgaataaagaaaaaattattccacttaatttttaaaaaataaaagatttaatttatgatagagagtgtgtctaaaataatatttaccgaactatatatatgctgcctttttcatctttatggcataataaaatggtatgattatcacaacttacctatgttggggaaagttgggcccactcaatctagttagttggcaattctatatgtaattgtagctgttttttctttcttatctcaatttagagttattatagtttttaggttggaagaagtagatagatatatataaacattgtgagcttgttttgtgtactttataactttttaagaaaatgtttttgtgatacaactcaaccaaaccaaagtacttgtgatttcattcataaactagaaaccccattaaaacatgacattttattcctaggtgtaaatttaagcttagtagttgaagaaggtagaaattctttcatttaaaaagctttagtctttatggtatggagcctttacctaactctgaattctctgtcaccatgataataatgctagtagtgcccctaataagcttttctcattctttatttgcttttctttttgtacctttgttattaaagtc

SEQ ID NO: 191288 - DNA, 2522 bp, Cannabis indica
gataaagataacttcattcatatcattccttgtcatatataatttctattatatacaacaccttcacttcgatgtcatactacattagtaatctaaaccaagattacttgaaccgaagaacatgcatttaatgaaccgtactaacaaccattgattaaagatttcataactttaatatattgactgactgttttattcatagctaagtgatcttagttctctgtacaactagtcacaacctcatatataaataataaatattttgatatttatatataaattattcaataataaatattaataattttaatattacttgcgtaaatcaaaatttttactcttcattaataatcataaatatctttataggcttttcaggacataaattctaacaccaacaaacagaagttctaaagtcaggcgtaaggcagtctcgaggcaagagaagtggaaagagtcaaagtcgaagtgaagctccgaagaaagtaaggaaagggtatgaagcccagtatcctgaacataccaacctagtagacattcatgagaatgtttaccaagccaactgattgctgctacacggttcattacaggaagtcacctcaaatgtacaaaggagataaaaacaaaagagatccaaaaaaaaggtgtgaataccatggtgatgtcgggcatacaagaaatgagtgtgattatttgaaggatgaaatggagaatttgatcaagaatggacatctctccgaatgagtaaggatcctgattatctatacgggatagagggtagcctagggacagttggaatttctcagacagtgtggagcaataaatcctccttagggtggtttaccaacaagatccaggaatgcatgcccctcagagggtcctaaacggctagacacctaaaaatgcacaagatcccagactagggaatccatatcccccaagtgtcgctccaccttaggtggatggtcatgttgcaactatttccagagggcaacatattgttggaagcactaggaacgctcaaaagaagtatcttaatgagcttgagcaggaaggagaaatgtgtgctctagtacagacactagcacagaggttgtggatgtttaatctgccaattaccttcacaaaagaagatgttagacatgtgtacttctcccacaatgacccattggtgatcaaggctcaggtcgctagcaaaagagtatctcagattttggtggataatgggagttcagtcaacttcctatttaaaatcgctttccaggccattgggttaattaaagcgaacctcgtgccttactcgatccagcttcaagacttcaacagagattctctactacccatggagaagatctaactctaaattactttgaatggtgatatagttggaagcaatacttcctctacatttaaatattgcacatttatcgtggcggattatccaaccgcctaaaatgccattataggatgacccgttctggtagatttcaaagcaataatttccatccagcacttatgtaccaaatcccaaagcacctgtctagccagcacatggggtagtctgggaagaagacgaattggatccctgagtgggagttgagagaatgatctagccattggaggatgtggaagaagtctgcattagagaaatggatctcactaaagtcgttaaagtaggaaggaacctgcctctaacagtaaaagaataaattgtgtcaaaagtgacaaagaaccaaggtatcttggcatggagccatgcatatataatgggaatcagtccccatgtaattggccatgctttgaacatagacttagacacaaatccaatccgacaaaagcgaagaccaatagatttggtacgctcgaaagttgtaaaggaacaagttgagaaattgacttctatggagttccttagggaagctttatatctggtatgactttccaatccaactttggctccaaagttaaatgggacctggaggatgtgcatcaactttatagacctcaacagggcatgtctaaagggctgttttttgcttccacagattgaccaaatggtggacgccatacctagaaatgaacttttaagttagatggacacatacttcgaatacaatcatatcaaatgcatgtagcggatcaagaacacaccaactttcaaacaaaaaaaggtgtgtactgatacctggtgatgccctttgggctcaaaaatgccagagcaacatatcaacgtttagtaaataaaatgttcaaagatgtcttgggaaaaacatggaagcttatgtggatgatatattggtaaaaggattcatgacacatacacgaatgaaccaaatgattcatgacatgtgtagtttccttagtgaaaatgaagggttcgcatgtttccacaacatattgccttggaattccaaaggaccaaacccatttagggttctacattcatcactgaatctagaaggaagctggaatccttcatgactctcaagcccctaaggattgggggtaaatattatccatgt

SEQ ID NO: 191289 - DNA, 1860 bp, Cannabis indica
ataataataataataataccattcagtgtagccataatgagagctgaaatcctagaaagcaaatttcttggtggagattcttggcaaagtctggtgacaaagtaatggaggaaagcaaaaggagtgactgaaggcaatttccaatcgaatgtgttcaacagcaaaagctccatcctgccaataactttactttcaactacattgttatattcgtatcgaaattttgatacagatggaatttttggctcttccatttttgcagccactctcagagctgcaaccgatagtaagccgatcaaccatatttgacgattctgcaaaaaacataatattaactaacaccaaacagcaagctttgaatatgattagatgaaaatactaataataataatatatataaaactcaacagtctctatgggcctcatccagagatatcgatcgaagtatatcatggataaatatgctgttttcttctgaaatccaaaagctgctccagtctagggtttgacaacaataacagaaaggggtgagttctaaaaaactgatgataaactcaagctgaacaaaatcaagtaatgaggggtttttttcgacttactttgacaatccagtttatagcttctaaacgagcgtattcaacttcgtctccaaacaccaaagattcatccttcttaaacacgaactcggtttcttcaatcagtaaatttattacatgctcttcctcttcggaaggactcatgtttctgaagttgataaatacgccttcatcatcttcaaacttttgctccaaaagggtctcactttctcgggaaaggtggctagaaaaggagtcattatccattttggatttctcttctctcctcttttttatccaaacagggaatttaaagaaaaagggtctcgtagagcagagggaaaagaggtggagatggggatatggtgaaagaaaatgaggacgacaattaccaaaatcttatactgaataaagggtcttagactgaaagaaggcaaatgggtatcaatttataagaaaatatatcgaaaagatggagtcacaacggatatttttttttttgtccttaaaagaatgaatgaaaactttttttgagtgagaaaagaaagggccaaaccaaagggttgtggtgtggctgtggctgagggcaggagctgcaatagtacgttggaggtggaaaatccaatagaacttttggtttgttggtacacgagtagttggcgcgtgcactagacagtccaatggaagcagaccatgcaattttctcgggcgggaaactgtacgttggatcgtacacccccctgtaaccgcacgaattagggtagaatgaatgaagatcatggtagcgcaccttggatcgtaccactgtaaccgtacgaattagggtgggatgaatgagcaaggtgtctctcctactttttttttttttttttttaaaaaaaaaaaatgaataacattcaacaggaaaagaaatgaaaagtcacgcgcgcaaacacaaatagcacatggagaattgttttcttcgcttaaatatcacatggacattgttgctaaatttaaatttatgtgccatgctagtaagtgcacaattcaataaataataatagtggttaagtgaccaatattatatcttaagtaattaaaataattaattatatcaaataataaaacctaatttattttatataagtaactaataatttttaatgattacattaaatgggtgattacatttatttttgttattgaattattattaaataatttgtgattaatttaaaaattaaataaaaataattaataaattacatctaacctactaacctcattttatttattttcttgt

SEQ ID NO: 191290 - DNA, 2638 bp, Cannabis indica
cttcaaaattgctttttttttttaataaatccaagagctcatactgagatgacaaactttcaattcctacttcttcgattagcagttgttgagcattgattcgcaagaccaagttgatatgatcgcaaatgcttcaattaaacctaaaaacaatatctgaatccattttcgaccttgccagcttaatttccttattgtgaactcttttgacaaaagaaattccaattagattatgcttagccgtgtatttcttctctcatctttcctacaaacccaaacgtatatgaactgagtttcaacggacgggaaaaacaaaattagtacacaaatacacaaacacaactaaggcaaacatcatcagggaatcaaaatatagatacagttactgtaaaagcttacaataagcaacgatttaacaataaaaaacagaatacatatttctattatagcaattcaaccatttccaagagtaacaggaaaaacatgaaacaatttctgtgttttaaatatcttagaaggatgcgttgttgattgtcaatgtagaggccaggtacaatttttttcaacattcgtagtaaaagtatagtcaaaataaaagatggaacaatatagccgcatggttttaaacttgaaagaatgtagacaattttgacagtaaataagattttgttgttctatcattcctccaaagtaaaagactaaatattgtatacagactgatatagatgagacttcttcactctagagtctaggtcttatgaatttggacaagacaccagcagaatgagaaaacaccatgataagcaccacaattggtaaccagccacaccattacattagatacacaaattgtcaacccaaaattattatcaactaagcaaaacaaatttatctccgtagagacacaactagcacaatccaaacaaaacatcctcaacgatcacgttctgttttttttttctacaacattagctattttgtgaaacgagaaaaagaggttaccaaatcagaggcgacgtgtagcccttagtgttttcttaagctcataatcagcatcatcagtgggcaactcatagcgacagacagggcaagtgttcctaatgcccagccatggcacaatacaatcaccatgataaagatgagaacaaggcagctgtttggcttgttccccaacattaatttcttccttacaaacagcacaatgtgcattgttattccttacatcctcttgactcaaaacaactgaaggaagattcttaacagcagttccagatgcaggaggccggcccatatctgtcggggtctcattaaactgcccaatcaacatatcatattctgcaggataaatataatcatgttcactcaaataaggttcattttctgggtttgtatccaaattttcagtactcaacagaacttcccaatccaaattttctaaaccaacttccctctccaaacttatttcttcctcctcctctaaagggggaattgagcgagagagcgaagcagaaatagatcctctgcgatcagcatccatagacatacttaacacatctctctcatcaatccgaccgtctacttcttcccactcaaaatcttcaatggtttctctgtgatcctctaattgaagcgaatcccagcaaaggggaatacctgtatcatcatcgttctcctcgtgtgtatggtccaaatcataagcttcctcagactgtatatcaattccaataacaccaatatcctcttcatctgactcagagccatacccaacaagtcgaatgcaggtatcgaaggcgtccgcctctcttacactagaagacgatgcctcgccagattctaaaccagaaaccctcctcgtcacgaagaaatcatcgtcaccatcaacgtccagacaatgtctatccattcctaaatcaatatctatccctaaccctaaatccaagtctaaaccatccatacccacgtcgcaatttccctcaatcaccccaaaattcgaatcgtcaagtgcctcagttaccaaatcgcttagacccattacctgagactgctcgacacgttggtggaagagatcgatgacgaaattgacctggttctcgcggtccaatatatcggcgttggcaatcgaaccaagctccgaaacgttttcgtcgtcgtctaagcaccgtacgttgatgttggattcgtgctgggatagaacctcgtcttcgtggacagtgatatgtgcatggatagagttatcggacggtgggaattcgggatcggaagcatagaggtcgaagtcgtatggggtccagtaggggaaggagtcaaggactaggctttggtcagggtggctgggatcgtcttctagttcgtgaagacgaaggtaggtgacctccgccattgatggaatctgttgagctttacgtggtttcaggttgtaagaaacttttggttaggtttataagaagattagattgtgaatttacaaaattgccttttttttttcatttgtagatgggagcttagacatatttgtagtggtttttgttttgggaaattatactaatgccctaaattatagtagtatgttagtatatgtacttattttaaaaaattataataaatgactttaaattatatgattatgttagtaaatatt

SEQ ID NO: 191291 - DNA, 2783 bp, Cannabis indica
ttcttttattttttcattcacttatctttctcttcccatacacaaagctaccgaatgtgcattgaaaccttagctttttgtagccttatttttcacaatgctcttctgtacaagcaaccgattagttggagggcatgagggtttttcagcaagcacgtggctctggtacaggtaagcgccttgaaactgttccgcaactaccagatactttcaaagaagcaaataggcatgacaatcttgctatcattggactggtcctcaccactttatgaaccatatcgagttgcttactagcattctcagcagcaccatgatacccttcaaggtctgcttttgtgataagaacggcatctcctgagggagagtatgcagccgtagctggtcttcgtctgctaaattcttgaacggcctgtttattgacattatttgaagcaaaaatgaaactattatgtactttgtaagcttaatgttcttacatatagcacatctaagagcaatactcacgatagcctatgaagtcaatgataagttaatgaaataattaaaataagtgagagagatataccttccactgagtgggggctaaaagaacacgaggccttctagaccgtacataatcaagtgcagcagctggtgtcatacttttgtactccacctgcagaggtaagtcaaatatgtacggtgaataccattaacaatgtctagcccaacaaagcattagtctaatagcagatcaataacaatcaatgcaaaggatagcatattaccaaatagcaaagaacaattgtagtgctcctaccacgaccagctttacaatggacataagtagttctaccagaagatgcattttctgatccaaaatatagacttagaaacattaagtttaagcaacttacatcatcacactaagagagcatagttaatcacttactgtgaatgaactccacagctcggctaatatcaactagcgaaggagcaaaaaggtaatctctagtaggaattaaaagatggtcaatcccgtgggcctgaaaagtgaaatcatcaaaatatagtgaataggaaacacactaagattataatgttctcaaacttttgtttacatgaaatagtacagaaagttcaatccttggattcttctttctgataaatttgtttcccagttaagaaaatggaaaagatgcctattcaaatttgggaccaatcctgaccaattcaaaatattaacaaacaatgatatcacatacaagagcatgaatacccaaaaacacgtgagaatcaaacctatataatttttaaacaataaaatggtaagtttatcaatttgagtaaaagaaattcagacacattttgatgagaaaacagtaaaccaaaaagtgactcatcacatttctccgtttacttattcttgacacttcccattacatcatccatcaggtgtccaattgcggaagcaaattttaaaattataaacaaataacaataatgatcatatgcagtgttgactcacaagatataacgacgagggaaccaatgtttcataaggttcattgagagtgattacaccaccaacaccaagccgcttcagccgtggaacatctttagggaatggaacggcaccaagcaaaagaaactgaagaaaaacaaaacataaccattcagtattcacacacgaaccaaaatcacaaacaccgtagacaaataaaaaaaaatagagtatgataaaaccgcccaaaagaacagctaaagacgcatttgatcgccagctaatcataggacgcacaatttggttactggggtgtactggaaaccaaaaagcttcaatctttacccaaaaacataacataagaaaacagattgaacagaggccttcaatcaaaagttgtaatttgcattaccccaattctctgctctcacagaaccgagtacaatagcagaaaaacagtcaatagggtcattcttaattgcggtttaaacttaaaacaattaaatccatacaacaactcaatcttgtttacttgattgatattttggtatcaactttctcagcaaccaaaacagaaaaaaggatcaagcagtgctcatagaataggctcaaaaccatacatataataattaaaagggaaagaaaaaaaaacctggtctatttcgtcccaccatctgaattcagactccatcttgttccgaagcacattatacaaaagggtcgggtaaaaaaggatccgagccccagctccgacaagagctctcttggcgtcgaccttcacaatctgcgtttcgtaaacgccgtcgttccgatcagaatccacgtcatccaattcctcgatcttcattccacacagaccgcacctaaaacctaaagccccacaaaaattaaattattaaaacaaaaaagatgaagacgaccatggcgatcaaatttcagagaatattaaaacaaagtagaaaaggaaagtgagagaatcatactggagaaagatgatgagatgagagaaggaaggaatcgaatagcatagaagtgaggaagaaaagcagtgatggagagaaggattggggtaggaaaaggtaaataaacagtgagtagggagaaaatatggaagaaatgggtgtcaaatttattagctttattatcaatatcatctcatctctatgtgtgaacgctctcatatgccaaggaatcctattattatatcccaaattccagccctttgtaattgtaattgtttcctttttgacaacagtaatttatttacttacctatttgccctttctctttaccttttttt

SEQ ID NO: 191292 - DNA, 3141 bp, Cannabis indica
cttatgtaattattccttattttgtccgcttgatttttatttatttatttatttttcttatttgatttaggtgatttgattataatctaattgaaaaaggcatttaatttcaccatgtcatctatagttaattttatatttagttatttactttagtaactaatttaatttgaaaggtcatataattgtaccatgtcatgagtcattttttatttattaaataatcatagctaattctttttatttattttgttattaattttaattatatatatttgaaaattattatatattgagtcattgccacaattgaataatttttactctaattttagtcaaacttaagaaaattactattttgatctcactaatttaaactcattattcattaagtttgaccctacatttgtattttaaaatggttgtcaaagtattttaaaagtctttttctttagataaaataaaaataattttgcctacttattctaaaaaaacaaaaaaagcttttaaattataaaaaacttatgaataagaaattgaaattttttatttttaaatagttctaaagaattttgaacaaacaaaagcgggtttttctttagataaaacaaaattagttctgcctacttattctaaaaaaattaaaattacaaaaaacttatgaataaaaaattattttttatatttagttcttttgcaaattaaaaattaattaaatacaattcaaaataaatacaaatatgcactattatttgctctacatttgcatttttatttattttaattaatttaaattaatgtgataagttacttttacaaaattataaatatatttttaattaaagatatttaattgataagaaaaaaaaattatatattaattcataaaaaaaaatataaaaaaaatggtggaaggtgcataggcacctattctcacttaggggttagtatgatatataaatagagtaatttgtgatataaatatctaaatttaactttcagttataaataaatacttaaatttaagttttgacggtagtaatacataagttacaattctgaaacttattagaaagtaaattaccatgtggcagtctttaattggttcatgtcattaaattttaatttttattcaaaaatagatttaaatatactaataaaaaaatgataagtagatagtaacttgacacttaacgattaggtacttacgaaattctaaaaatataatttatgtattattaccgtaaaaaattaaacttaaatatttatctataatcgagagttaaatttaagtatttatgccgtaaattactcttataaatatgagaaattcttaaagcataagtagtttcaaacatcacaagatatatttttattagtacattgaatttttttttttttagcttttaaaaaaagtattatatatattttaatttaataattattataaaatattattcactatttataatgtagtagtactatgataatgtagtagtactatgacatagtcggcccaagagtgatgcatgttgtagactctcaccccattctagtccaaaaatttctttagagaaaaggcttttaatttattttttaaaaatactatattttatattttattaataatataaaggtctagttattttatccaaatattatattttaaattttggataataagtgacaactttaggtatttacaaattgagttaaattgagttacatatagatgatggcatgcatatttatttcaatcattaaatttttctaacaaaccttccacttcatataaatccaaccccacattattaaaatgagacaagtgtactttcactttcttggcaattatgctacacatcatttcataattattaaataaattaaaaaaaaaaaaggaaagaaatttaaatgaaaattatcaaagttatgtatttttttaaaagtaaaaaaggaaagatttcaaaaagttaaataaaaatgaaaacaagaataggaatataagaatctggtttgaattttcacgtggttaactatatccaaaaatatattctttaaatcaattaataaaacaaaaaacttaattaataatttttacaaaatagatgatattatttaattgttaatattattattatcataataatattagtgttatctaattaatgaagtctttaaacacaagttagtcctctatttttattgttactattaaatattagtgttatctaattaaatatgaaaatttaatctgtggatataaatcctacatgtaaccaccataataaaatataatttttttgtctaaatattgaatggaataggaacaaagacaatttgatttttgaatattaaatgaagcgcctcaacaacatgattaattttgtatttattttataaaaaaatttattataacatgtgtatttttatatatttttgtagtttattaataaatttttaaatactttcattctagtttacataatttttttttatttataattttatattttctaaataaatggattttccgtgaatattacctattactagctacatttttatccctatgtcgtaacacattttaaagaaaaaattatactatatactcttttttatattgtcttcttttatttttattttattttttaaagtttatcacttttatttctttttttaatattgtaccaattttgtccatgtcacttcgatactctccactctcttgtgtcagggtattttgagtacaatacatataaaaagaggtatgtttcatttaaatataaaattagaggcaaatttgataagggaatatttttcaacttcaattaattaacaatcttacccatactttagcatttttctaaattaatttatcaaaaataaaaaacaaataataattaaaaataaaaaactccaactttcatggtatactaatactaatgaggattaatgcattcaatttttttttgaaaaatttgggatggttaataatcattcctatttttttctttttcaatttaaataaataatcaaaattgatctataaacctaatcaaaaaaaaaaaaaaaaacaaagaagagactattaattaagtactctctattgtagatataaatttaccccctaacctaaataaa

SEQ ID NO: 191293 - DNA, 3023 bp, Cannabis indica
aaaaaattaaaataaaatttcttccacgaatgcatcaactagtggtaatgccaaaaaaaaaaacaattatagtaatcaagacaataatttcctattacgatagttagtttatcataaatttgtaagagttcttcaaccataattttagcatgaaaactcccatagcaattattttaccaacatacaaaaatttattaatttataattatttattaatccttatgaattctaccaaataatatattttgtgaatagagcttagatatacaattttgttatgtttataagtgttggtatattattatcatttttctctttttttttttataaaagaaaaatgtccctggttggcggatcaacatacagtcgagagagtagtcacctccttaaaaaatgggaaaaaatgtctatatattttagttaattgtaatacatacttgtaatgaaatgtgttatatactaacatagtatttattttacatttatgtcaagagtttaaatcgtaatatagtagtatttttatttgataatatttaaagttttttgaacctctaccaaatttttttaagccaatatttttattgtttttattattattattttaaactatatttaatattgtaaaaatttatttttagatttagactaatctttaacatgctataacaatgtaaaaaaaaaaaaaagtacctacccttactttttttttaaaaaaaaaaaaaattgtctccttcgactaaaatcttaaattcagccaattgggcataatagataaagatgtttgaaaatttgatattgtattataattgatatcatttttaactatttttcaatataggattgctaaaaaaaataaaaacaaaataaacataattaaaaaaacaaatgttcataaagtggctaggatgggtctaagattagatagtgagttaatctggaatggttctctaccttccatttagcttgtgcttttgttctgttttgtagcacaagtttctgtcaaaataaaaatgatcactttgtcaacccatgactagctagctagttcataataaacttggcatagaaaataccaaaaactctaaaaagaaaagtacatatatccttttgtattaggttaggtgttgcttaaaaaaacaatacaagtatttaaatagttagttggacttgggcatgaagaaggtcatttttgattgaaatgcctctttcacataattaattaacgtaaccccatttgcaaacacaactctccaaattggaacgttactttcatataaatagacataataattcttcccctaattaattaattaattttagaatactaaaatgtattagtattgtgtagcactctctcatcgaagtcaaggacgaacccatatagaagcgagacgagtcagtcattctcttatataatttagttagttacgtcatatatttgtaataaaaaatgatatttataaacataatatcagctttgatgtaatgatttagctagaagttagattacatatagattagagtgatagactcagagttcaaattctattaagagcatttttttccttttaagtttacttttaccgtcttgcttttaaaaaattacaccctgtcactgggtgtcatatcgttattagtgcgtatcgagtcttatataacttaagttaataagtttaataacttttaaaaaatattgctaactaaccataaaatgtgactttaggtgatactaatgtctaattataatgctttattttaaattatttgtattgtgtgtgtggagagaggttgattacttaatacaaaattatttaataaatgccaaacatggaagcctcttaaacctttgctttcagtgtctaattatgacccttggccctcttgatgtcatataactgctcaattatttaatggtgaataaatggtgatgctattgtatttaaacctatcatcaaatgaagtagaaattaataaactcacttcttgactttatgtgcagtacagaccctacattaacagaatttctatttaattttttatttttagaatactcaattcacaataaatgtggaatagtaaatcactatataaatgtgtctactcaattgtattttgttcattttatcaaaataatttattgatgtagaattaatgtagcactaatttggtaaaaattcaaacaaaaatatatgtataaatagtagtttaataataaatttcgataatataatatatctcgttagaactaatatgtacatgtttaaaactaatatactcaacaaattatacctatgaccaataaccgcatcaaataaaaaaaagtatagggcaaaatttacaataatcatttttagtagatttatcattatgaattggatttcatggttgtattaataaatgtaattttccaattcttcaagatattatccttcaattttttctccgaatctcttagctacaatatatttatatgtaaataaaacagaataatctatgtataattaattttttttagtgcaatacatgtatatctaatttctttcattaaataatatattttttaaaaaaatttgagatagaatttaaaattttgatctttcaaattttttttaactattgcggctaacttttaaatgtagaataaattttatatagaatataaaaaaccaaaaataagagtttaagataaagttaacataaaaaatcaaaaaaataccattaacctaatagaataaatttttcactataaatacatacatatattagttgtgaataaataaaaaacaagagtttgcagtgatcatgataacttccctaattttaatttgaataaagttccataggcattagtgtgttaaaaaaacttatagccaaagaagcatagcagccaaagcaaagcaaagaaagacaaaatgaaagaaaataagtaaacaaacaaacaaatcagagcataataagaagaaaacttaattaagatcaaaatcaaatttattaacccaaaaaaaaaaaaaaaaaaccgaaac

SEQ ID NO: 191294 - DNA, 1235 bp, Cannabis indica
tttttttttattatataattaagtgtagaatataaataatagattaaattggatagatttttaattagaattttataacgtaatctatcttccattcttatttaattagaatgtaatccaatccaatcttgcgactaagcatttaagttacctcttctgggtagtacaagcacaagagccctttaacttttatttagggaaattttcctccaatttagcaaaacataatcattaatcaaaagatagcaatatatcgttgtcgactgtgctagcaatagttttactagaaaaattatcatgcgaagttggtaagcagatacttatattcatgctagtgaacaaaaacccccacaaggctttcccatcatgcaaacaccaatacctgttcattgccaaatggtttgtttatcttgtgttatctttatgcaataaataagaagtagcccaatgaaaaatatcccctagctacaacaaacggcactaaaattcatagtttccaaaatctttatataagaagggttgttcaacgctgaacaccacaacaattaaaaaggtgttctattctgttatactttgagaagaattcaaccaaaatttatcatacgaattgttcgctgtaatcggagtatcatctgcaagggaaaaacgagcacaaagttcagatcatggttatatagtctatccaagaaaagcaaaccaaacaaaatgtaaagtatgcttcgcgaacttccaacttaatgatgataggaagtatgctgaagtagaaagaactttttttaacaggttgataacggcaaggaaagaccaatcaaaactgtttaaatgacaagtctaacagctaaagctgtgtggaacagccaagaaatgtaacagctaatgtatgagaagacacgggaaaaacacccaagctacaaaagaacagaagtaatagtcaccatacaaaaggcgctatatagagtaccattcacagccttacaaagtgaacattaggcctacattttgccacagggcaataacttgtgtaaaagtgttacttctgacagcactaatattgttggataaaaatcgtctataaacttcattacccttgatcctcctgcttgctccgaagacaagactaataactgcatatttgtactaattcaatgttctaccatttctagttttctgctgttctgagaggaaaaaatatactaaaaattttatgtctagaatagtctccgttgattatttgt

SEQ ID NO: 191295 - DNA, 2232 bp, Cannabis indica
attaaaagtaaaaaaaattaccataaaaattaataattacttaaaaaaaaattacaacaactacaaaatacaaatcatgattttaaaccatgatagccaataacagattagttagttatagctttacttttctgtgtcttgacttgtaaccagttctgttacaagagaattcttgtttgtacaatcactataaataaaacgtttcctcctcgaaatgtttaagcaagcattctaagttctgaggttcttctttcatctctctttgttttccttttttttgtactctgttttgttctttcaaaccaaatcaatctatttttgagtagattcgtttagtttgatttggtttaatcatttaattggtatgatttaattttaaaatttttcaaaaaaatcgcaatactaatttagtttgaaaaaaataaaaattcaaatcaaaccaatctagaaatacccaaatacacgtagtcatatacgaaattttgaattatgatttatgatttgaagtgtgaaaaataaaaatgttactatggacagagacatagtcggccgaaacattgaacagcttggactactgcacaagatcttttatattagaagtccatttttttttgttgtctcaatatggttctaaattgcctattcaattattttgctttattaaaaactaaatcaaatatttatttgtcaataaaaaggttcaattttaatattgtgccccaaactctcaaactacttgagccatggtaaataaagacaaaagtgatattcctactataatttaaaaattataatttttttcttatattccatctataatagtacttaaaaaatagaagtattaatgacaaaacattatttaataaggatctgtaaacttcaaaagcctcattattattgactagatacagtacataaagtttgtagtaaaaattaaacttgtttcagaacctttaaattctgcactcatcttttaacagagaaaaacagcttagttgccaataataaatatgagggtcacctttcacaacttaaaccagccataaaaaggtgaagccaatttttcatgatccagaattttttgccataataaaagaaaatcataaaaataaataataatattaacaataaagtcttatgagactaataattgatgctacctaatttaatagaaacaaaaaagaaaattcctaaagatcaaaaacctattaggtggaaatgtggaataacaaattatcaagaccagtacatgagctaagggactaaaaaagtctagtgtgactaaataataagataactaatggagaatgttatcaaagatcacatcatgcatacactatacaaaactaaacaggaaaattctataatgcaccccttgatgtatttatatttatttatttattttggcatttaagataattttgtagtttaatttttttccaatggttgtataaattgtattatttaaagcatcttacaaatttttttaaaaaaattaacacatataaaatataattcaaacaattaatttatacatctataaaataaattatttaaatattaatttctattgtaaatttttttaaattttatagtatgtctcaaagtctattttttttttttccaaaatgtcaaaacatataacgagtgcatcaattaatgtactccttctaaaatgatgttttaaataaatataacgtacacaattattaaaaaaaaaaaaactatttttttttcaaaacaatgtactcttttcaaaaggtgcataagaaaaacacaacctttaatttaaaacattgttatagacgttttataattagttaataattttttataataattattaaaataaaataaataaaacttgatattcaattataccaataataataatattacattttataaaaattgtaaataccattttaacacttctctttaatttattgttggggcattaattaatgaatgaaagaatttatatccacaagattagatttgagaatgagcaaaaacaatattgttgacagtgaaattatggattgggaaaagagaaagagggcctaatctcatcctaatgttaagggtttggtatgacaaaagcacatgcaggcaacaaaggcagagagctcagctcaatcacttgtcaacttgagattgcttctctgcctcatcttcctttccaagtagtaatggtttgtttaccaatattctctttttttttaaaaaaaa

SEQ ID NO: 191296 - DNA, 2341 bp, Cannabis indica
acaataataatgcttatcaattcattcatatatattaatacatagatttaaagtggtataatatacatgatgtatgtatggcttcaaagcaaaccaatttagggcctaccatactttgctatttgtccattttataaaaacgaaaacaaaaataaacgatacatacaccttatcgttaattattggaaagcagtcaattcctcatcataacattcaatattaatagtaaagcagaaagaaattaacattaaagtattaaaaaaaaaagaaaaaaacggccacattgatgattaaaaacgtttctttcctttctttctttttgaaaaagtgaaagaaatcactaataaactgctaaaaagcaatgtctttaatttcaacattttttccgtcatgaaaacatcacatttgtcatcaccatccaactaaatagggaaaaagaaaaaggaaaataaaaaaaaacaataaattccccaaatttacaaaaaaaaaagattaaatttatttcaaaccctaaagcaagcagtaacatgatgaagatggtggtggttgtgatggtggtgataggatttttccctatcaatcaagccttgaacgtacctaaactcctccacgtggcaaggaatggtgatagttcccttttgatcaaatccatattcttcttcagcctccttcaacaattgcatgaacaaagggtgattaaagtacatcacaggcaccacaaatctctgttgttcttcattttgtgatcccactatgattgccaaacacccttttggaacgtctctgattacacccttatttttggtcccatggtggtgaccgttattgtgatgaataagctgaaataactttaggcttttttctccactacccatttttatttaatctacaatatttgtataagctatatatataaaagaggatctaatagagagtaactgattacagacctgggttttccaaaaacaagccggcctttacaagaaaacgaaagaaaaaggccaagtatcggaggctcccatggcttgcttggttaaagttagtgaagaagaaaacctcagggacattggtacgttagtcgtcatgatgatacgaaacgcataccaatataccgaaccgaaccaaggaacaaattttggttatatagccacacagagagagagagagagagagagagagagagatttataataagaagaggcctagatatatagtgtatataactagggtttttcttgttttgtacacaactagatatcttaatgacttttgatcatcaccgttgattataaatcaaaaaaacaagcttagtaaggaggttttgtgtacgtgtgtaaaagttggtgtttatagctttgaacacaataagcggtttgtttggagagaaaagaaaccatatctttttgtaaataaatgaggctttatcgcattgtgggagtgggtttgttcagtgaaggtaaattattaggaggtgaaaatgtgttggacacgtgtacggtgattggagagggggattggacacgtggatgaatttgggtttttggatctttatatgtaaagatttagccgacagctgaggtgtcgtgtatataagaggagaaaattcttgggacaaccaataacaggtctcgaacatgtccatgtggatgtgaaggtatcaacctcaattttataccttatatacgtgtccatagacacacattctcctacgaaaactattcaaggtactaatatcgtctttttattgtggtttgcatttttatcatttattgttattattatattattttattgctatctacattaatcaattctaaaataaaaacggccaaattattaagaaaaaatataatttgtaagcttaatagtagtaataacaaaaaattagagaaaatctactcaggtagtcggccaatttattttattttaatatgaaagattccttgaaaagattacaaatctgccaaaatttaaacaaaccaaccgaattaggatagtccggtaaccatgtttacagccaattaagccttaaaaagagctaaagttaatcttttcatttttgccagccttttataattagttactactagtatgttatttttgtcaggttcattaatacaaatagttgtaaattagaacataaatgtagcagctaattttgggtctatttaaaccatagattaaaattaacttcccatatatatgcttaattaaagaaatatttgccaaataattatgccataaaattagttttcatagtgtattatttttttccttattgttatccatatagggaaataacctatttagaaaaataagccaattaattataatttttaag

SEQ ID NO: 191297 - DNA, 1759 bp, Cannabis indica
atcttttatttttttaatttactagttagctaatgataatttcaaccaacctgtaatgctagtctacaagtacttttttttgaaacatgtctacaagtacttaaacactaccttggacattcatgatttttaagtactataagtatttaaaaatcataaaagtttaaggtggtgttgctgacatttattagtagtattcttttgtgatctgtgcagttcaataaaatggtattaaggttgagggagagctctgtcttggttattgtcttaatttaattttttgatagatacttaattacatttattatgttgattaattatagaaaatatgaatattagtaaatacatatacataatagagtttatatattactcaaaccccaaacaagagtgtaattagcaatgtgggagtctagagaaaacccacatcaaaatattttattcaagaaaataacccacatcagatgtgttgaatagaattgaataataatcaaagactcaatcactcactcaggacaaaggatgagttgcagtgctgcaatatagagcaatttaatcataaaaaaagttgaaaacaaaaagtttgatgttggaaaaaaacaaaatattagcttagtgatgtgcaatgtgttgtgctgtttccatactaaaacagttgattcaataacaattccatgtctcatgcctttctcttcctcaataattgctaccttctaaagagtgaaaactaactgagaatgaaaatgaatgtttgaaactaaatatttgaaagaatatacaaattctttactactcagtaattacaaaatattttaaagaaacatgttcatataaacctttctcaccctgttgagctgtataagcttgtctggttgagaaatatgatgatgacatgtcaacttaactcaaccctcttaatgtcctattattattgataaaagaattaatgaagatatataagaaactcacaagactaacaggctatcatgtgagtaatttaaataggaaaacaggacaacagagcttcagcttcttttagttttagccaacatcattattcatcacccaaatcaaagaagaaaatcttggaagaaaacatgtaatataataataaaagattgaatagaatgagttaccttccttggactctgatttagtctctcaactctaacccccttaatgtcaagttgcagagattacaaccaaaaaaaagaagcaaatatgtcttcaaaattgtagatataaaacaaaacagaaaagtcctatttgtttttttttttttttttttgaaataagtcctattgttgatatatataaatgcagctttgctttatattacagaagctaattaaataaatacattatgagtggtattgagtaagagtagtctttccaaaacaaatacaatattaatttgtcctcatacaaacaccaactataaagaatgaggaaaacaagagtcaaaaggcataacacaacacaacacaacacactgacactgcactagcctttcaaaaatacccaaaactttgcatttaaatgcttaacatatcatcccaccaatgaatgagcacacattatttgttgatccccttatagaagccaatgaatgagtacgacattctcagctaccacatttctctgctgccaacatatcatcccaccttcaacaaccaatcaacatgattattgtcaagtacttaattattcatttacaaaattaagtgtttcaaaagacatacaaagatgtaaaatcaca

SEQ ID NO: 191298 - DNA, 5084 bp, Cannabis indica
agaaaaaataaaaaaaaaaaaaaactaattttgaagtgtaaaaatgaaaaaattctttttttataagttgtaattatttaagacatcttgtaataaatttcaaaaaatttaacatgctaaaaataaaattcaatctattgcacacgtaacctttttattttcaatggggtgaaataaattattttctataataataataataataataataataataataataaagtgagaactgctgaatttgtgtttaaattttggattttgttcactatttagtaaaagtacgatgaaacccacacctttaattaactactataaataaaataacaataattataaaacattggacataaattaaatgttaaaaaggatcacccagtataatttcccaaaaatctcaatcattaactgagcaaactgatgtttcaaaaaacaaattaactactcacactcacatctatactattactaatactagtttgttcatccttaactcctatcactcaaaaataattttagaccataaaatgatattatcattataatactaataatagtacttgttgtttgttgatattcatatataatagaccatgcaatttcatcttcaccatcatcaacctgcatgaaattgaattgtaacagtattaaaataaagggattcattgattcaaatttcaatttgtaaattgcatttttatacacatcatcatattatatattcaaatatctcattcataccaccaatcaatcattcacatataggcagaggaagaagaaataataacgtgccaaaacccttgagaattgataaaaacaaaatgaagttggctaggcaagtatgaagtaatgtgaaatctaccaagtataaaaacaaagtaattgaagcactaaaacaaagccacatgggaaaaataccaaatttcttctatggttacaacaagtgcaataccgattcttcttcttaatcgagatcttcgtgtctaggctctgatgatccagtgttctggtttcctcggtttcccgagtttgatccgtcattggttccttcgttgttgttgttgttgtcgttgccagggttacttgtttcagcgttcgagccaaagagtctaaaaacccttggcaaattgatcgtaaatctgcgctctactgagcgtggtgttgtaggattttctccagtcgatgcaccgattccactgtcttcgcctgcagcagcagcagcagcagcattggtgctcccccccatggtgggggtattgaatatcccaggtgtttgattttgattcacgggggcagaggctgcttgagtcctctgttcgtattcggggtcgtcagtgggcaactcgtaacgacaaacagggcaagagttatgcaactccaaccatgggagaatgcaatctgaatgataaatgtgtttgcagggtatttgttttgcctcttcaccgagctcgaatgtatccttgcacacagcacattgtgaattgtctgaagccaacatttcttctgtaatctttatattggggagtgcttccactgcagattttgatgctggaggtgtcccgtaacgattggggtcgttttctgcaagttgctggatcaattgttcaagcccagggccgaaaaagtagtcaccgagattaagattggtcgggacacggaaaccagttgagtccccagggttgccatcaatcacaaactgaacattggcaccattggctcttagtgtttgtaggtagttttgaagaaacaaaaatgggttgaaagcttcgggatcatgaaactgagaaccttgtgttggcgcaccacccaagagggctgagagatcgtcaacgatggtaccaccagcaccaccactacgaccaccaccaggaccagaggcagatcctgcggagaacataatgggaaagccactagcactaaaggatggtgcatcgggtgaaaaggagaaaaagggattaaagtttggactgggcatagggttttcaacttcttcaaggaagccaccaccgcattcagtacaaactatttccgaagaggggtctaggcttactgtgcgattgcattgatggcaaaaataaagttggggtgcattggcaccaccaccacctgcagagaagccgcccgacgatgacatgaaggttagaatggggaaaagaccgggcagaccaaatgtagaggttttatgccttctaaaccaatatcctttgatctttctttgaaagtatcagatgcctttcgtttaatttgtatgtgagccaaatcaacctttcttcacctgcaaaatagaatacaacaatattggtaaagaaacaccaaaatgctcgtcatttttctaggacctgaagcaatcaatacattagcagacaccttaccaaaaaagttagaaaaaaatgcatcagcagactatatacaaataagtaacacaactacttacagagcagtaatttcatacgagagaaaatccacattatctattgtgtacaaatctaaggagtagagtacccctagcctaaatcctacattaggcaaactggccaaccaaactaaaagtgacccagttgactttttttaccatcctttctaattcaaagttttctaacttacctattgtttagctccttattttgttagttctatatttgctaatttctagaatgatctttttttattattattttagtaaatctacttgtttcccatttaattagtttcgtatttctatacaaagattgtaaaagttgtacacagtattctctgatcctgaacgatatttatgagttttagggtctcctgcaattcctctcattggtttcacttcaaaaacagactttgatgcaccacaatttgtgctccaactttctaatttaatttaaaggatgtcaataatcataaaacaataactaaattgcaaaaattggtctcaagaaaatcataacaagaaaaatatggtcagtattacagagtgcgaaacaaaatttaataacccaaatcaaatgcacgtttaaaaccataagaaagtaacaactaatttcaatggatttattttattttttcacttaataaaagagaaaaaaaagagcaagatatataaaagatgaagaacaagtacataggcttaattatttgtttaagttacttgttcttcatcttttatatatatttactcacatctatatatataaaagatgaagaacaagtaactcaaacaaataattaagcctatgtaattctacaaatttaaacttattcaaactttaattagataaatcctagtaacaatacagcatcattattcagatgaataaataataaacatgatacaaaattctaataatttaataaatcataaatgtatgacaatgctcctgattatttatttcttatttagcatcaacaagagaaaatgtaggcaaactatatatacgagtcccatgaaaatcttacaataggaattttgacgcaatgctttaactcagcatttggcttcacaatcaatacagtagctagaattttcatttcatattcttaaatccttaaggctatgtttggaagttggatttcggtggggaaagaaagaggtaaggaaattgaaaacaattgattcgataaataatgaaaaattgattttttttccacttttttttttccttacatttttctttctatgccaaaatccaacttccaaacataaaatccaccaaatcttctcacttcgtatgacattgtgccccaaaaaacagattgaatggcaaaaacagaaaaaaaaaatattttcttattcacacaaaattatcaaatatatctatatgtatatgaaaacaatgagatgaaaatgaacacacctctcgattccatcataaattgatgataattctatttcatatcaatgggaaaactgtacagtttacgcaatatgtacacacatatacaaatcgatactcctgcaatacaaatacatctagaaaattgaacattaaaggttactttctcatcatggaatcaaacaataaaaagaaggaaatgggaaaaaacagagctagggttgggaaaagcagcgataaaattcaaatctataaatacctaagaacctttacaatattacaaataacgaaattgcgcttgataagaaagagtatcaccgattccgccatgagcatttggattagtgattcatttcgataataactcagaaatcatacacagcgaaaaaaaacaaaaacaaaaacaaaagataagatatataatatatatatacatgagagagagagagagagagagagtaggagatgaacctgagcttaacggtcgccggagatgcaccgaagatcgtcggtgcagccgcagaaaataataataattataaaaaaaaataaagaaagagaaagaaagaaagaaagagagagagagagaaagagagagagaggattgctttggtttggtgggtgaaggaatgaaacgatagctgcctgcctcttcaagaaatgatacacgtggaacaatatcagtcgttggattggatacgattgaaaaatgaaatgcatcgacggtctcagattcatagttgctaaacacctttaataaaaataatgaaagcttattgttattattactttttatataaataagaaaaagtttgatttgttttaatttaatgaaaaattatcattctctattttttttaattcaaattttgttatatgattgtgtaatttgtagttgtagtagatatttttatttatttttaaaaaatttaaaataatttatagtattgaatattttaattttgttttgttattagaaatcatcaaaaataaatgagatgcttacttataattataatgtagatcttagtataaaaaaatgggttataatttattcaattttaaaaactaaaaagtataaataattttattggtaaggacaaaaatagtattaagcacgttataaagaagagatggaaaatcttttatttaaactagctcactttttaccttaagtgtgtgcacaactaatttatgtgagtcatattagctaaataatttacatgaataagagacaatttaagaaaattgtatagtaaaact

SEQ ID NO: 191299 - DNA, 1647 bp, Cannabis indica
gaccctcagggtttgtgaagatcataatgcttttgttgaaatacaatgggttatcttcaaggacccgtcgtcggtcaccttcacattgaaaggtagcaaggaagaggccagagtggtattccaatatctcaactggaaaatgaagggtccaagcttcacgtatttctttttcgatccagtgaggtttggaagataattttggggtaaggattttgaaaataagacaataagaggcagtgaaatctctagagtggtgagagatgtgatcgaagtcatatatgaagtgttctttgtcagttaggttaagggtgtttggtgagtttttggatgacaaagccataataggatactgagtgttggggtagttgagaaggtggggtggtttgatggagtaaataataaaccagacctttaaatagcaaaaaaaaaaaaaaaaaacagaaggagaatagaatacctggagatgaaaagggcgggagatccataggccagttgttgggatttccatcggggatgggcagagaatcccctaatgggggcggagacggagctggaaatcctttaattaaaaaaataaagtttatactaaaaattcaaatatataaaaattaaaatattgcacattaattattatttaataaattaattattattcaaaactacacaacttaaaattcataaaaatgatactaacatactaaaaaatacaacataaattataaatataatattattagaactatgaaatgaaatactaaacgtgttcccgtcgatgcagggagtatcatccacgtcctcatctcgtttaacactcgagaatgaaaaataatctcggtccccgccccgttctctgtttagacaggaaatctccacccattaagggcgggtccctgtagggtcgtaacgccaagggaaaatgtgtatccctatatatagtacaaattacttaagtttaagtagtgtcgtttccctcttaaaataatttcttattttgagtagaaaatccccaaattcaaccctaaagtgcaagagctctcaaaacagatgaagaaagttagaaaatttcattagagattcatggcatcagccatgatcgaatgttaaatacaatatagataacctaatcaccaaattttactagtccctacaaacctgacatacttagcaagattgtgggcaacaacattaattgtcctagaataatgaaaaaaactcacattatgaaagagagtcaaattacaataaatatctcgaagaacttataaatctaacgacgaatctaaaaaagcattattgttaaatattattaactttattcaaacaattagtttcacaatgaacatttttcaaactaaaaagatgatattagatttttacatgatgaagagcaagaaaccatatgagcatataaataaccccatgactaatagctaatcatgtgtcaaatagctgagccataaacatcatagataaccaatgcccataccaaaaatctccttatacatctaaaaccccatcatgtgtaacaattaatacaataaataaattaatgcaaataataattagaatttcttaatattgctgcagtattatcttatccggaataaaacgatcgataataatgaagagatattatatataatatat

SEQ ID NO: 191300 - DNA, 1707 bp, Cannabis indica
cgtagttttttaattcactattcatactctacatttatagaatattattcattactctaaacatattttatcaattgttactaaattttaattttactttttatatgaggatatatgtgtaaatattaatattatatgtttgaaataaataaatatattaaaatttggagaaaaaaaaaagttttaccgattaaaaaaactaatatatggtgtattataaaagtttaaaataaaattatcaaataaaattgaatgatatattttaaaaaatagagaaaataagttgtcgaaagtgctcaaagacataatatataaaagaccaacattagagttgttttttttctataaatttgaagtatatatttcactttcccataaagattaatttgttgagttgtaactgatactatatatttctatctagacccgatgatcaaaaatttaagccttatatgtaccctatttaagacaatatcagagtctgtactgacaaattaaaaaaaaaaattacagttttgtaaatattggatacttatggcgctaaaaataaacattaagtttatgccacttacaaacataaaactttggatacttatgctaatatttaccctaatttgtttattaatgtatataatcaaacaaaaaataatttagaaagtgaaaagatttggagataacaatagcaagaaaaaactgatttgagttcaaaaatgaataactgaattaactaacatgttgtttttaacccaatatagcttcattaatccagctcccaaccaaataaaaatttgttctatatattaattagtattttagaatgttaaaaaaaaaaaactcagctcatcactccaatttgctgccgaaaccgaaaaataccgatttacgcattcgaagtgaagcgagatcatcttaatcttatcttcctaataacctgtcagattacttctaacaaaatcatgtgaaaactctcaaagctcgtcgtggttttgtggttgttctcggttcatcaaatctagtttttgttgtagttcctacgaattcaacaccaatacaaaaatcccaatgagaaagtaaataattagggaccgattagaaagcgaaacacattatcaaagtttagtaccttaagtcttgactcgacacaaacagccggtgtcgatagcaatgctacatatctagcccatgaccaaaaccaaacaaaatattaagaaggaaagattgaaaagagagaaaatgaagatttgggtaagagtttatcaagagagttcttactcgcatcgacttggttcatctacgtcggtaacctcgtttttcaatccacatctaagtctaacctgaaggacaaacaaaccatgcatatgagattaaaatcaatacaaaagttttgggcataactaatctgaaaagatgagaataagtaccttcaaacttctatctggtccattccaacacttatctccatttgaaaagatcatcattctgtacgagtcttcgaatttgtcccattgcctagttccacagaaaatatgaatcaatcacaataaatgaagcatggataatatcatcaatgtaatcgatattgaaaaactataaaagtcaagactagtcatcttctaaaatgtttttactaaatcaaaagagaggatttcagccaaacatatatacgaacatgaatatccaaggagcattgctattaggtaccgtggt

SEQ ID NO: 191301 - DNA, 2821 bp, Cannabis indica
ttaagatcaacattgatgctgcaatatttgaaattgaggctcggtcaggcatgggagttgttgcccgagatgataagggaacgtttctggaaggcttcacgaagatttacagtgaaaagttggacccaccacttgctgagacattaagcatgagggaggctttgagttggctcatgaataaaaactggcaacaagtctttcttgaaaccgactgtcttactgtagtcaaagcaattcgcagtcatgtagaaatgttatcttgttttggtattgtaattcgtgactgtagatgtttactgaaagagttaaaaaaagtctcgttatgttttgtaaaacggttagccaatatggtagttcatagtcttgctagagcttctatttgttaccttgatcgtatgttcagtttagagaatgtctcagctgttgtgctacctcatttggtagctaatcttgaaggttaataaagttgattttcctttcaaaaaaactataaattcaaatagcccctaacctgtagataagggaatttattttcataaaaaaatgttagaaaattactataaatccaattgaagagattgacaattaattatcttatgctatttgcatttttcagttaagatatacttgataagtaaattattatgctcgtaaatgttgtaattataattgctttgattactcctactgataagcttagactatcagggctcgtttagaacgccgtattatattgtaaaaactagattgaagtgcaagatgactttaattcaaaaataggataatttatttatttaacttcatatcttaattgaagtagacttttaattattatttttttacaaacaaaaatatacattagagtaaatttccaaaagtatagcttcaaattagtaccgtatctcaatttttttttttttccatgattacatggtaaacaaaaaatgttgaaaatttttatagaaaaaaaaaataaaaaacttattaagttggagctgcacttaaaaaaaagttgcctacgtaccctattaagtaatagggatcaagctccacgtagttctttagacctgcaaaataattaaattagtaacaaatcatgaagacaaataaacatgtaaaaatggaaagaaagtaattaaaaacaaaaagttatagaacattataacagacgtaattcttgcaaatatcatgctatattataatttataaaggttaaagtcaaataaatgcactcgaataaataagacatccatatatttatatcattcctttcccgattttaatttgtgaaatataaacataaagaatttataataaattttctttcagttaaaataatttaattaactaaaataataaaataaaaaatataattatctacaaactttgaactgtttagttatgcatagaaatatttaattgaattatattgttcagataaattgttgtaaaagattatatatggtaataaatttgaaggtaatgtttagaacctatctttttaaaaagatttcctattaacccataaatcttatttccatagtaaaaaaaaagccataccaaacagcccccgtgtcttagtctattaaaatgtttaaactgtgatgcaaaatacaaattatatattttatccttcaaaatataaatataaatacattcaactttaacaaagataaatctctcattaatgtaattgtaaaacatataatattctgaaataatctaatcaataatttttagaataaccgaacacataagataaaatccaaatccaatcacttaagataaagttcaagcaaaaaacaaaatgagttgattaaactttgtaaatattacaatgtatataacaggacaaatttcattaacttatataaagataaagtgtcatgggcagcaaatggccatatatatatccaaaactgataacaaaactaggatacatcagcacaaattagttaaaaagcacttgatgaggagtaagattttattataccagatttgagaactacgtctctttttgtaccaagccatctccctcttttatgtgttgtattttttctaatgttaataggtactgtaattatgttgcccataatgtggttaagtaggccttttcccaccaactgtttggcaattccaatctcctctattttggaaaatctattctgtaataaccgcgaggtctaactgttttatttgattaatgactattcacgcttattttcacaaaaaaaaaaatttgagcaacacaaacattcagaagaagagattagaacactagataacccaaacaaatctgtacttaacacataattccaaaccatgccagtggaaacgacagtggggagtgaaaacaccaatgcagagaagacagcatgaatcgaaacccacaactattaagacagaatgcaaactgcagcatgaagataaataataaaatattgaagctatgtcagtaaatactataagccaagttttaagtaaaccttcactaaaatggtactaaaaaaagaaggctgcaggcctcaaacatttaacacatcttctgaacctgaaaatttattgagcacaacaaagcacaaacaatacaagtcattcaaaggaaatactagaacaagataactcccttctgaggtgccaaggtatatatgttctgataggaattattgaagcaagtttagaacttaaaattattgaacaaatgcatatgacagctaagatagtcttgaaccatttcccatcatctacaaagatagaccaaaatccaaacaatgtagcacgtaacacgttgagccaacggagatataaaatgtaaggttga

SEQ ID NO: 191302 - DNA, 2721 bp, Cannabis indica
tctctctctcttcagaattgatgatcatagagaaaagataagaggagtgctaaaaggaaggcttcctctagacaaggacttgaaaagggaaataactcaagctgtgaggttgttcaaatctctttatagttttagtatctattagaattttcacttgaatttaaatttggcctttatgctcattgagaaagtcatactacattgctgggcatgcatgtcaactccttatatattgtatctatttgtatattggtttattataatatcccaagtccagattaacaatgctaattttgttattatttgcatcaagttgtgtggtggattataggttgtgctttattttattccacttttggcaaacttctctcgggttggctgatactgttttttccacagggctgttaccatggagtttgatgatttgaagaataaatctcatgaggcagaacaagaggtgaaaatgttgcagacgaaaatacaagaagataataataatatctccaaacttcgtaaagatatggaatgtaagtttgttgatgctgtaaaaagttttatctttggagtctgttgcgacaaacaatctaattgcccgaactatatatatagcaacatctttgttctataggcatctgatactgatctgtttaaatatggaaaattagtatctttgtttggactaggaagaactatggaaaattagttctctactcgtgtataaattttcaccactaactagtctagtcaaactgtttttattggcttttttcctattttgtgcttgctaataatagtaatatacttaatacattatacgattttttcgcagctaggaaaagatacatcgaatccaaaatcaaggccttggatcagcaatattctaccattgattcttatctcaaagccttggagacagctaaggagaaaagggatgtccagaaaaggttctattttaacttaggctgataacttgtgagaatctttacgaagatgtacacatctctgtacttctgatataaaggtgttaataataatatgatatctttctcattgtagcaaatacaacattgctgatggtatgcggcaaatgtttgatccttttgagagagttgcacgcgctcatcatgtttgcccttgctgcgagcgttcattctctgcagaggaagaagacgagtttgttaaaaaggttggcattttttgatattttaaactttaagggctttctgcacatgtaatagtttactttctttccagttttaagggttgcaataaatacgcttaactcatgtgaaaatagcatttagccatgtataatccatgattttttttatatttcattcttaactggctctgtttttttctgagttgcagcaaagagtgaaggcttctacttcagctgagcatatgaaagtgctggcggttgagtcatcaaatgctgactctctttttcagcagttggataagcttcggttggcttatgaagaatatattaaaatgggcaaggagacaattccaaatgcagaaagagaattaaaaaagcattctgaagagttggatcagaagtctcaagcccttgatgatgtaaacatcaactcatttaactctataattacttctacaccgtgcataagagaattacaatttttttaatcgtcgtgactactcttgttgctttcatgttttgattcaagcagagttgagaaagacaattcgctcttgtggtttttgagtgaaacagaacttactaagttttcttttttactttataagagagaccacaccttagaatcgaatttccctttttcctaacatctcttccttttatagtattctactctataaagtttcttagatcaggtatttgtccatgagaaaagtatctgagacattctttactgaccatctaaattgctaatgataatttactcatgtgatttgatctgaaacataatttgaacctgatttttcagttaatcttttcttcctttatgtgcacttagcatggtgaaattaaactcttgttgataactgcaagtttctttttcagctgttagctgttttagctcaaataaaatctgagaaagattcaatcgatgttttggttcaacccattgaagctgctgatcggctattccaagaaattcaagcttgtcagaaacaagttgatgacttagagtataaacttagcttcggagggcaaggagtaaaatccttggaagatattcagtcggagctaaatactttacagattacaaagtatgacatttagtttttccacctgttggtaattcggtttagtcataaatatattcgatcacttagcaaaaaaaacatttacccattgatatatatggtttatacttactgtggcaacagggatagtttgcataatgaattggagaagctaagggatgaccaaaggtacatggaaaaggatatgtcaaacataaaagatcgattgcatgcactatgtgcggagaaagtcgaagcagataatgtatttcgagatgtgagaaaagcagaagaagagttggagcgtttggttgaagagaaaagtcaagttgaacttgatgaaaaggtattactttaggccttgaaatttgttcatttattaattttaatataaatgttgtgaagcattgctctctctactcagagtaatgaaacttcaagtttatatcccagtgcccatacgtatcgggtaactttctctaataaaaa

SEQ ID NO: 191303 - DNA, 3199 bp, Cannabis indica
tttttataaaaaccccaatctatttaaagagcattccatccaaagaccaaaagaaaaaaaaaataataataataataaaaataaaaaaaataaataaaaaacctattgaatttgaaaggggggctttgttttagtacgggtggaatctgaaggagccggagccatcgaggacagtgaccaactcaactcacagtattcacactaaaaatctaaatcaaaataaaattgttgttcttgttaggataccttcctttagggcgaacaatcttttcaataatcttccataatccattcatacatacatgacgacgtcccttaccgagcttcacgatgacattgtccgaagcatggccattggagccgttttcccagattttgtaagctctacctctcgaaatctttctttaattttttctttttcggttgtcaggtttgcatggatttagggtttaggttttttcatttttaaaagcaaattcacctaaatcgaccaaaattttttagctgttcgtattcttatgatctatgctatataattcacattcacaccctctttttgagttttaagattgattttaattaaatttcagggtggaaaggttaactgtatcgattttcatcgaaaagatgatatactagtcactactagtgaggatgattcagtgcgattatatgatattttaaatgccaagtgagtgctgcttgctttgctataatgttatatgcatcccttagcaaaattgacttcggtctactttcgataattctttataaaatttataagaaaaattagtgtctctcataggctgcacatgagccagtccagcacttctgtagctgggttgcttgagtaaccaagaaatcggatttagtagctttctcataaagaactcttattgaaaagctgaagcaaaaccccaatcaaacagtacttatatataaatttgtaacttttttaaatggttatatataacccaactcttagcatggtttggctggcttcagttacaacatttaaacttcctatatcaaatttgttttttaaagttattcactcggtcaagaaaacatatcaaattaaaatttaaaattctatataaaattcctatcaaatttgaaaacatgatcaaatttaaacttacaattaaagaattcaagtattagtaattaatgtttaacaacactaaatcttattaatccaaacataaacatgtcttaaaattattataatcatctacaataccaacattaataataatttaaacaaactaaaagtttgaattcatcgagaagctttttaggttataagccatttgggccatggcttgttcgggtctggttgctcgacctatttttccagattgagtagggttgggtggcggggttggccatttatgtgcagcccttactttgatcaaattgtttagaaaactagttaaattttcagactaaagccattttcttgttgaatatttaacttgatgtcatttgttaaagaattatcaaaattaggccaaagtacaaaataattttaaaaaagagctattttgttaattatttcatgatatataactatcatattttggaaatttttgtgtgtatcaaattttgaattcttataaagatcttgcttaaagtgtgaatgctaacttgcatgattgttaacaattgaaggttgcttaagaccacatatcataagaaacatggggctgatcgaatatgctttacccatcacccaagttctgttatatgttcctcctcgagatataatttgaattctaatggaggtttgattcttgttcattgttaatagttttgatgagtctagtgcctacatgtgagaactatggtaactgtttgattttgcagaatccctccggtatctctcaatgtatgataaccgatgtctacgctattttaaggggcacaaagagaggttaggttcttatcttttgctacttttatgacaaacaaaatgatttgagctgaattttttttttcctttgaaagagtttgattcttgtcttttcatttatgaaaagattgaggctctagaaatcttttctcttggtttaaatatgtttaaaaatgatcgaaattaaagacttgaaaatagcctctagcaagcgtgggacaaacaagatctttcttgtcgattttctcaaatagttgatgagataagcatatatgttgtcgatcaatttctggatttcaacgttttaaattttagttgcaaaccctgtgttaatcaagacctctctgtctcccttttatgcattctttttatgatatgttcttcctttcaaaatctagagctgctctcaaatacaacagtcatcaattcatctgacaaaatgttgcatacatttaatgtttttagtctttttgggggtatgctgatcttgtttatttaattgttgctgtagaatcgtgtccctctgcatgtctccagttaatgacagcttcatgtctggctcactggatcacagcgtcagaatatgggatcttcgtgtaaatgcttgccaggtctgtttcttatattatacatgtatctacttctttaaattacaaagaaggtaatccatccatacaagagtaggaagaaagcactggtttctaaataaagggcatgaatttttgatatgcccatttagagtcatgcaactttttaatcttgtcttttttttgttattatcctgttgttgactgtagttgcttgtaattttcagggaatattacggctgcgtggtagaccgacggttgcttacgaccaacaaggtctggtgtttgccgtggcaatggaagggggtgctataaaattgtttgactcacgttcttatgacaaggttgatagctatgtagttttctcttagtcactttttcatctttcatctcatggatctaacaaatttccatctttagggtccctttgatacattcctagttggtggagatacagctgaggtctttgatattaaatttagtaatgatggcaaatcaatgctcttgacgacaacagacaacaacatctatgttcttgatgcgtatggaggagagaaggtaagtttctgtatgcacatatttgttaaaatgttcgactgggtgtctcacagaaaaatttaagaaggaaagaaaaacagttcattctggaattacacagattcggttctattgcagttatgattttaataacttgaat

SEQ ID NO: 191304 - DNA, 1853 bp, Cannabis indica
gcaagttatttaattacctaaaaatgtgtacaaacggtttgcctaaaccaaatacctagactgacaaaataaaaacttgtgaaatacaagtgacctagagtcaaaagtcttctcgatcacttggggggcaactatacacccgtacaagaattggtaaacaacaagcttaaagcaaaaaagaaaaaataaacatttagacttaagagaaaaaattcatattacaataacaaagcaagataagtttgggattaaaggctatccggctagctagttgtcttaaataaaatttaaatactttccaagtttaaaagccacttggttggccatattgtacttaaaaataggcccgtaggccgaactgataaaaaatttttaaaatatcaaaaagtaggagttcaaggctttttgtatgggtcagacacgtcttcagtaacatgagtctcattttcttgaatggtgaaagggttgttaccaaccatctcagcttcttccttggctttttgtgcatcacagaaactaagataatcatctttgttctctttgagataatcaaagtttgcctctgggtttgccttctgtaactcatgaaagacgtccaaggcagctaattcaaagcttttgacctccttttgaagttcctcccgttccgcattaaaagttaactgtttagagtcaatagtttcctgcaaggtcttcttctcctcaatcaggttcatttaccttggtttctaaattttggagaagagtgtagaggttttccctctcatatttgagagcattcacttctttggacaatgcatcaatgtccgcctcaagctgagttatggacgatatatctttaatctctttgcttaagtcttgatagagcttgttagcagcaagaatttgcttgttaacctcacccaattgaagaatcttttgcttggtctccttcttggcgtcttccaatcctatcctcagtgagttggtggtagttgaaaattttaaagctacagacttagcacgagagtaagtgtaggccatattcaaattaagttgaacgataaaacaagattaaaacatgtacgacataaagcctatatggaaaagtagaaggaatagtacttactcgggtggcttccttcagcattctacccatgagtagctccataaaaatatcctctgtcatagccagctgattgtttaccttaggcaacactcggtcctagtagaacgtaagcatctccttactcttcttattcttcagattcaatatgagaggagtggccagtgtctttggcatcccggacccttctatgtttgccctttgaaacctttggttagagtggcagaagcttgagacttggcattctttttggccaagggagcaggatcgaggaccacaacctcgagaccatctaaggaggcaacatctagattcctcgtagttgtcccttagggagtcttagtgttcagggcaatgatttttggcattatatcgtcatctttgggttttgatctgagacttctggccaaaggcatcacccaacctcttcttaagagcacatagtagcctctatgacatgacttcataaaaagagagaatgtttgttagaaaacataatcaagcaaagacaaacaaggctaagtaaatatggtctaccttgcacgtgtacggaagcaccctccaaaataagcaaagaaggagcatcctaatcagaagagtcctcttcttcttcctcaaccacaacaacttttcccattccttccacctagacaaaagggtgagtaggctcttcacgaccatctttgatactaatgggccactcatcaagtacttggtcaccttagggagccttctgttgggttttatg

SEQ ID NO: 191305 - DNA, 605 bp, Cannabis indica
acctcgagtaactaatccctgaaccaaacgaactcccacagaggaataccaaagtcaaaaccagccaatcccacaaccaagcgaaaagagagaccaaaagacaaaagacaaaaagaaaacaccatcaatcccactaaccttcaaaaagagaccaaatgacaaaaggaacacacaagtcaacacgatggggattggaaatggacacacagggatcagcaaaagtgagaaaagaaagaaagttggaatctgagagagaatagtagaagacacatctctcatttggttgaaagtcccagagttatatttggttaatgtaaaaaagagtaattttcaacttatcccaattttctctacctaatcaattaccacttctaaaccaatgcataattttatttagggatatttacaaaaatgtagaaaaataaataaaagttttgatatatagctgtaaagtattctttccgagcctccaactctacccttccaacccataggaatctggcttttaggaaaattatacaatctccagcctgtgatcgctgtggaaaccatgttgaatctgtttctcatgctctcttcttttgcaagagtgttcgaagagtctg

SEQ ID NO: 191306 - DNA, 701 bp, Cannabis indica
ttcggtagccactgaaaatagctgaaaagggaaaaagaaaacctctaaaacatattcactatacaataagataagaaataaaacgaagaatttatcttctttttcttttttcttttaaaacaaaattgccttgtattaatttaacatagaaatacaagggtgtggaaaatccacaaattagaatatcatacaaaaccactaaccattatctcctgccaattcgaggaagcactgaagctccaaagccttcctataatacatcatccctctcactggaagaaacaccagcgattctaactttagattctgtaagtgattagtattaaagagattccaaatcaaaccattatccggacctgttctataaagtgtttgccctctgtaagacacccattgacgaattaagtctgacttatccttctcaatatttttgatccgagccgtgaaattttgccattatctaaaaaaaaataattcaaatggttgaaatgtgttagaacttttccccataacaacaagaataatgcaacatgcagtgagaccaaaactcaccaggatatattttctgcaggtaaaacaaaattgatatcccatcctcattttccttgttaagatcatcatcggtataaaggacatcttctttgtagtacggagtaagaacactaattcagaaaaggcacaaatgtttaatttaaggaaaa

SEQ ID NO: 191307 - DNA, 2077 bp, Cannabis indica
ttgtaagttagggaagttagtttggttagttgctgactgtggtttatgtaatacaagttgccttgttttataacagttttctactatgctttcttgtattgaactcgagctgtatataaaactcattagcttgtaccccttttgatcataatgaataatacaatttttttggttactctttcttctctgttttgtaataatgtatcttttctaagtattaaactgtggctttgaatgtaggttttaaaaccatttaggctagctcaagtgattatagagagtatgggaaggtgcgcgtgtatggaagtcttgagtttgagttttaaattgtgcaatgtaatatatataaaggttttgataataaaaaaaatgtaaagtttagaagattatttatttatttatttcaaatagttgtgacaatggcgttgctcatagaggagctaatattattttatatgttgtaaagcattgctttgtagaatgggaaggtttcccttggatgccaatcctattatcattgtagattgggcaaattcttttgtaatttattcactgtaattaaatgaagtatttccctatttaaagaaaaacataattttcatgaatatttgatatttgttttcttaagtggtgaatattaaatatttagagagcatattttccttataaaaatgccctaaagcaaaataaaaatattgagatctttttagttctctagataaagtatttcaaattcaaaccatgtatttatttaacagtaagcaatggcatgttttttaagaactttttgctcttcaaattatcattaaattttcctttcttagcaaaaaggaatatttataaactttgacaccataatctttttaccgatatatgttccattggagaatcaaagtttaaaagagctgccacagatcttgacaacaaattatccaactttaaaaatattggtttaattgaaaagaagaaaagaccttgtaataagattgagattccaaaatattttttgttagcaaattttgatttttcttttttaaaaatagttgcacctcactccaagtcaaataataaatgtttctttttcctcatttgaaatcaaatccatgggatgggagagagaaaaaccagcaatggtaaccccacaaaagcaaacgttatacgatttgtcttctcttgactatgactaataatacttatataataaataaatattgaaaaaattgtttgacaggacaagggacaagtggaagggataatcctctctgcaagatttgcaaacagaaagaaaatctcgcagatatattggatccttggaatctcagctttagacttttgctttaaatgcaaaagctttcacccattacagtttcatacccaaaaagaaagtaaaagatttcaagagaaaaagaaaagaacccttccactactataataaaacctctccataacccagagacttgagattacaccacacccatttcaccatttcagactttggacttggtttaagctttttctgcaactgggttttctttttcttctcagtttagaaatacccttttgagttttgaggctaaagagctcggttgagggatttcaatggcggccatggctagtgaaattctcagacgcagtttagcggaaagtgttaagatttctaatgggtctggctcaggggagcttcatgttcttgctgttgatgatagccttgtggaccgtaaagtcattgaacgactgctgaagatctcttcctgtaaaggtgagatattatcgattatcttttcttctttcattgaagataataatgttttaggctttgattatatacaaaataaaatgtggaagctgattggttttgaatttttatagtgactgctgtggaaagtggaacaagagctctgcaatatctgggattggatggcgagaagagctcagttggatttgatgtaagcaatactatagacctgtgtcttgttaaatcattacattaaatccgtttgatttctgggaaatgaaggaaaatagttcagtatatggctaaatgttctccaaagtataaggagaacaggcttttgct

SEQ ID NO: 191308 - DNA, 2135 bp, Cannabis indica
gatctctttaatgaatgagcaatactaaacatatatcttttttgcagaaaggtacagttacagccactgaagtttctgacgaagaagatcttgaagatatcgactttgatgatgatgaagattttgaaggtgattctctctatatgataatttttttgctctccttttgtataatataatagtataatcagatcaattatcttggttacattgaggtttatactcatttatcataaaaaattatctaatattgaagctatatttctctacttgttgtgatgaccagacgacgaagaagatatgcttgagcactacttggctgagaaatcggactcatcgacacattcatccaagagagccaactaaaagataaagcttgcttgtggagcgttattgactggcttgaaaaagatgtaccccttttcttggtatcatctttggttgtagtcatggtgatacatgtgtcaaaggctaaaagtgtaattgcaaaagtggggttaaggaaagcatgttgtaatttggataagctattaaacaattaaaaagtctttattttgcatgaggagaaatatacgaagagttttgtcatcagacttcagacatgtatatgtatctgccttccaagctttactttttgaaagatgtttcatttttgtgtttataaatcagaaatcagaaattttatcatggtcctaaactattcaaaatgaagttcattaatcattatacgtctgttttcactttctacaacactaaataatgttaacagagggtaaataaattacaacaaatgactaattttatttcaaatattttaagcagtctgacaagaatgcggtatgcgcatttacatctcaactgtactccatgaattttggagaacttacaatcttttataggctcactaaagtttacaactacacaattttcttgcattatgcgtatatttcagttctcttacccacaagctaaagctacccttttccacgcatagctattatgcttgcatgtgtgtattacagagggatttcctataacttccattataccattacctggtctgaacagacagacacatagatccccaaaccttttaaacacaattcccgcaatgttccgcagctggttgcttgcatcaatatctctcagttaacagaagcaatcttttgaagactaatcgggtcctctactacatatgcttgagctttttctatacacatccttgatcagtcatggcttgagcaacagttagaaaagccgcgatcacagctccgtgagccaatgccctggtgaaattgttggtgagttaagaggagaatagagcaatccaaagtgtgtatagaatgaattattggcttaaccacttgagactagctcaagtggccatatagaaggtattggggtgtgtgtgaggggttggtcatgggatcgaatcccaggtatgtaactcaaaaatgtaatataaagacgcttctatcagaaaaagaacgaattattggcttggctgcgtgctcgttatgcaaagtgcgagacgagtagaagagaaaaaaatacttactcaggactctctttctgatatccaaaatcggttgctgctttgagtgctctctggtatgtctgtttcattgcttcctggagatcgccaaacaaaatggaatcagaaatcataaaacaaataaaccacttcaagttccaatctgacagaaacactccaagtgggatttttggtgtataatcatgtttatttcaaaagctacacatcttgtcaatagaattttagagtcacctgcaacttagattcaaagtcctcaggtgaccagttcattgaattgcactcgtggtttaactcaagttctccagcaacaacctgcagccaagtagataaaacataactttatcactgagaaaataataggcaaagccaagagccatgtagacgaggaagagtatcacaaaaccctactatcttagctactccaaacactttaaggtcaatattctaaatcagacatcccatggagatagtgttccgcaagtcatagtccatgtttatccaatgtttataaaatagcagttcccgatatcaatgttcttataatgacggagcctgtactcactaaaaactatcttttttt

SEQ ID NO: 191309 - DNA, 1063 bp, Cannabis indica
ggaaaagtatattttaattaaatataaattaaaagtaaatttagttaattgaaaaataaaaaatatatttttcgacagcctaaccacaagtaatatgattaaaatttagaaaatttcatacactacaaccaatcacatatttagaaataatttcacttacaaaatttaaatttttgttttgaaaacacatttttaaaaaacacaatttttaaatacacaaaccaatcaaaaccctaaaagatagatgactattataatcctataaatacatagttataaacattcacatagtaaattgtatactaatcctttagttgtggttgcatactagatggtgatgactgcgtattgattggtggtagtgctgaagacgcttctgtctcacattatcttgaactatccagaaaactttaattaattaatgattttccacaccatttttcttcaacttgttcacttcctctttattaataaacctgaaaatgttaacaaactaaaacgtaaaattaggcaaaacaaaaataaaactaattaacaacactttgaaaacacactcaaaagtaacacaaattaaaacctaacaataacatccttccataaacgcctataaaaaccactctcagtcactcagagaggcttatgaatctcactcatcattcttacaattcattctgtcattctcttggtaattacttactaattttgtcctctctcatttgttgcccaaaaagtaagactgagcatcaatcaatttagtcagttttttttctatataaaaattcaaatttcaattttacgtttagattggtgcaatccgaaaaactaaacgactaatctagaaacctcctaaaaaccgaccattgtgaattgcggtttggttggtttaaactaccaaaactgaacttttttctgtgtaaaaaagaaaccaactttctcacaacacacatgtaaaaaatcaaagtaggaaaaaaataagttgtgattttcttattttctaacaaaaaaaaaaaaaaaaaaagaaataaataaataaagagaatgtataatagtgagacgaatatat

SEQ ID NO: 191310 - DNA, 1950 bp, Cannabis indica
ccctaagaaaatgatttataacaatatctaaagttttgagtttataaatggcataaactcaataatttttttagcgctataagtacaatatttgtaaaattatgtatatatattttttaattttgtcagtacacaccctgttattatttcaaacaagacacatataagacttagattctacatcattgagtttggacggaattgtatagataaattcaaaatgaagtctgtattgatactgaataaaaattacagttttataaatattgggtacttatgctgctaaaaaaatattaggtttatgccgcttagaccatctccaaagaaagatgtaaaaattatgttatttttgacacaaaaaggattgcctttactgacatccttccttgcttaggtcaagaatttgaaatccaccatagcctctcttgaaatggattaaatgcttggtctttttgaaggttagcttgatgtaggtggtgtcatttgtgtgatgggaatccttgaaatagttaccgatgacccaattaaagcaaactgaggtaaagaccccaatagcttacacatggtccccaggattgtcaaaatgaccgaatgggtgggaagggatatgcaccacgtggtagtagagatgttcttacaatctaaattttagatactatgacgctatttgccaaaaaatagcaactatgctacaaatataccacgtgttgtgtagtgtagtggcagtgattgcctttattggcatccttccttacttggggtcaataattcaaaacctaccacaacccctcctaaaatggattaaaggcttgacccttctaaagactagcttgctatatgtggtgtcatctctcggatgggaacccttgaagtagttaccattatccaattataaaatctccataactgacacgtgattcctgaaattgtcaaaataactgaaggaataagaaaagtatatgtaccacgtgatcccttttgtggataaaaaaaaagtaatttgcggtataaatacttaagtttaactcctagttgcaaataaatacttaaatttaattttttgactgtaataataacttagttataattctaaaatttctataggtacctagatgttaagtgttaagtaaactgtcacgtgacaattcttgattggtccaagtcattaaatttttattttttagaaaaattagtttaaatataatgacttaacatttaacagtgaagtacctataaaatttcagaaaatataactttaaagtattaaaattaaacttaaatatttatatcgtaaattaaaaaaaaaatataataataactatgccacaaatatttattttttctttataaaaaaatagagaatgttttgttttgtaagagaagaatattacaaagaaagaagctcaaaaccaagacgccgcttatgaatatcacatctctttaatggcctccttcttcttcttcttcttctctaacaaacttctttaatggcgattcatctttcttcttcttcttcttctcgcttctccaaattccgctccttttctactctacctggatttcaaccttttcattcatcttcctctcttaaggtcaattaataaatttcaacctttattgtcgtcaattatatagatttatgtgttaaatattagattgtaatgatgctgaattccccatcttttttcttttttagttttatgaatcaagcattcgacgacgtggtcgtggtggtggacgtttacgccgccggagaaatctggagttaagggtgtttaatgatgtacgtgagggttttattttacagtttttgatgatttgatatgcaaaagtcttacgttttttttatcggttatgttgttttgatgatcttgttatttctcaggtattcgtttgacatacctgttcttgatgattggggtgacagtgcgattactcatgggtatatac

SEQ ID NO: 191311 - DNA, 1072 bp, Cannabis indica
ggacgcaacggtagacagagagaagagtatcatgttcgatttgatcaacgtaattgcaactcggatgagtcaaatttaccggaaatgccactgtcttttcaaccctaacgtaacgcaagtggggtgagggcaattttggtaactcgagagtcaattttgtggaaattgtggcacggaaattgtttaggtaattgtagccgttttaagtacgtacgtagttttttttttttgtttgtaaagctcatgaatgaatgattgtgagtgaaatgtgaagagtaaaacaatcccgtggtggcatggcatggtgggacccataaataagcagaagaagaactaaaagccactgtacagtgtggaagatatgccaatggagtgggatggggtgttggggtttactattgacggtccacaaaaaaggtggaaacttggaactctacacgtgaattatggcaaccattctatcctccattgtggtcgtgtctctctcacgtttctcataccctttttctttggcaatctagctgctactaccaaaaatttataggagtaacttagagcaactcctccttgggatgtcttcaacaatgttagatgagatcgacatatttttgttatttttttaatagactaagcaatatagccgttcttcgcgcggctaatttaattttttttagcattataataaataattatttaaaaatataattttaatatataataaaagtataaatcttctctattagttacatcttttggcaatatacaaactattctatttttaatgacagttttatctttgtacacaattctattacaattttttatctctccattccaaaaaccattatttcggttgctccaaatcaagtatatcaacgttgcaatggcaacagcaaagacttttttttgaagctatcacattttgcctttgttaatcacttgctgatgtttctcaagattgctgccgaagtcctccattgaggcaatgcttgatttgtgtcaagcaatccttcgaaaactggacattgttacatagaaggcagtcattgctatcaattacccaaaatctctt

SEQ ID NO: 191312 - DNA, 2602 bp, Cannabis indica
aaaggattttttagtacttttgactgtctagcgatcttgaaccattccgatggaaagatccttcaatgtcagttctttcatatgtatgggcaccgaaataatctcgttgggcttggaccagttagctggcaacctgtccctactgtaagaatcaaagtaagcaagactagaggacataccaggggtgctaataccagagttgatggcaagacatacaactcttctccaggcagattgcctctcaatgatctcctttgcaaactcggggtccacaaggaggtttgcgagatcagcatttctgtcataggcttgcttaattctgtccaagaaaatggcccgaataatgcaacctcccttccaaatcctagccaattctcccaacttcaaatcccatcccttttcaacactctttgcacggatcagattcatcccttgtgcgtaactacagattttggatgcataaagagcttgtctcacatcatcaatcaactttgccttgtccaccacttggtcagtcagcacatcaccaaagccactggctttaaagactttggcagcttcaactcgttcatcctttaacccactaagaaatctagaatccaaagaagatgcaattgtgggagctgcaactgatagatcagcagcttgttgtactgtccatttaccagtacccttcatgcctgtcttgtccaaaaccttgtcaaccaaataaccttctcccttgtcatccttgatcccgaaaatatctgctgtgatttcaaccaagaagctgagaagctctcccttgttccattctgtgaaaacattgtgcagttcttcatttgacaattttccaactgatttgagcacatcataagcttctgctatcagctgcatgtcaccatattcaatgccattgtgaaccatcttaacaaagttaccagaaccccctttgccaatgtaagtcacacaaggtccactgtctcgaacttgggctgccaccttaagaagaatatcttctatgtaattgtaagcctcaatggatcctccaggcataagagaagggccatttcgggcaccctcttcaccacctgaaacacccattccaaggtaaagaagacccaactcggccatggctttctccctcctctcagtgttttcataccactcattaccgccatcaatgatacagtcacctttctccaagtaagcagagagggtctttatagtctggtcaacaggtgccccagccttgacaagcatgataatgactcgtggcttttgaattgagttaacgaaagattcggggtcatggaagccgtacacaggaaggtcaccttctagttttgctctttcaacagtctcatcaactttggaggtagttctgttataaacagaaattggaaatcctttttctgcaatggtgactgccacagccaaaccagcaaggcctattcgagtaggtgttgaggggggtgccatagttttccctgcacagaatttgaaataacttgtaagacaaatgtttctcatggctacacagaaatctaggaaccataaaaacttacaaaaacaattaggtgatatcaaacaaaagtcaaattttcatgtccataccaaatagagtttcaaagagcgaaaaaagaaactgaaacaatgaatttcatctaattgaagtccaactaatataataaatcaatataacagcatcatggtttttcactaaaataaaatatatttgttttctacagaattttagcagaactccacaatctttaagatgcaaaaagagctaacaattgcaaggtaaagatcagtaggaaccctaaacaagattagtggacctacacacttaattaaagaatactaaaaaaattaaggtaggtgaagccgtttttctatctacaagtccaaataatattaacataatttgatcgtaattgaaactcaaaaggttggtcaaaatagaccaagtattcatgacaaagctaacatttcaagggagataatcatctgatgatatcccaatcccaagaagtaaaattttgtcaaataattttaaaatcaaataaatcacaatgaagaaaagaacacgcaaattgattataaataaataattttgcagtgctcaaacgcgtcaacctaaatacaattacaacaatcagaggcatctcacaagtgtagagatcatcaaatccaacaaaggaaacaaaacccagatgagcaatgttgaaattaacagacgagagataaagagaatcgatacctgaaagtgtggtgaccttgttatgtttgagaaagacaaaattgagatttggggttcggatcggaatggggaaaagagatgaattagattagctgaaggagttgttgaagaaggtctatatataaagatcaagactttaattaaaagtcaggtcaaaattggccgccgttgattgggttaggtgtggatgtggtggtggtgagaacaaacccaataccatcatgattcatggttggtgaattttgctatatgtattagaataatatcacttttactttcattattgttattatttataataatactaataattgagaatgtgctcttcaattttatttatttatcattttttttttt

SEQ ID NO: 191313 - DNA, 1391 bp, Cannabis indica
ttattaaaatgggaggtgaaggtgaaggaggagatggggctttgttggtggagagcctgctgggttctgtcctcctcaccagaaaaccccagtttctagcaggtgggtgttggtggagaagtgtagtggcaaagcaagtgtattggatatggacaagtttgccattatgcgccgagttcatatcaacgctagagaccttagaattctagatcctctcttatcatatccttctaccattctaggcagagacaaagtcattgtcctcaatttggaggtaataatataacacctcaattcaatttcattacttttcctttttaattaattttttttattcttttacttccagcacatcaaagcaattatcacagcacacgaggtaattccctttctttcttgttttcttaaattgttataaaaatccaatctttacttacaatatacaaaattattgaggtggggttttcttaattagtgtttgttttctaattcaacacttgaatcttcttttgttgaagaataagactaaaggatgatgatgcttttctatttcttttattttgtttggtataggtgttgcttagagatccattggatgataatgtgatccctattgtagaggaacttcaaagaaggttacctttaacaacaagtgcaactcccaaagtccatggccaagaagaagaagaggaagaagagcaaccctcctctgcaacaacaacaggggtaagagatgaaaccgaaaccagtgaagaaaatggtatgcccaatccaatccaattcaaaacgaaacagcatttgaacattgaatcatttgaatgatggcatagcatagcattgttagattatgagtttgagatgaggtgttgtaatggcaatgcagaattcccatttgagttttgggcattagaagttgcacttgaaggtatttgtagctttcttgatgctcgtacaagagaattagaagcagaagcttatccagctttagacgagctcacctccaaggtaataaaataacataaacatatgtgatgtgactctataaattatagtaacttaatttagtatgtttgcagattagcagcagaaatttggatagagtgcgtagactaaaaagttcaatgacaagattaacaaatcgagtccaaaaggtatttattatctgaattgaatcataacatgagagtatgtgttatggtgtaatgaactgaattatttgcaggtaagggaggaactagaacaacttcttgatgatgatgatgatatggcagacctttacttatcaagaaagttgtttatgagtacaacaacaacaacatcatcttattgttcagcatcaccaggaagaagtggtcctctcaattggtctcctactactacaaatacaaata

SEQ ID NO: 191314 - DNA, 5854 bp, Cannabis indica
gtgaaaatatttagttttcaaaattaaaggaatcatcacaattgaaagctttaaaggtttgtgattttagttttcaaaattaaattttaaaaaatgagaataaaaaattgttgaaaaaaatgagaataaaaataattttatcattttaaaaatttaatagtggttgacacaaattttttataactattttagatgtttttttactaaaaaaaattcaaaattctacactgtatcatgatatgaacccattctaccccagatttgactccaacctggatcccggcctgaatctagaccccaacctggacccggacccagacccaaatcccagaactcaaatcccgacccggaccctagacctcggaccctaaccccagacccgaacctgaactcgggtcccaaacctggggctaggtcgaaggtccttggccaggtctaggtctgggcttgggtctgggtcaggggtctcaggtccgggtgtggggtgtggggtgtggggtctcaagtcaagttcgggtacggggtattagaacttttgccagcacaaaatgaaaagcactggcaaaaataacttttctcagtgcgtaaatgcgctggtaaaagttagattttagccacggcaaatgtgcgctggtaaaactttgacctttttgccagcgaactgtgctggtaaaagtgacatttcttgtggtggggggtctaagtctgaatccggggtctagggtccaagttcgggtctggggtccaagtttgagtccgggtccatgttctgggttttgggtctagggtcagggtcggcgtccgggtccgagtccgagttcgagtccgagttcggtgttcggtgttcggatccagatctgggtcgtggttcgaggtctgggtcaggttttgaggttcggggttcggttttgggtctaggttctgggtcggggctgaggttcaaggtccgagtctaggtctgggtccagtgttcgagtctgggtcggggttcgggatccgagtccgggttagggtccgggtctgggatctggggtttgggtcaggatttggggtccaagtctctgggtcggggtccaggtctctaggtcggggtccgggtctagttgcgagtctaggtccgagtatgtgagcaaaaatataaaatataatatgttagacaaaagaaaaattatttttgaaaattgaaaataatattttgatgtttctataatctagtttttttaaaattttgactaaacgaatcttattaatttttaaaaattgttttctgcttttcaaaattacaaacaatttttaaattatgaaccacacatcacacaaccctttaatttgttaaaatgtatcaatccaacaattgctttaatattatatgcaatatatatttatagtacttaatataaagatatatgcatgattaataaataactttattatatataaagtcagatatatgcatgattaatataattacttaatcaattaaataatttatatcgaacatagaattccgttagcttacggctttagctagaaacaccaaattataaactacatctataacgttttcttttcaaaaagtaaatataaaaagtcgatcagaaaaaaaacaaaattataaaatgatcagttaggataaaatcaagttttcttaacaattataataataataataaaaaaaatcaaaacatgtacattaatttaattgtactcttctccaggtcaatgttggtggactaaagttcaatcacataacttagtatattcaataagaagttatatagtggttcaatccttggcatggaccacttatttgttgtaacattatgtgtatatttatatataatactaaaaagtttactatagaggtaaaatgtgttttgtatactacatgttatcttagtctcaatttgttcgatcatatatattagctaggtggagctcaatacctagatcctaatgaaactcaaccagatgacactgaacatagaacagatgagactagagatgaagacttgcaagattgcctgctggctcgagattagaagagagatcagtccatctaaggtttggtcaagctaacattacaatatttgtctttatgttgcggatttagctagttgatcttcatgaatcagaaagtgttatattatttataaataatataatatataaattaaatatatataattaatcaataatatgtaacatatgacaatatatattaattgtatcattttgtaacatatgaggtaggaatgtcaatggagtgggtcggatatgatccgagctgatccagatcatgtacggatctgctctgccccgccatgctggatcagatactcggatcggatctgatccgacccaactttttttttttttttaaaaaaaaaaattttgagatctaaatttataatatatagttcaaatgtgataatatgaaaataaaattttcaagtacatgaaacagtttgataggtagaaattttctccaaatgattacttattaaactaatccacatgaacaattttactctctaactgtgagtcagcactttatatatatatataaaaaaaataataacaaatattatttaatatatatttgattaataatttcataatttatcaatattaattaatctcagtgtaaatttatttgaaatatgtgggacacactctctactaatttgcacctaattgtaataggccttataaaaatgctcatatataaagatggtacaaaaagttatagcaagtcaataatctttaaaagcacaactacaaattaaaaataacatttttacagaataaagaaaaagttatgtgtaagagttatacttattggccactcggtgtcgaactaccagggccaaaaaattttttccaaataaatttgatcagagtggaggctgtttggattttctcgtgaaaatgaggagaagaaaatgagatttggtgaaattgggatttaatttaggctagattctaattttttttttttaaaaaatatattttttatatatttttaaaacggatcgggtcagatccaatccgtaaaaaaattgagtggggcgggtcggatctgatccaagatccaataactatccgaatgtttcgaatcagtaatgatccgtcggatcggatcactgacccgatccaaatgaatggatctttttgccatgcctaatatgagggaattacttgttattatgcgtattttttagatagtaataaaaaggcgtacctttccaatgagacctggcacatttgctgaagaaaatcagaaccctagctggttctaggaggattcgaaagaaagagagaaagcttgagagagaagatgtgtttttgtctaatttctattttttgtaaaataaatgaaataaaattgattttaatcaattaatatcagcttaatacaacataaaattagattaataaatcaactcaaactccactaaaggacaaaataaatatagggcaaaaagatcattttgcccttgcccacactaaaagtcataaacatcacttaggggtgttttggtcacttctaaaatctcgactattcccaacattcccaatgtctaactatactgcctcgctatactaaaattactaagatgtgattctaatagtcaaacaccgcgttccaatgttgctagacacaaaacatgcaaaattataaaattctatatataacatataaaattcataactaatacccctgttattagcggcggaccccactctccgccgctaatacccctgttatttgcggcggagggggtcgtgccgctaaagagttaaattgttgtagtgattctgaattaaaataaatctccgtaaattaataattcataactaatatacaagtttcataattaaaccataattatctgctaatttctaaattaaaattaagcgatctttacactatatattttcaaactatacaataaatcatttttacatttctttccttctctgttttgatttttctataactgtgcaatctccaaaaaccattggttatcacttgtagatacatttttaggccaaatataggtgaatcttctcttcacttcttctttagtctatctgattacagttgtgactttcaggtcctctgattcccacaacaccgcatttcttgttttccagacctggtacacgagtgaagctatgacagcatacaggttacctttcttgaatctgccaacctttgatcgctcaatccacctcaaaattgcattcaaatctgttgtctcgattctccaatccagccacaattttatctgcattaagcattgcagagaaaaggagcaagaaaagaacaaatgagacttagtctctggttgttgcctgcagaataaacaataatcttctgcaattatgttgaagtgcttcaacctttctcttgttcgaagcctatcctgaatagcagcccacaaaacataactgtgccgtggaatattttgtctattccatactccatgataccaatttactttcctttgaggaggacaaaataagttgtagccattagagattttgtattgtgtgctaatgaactgttgtacattcattttctccttgatttgatctttaacacatatcaattttttccaataccagctcgcttgttgtggagcttggtgactccaccaatcttccccttttatatagacacggtgtatccatttgatccacaagttgtcctccttgtttgctatcgcccaaacatattttgtcatgtgctgccaagttccattctgctattcttctgagacctattccacctgcagctttcggttgacatacattttcccatgcaattggcccagagccaagtgacatatgttgccctttccaaagataggcacgacatatagtttcaatgtctttgattgtcttccttggtataggatcatgatttgactccagtaagggtgaatggacatcaagacggagttcccaagcactgctctacctgctaaagacaagttccttgaattccatgatcttattctcgctgtcattttttcagctagcaccatacattcttttccagagatacgtttagcacatataggaatgcctaagtatttaaagggtacctctttcttgctgaatccagatctgtcaataagccgttgaactttatttcttccattccacaacagtaaatggtagacttggatgaattcggttgtaaaccggatgagcataagaagagtttcaagccttgtaacatgtaatgaatgcttttgaagtctccatgacagaataagataacgtcatcatcaaacattagatgattcagtttaagctacatcgatcatggtatttgaattttggtttggccccgatctgagtcattattcttgacaagtattccattctaaggacaaaaagtaatagagacataggatctccttggcgtaatcctcgtttcccctattggaaaagtaaattttcgttacaaaattatcatagagtaatatttatattgtgttcatagaaaataaactagacttatcgttgcctaaattgctaagatgctaataccatattatgacaacatatatatgttgtcgcgataaaaataaatgaaaagttgatcaaaatctttctttgtcgtagaggcgtgcgcgtatcaactcatccctagccagactcctcccgtcgaattctttccatatgcttccttgtgtgagtgatgtctttgtaatatcaaagaatttgtgaacttgcttacacattacttaaaataaagtttatttgcgtcgattataaactaacatatttttcaatagtgacagtatcatgaaccgacatttaatatgttattttt

SEQ ID NO: 191315 - DNA, 1504 bp, Cannabis indica
ctggctggtgatggttttgacactgtgatcaaagctaaggctgcagttgatgctgttccaagttgcaaaaacaaagtctcgtgtgctgatattctcaccatggccacccgtgatgttgttgctctggtactaattaattataattcatactacatccactacttaattaatttggttaattaattaattatatatatatatactttattaattcaggcaggtggaccttcttatgcggttgagttgggaagattcgatggaaaaacttcgactgcatcaagtgtgaatggaaagcttccaaagggttccttcaatgtggaccagctcaactccatgtttaaagctaatggtttgagccaggcagatatggttgctctatctggtacttatctctccctcatatcatttttgaacttttgtcaattttccttgagttgtttgggtcccatttttgcctaatcaattaaacccgcttttctttttcttcttacactatatatgtacatgataataattggaaaccttgcattttatagtctaaaggtcagttatttgggtaccgtattaatagcatatgcccccacaccacatagtacacatacaaaatgccttcttttcttttacacaatcttaatatccaatgacttttctcttctttcccatcatcgttattattatatgatagatagagagacacacatattgctgcttgattgtgcatgtttcatatttatcatttaagatgcttattattatttttcaagataagagcataccataatttgtacaatttatattatattataagtctttatatagatatttaactattactatagaaatcacaattgaagattgtttattcatttttcacgtgcacgtacaaaagtagaaaaagaaaaaaaaatagtaaccgttggatgatgacaactaattataagctgtgttgtgttgcagcggcgcacacccttggattctctcattgcagccagatcacaagcagaatatggggtagcaaagtggactccaccctaaacagcacatacgccaaacagctccaagcaatgtgtccaagaaatgtggaccccagaatagccatcaacatggacccaaacacccctagaacttttgacaacatgtattacaagaatcttcagcagaaaaagggtcttttcacttcggatcaagtcctatttgaggactcaagaactaggcctactgtcaatgcatgggctactaacacaaatgcctttaacaatgcatttatttctgcaatgactaagttgggccgagtcggagttaagaacagtcaaaatggtaatattcgtatcaactgtggtgctttcaattagactacactgaaaaaatttgtttgaggatggataatattggacatgtgaagacaaaggaataataatgaagaaaaacaaaaacaatggagagggaggcattcaattgtaatctatggaattttaaattatttcattaaaaagtaaaaataaat

SEQ ID NO: 191316 - DNA, 1207 bp, Cannabis indica
ggttgagcaattgtaattgtaaagtagaaaaaacaaattacttcaacatttgttttactttggtttctttttttttttttattcattatatatgtttctactcttgtccaatattctttaagcataattttccttttgtttctttttttagctactttaattaattttggtcacttttgagttcaattttgaaatagatttgtttactttttctttttcttttgtcttttttcagttgcatttgtttaaaaggtatctcttcttggattaataattatggccattacattaattttcgtactctaaagagtattaaaagccaattcaatcctgtaggggatgtacatgtttgtaccttaagcggcccaatgggccttaacatttaaactactagaacaactgtcttaaaagttcaaccagtatcgctttgtagatttgacttagggtttatcccatgtctatgctatgctaagtgcatgtagagataaaagaactagaaagtaaaatcttaatatcagaagaaaaaataataattcaaaactgagttttaatttctgacccactagaacacctacaaaataaaatataaaaaataaatattaaataaaattcatactaaacttatttattctcatctgtattatattcattactgaaagtaactatattaaatttgatgtattattatttgattaaactaactttacaaaaacaaaactagtcatggctttacaaaattaaaaataagtcatcccaatcaaattgttcttataaaatcaaaattagttatactggtcttataaaactaaaactaactacattattagtcttataaaaaaaattagccacattaatcatacaaaataataaaactagctgcaaagtaatataaatgaaatttattataaacgttgttgatattaatatagaaataaaactgaaattttaattaaaattaatgttgatgaaatacctatttttttgaccatataattccttctttaaataaaataataatacataataataaaaaatattgaaagaaaacttaaaaacaaatcaggaaataatcataatattaaaacacaaacaatcaatcaaaaattaactttaaatatttgtatttggaactgattttcccgcataacattcgctcgcttctattaatttttttttttttttaactttgaataattaatttattgag

SEQ ID NO: 191317 - DNA, 2490 bp, Cannabis indica
atgttctggaaagaacatagcatttctccaaatgcaagtaaactctattgtagattgtcatatcagtaaaacccagtgttctgataaatctaggaatcctttattcacatagtcatgtttactttccactgtgttgacaacacaacaaacatgattaagtatgtgaaaggggtttggataaatttataaatcaaacagacaaacaattgattaagtgaaccaaaacatacacaaatgaatgaagaatacttctgttactttattgatattgaattacattgaaatagagttttatttagggtataaaacccaacatactgaaggtttctctgctgccattcgtctttatgagaacactgatgcttttactggtattaaaatttgtaggggtgctccttccttatccaatctcttgttcactgacgatagtatgttgtttactcctaacacctcttaatctagtgatgccattaatgatattcttcataattatcatcaggtcggtggccagttggtgaatcgtgataaatcttccatccttttctccccgaatactcccctggactcgcaaatcaggttcaggactgctttgcaactcactggtgaaggatttataagcaaataactgggagttcctcattgtgtgggaaggggtaccaattctgttttccattaccttatacagagtgtctcttctaaactaaatatctagtatgataaattcttttctagggctggtaaggaaaccctcatcaaagttgtcatctagcctattccttcttttgcaatgtcctattttaagatcccaaaatctatttgtcaaaacatccagcgcttgacttcaaaattctggtggggttctacttctaatgttagcaggatccattggaagaattggtctgctctctcagtctcaaaattttttggaggattaggttttagaactctcactcatcataatcaggctcttcttgccaagcaggcttggagggtttggtctaatccagactctctccttcattccattcttaaagctcgttcttttaaaaattctgattttttgctcgctccaaacggatacaactcctcctttacctggaaaagcctcctctggggtcgtcagcttcttaagaagggcttgtgtggaagataggtaatgtcaattacatacctttatctgcttccaattggattcccggaatctctcattctactcttcttcaccccattgacccttctcttactactgtgtcgtttttcatcaatcctgatagtacttggaatgttgcaaagttaaaccactatcttcccttgtatcaggctaaaatggttctccaaatccccatagaccctaaccctgttgattctctaatttggggctttcaccaatcaggcatcattactattaattctgcttaccatcttgcctctgccgctgcaaatgtcacatctccttcatcctctgacccaaatccttttaagatatggtggaaaactctctggactcttccaattcccccgaaaataaaacactttacttggaaagctttcaatcacaatttaccctgtgctttaaatctgttccacaagaaagtcctaaatgagcccttttgccatttctgtggaggtgatccggaatcagtaactcatgtacttattgattgtaccagagctcgtcgtgtttggaagcactcaaaatttaagaatttccacaatgatcaccgaagggtttatatcaaggagttttatcttcaaggcattcacttaattccaaaggaggatctccctctttttgttagttcaatttggcacatttggaatactagaaattcaatattatttcaaaaatcctatgtttctaacaatgtggaagagtatgtcattaattatttacagaaatacaaggaagcacaaaaaatacatgctgctgctgattcagtagcaacttcgcatcaacagagtttttcctctcaatcctcagttccgtgcataatacaagaggataccccagctttgtctgttgttgcagccttagatcatgacaattgcgttacaggtctaggttttgtcttcaagataggcctacatcgagttgttacgtctacaaagatccataaaccaggagcatccacaccaatttttgcagaaagccaagctcatttagatggcatcgcttggtgtctctcttctcagttgaagcttgagtttatgttcactgactgcctaaaccttgtatccaaagttaatggacattggaaggaccaatcgactctttctagccttgttttgaagatcagacattccttctccaacttccctgatgcctctttgaagtacttccctcgccaatttaatgccaacgcacactcccttgctaaggaagccattaggttgcgagaggaagattaggaggaactttttttagttcctctgttcgctgctgcttgtgttgttctgttctcttttgcagcttttatttactaaaatacc

SEQ ID NO: 191318 - DNA, 2101 bp, Cannabis indica
tttttttttaaaaaaaaaaaaattagaataaataaaactgactttccaaattttataagttataaaaaagaaaaactttaattaatatataatactacattatcaaattatagtaaatagtttggatcatgcaagtactaatacttaattatttatttaattatatctttttaacatttcaatatttgagctttcatgggctttttgcactattaataaattttttaggtcaaaatattttgagaaaattatattgtatacttattttattttattttttacttttatttttatattctttaagatttactcacttttatagatgatgtttttattatagtcatcagattaatgtaaattacatgttagatttatgtggagagtgagagtatattaataaatctacttttatattttttaataaaatataatataaaagtatttttaattaataaatacaaaaaaatagtatttctcgatgactcacccatattgaatatcttgttctttactagagatcactttatattaatttgattaaattcttaataacgttgaattaattaaataggcatcatatataatttatgtttttcgatatcgataccaactacgtcaacacgttttttccactccaccatggaaaataacatttcacaatgaataaagcaatatttgatatgctcaaattaaacaataaataaataaaaactcggaatatgactgtgagaagaaaacacaaaaagaaaaaggaaaccttttgtagattacaataaatataaataaatacatatatattatatggacaatatatcttgattattgccttccacatatatcatacatacagtgcaagtctacgtatatatgtacatatatatagaacaacatggcatgatgatcaatatatatatacagtccttaatgaatttatcaatatatatacgacacagggcaattcagtaatgcaaaaacatagagggttccaagttccaaccttcaattattattaattagaagagatcagaacaaccttaaaaacagttcaattatttaaggagacatacactttcgcaaatgttgttttagtccccttgaaagctcattttgtctcttaaaataacttttcttcatacatctcgtgaacaaaactaattataaacataccaatcattgtgttgatatttctaatttgcatacataataatatagcattgcgaataatgacaaagttaacatgtacatattagtgagactgtgagagtgtctaatcagtgtgtgtgtggttttaatttttctatagctacacgcatataactgttttagttaattcaagagagcatccatataattatatccagctcaaatgatatggtttgaaaagagggcattatcgataaaaagatgagttgtatctcaatatatataggccatttcctattgataatgaagtatcttgaatgattttgacatgaaagcccacaatccaaaagtcatatacataataaacacaaattcacaagcaaaataattctcacttttattgtaagtatgagatgtaaaaggtcacacatttacattttgcctatatgaacatataattgaaacaactagataaaccagtacagagtaactattctctttaattatgtaaaaagataccaacgatgcatcatacatgatttaacactacaaccacctatagctatagctaattttgtagtaataatggtgtatatttatataaataattttaatcatgttactttgttcatttagaagattttttatgtataaatgaatctctacacacacaaaaaaaaaaatagaaatggggattgacgaagacagggcataaatttcttgaagagtactttattatattattatgaaaaatgttaaaaggtattattggtacttaattagcattttaatcagtgtattatatccttattaatataattaatagtattggttttatatataacttaaaaaaataatattttaaaaatatagttaactaattataaggtgtcacttataaaaagggatagatcttcttatagaaggcacttttgaattgatatgaaaatgatatatt

SEQ ID NO: 191319 - DNA, 1079 bp, Cannabis indica
ctagggaattgatatacttaccataaaggccagtgcagatgaaactaaaaaaaattccaatgcggtccttctcctcaagactttccttagttatggggtacaaccacgatgccatttcggagcgtccaaacatggttgccatatagagtggcgtcaccttatgatcatcccctccacctctaatggttgccaaatttgggttcctccggagcataatcatagccacttgtacttcccccgtcgccacagcagaacagaaagcggtgttccctttcttgtctgcgagttctaattcatcctctgtcatcattttcaccagtgcctccacgaagtggacgtgctttgttccagcagcgaagtggagaacggtctggcctcctttgcagatacttgcagttaaaagtctcgaatctttcattagaattgcctttgcagtttcccaatcacctcttaatgcggctttgtaaagtggcacaccgaaatccaagtacatttttctagcttcttctgcgtttccagggaaaaagaaaaatcaatttagtttaatgtgactattaatattactacagtacttgctgatgttatttgaaatggtatttatgctcttaaatttgaaagggaatatctatataattgtatgtttcttactgctgttgatgagcaaatgttgagaagggtaacgtggttgagctgaagatatattgttgatgtggataccatttgcattaatatttccatcaattgaagcaacagtattaatttgctttaccatttctgttccttcagctccatgaatacgaagaactgtactcgtcgaattcaacacattggttccttccattattactatacgaaaaaacaatgatcataatcacatccgataaaataaaactaacaataatttttcaataatataaaaatgtctttattgtagggtttttcgttcctatatttatagctataagaggttatttttttttctctgggcaggcccgcgcctttcctagcatagttccggcttcatcagggttatgttttgccattgcgataggatttttgctgtggtgagtagtcttttc

SEQ ID NO: 191320 - DNA, 2097 bp, Cannabis indica
ttttggtcctctctaattttgggttatcccataaatatataatttgagaagacaacacgcacgtaaacccaaatgagggaataggtagcacataacaaaatatagcaaacgtggaagccttaaagtgaattgtggaaataaatgaaacaaaaaaaatagagaagaaaaatctcaccctatcattcctcctcaaaatacgatctcttgctagtctatttccctcttctcatgcctcttaccccaaataacaaggatctcatatcatttttctactcccattaattattcccatcatctttgccttgcccccacccccacccccaccccattttcttccatctcctcaattttcaaaggacattttcttctttggaggcaaaatggtatgttgttctaatgaagttaattttactcattttcataagatacgacatttgattgtcaaagcgacaatgagttgttttgttttatatttatttatatatttatttatgttatgattgttaattatgatggcattggggacaggccaatgcggcatcgggaatggcggtgagcgatgagtgcaagttaaggtttttggagttaaaagcgaagagaacttaccgttttattgtgtttaagattgaacaacaacaagtggtgatagacaaacttggtggacccaatgagagctacgatgatttcaatgctagttttcctgcaaacgagtgccgttacgccgtctacgactttgatttcatcactcatgagaattgccagaagagcaagattttcttcatagcttggtatatattctcatgaccaataattaatttacactttttattacaactacacgaaaatcactatacgaaactatactggggtgattaatgaaaaatgatcatgtgataataaataaaaaggcacatatatggtaatttatcataatatatgattgatgatcttggttgatgtaggtcaccggatgcatcacaggtgagaatgaaaatggtttatgcaagttcgaaagatagattcaagagagaattggatgggattcaatttgagttgcaagcaacagatcctagtgaaatgagcttggacattgttaagagccgagccttctaaacaaacaaacattaattaattaattaaatttaagtacccctattttttttattacttcattcattcattcactgttaccatctttcttaccttgttctttccttttcattttttcttttgtcgtttcattcaaaacgaaacccttgtataagaaagatgtaatgtcgtttcttgagaaactttgattaagagttcttagaacatatgatttattgggctggtaaaaagctagagcaatatttattataataataacaagagtaataaacattgctcgtatttaatagctagtactagtagaatggcttcgaggctctaggttactttacttgcttttcgagcatagactgttatgaatagcatagtaatctattcttttgtctgtatcaaatgcttaatcagcttaattcaatatccagtgctattattatacattcttaaataattcttaatttttattttacctaataaagttattgtattgtatgtactcctgagtccagagtccagacttgttttagtcccacatcgacagctgagagagattactgtaaaagttatgagtataaatagggctatgtcaagatttttaaaacatgatccttcaggcagaaacaggatatgatgagtggtctttactcttttgtgagaggggtgtccgccccaaagcctgttacgacagtgggcactctcaattgaaccatctgatccctatttttaaaacagttttagctttttataagtaaatgtaagattttctttttctatattttgatagaaaaaaaaaaattagttttttattattttgcttatcataagttattttatttttaacattaaaaattatttgaaccaattattgaaattaggggtatttttatctttacgcttttttttcttttgcatttttacgaaattttacataaaatttgcaactagtataacttaactcgcaataaaaaaaaaaaaaacgaattaaaaaac

SEQ ID NO: 191321 - DNA, 1828 bp, Cannabis indica
tttattttatttttttggtttttggtctttctttatatttgagtagtgaagctttatgctacttgctctgattattgcatagtatggaacatgtctaagcatggtctgcattttctactgatggtttgcctgccgcaatgtagtattgacttggttctttgctcgcagagaatatggagtttgtggatgatttattgacatttgaagaacttggtgtgtgcttgaaatctcacgggtgccacgtagctaatttgtcctcacgggacttctctaccaagaatggggttggtggttgtctgagaagtctgttgagacagtttctaatggttgctttggatgtatgtacactccaatcaatctatctggcttttaactttccttgttggtcaaggacgcctttaactttccttcttctttttgttcaggcagctgacatctccatcctagcatcatggtatagagaacacggtaaccatgattctccggtggttataattatagatgatatggaacggtgttctcgatccgttttgtcagatttcatccttatgttgaggtatactattgaagcttgctaatataccttccaaacctctttaaatttattattgaagtaaataaatatactgattctgtctttccgtttactatttcctgtttactctttcacgtctgagtaaagtgactaattctttttcctgcacctctctctgtcacttgtaatacgtggatagtgcttgctagtcaatttcagtcgttggtatcggagagttttaatatatcgtctgttaataaatttcttgatattggttgaatcatggtgattgatggttagttctcatccacttatctcaacaactatagtactattcttgggtaaacgaagttttgtcatttagttggctgtattgcacacaggttttcccacccatgatgagtttactttcctgttcaatatctagtagtgtcttaaatttcgtacttgaaggtttatcatcatgttatgttatgacttctcttattttgttcttattgttttgttgttctccttcaatctctttcagcgaatgggttgttaagatcccaattattttaattatgggaatcacaacactagatgctccaagaatcgtacttccttcacatgtgctccagcagttatgcccaagtaagttcattttggcatcacctgctgaaagaatgaacgcagttgttgaggctactcttgttaggtggtgttctggtttcagtattggtcacaaggttgcagttttcttgagaaactatttcttaaatcatgatggaacgttgacatctttcattagagcactgaaggtttgtccttacagaaattttgaactataatattctattgttgtttggaatatatgaacatttcatgtttttatgttgtttgtttgactataaacttactttacactttttttttgctctgtaatctttacatgcagatagcatgtgtccagcatttctccatggagcctttgagctccaatcttggtttacttgccgaagaagacagcaacgatgaggtatcatctctgtaaattcttaacttgtgctgtgtatgaaaattacacagcttttcatagtctcacagtgccttgttggtacctttcataaaaaatgcaccgcatcttatagcttctgtatatatcatcataagttggtgctccattgttacacttcaacttatgtcagacctgatttgatgtgtttgctcccctctctctctctcacctagaaaggattgttgtttatgtcctcgcattttgtttgtagtttgtccttcttttctcttttaata

SEQ ID NO: 191322 - DNA, 1434 bp, Cannabis indica
taaaaataagtttaaaattttttgaacacttgtagtaaactacaatatcaaaaattatattttcgatactgtaacttacaaaaagtatccacttctgtaaggtatttataattttttaaaaatttataaaaataatactgtaactataacgaatagtactacgaaaaaaaatattttgtcatgttattttagacttgaacatgaatgtagaagtttattaaaaaattgtaatttgcattttctagtttaaatagtatcccataaaataaacaacttgtaccattctacagtactatagatgtgatttttgatactcaatatcttactttttaattttgatgtctctcggtaattgacaaaaactagaaccatattattgggaaaactagatgatatctcatctcaacaagtgattagttaggcaacagaggaaataggaataaaaagtaaaggtaatctttttttagggcctatttgaggatgggattcactaggtagagccacttcacatgcacacccatgctgacaccactgtgttttgtttaacctcctcaattatggcccagcaataatcaagtgagaggtattttggactgttaactagggtcttatctcatcattcttttagttaaagtttgagctgtctccccactcttctttatttctttttattatttaatttaaattatgaaaattatttaatctaaacaactagttctattatccaacaaggttatgattaaaaagattaatattaatcgaacttagtttcattgagaatcagaaattttgacaccataaagaatataaatatgcatgtagaattgaataggtagtgcttgaaattagcagaaaacaaaaaaaaaacaaacattgagaagtgatgtgtggtatgagtgtaatagaaagacaaaccggcaaaggccaaaaaagtggtctaaagagagagaaaagaaaaagagtcagttgaagaagcagttgtacgtcaagctaaaattagttagagataaaagaaacaacaaggaagacgagtaataagaaagagaattgttaattactaatacggcgccttaaaatgcctaaaaccaatagctatatatgacatatcatgtctctttatggtataagatgtattttaattagcatttctattctagctcaataagaaaaaagaaaagcagggtcatcttaaaattttgttgttaatgaaaatagcggaatgagaagagagccaaatgcgaaacaacaagctgtggagaaagtcaacttcagggtccgaccaaaagtaatttccggtccgctttcggtgcaccaaactcagattagatcgatcatataaataaatatatatatatatatatctttatatattaaaaatgcttatttaacagcaattcttgatttaaccatattgttttgtttcctctgttaact

SEQ ID NO: 191323 - DNA, 3206 bp, Cannabis indica
cctgtgaccggggattgttcggttgaccattcagagtttcggaagtgttcctagctagatcttcatctgagccacccaatggtatgctggacgctggttgctgattagtaacttggtaggcacttcgtatcagtacggtggcctatcttgttcagtcgtcgatggctccttgttgagcccgcaacgtttccatttctttatctctccaaccagtgaatagacgcctttgctcttcgaaagaaaggttcactgcagcacagagctgttcgtgatcatgatgtagagtattagtatggccttgcatgagtccaagagcattacggagattctggatctcagtgtcgtctccaacagttgtttggacatttgttgctagcgaaacctcagttctgggaatacctagattggttgttgaactggtatttccagtttcttgcacaccaggtgtgattctagccaaaggggacgtcacatcgtgacccacggttggtggttgcgtgattggttgtttaggatttgtggctggtgggacctttgcattccctgaagtctgcagtgcgggattcactgccagtggatctacctgatcaaccacgcctctacgagtttgtaccaccatcgtgtttatgattaaatttaaagtaaagagaaaattggtgattctttctctcaatgaaagtacaaccccttttccaactgagaatggatcactatttatagggctacatgcttcagggaaaatttcccttttgctttacaatatctataatttgggtaaagaatacataatacatatatagaatacagagattgtgggatttggaaagcttgccatatctatgtgatacgatcccaaatttatagggattgctcttgtgcttcacgatacaaatgctaaaattgctatgtgttgatatgctattcagattgtccactatttggctaggaggaccttatctggacaggtatatgcagtgttctgctcggatcatctcttttaggcaggtatggagaatcaagtccacgtgtcaccagcatgtgatgccacatcaaagtgtgaaaattgggataacactttgtaacttatcaatggtctcctatcgaaggtttttttatgacaagcctcgcggagaagaatgttcagattgtcatgttgtgtcatcaacgactcttttcgttccttctcttgcttatatttgtcatgagaaggccttgaatgagttggtccctttgtaggatatcctcatagagagtgctgacttcttggatttaggtggcgatggtctcaaattgaagcatcacatgggcttcatctttatccctctccccctagccttgcttaggtgctcttgatgggagcatacagtcccctcgaacttttgctcagttttggccttgtgatctaagtacatcttctggtatttggtatcccacttcttctcctcaactgcgagcttagcctcccaatcaacctggatcttttgggtgctagaggcagcctgggtcttgacttgctcaacttctacacgtaaggccccgttctaaattgttaaggattgaactttagcacgaacttaaatagttcaatggtcatgttacccagttctttggcagttttctctacgaacaacgccatctagagaaaggaaaataaagggaaaaggtcacacattcactttggtaatgaaaattgtatcgaaaggaagaatggttgaccgctgctacctattgcttagcagccaccgatagtgtgtatggatcaacacagctgctcacaacctattttttggatgtaagcttgctcacactaaggttcatgttgtctaatatctctggagcataagggtaaacgactccccccaccttaggtaccaaattatggcttactgcatcaagatccaaaactgggccataaaaagaaagctaacaaactccctctgcaaccttagttgtcttgagaaaagatagccgggtagcccacttttgaagatttatttgttcccgctcatggcaccttttcaaaattgtagcaaacttgcatacctttgtgaggtagtcatggccgagaacaggcagactcatggggaaggagaatcccagtgaaggaaccttagcccctacgacgcgctgagatggatcagtagaggcaggcctaggagttgtgcacctaggattgtgtcaaagtgtaggagactgagagggccgtggggtaactgagatgacacaatctgtaattgaagaggggatagagtctgctgctactgcggtagaggctctcgcccaggttgttgctgttgtggatgatgttattgttgttgttgttgttgttatggttattgttgctattattgtaacagcaggctagtcaatagtacgttggatgcccctaggtttgggattaaagattttatcctcttcatggcaggacccagagaagtctttgatcccttgcgtttagacttaacgggagtcccttttggggaaaggacaagttcgttcatactactatcagaacccccatgtttggtgtgatttttgggatctttcctctcgaacggggaatgtcctgtgagggctgctctcccggagtggcgagagcctgagaggccttcgggggatgtgtcagagtccttctaccccacctagtgaagtagaatggccaagtgtagtaggtctagtcatggtgggaggaggaatctcgttagatgtctgatgatgaggaagttgaggggggacgcggtttctgagtcctggaagccctggtcttaattttccccttgcctttttcttaggatttcttggccttgtccatagcagctgagatctggctactccaatacttgaacatcacggattctggtgtatatgcacatgaagcaacaatatgagtaaatataaggaacaattgcaagtcatacaattatatggaaaatagcagcgtcaagaagaagaatctagtaaagaaactttgggcgtgggtgcaaccattcagcgaagtgttgtaggttgttcacgagcaaaagctataatgcccctatgaccaatgaagctgccatactccttaaatttcagcagagacatggccatcaaagggtctactttgacagtatccaaaggagtccctgaatttcttgggcttttaattatttgttctactttgtctatgtaatccttcataggggtaatctacggtggtttatgcctaa

SEQ ID NO: 191324 - DNA, 908 bp, Cannabis indica
gtttagcttctttcttctttttttgttttttttttttttttttctatttcattatatattttttttctgcttctctctctttgtgcacttacatatattgagttaatcaacaattaatttatggctataactgagcgtgagggtaggattaatattaatagtggcaaagatgtgcccggaattaagctgtttggggctacgatcattttgcaatatggtagacaacaagaacaagtagtaaaagaggaaccaaataagttcgaagcggagcgtgatcatgatctaacggttgagatgaagaggccagaaaagatcataccatgtccaagatgcaagagcatggagactaaattttgttacttcaacaactacaacgttaatcagcctagacacttttgtaagggctgccagagatactggacggctggcggggccctgcgaaacgtgccggtaggggctggccgaagaaaggccaagccgccttgccgtggtgatctggctggcttgcccgacgattgtttttatggtgatgcttctgaggttgttgggcagtttgacttggatggattaatggtagaagaatggcatgtagaagccgcccaaggtggtttccgccatcacttcccggctgtcaagcggcgaaggagcggttcaggtagtcagacgtgtgcttaatagtttcaattactgttttttttttcttggggtggtttgggaagtgccaattttacttatttttctcttgtttgaggaaaaaaccaaaacaagagttgtgatgtatgtatcttcgatcatattggtgtacataaacaaattgattgcaattaatcgtcatcattattattagatcttacttttcatcatactcataataataattgaagagagtagatcaactcttcaaaaaa

SEQ ID NO: 191325 - DNA, 538 bp, Cannabis indica
atatatataaaaatattttttaatcttgcatgagaatttttttaattattatttttaaatggaataatcaatttaacaaaattagaaaataaactagctatattatttaataaagcgtctaatttattacagaaagtgaagcatttgaataagttaagattaaaattaaataatcaaactcaataaaatgaataagaagcctcaatataagtcactaatctagcagttccatcaaactactcttttgtttttttttgttatgtttatgcttaaattatatgactgcaaatctacagaactcattcatttatatatatatattattaacttatgttgtaacatcaagtatactaactataagaattcttaataagaaaaattagaaaacaaactagtaaaattatctaataaaactcctaatttagtaaaaaaagtggaacatatgaataagtcaaaattaaagttaaaaaaatcaaacttaataaaatgaataaaaaaccttagtataagagactaatctagcactaccatcaaaact

SEQ ID NO: 191326 - DNA, 1714 bp, Cannabis indica
  modified_base (97)..(97): a, c, t, g, unknown or other
ctctctctctctctctctctctctctctctctctctctctctctctcttcttttcgttaatttctttacttttttttttttattatttgaaaaaagntgaaaaatatgtggaagaagtagtgactttaatcattatagtaagaattttactttaacggcttatttgaagaagtagaaaaatgaaaagcaagattcttcataaaccaaacaaaaagaaaatacaatgtgcagccatttacatggatcatagtggtgtggtaatacacagtcttttgtaattataacccaaaagaaaatttgagacaataatatataggtagattttaataccagtgcctatactatctctccatgaaagacaagctcttagttgcttgacagccttcttaacattttctcctttggatttcaaaaacctctcaacacatgcctcattacaaaacttctcctgcaaatagttgaaaactatatatgatcagtacactcaactattatctgtatagaatagagaacatacagataataatagaactgaaagaagaagaacaaaaaataggtacctgttttactgttagaggtgcttgtttcttgagaagctcgagaacagtttccactctagtgttaatattcactttttggtctttctttcccatttagagatagagagattttaatgataaaaacaaacaagaactaggtttcacaagttataataactctagtttcttcaaacccaaaaccccactaatataccagacttcaggttcacgcaattttcatcaaacaagagaaagaacaatctcggagagtgagagagagaaatgagagggaaaataaattaaaaagagtggaataatgaaataagtggtaacgttgaataaaagtaagagcaagttaaagcacctatatatagcaaaacgacggctaataacgccgttacgatgcttcacacttacacatgctaaagaaataataattaaaatatttctttttttttaaaaaaagtattggatttaattttaaacataacgtcaactgcatcatactttcggtcaatctctattctaaatcgtctgtatggtaaggttatggcatcattgcaaatgatgggttgtccgatagtgattcgtaacggaaattaaacgtccgctggcccaggcccaggccattagtaaaaattaaaaaaaaaatcacccaagcagtcacttgcattatttattattactttccttctttagttcctattatagctaaactgtgtcgttttagccttaatattaatagagagatgagagggttattcagtgagatagtgggaaagtgggtgtaatattgtaataagttaaaaaaggctgcggtggcataggagtgtaaattaaaaggaaagtacaatttgttttggtaaaattaatgagagaaactataatgatagtatacctttgtagaggatatcaaggatcatgatgataatcaatattggggtctcaaaatctgactcatagctatatatgtataggcctatatgtaaatatatagaccacgaaaacacaacaatccatttgcttttcaaattagtttcatcaactcgtgaacaatggacaataataatacgtaaaagaatcaaatttggctttgttaaacagtatttccctttgtctttggtctagctccacagttaattttcatcactacttgtcagctttttttttttttt

SEQ ID NO: 191327 - DNA, 750 bp, Cannabis indica
aaaaatagcacattaataacacaagtgggtggttaatattatatatgagctcatcatataattaaatatgtgatgcatgcactcactttttgttaccatagcacccttttaagatcgatcgttttcggcttatatatgatcaatttgctttcattagacaagaccaactttttgacttgtatttcaacagtttttatcaaataagttagactagattcaatgcatgcttggttgccagttagttacacattttgtgtgtatatatgtatgtgtcttaatggcacacttaagtgactatatgtcaaataagtgtccacacaacaataaaaatgtggtgtccttatcatcgatcttatatatttaattactaataaattataattaattaagtagtagtagtactaatgatatataatacgtatatatatacagtaaatcaaggattggcaacgttggcattctttggggtaggagtgaacttggtgctattcttgacaagggtattgggtcaagacaacgcagaggctgcaaataacgtcagcaagtggacgggaacggtctatcttttctctctagttggtgcttttctcagtgactcttattggggaaggttcaaaacttgtgctatcttccaagccatctttgtccttgtaagtcccacctcctatgtaaatcatcatcttcatcttaattattaattgtatgtatctttcattttgacatttcaactcaataaatatatatatatat

SEQ ID NO: 191328 - DNA, 3679 bp, Cannabis indica
  modified_base (73)..(73): a, c, t, g, unknown or other
agtatccactctattcttattctgtcgttctatctagttgttcgtttttcttttctttttagacaaaaaattntttatcgttggtttttttttctactataaaaacattgtactgcatactaaattactatagactatggctctttgaccaattaacttgttctatttctatatgtttttcatttgaaatacacttcaattatattttcaataatgatgatgtttgttctgggtaatttcttggaaggatcgtagaaactacttttattacgttttttttttctaattataaaaaaaaatgtgtagtcatgtcaatatcatatatgactttgttgtgtgaaatgaaattgaaaattttagcctttttcaatatctcactaaaaaattatatcttttttctccctgtttttgcaagagggaaaggggtagcaataattatttccaagaataaattacaaatttttgaaatctaattttggtagcataaattactataattttttcaaaatttgcagaattttttttttaaaaaaatatgttataaatacaatgaatatgattttttttttaagtaataagtaatttacattactaaaataaaataatatgaaaaagagatgacacaaaatttatttatatttatttacgagcattattattaaatacgagtattgttctatataattataaaaatggcattattgagcaactagcattttttaccataattattacatgaaaatatatttaacccaacataaattatgtttttttttctattaatattaaatagttatttgataatgatagcaatttctttatattaatagagacagaaagttaattgattagtgatgattagtgatcatatattacagacatccctcccgtgacttaataatataaagttttgtagtgatttaaattggccggtgattaagactttaatttagtcactcaaaaatatttcaaaccaaatatatatatgtattttattttatttatatattgcatgagcaatcatgacacacaaatttaaattattattgttttatttatacacccaaatattactatattatattgtatcaaaataataataataacaataagtcactattggcatgaatatgaatatgattaactaatcttttaacgatgcatgctgatgccttggtataaattataataattaaaaaggaaccactaaaataaagcttttcattctttttttttttttgaaagttttctccaccttgaaatcattaataatgccaaatttacatcaaagtacgtgttagtggatcaaaaagaagaacataaatcaagattgaaagttgttcaattaaaaatcttgagctttgttagtaagaaatcaattatatttaattactagaaatttcagttactcaattgatgtttgccattttcttttatctacaaatcaatggctaaaaatatttgattattttcattctatattttttatctttatatttcattcaatactcataatcattcatatatatatcaagtttagtaaataagagaaaaatgttaattaatatacattacattaaaagaacataatccatctttatacaacacaatcaataagcttaattagtttgttttcaaatttcaaacaataacagcttatatataatacactcttcaattaagaacccccaatattgaaatgtagaaagaaaaaaaacaaagattaacaaaattagcaataaaaggaaacattataataatagtaataataatgttatgaagcctaatctgcaatgaccttgttttttcttctgcatttgctgtacaacttagatggtggagatggagaaaactcaaagggcaatggaggtagctccatctcccctctcaaaatcctaacaatttcgcctatatcaggccgaaattcgggcattttctgtaaacaagtgatggccaagttgatgcacaagctagcttgatctttgttgtactcatctttcaatctttcatcaacaagttccaaaatgttaccagcttgagctaagtgtctacaccaacttattagattcgccttttcgagtttcatcggtgaagcaagaacatgtagtggccttctaccagaaacaatgacaagcatcagtactcctaaactgtaaatatcagctttttccattaagtatccacagccaccatattctggtgcaacatagcatagtgttcctctcatactagttgtgctactcagctctctactgaatatatctccactccacatatcacttccaattgagttgttgttgttgttgttcctcttctttttccaccctcttctgaagctgaactcaccattttgatgatcttcacaatcaatttgaccaccctgatcatcaaaattctttcttctgcgaaaataaaaccgcctccccatatcgaaatgtgggattttgaagccttttctaaacttggctttaagccttttcagcttattactactcttagtactattactacctttcttcttgttgctaatctcagctaagtgttcttctttccaccactcttgcatcttctttggtttcttctttcggtttttcttccctgaaacttcaaacccgaatgcttgtaaatggggttcatcatttgcttcttcttctggtttatctaagggagctgaaatgtccatgtcctcctcttcctcctcttccatcatcatcaaatcagctttgtcaggaatgctcttcttttcttcatcccaatcaggatttgttgttggtccaatttgactcccaatccattcagtgacataatctttactgcataattcaccactaccatcttgtctccaccaccaatctttcccccactgtttcatatcaacaacctcatcaacaacagaacaagtgtttgaattggacaactccttactatgatcatcaatactacaaggctcatcatcataaggaacaacaaacttgttatgattccaacaatcatattcaccaccaccaccaccaccaacaccaaaatctactactgttgaaacctctttccctttagcatttgcaatgttggcattataattcaaagaattcaagttcaaagctttaacattataacaagctttactatttttggaagaagaagaagcttgtaaagcaagagcaaaatctacctcatgaggactatcttccactggtgtactaattgcaggaggagtctctggagtcaaattcccagaaagttcttgacttttccccaaatcttgactaaacatatcaacaccaaactcaccctcaaccttaatccttgacaacccaaaatctgaaatctttgctctgtactcaaaatcaagcaacacattacttggcttaacatcaccatgtataacaggtggatcacatcccaaatgcaaaaactcaagtgtctctagcaatgtccaaaaatgattctcaaaccttctttcccaactcaaaactcaaaaccccatctccaaaaagtgactcttgtaagactcttattaggcatatactcataaacaaggattctattattcctctccaacacaataacccaaaagggtcaccaaaatggtgatcttagcccaccaagaatctgcaactcattctgaaactctctctctgattgcaaagacaaagcatcaagtctcttaattgcaatc

SEQ ID NO: 191329 - DNA, 1822 bp, Cannabis indica
gattcttttttttttttgaactataacaaaaacaaaacagagagatcttaaattataaaagataaagtaaataaaaatggaaaattagttaatagccagatgcataaaagaagattcacatagaaagataggaaaaactactgtcttcttccagttcagccttggtaattttttgaacaactactagggtgaggatgagtggccattaaaaaaaggttaagaaaaaaagtgactttcattaacccttctccaagtcacaacagagccagcgaagggaatgagtttcaatacaaaaggtctcattctcaatgttgaatatgtcaaatttcataaggttgtaaaaataaataataaattaagttcagtgaaatactttcactcggaagaaaaaggttaccattacaatcaataattaaagtgtatgcggccagaaacttaggcacttagatggaaaattgaaatgtcattattaatagatacgattatgtagcaaaacataaagcaacaaatcgatactttgatcacattatccccgcattcttataaatttgttataaaataatgaacataaataagattaaaaaaaataaagtccaggaaatattgaagcagcagaaattacaaaaccattaataccttacctcttcgtctttgacatatggttcaaaccaattccacagagtcttcggatctgcagcatacctcaaatagaggaatccaacctgcagcacaatacacaagatatctgacatgagagcatgcctaataacccaaccagtttcataattagcgataatagttcaaggttggagcacataatccatacgtaactaatgcaatcaataaaaatgaacccttgggttcctcctggaagattatgattgataaatttaaacgtttaaagtcatgaatcacatgttaatatttaatctaactccagcgttcatcacttcatcttatatgttgctgtggaaagttaaattaattatcaggaagaaatgctgttataggcattgtatatatccaagccagtagggaaatccagggaaaagaaaaaactaaggagcaacatatcaattgaaaactacatctgatagtcagaaagtctcaactactaaagcaaaaatgtacacatcaaaccttagcatctgaaactgaaagtctcagtaactcaaagaaataaggaaactccaaccttgatttgtaaaatctgctaagaaaagtgcaatatcatgctcatgatctttctatataatgactgaaagtagaaatttaattgaacttgcaagttaaactactaatggggttccggaataaataaccaaatactccaaattcttgtgcaggccatgcaggcgggcagttctatctttcactgagacatggaaactatgaaatagaaaaagaaagaaaattgaaaacacaaaacactttacaggtagcatcaagggtaattatatataagaaaagaagaaagacagaaggactctggaacaagatacagacttgagttcctgggaatgaagctctagttctacttctacacccaccattcaattttacaaatgagatcgtggctagagggagattcagtcacaccaacgataataaaaatttcagaaggattccataaaacaagtaattggaatttgaaaactctaataaaagaaaataacattaaatttcaagtactaaaatcaagaaacaatagtgccaccaaaaaaaaaaaaatcgagaatcaatagaaagaagcaaaaaaccaaccagttagtctccttgtgtgccttttaatatactattttattcattatgtaacacacac

SEQ ID NO: 191330 - DNA, 1589 bp, Cannabis indica
tatgaaattataaaattttcaaattaatcataatgaatttttattgtgccacaattatgattgtatagtgtacaaaacaactataatattcgttttatggttacatcatttttcctcacggatctcatcactcaaatctcttttgcttcgtcatctttcttatttgcatataggaagagcggcaaggagggaatcgtctgaaccatggaagcttcgatcaagtgaaaatataattttaaaagtatttttacttgtttaattaaaaatataaaataaatgtttaaaaaattatatcctaagaacactcctatcaacttctctactctttcatttaaaataaattatcaaaacctcactttttttgtatattactattctactcttttatttaaaatagattatcaaaaccttcattttttttgtatattactattagtgcatagcaccatctataagtggcagtgtataaataatgaactatattttataatagatcatattccttattttcatttgtcatagtaatggaaattgttggctgtccaaattagatggtaaccctagttttttaaactacataaggtcaaatttttaaaaagggcacgtcaaaagactcaacaaataggtttcttatttgatggaacggaagacttagtcaaataacaacttttttaggaatgtctaatttaacaaaggataatcaatggagcattgaatgaataaataagcataacaaaatcaatataatgcatttaaagtattttcaaatactatttcattgatgatatatttgtagtctaaattcgactctaagatcataattgacaaattgaagaaagaaaagagtagtgcaacatagtgatatagcagtagtaaggaatacatatctttattagaattagaatcatgagatatatatataatcaaagagttcccaccaaagtttcaatatggtttggggttggggttcaatgatattctacaaggcaggcaccaaccaacccctcattttttcttttcttttctgttttaatatatatatatataattatatatatatatttatatataaaactactgcagtctgctcatggccttggagaaaataataatgagtaaagaaacaacagaaacagcctctgccatgttatacggcaaaaatgttcagaagagaggatatgttaatcagcttagcttacaataacattgcattttcgcctttcaacccttcttcgctttgaatcatcatcatatgactgccaagaaaacaatgtcaaactgatgtaagtaaagattatacactttcaaagtgtaaacacatgatgtaaatacaaaaacaaaaaaaaaataaacctacgtgtcattgtagaaagaagaggaacccgaactacctcctttgtagccactcaccaaactacgtttggtacgagtataacaatttcctaaactagtttctagtacggttagttttaccttacttaattcatttttttaaaaattttaaaactaaagtagtttaggtaaaacttaacgtagtattagtcagcatagaactgtaaacgaaaaactagaaactaatatatacacat

SEQ ID NO: 191331 - DNA, 1451 bp, Cannabis indica
aattaaaaatgatagtatacatataagttatacacaaatttgaacaaaaaaaaaaagttaaaccaattttagtaaaatgagtctcgcttgttaaaactttttgtcatataagtatgcgtcaagtttgtttgtgcacaaaaatcacatattattactcgaatttaaaatgttcacaaacctttaatttctcacataaaatgggatccgaaaaccatgtctcatcaatcatcacatctggtgtcaaaggtctcccattaaacgaaactgcagacattgaagatgtgaaaactaccctttttaaagaaggaacttttacacatgaccttagaacattaagtgttccttttactgctggatcaattagttctacctgaaaaaatatagtgttaaagaatcataatatccaatatgaaagttttctgttaggttagttatgacaatatgcctctcattaagataaagtagaatatgaagtttaatttcatttcttataaatttttagagtaatgtacacataaaatatgcactaaaacactatttctagtgatgtgataaaacttttttaaactataaatttagtcttaattagatgtgattgactgaaaacaaaaacattgtcacaacactgagtttgaatttggtattttgattcatattttgtgtgtacatattattattcatattcaagaaatatagaaaaatgaataagcgatggataaaaaaaataaagatcacattagataatatgtgaaaattctcttcaaaaaaaataaacaaataaatgaaaattaactatttgaaacctgattgatgatataataattcgataatacaactaaattaaacataaaggaaaatcgaaaagggattatttcataaatacacaaaaataataaaaaaaattacaaaaatacagttgtacgaaattttaaatatttttacgatttttatgattttatttacagaaaatacggtatttgatatatttttatgttgtactcttgttagaaaaaacaaaaatgaacctgaggattagtagttgtgataattgcaggcgaagcggtatgaaaaacgcattcacaaccatcaactacagaatcaaatgatccttctttcaacaaatctgcctcaaacaaatgaagtctttcttttgctccatcaagtaacaacaaatgttgtgttttctttgaatcatctacacacaaaaaagttataaacaaatataataaaagagaatttaacaatcacttaagaaattcaatcaaagtatatggagattttgtggtaaaccccttaaataaaaatagattactttatgtttgtggtgtgtgttggaaataatccaatttttttttatatataacaatgtttattatagctatttatgatatttcgtaaactttttcttaaaaaagttatagtataaataataaaattcaaatgttttacaa

SEQ ID NO: 191332 - DNA, 4124 bp, Cannabis indica
tacaaaagatgaaggactagacaccgaagataaagagtagaccaaacatagaatttgtttttttttcccttttcctatattatattttttaatttattttctcaaatgaacaggatcttagaggttttttaatttgcagtttacaaattcttgcttgctctaggtggaagagagaatggttaattttaatttgcttgtgaaccacagaaaaaagaaagttagaaaaaagggctcttgtaaattttgattatagatttttgtttctaggtctattctttgaaaggaaattacattaattttgccgaataatatgttggctggagaatgcattattttcttgtccaatatcattgtactgatgacagacagtatattttttcattcaaatatacaccattcattattcaatgtcaatattagtaaataatgatgcaaatcagcaatatgtcaatgtcccttgacccaaatcagcatgttatgagttatagtgaagtctaatgtgtgcttatgcaaggctggggttaacagaataagaagaaacaagattgaaaaacatcagtaaataatgcatttttatatattaaaaaaatggtgtgtattgataaaatgttatagtaaatttgaattacataaaaactaaacaagcactcaagaagacttgcaactccacttttcttttactcccaacattgcaaaactacagaaacacttgaacaatacacatttgtaagaacaaaatagaaacctaaaaaaagtatttcattatccctcattcggcattattgcagaatgaggtactgatcttctggccctaaagaactacttttaaattcccatcagcagcagtttcccgttctgcaacaagcataagcatctcaaggcgtttgtcaaaaattaatgcactctcatctctcgcatcaagatcagcagcctcagcttctagccacttttctcgtagatcatcaagaagattgctttgttccgtgttcacctcagctcctggagcacttggcacagttgttcgtagtgaagaatctccagatggcggcggcagtgtcaatagcattgctcggaattcacaagtttgagcaaatgtctcaaagttgcaagccatcatgtctagacaatattcccgtaccttaagaacaccgtacctaaaatacaaatgtaataacaaggtattaggtatcttgctgcttagttgttaattaagcctccaactcaatttggttatgagaggtatctgaaaacttaatattatcaagaactgaaattttgtagaaaggaaataccaaccagaatatttaacagaggaagatagcattccatttccagatgtcattagttttacttacagcatgtaagtgcaatgttatatgctaacaagcctacacaacttacggttttttgggtgttttactgggttatattctaagaaatatcacaatatttttatagtgatctcatgttaaaatggataataattaaaaagtgtcttacatgtctgataatatcaaccattggcacagttctgctggtgaaactctttccaagtgtggcagtagcacatcagctacagcacgcttaagaggaaataataggtatctcgaagcagcatcaaagatttcctcagcctgttcaattattacaataaaaataagaaaataacgtaaactgaatgcatcttcaacttagcataaaaagaaacttcaaaggcagaaaaccaaaaagagcgactttgaggttattactattactacatgaatggttataatatacctgctcagggtttatatcttttaaactatcagtatacctgcataaaccagggaaccattaaaaatgagaatactgtagccaaactagtacagaaagattaggaaggaatctctaatacaaaaatttgacaccaaaacttttgattttcataatcaaaagaaacaatatgaaaagtagtaatacttctcattctaaatgttagtgcatcttcagaattctatagttaaaaaaatacacttacataaactcaatcattttctcaaacgcctccatgctcaaatcatgttcctcaatacatggcagggtatcaaaaggtagcccatcttttccttcatgaaaatctttcattcgtgataatcttgctctaaagtactctgatcttgatgccaaaaccacttgatggcaacggaaaatctttttatcaattttaatgcaaacatcagctagatcatcttcaaaattacttatacgcattctatcagcatgagatattaaatcctcaacaccattaattaagttaggatcaagggtcgaattggcgagggaaagttgaagtatgcaacgtaaggagctagggagacggtcttcttcaggaagggatataccctgtaagatgaaccgtttctgagagttgtcgacatcttttaatgctttatagtcagcgaacttttgatgaatcaattctttctcaacaatcctttgtaaagattcacatttgcatactttgcatatcctcaccagatcttccatatcatcaaccgcaatctcaagtctatcagagtaaaagaaatggatgaggctataaagagcaggataagacaacttttcccttgccaatctcacttccttacggtgtttccaatcattctcaaactttctcttaaaaaacggtgatcgaacgctcaaaattaccctgtgggcttcaatgggtctaccttgcacatgaaatatgacatcgggagggaaatggttggaattgaaagccagactggatggattacctactcacaacattacatgtcaagtaacacattggtacatctaaattccatacgagaaatcacaacataagacacgctcagtggagacagacaccaaactctgacgatattttccacaattataatgcacttccatggcacattcactaatcaatgccaacagattgtgctgtccttcccaattgcactaatcaatataaggaaatcacctaagttaaatttcgtaaatgtgtaagtaaacacacgattgtatagagatagtgagacatagtttgagtcattggaatcatcattctgtcatgtataataaacaagccttcaaagtcggaacattcccatgattctttaccctattcctacctaaaatatcaaacacattcgttcgcatgctattgttgaactgtttcgataacggtatagcccaataaccattcagcttctcagcaaccaaagctttaatcatatgtacatacaacactcaaacacagaatacgacataactcagaaaatggagatagaacgcacctgaaatctgaaactgacccatatcaacctgctccaagtacaccctattagcaccgcagctcaagaaagtttcccttagagcagcctgcaagggagccaaaggcgggggccttgcctcaaaggccttcaagagcttccgaaccttcaaattgagagccgcgtagtggcagcggtcgccatcgaaggtgtgctcggaacaaacggcgccgctctcgagcaacatccgggcggcgtcgaggtggccggcgagacaagcgtagtagagggccactgagtcccactggtcacgggcgttgacgttaacaccggactcgagcaagtaccggagccgatcaacatcaccggcgcgggacgcctcgaaaacgtcgccgttggggactttcttgagtgggaccgaggcggaaaaatcggaagggtcgaggtcgatcccgtcgagctcggcgtctaagctccacgcagggcgtgcggtggcggacattgggttcgtttggccccacccaactaagtcctttttttcgtacaaagtgtattttgggaagttattaagtggagtgaggtgaaggaagatgaagagggtgttgcacacaacacatataggaggggagggagattttttttttcttttcttttttaaaggagaggggagggagatttatttggctattaaattattaggaaattatagcatatggcaataaataatagactagttagtaaataagtttcatttcaaaatttatagcaaaatgactatattagattttttcttaacaaaaaaaaaactttaatcaaaccccagcaaatacattacaacagagg

SEQ ID NO: 191333 - DNA, 3406 bp, Cannabis indica
ggtgggggaagtgtcacagtctcatgcgccattgcacgccgaccactagtatacggtcccctcgtacccataaatactctacaactaaacaaaataacaaaaggagatctaagagaatgtatgttaggatcataagagaaaatgagaagaaaatcaactattataaagggtttcttttgtgtgcttgtcattatactctttggacttccaaactacaaaaatgagaaaggaatataaatatcaatataaatatgtatgtatgtatgtatatatatatatatatattaatgttttgaaaacttgaaaaaaattaagtttggatagttgatctcttttccacttcgacaaaattatatataccaattttccaatttgaacaacagcaaaatttgcttaggctttcttcttcgagaaaaaggtaaaagattcatagggtaataaaaagccaaaagaatacatacaaaacaaatggtttaactaacacatttcatattgatatatgtcttacaagagttacccaaagacatgttcaatattattttataataataatatcaaatattattcactagttctagagaaaggccatgtttatctttataattaactatattggtatatattattttttagagaaatatattctctgttttagacataaaataatattgtatttgtatgtagaaacagattttgctgagtttgaagggtcattaattgatttacttagaacaaaaaaaaaaataatgcactaaatcaattaaaatatagagattgagttagtgggtattgctttcaatttttaataaaagaaagtggtttcatcatgctgacatatgatgacaccatgatcgatcgatccaagcaataataatattaataaatgtaaagatccataaaaccttagcaacaccaaaaagagaggaaaacataaagaaaaagaaaaagaaaatatcttcttatgttcatgatcatgatcatggcatgggtaggttatagatttttattgtataatatcttcaaaacaaaagacacatcacaaatttcgtacataactttatgtggtttcatttgatttggaaaagaaatatatgttacaaaaataaaaatatctttctcttatatatgttcctcatagtggtacaacctccatattcatggccaataagagtttgcctaatacattagttaaagaagatatttttatgtcattcaataaaagaaacttaatttgttttctataaataaaaaaaaaagaaatgaaaatgacactataaccatttaattagattagaaaaagagagtgaaatatttatttaagggcttaggagtggatggtcattctgagagttaattaagtgagaattaattcaactagcagaaaacattactcaagaaaggataggttgtaattggatgaaaatgatgaattaattgtctcactcattttctttctttaattaattttattttacaaactgataagtatatatgaggagtaccctttaaacatttttcttaagaatttttttaacattaacacttttaattacactctatggggagactatttggtcactatatatatagctaactataggtcatcaagtactataacatatgcaatttggactaacaaaggtctttgactattatattatgctatttattttcatgtaggaggttactgataatattgttataattatatattaaatatatagtagtagagaagctatctagaaagtgtatgtttctaccactagttagctagtttggttttgatcagttataataatattgttggtattgttttttctgtatattaagaatattccattcatagagtactttcagtgatatattaaaatacttttcagtaatatattataggaaatttatgaactaggcccttttattaggttattttgatagatgttatatttgtttcggtatttaaaaaattatttagtttattttcttttatgattatctacattatacttgtttaagattatttttaaaattttaaaataatttaatagtttgcacgtacaacaaaatatgtaaatcttattttcgacatataaactactcagaattttctaaaaattttacaggtaattctaaataaatataacatacacagtgatgaaaaataaccggactaaatagttttcttaagtactaaaacaaataaggagtctactgaaatacccctttaaggatgtaccatgtagacaattaccctatattataaagggacgctattagaaatttatgtaataaattctcctaagggtcgttctggtagaccacttatttgtttttgacattttagaaaatttttttttagtaattttttcattcgtgatcatgtacgttgtagctatttattaggaccacttgtatatatttattttttttttgaataatttacaatactaaaaataaggtttaaatagttacgtactgtatgtataagaaaaaatagttgtgcgtacaacaaaatatgtaaatattattttcggcattataaattactgagaattttctaaaaatttataggtggttctaaataactaacatacacgattatacaaaaaagttggactaaaaagttttcctgagtgtcgaaatagataaggagtctaccgaaacacccatttaggggggtgtattgtagacttacccaatactattttggacaatgcatgtgttttggtaaaaattattaattggattcttaattttgttaaataataatttagactctgtatttttataaatgatacaaaataaaccttgaaatcaatttttaatatttatatatatatttttaatataaccaacatgaagctagtatctagcacgattacaaatacaaaaaaatataagtaatttggtaataacacttaagtcagattattattaaattttaatttaacaaaaattaaatttagaatctattttatactattttgaaagacatacaagatttaaattttcatttaacaaatctaaccagcaaattttgcaaaatatatgtccaaattagtatttagcatatcataaattttattttatgtacttttaatttgggtatctaggttctatatatatttcattatgtttaatttgatgtattttttttatttgtagtaggtaggttgtatatatatttgatcatgtagtttctaataataataattaattataacaaatcttagtttagattactaatcgttaagatcaatctaaacatcagctaacaattatagacataaataaaattaatacatgcatcatctcctaagtcaaattaaattcacctaaaatatatagatatgatattcctcatttaatttggctaacttaaaatataaaatagactatatcatacaac

SEQ ID NO: 191334 - DNA, 2543 bp, Cannabis indica
ttagtgtgaatttcaattgagaagttttatttggctgtttgaaattcatctggaatacatggttaggttataataaatttgtggtagtcataagcacaatctattggttaggttattaataaattttgtggtagtcataagcacaatctattggtaatacactctcttcaaagagaagagattccaagctcaaattctccctacccaagtaaccaaaaaaaaaaaaagaaaattgtgagctactgagcttaaaacaattagaccttgataaacaaatacaaataataaaaccagtaatagaagcgaaaactaatagcttttcgtctatcctgtctaaatatatcctaggctttgtatttcccaagtttccattcagtttttttgaactttgtgtgcttaattataatgaattaacattatgtgttaattcttgtaattctaagattattaatttcttatttcttatttttcattttacatttttttaatttcatgtaattcaaagcttacatattacataaacgtatgaatgcccaatttagctacggctataatagccatcattatgccactacgtaaattctgttaaaaacagcgccatgtaaaagtagtagccggacaaaagagtgtggataaaatgtacctggccttcttagagccatctagcacagtttctttaaagtgctttatttcatcctttccagctggaggcggtgctttaggatgagaagcaccaaaagaatgattctcagaagtactgggaacacctagagcacgtcttaactctcctgggcgaggatattttggatttcccaacgtaataggctccaatggcaaacattgaggcaatggtggcacattagaggatggtgcagtactcctatttaaattatttcctgagcctaacattgtttttcccctaatgccttgaaatgaactgaaaaccttatctgaactgaaatgaacttcaatcaatgcttgccttctaatttccctgtcattatacaaaaaccccagaaatgggattaagttatcaattaacaacttagcaaagtaagtaaacaaaagaaatctactatctttcaaatgccacttgagaaactaattattactaaaataaaacttaaacctacgaggaaaatgtgacttagtttctaagaggaaaatgaatcaagctaaataattttcatcacaacaagattggattttgttttccacttaaatatatccaaaaaagtatcaaactttgaatgcttccaccaaattcaataacaacacccaatgatcccaacaaactcaatctgatcaaacaattacatatccactaatcaactacgtttcaatttataaatatcttcacagatcaaaatacacacataaattagtaacagaagctaacctgatggcgaatcgtgttgatcggaggacccaattttacagaaatagaaactttatttgggggtttaagggtttctagtcgaggaagtactttgtttgattttttgggggtttaatcgaatctaaccatagctcgaagagctgaagatcgaaaaccctagatcaccatcagataccaaaaaaacaaaatacagataaaattatgtttatataaacaaaattgaaaaggggaaattagctgaaatcaaaggaatttgaagaagaaaaagagatggtcacctgagattcaacggagtcgagagagaccagatcatacagagttgtacggacaaagataagaccaggattgaagcgggagatggttgagttctactgtatatatatacatatatatatacacataattattttgtaaattagaaaaaaaaatatatatttattgtaatttttttttattttaaataaataatagaattttattaaataaataatgagccaaataatgagtctattaacttttacatccacaaacaaattataaatattctaacatcacagttaattttaaaaacacatatgttaagtttcatccaaaaagatacaacagtagaaacagttatagcaagtttatttaatctcctagctttagcacttaattattgtactaataaccctttcagtcgcgaaaaacttgttattcccaacggctaataacgatttgatgacgaacattgaagaacaaagaagaactaataatgtcacacatataaaattgaaacacttaaaactatgtcataaagataagactaaaacactcaaaaatatgtcacagagacaagactaattttatagtagcgaaaatcgaatcgcaatatttttttgtattaaactattggtagcaaaaaatatatatatatatatattttaatataattatattttttttatgttatatggtaatggtgtgattaatgtaaaaataaaaataaatatttgggagtaattttttactttttatttttcttgtgctttttgttaagaaataatggagtttgagatgaaaatatagagaagatgaataaagtgaatcatttatgatattaatttagctttacataatttttggatgttaatttttttttttt

SEQ ID NO: 191335 - DNA, 1186 bp, Cannabis indica
aagaatgatgttagtaagcataactaaattggatatatattttttttatatatttgttcgtgctaaaaattaagttaaagttatattaaaaggaagatcattaaaaattgaactcagagtattattttgtattattttaaaaaatacagaatttaatttatcagttaataaaattaaaagaactaattagtattttttataaatataaagtgcaaaataatatttttaagttatatttttgtatccttataaccaaaccgaatttgatcatatctaatcaaattattggagtccaaaatattaaatatataattttaaaaagtactataaaaatattattaaaaacataaattacaattattttaattgaaaaagttagtgagaaaataagtattgaaaaaattgtagtacattcttttaaaagagtgtttcggtacactttgtaaaaatttcattacactatatctcgttcaacatttaaaaaaaaaaaatttttttttttgttttttatatgttgtaaatatttaagattattagtaatttttttaaaaaattaaataatttataaaactaaaagataagatttactaaacatatgaaaaaaataattactcctctaacaaaatatttaaatctataagttttaggatgatgacaaacaaatacaatattaacatttggaaatgtttgtgataagatttcaaagtcaaaaaagatgacattgaatacgacgtcgtgcatgcaaatttggacacatcttgaatttattgattttatatattaaaataatggagtggagtctttatagtaagagcactcccgtgatcatatctacactatattccctaaaatatcttattaattttgtttatttatttaatctcacacatttacatcatattatacattaatttctttaaattatttaaatattatatctttacatataatttattaattaaaaaataaaataaaaaaataataaataatagaaaaatttacagcaaaaatcctaaaaaatttatatttgatgcaactaaatttgtaactttaaaaattaatgataatagttcctaaagtacgtttttctataagtttaataatccttttttttttaacttgatttgttaaaaattaataaaataccacatgttaatttttttataagattttttttatttttaca

SEQ ID NO: 191336 - DNA, 3243 bp, Cannabis indica
atttttttttcatggcaaatatagccagtaataaattctttattgtcatattatatattacatgaaaaagtggtcatgtatttaaggcttaatagttttatcatgtagcacatgacccatgtgatgatggagatgctaatatattttcatttcccaaaagaaaattaattaaataaaaatcttaattcacactttatactaaaaataataagctaatcacatatagaaatatacaatttttaaatcgaggatatgtgcgactacttaattaattattatttttttacatgcacatacacaaattatataaatataaaaatatagatacatactaatttacattttgtgggaccaaattttcttaaaacacaataatactattttaaatattattttttataaaaattattgatcagatcacttatgttgttaaatgataatattgaaccttatataataaaacatggtacaaaataatactttaacctcaattttcatcattttttttacagttttttacatgatcacagacaaaaaaatacaaccagttcgttcataacacatctaggtcaagttaattattatattagattttattttgataaaaaattagtttagagtattattttataccttttgaaaaatataaagttaacaaaatagagaatttaatcaataatttttacaaaatataagatccaaaataatatttactcttaattattaaaatttaaattcacaaaacaaaattaatttggaaatgtatttacttatttcaaaaataaattctcaatctataattatgtatatttatatcacactacatcttttttgttattgagaaatcagcaagtgttgttcattactccaataaactttgaatttttacaaactaaacaacaccctttatccaacggcctgagataagtattctatacaatttacaatgtattaaaccatgataaatcttccaatgatactttgttaggccacacactatgtattctatttttacaaatatttttcagttgttgtacaagatcattcgaattctcaattgtttgctgccaaaatttcctatttctagttttccaaattaagtacaccaaggcagcaattgcagctgctatgaccctcttttgaaagccagaaatcttccttcgatcaatgcttctcaccaggctttccaaccgggttgctgaagccttccatcccatccatattttcacttgttgaaggcactcaatagcaaaagggcaatcaaagaataagtggtcacaagtttcaacacctttttcacacaataagcagttcacatcagctgctattttgaaccaaaacaatctctctttggtcttcaatttattttgaattgccagccatattacaaagctatgtttaggaatgtttagtctacccaaacttccttgctccacttaattcggttctcttaggacataacaacttatatcattctgcaactctatatttgttttgaatgaaagaagaaggggtagttaatgttagaatggtacatttcaatgctacaatcttcctccaatgccagctgccttgttgtggagccaagtaactctaccattcgacctctttgatatatacactatgaatccattgacccaaagattgtcctccttggttacaattgcccaacatatttaaacatcactgccttgttccattcagctactctcttaaatctgatacctcctgctcctttagtttgacatatatttttccaagcaatttgacccagtccagccatcatttgttgccctttccataagaatgccttacacacagcttctatgtctttgataatcttctttggaagcaacatgatttgactctaatatgcatgtatagtgagaagaatcgagttgattaaaactgcttgaccagcaaaggagatgtgcctggtgctccaagttcgaattttgtgagtcatcttatctataagtataccacactcctttgaggaaagtctcttggggctgataggaatacccaaataggtgaaaggaatttcacctatctggaatcccaatgcatcaattatgcgttgtacttcagaatctaacattccattacaatagatagccgacttcttaggttaggttgcaaccctaatgtttgtgaagacaatttaagcccctacaataaataatagatgctcttataatctccattgcaggatagaagaacatcatctgcaaaaatgagatgattcaactttagttctctgcatctatatcatgaaaggtgaaatctaatttttgccccactttcttcattattctggtgaggtattccatgccaagcacaaaaattaatggagacattagatagccttgtctcagtcctctctttgcagcaaagtagcaaagtagccatgaagagatccattaatcataagtgaaaatttaggcaaacaaatgcataccataatcagctggatgaatgactcagaaaagttcaatccatgtaatatttcttcaataaagtctcactccactgtatcataagctttctgcaaatccaacttgattatgcagctagctcttgtcatcttccttccataatagcgcacaagatcttgacaaatcattatgttgtgcgctatgaagcgaccttaaaccccccttggttttgggataccaagttaggaagtagacatttaagtgttgagcaaatgagtttagtggctactttgtataatacattgcagcacgctattggtttgtaatccttcacagtgtttaggcattttgagcttcgctacaagagtaagatcagtattattaatttctatcaataagcagcttgtcttaaggaaataaattatggcttctgctatctcttccccaataatttcccaatttttttttaaaaaaagtagctcccaaatccatttggaccaggggcttttaaacatgggattgctgaatctgcctgcttaacttaacatcatctctagtgaagtcagcaatgaggaaatcagcctgacttcgtgttaacacatttccctctctgattatcatctgatgtacattcattcttctttgcatacaagtgcccaataatcccaagtagtattgtataaaagcttctagaacttctattggctcttttacccttttcccattagcatttattattgataacaccaaattgtgtcgccttctctcttgtatactggtgtgaaacagggcagaattctcatct

SEQ ID NO: 191337 - DNA, 1072 bp, Cannabis indica
aagtaatttcaatattaatttagtcaagtagtgggttttttttttcctactcttattattggttgtcgttttatttatggtattaatattatcttctccaaatgatgtcgttttgtattcctaaacctttgatctgaaccccaatccactgtggtattagacagagcacacagaatctgattgcgcgcgttcatttcttatgctgtctctcgcaaagcgactccaaacccttcctcaatgcctcggggccgccacacatcacctccggtggttccggaacgatgctgccggtccacccaggcgccgtcgcaagaccccggcacttgctcgtaagagggcggaagacaactctgagtggtggattgtcgacggagaagttcacgagatcggcgaaaatgtacctctacgcgagcgtttcgtccttcctagggataatattcctaataagcgtcggaagcagctcagggaacagttcatgcgccggactcgtctcgttatcaaagaatcggtttgcttctctttgttctcaactttttttttcctgtttggtttacaagaaaatgagggaaaatgaaggaatttcctcaaaatgtttgcttaattttaattaaaaggagcatgagccttggtgcaaaaggtatttggagctgtatcaagagcttagagaaaattgggagaggctttactgggatgagggatacactaagaaacacggtgaagatcatgcaaattacgagtctgctgaagatgatgatgacgatttttctccatataggttcgcacaacccattcttgtggtgccattaccactcattaaaatttgcttcttaatatctcgttggtcatatttacagtgtattaaatctttctcttgctagattctaaatattcctttctgtctttttgttgataatttcaggaataggtcatccaatcctgagcgactgaaggtacaaatttggttaaactggaaatttttgttatgcaattggatcaagaattgagaatgactcttgtttgtttgttttgattataatgacagtagtttaggaaaactgaaaattcactcaag

SEQ ID NO: 191338 - DNA, 2360 bp, Cannabis indica
acactgcatttttctgatacacataaactagatgaaccacttagaccaagggagcatgctagtgtggtgccatagaatctcaaaagttcattgccatcggcaagacaccgtgggtgtttcttggcgagtttgctggctttcatcttcaccatctctctgtgttcttcgaatcgggcaagagttttttgcatgttgtgaactttcaaaactctctcaattctaccacaatggttctcagatttcaaccaactggtcctgcatattatctcaacaatttttctggatgaatcaccttccacaagctcagtcactgtcaaagatgaaagagtattaaaagtctttagtagtgagtctgctgacgaagaactaatctactccaatatgagcatgttcttccattttaatgacttctcatttcagttttaatggagagtaagtaaatcagcgacttaaataacaaatttaccaagctgaaaaaggttatttactcagtcaggggatgcaaatcaaagaagagaacagtaatcttatactctaaaagctaaaaaggtgtagataaggataacacaagtactttttactcggaaagttttggtcagaaaaaagttgcaacttttgatgataagaaaatataaccaagatttggaagaaattcagacatgataagtcaccacaaaaaaaataataaataaataaataaagtttcataattttacctgcatgtttagatagatggtgagattcagcagcttcccatttgttgaattgttctccacatttgtggcaagtgattgtggaggaaccattagaatctgcatcaagagagatcctattactttggcgaactccattgctattaccaccaccaaaaatagcagagcctccaaaagcagccccatctgtgctattttccttatctgatagaagaaactgagactttcttggaggagttgaagaggtcttaaaggaagggttgaagtaatgcattgtagagtggcctccaggtccaggtgtgcctggtctcaatgttccaacaaaggttgacccaccaccaccacttccaccactactacccccactgccattaccaatacttccattcccaaccccttcttggaagccattaaagccagagattttgagctcacaccttgagttactcaaaataacttcatgtgttattgggtttaagaactcactgctccctatggatcttggactacagcttggaggtttctccatgtgtcttttacttccatggatgacatccttgagatttgctatggaccttgaacagcctgaccttccagcttttctagtcaagattgtgctcaaatgttttctggattttgggtcatgaacttctgatggctctgatttacagtgtagagacttcttcagcgagaaccaaacagttggcatattttaattttccttgagtaccctttttcttggctccactaataaagcttccaatgcttcaaatcttcacatttcttctctttctcatactattttttactaccatggaagctgtgaaaaataaagaaatatacttcaatttcagcctaaaagacctttcttatttatctttgatgcggagctctctttccctgaactttcacttccatttctaaacgcgaaaaatgaaaaatgagcaagcaaaatgaaaggtaagagctttcatgcaatgtcttggtgaaaacagacaagtctgaaaagcataccattcctgttgagtcctctcattctcagggaaccacccaaccagagtttatcaaacattttttgaaattttgggcaaaagggtcacccatggaggaagaagaaagacaagtggaaagttcccatgttctgattaagaggagaaaaaaaaaacagtatattaacaatttgttttcacaacaagaaatggagaatcttttaggctcttggaaagataataaaccctttcaaaacaaatgacaataaatgatataaatatatatatttgtatgtgtcaagaatggaggcacacagttaaagggaccagaaagagacaatggtcattatttattatttatttatctcatttgaattcaaaaggtttctgaacttgttgcagatttcttttacctggtattggatcttagagatttttcttctgtgatgagtacaatccaaaaatcaaattttcttttttacttttggctgaaatgaaatgattatagctcaaaagcactgtgccatgtatttactccaatcagatattaattaaatctattgtataattattgtcctctacaggtactattccattcactcagatatttttattcttttctttttcaaaaagttgaaattaatttcattatcttctt

SEQ ID NO: 191339 - DNA, 547 bp, Cannabis indica
tttttgctaaattatttttttcccagataaaattgaaagaacgtttctatactataaagaacgtttctatacttcaatatatatgtattaattttttgttttgtaattttcaaaaaatataaatattttttgtttaagggattggacatatattgaatttcactccagtatatttggagatggtctctttcaaacaacaaatttagggaccaaagctatcaaatataaatattaattggatggatgataaataattttgtatataaaattaaaattaattaataattataaatcataccttttcaaaataaaactacacaaatatctaaaagcacacttattacaatagatattgtggtctataacttatcttcatcttcatcattttgaagatgtataatagttaagtacacttacatggctcaaatttagtcaaattttgaagatatctgaatattaattagcacgtgctgatatatatgtatagatatagatcagtatatgtatatatattccactagcactgctgagcatcatcatcacaatg

SEQ ID NO: 191340 - DNA, 3211 bp, Cannabis indica
ttaaggcgaaacatagaaactaaaacacgaaaaagggatagaattttacctctattgcagagggaaacaatgtcattccaccaatgatgctaagaccagtgagataagcactatggccaggtatgtcctcttgaatttcggatgcaccataatccataaggaaaaggtgaacaatagacaagactatcgccacgatgtatctaccttcgagcacgagttgcagagcagctggaattgttgcaaaccaagatgggaaaatcggtaacagagagctaatgattgcaagaactgttgacatgtacaagaaatgtatcttaattagtctaaacaaaagccatgtaagacatccttgaacaaatgcaatctcagctgtagatagaagtacacccgaaacagcttgatcaagaacctcaacacatctctctctagctgatttcgatattggaagcatacatataacttgctcagtcacaccacctgattcggttgtgattaggtaatacaaaacccaaaagaacaccattgactgagacaagaaattgaaaacctcagcagctccagatatgatcgaattccctatggagaacatgaatttcgcgctgcttcctagaaccgacgtgctactagcgagcacacgctgtgatacatcagcgccttttacagcatacccttttgccttttctaccaaatcctctctagtgatgataaattctcgaattatcgcatccatttctgtgtaaatctgtccccattctcggttaccaattcgagtccttaaactcataagtttctctgtgtaaggcgaggaaggactcatcagagcggttgaaggcgctgatgaattagtctggcgtttaataacgaaatgcttaatcccagtaacgaattcggttaaattatactgcattgctaaagtatcaatctgttcagaaacagtctcatatgctttagtactatacttatcaaccattccaggcaaatcattatcttccatccatttcttaacaccaattctctcagcataattactctcttcaacatgtaatttcaatgaaataacagcatctttaccttcaacaccaatcttataagagaaaaatgtaacaccaaacaaaaaccccaaaatcataccaataatcaaaccaattccaactattgttttcaattttctcaacaaccctcttgtgaaaaaagcactaattctactacgaggaaaactaacacttctaaaagaagtaactgttgacattgttgaatcaactgttttagcactaaacacaaaacccaatccaacaatccctaatgacccaattccaccaaaactctcataagcaataatgaacacccaaaaagacacaagccaccttaaaagcttcgaaaacgcgcctcttcgccttttcgggtgagctgatttgggttttctcaacagaatttgaacagcaacttccctaacctcaacaagggtacctacaaaaaccctaaaaacagctactggaattgctagaacagtttctgtcaaccccaaattcaatggctcaatccaaaatgcttctagggtttgttgaattccccttaagggaattgaacagagcacagcccattgaatgggtctgagatattcttctagaagcttacaaaccgcaaacagaatgaagatagtgaaagccaagccagcgtgtgccatggctatgtatagcgcgagtcgtacctggggatcaccggagagggtggctctgccatctgggtcggtgactgtttccggtgagtctttaccacgcgccgtcgagggaggcgcgtgtgatggtggtgttggtgagggttttcgaattgaagctgatctgaacatgtcttgccacgctgggtttgatgaatttggttctgagtatggaacaagttccattttttatatacagagaaggatttttttgagtgtgggagttttttcccagatgaaaagggattgactttattggtctatattctgaataaagagagagaaagaagaactgatgagagtggaagagagagagagagaggcagagccagttgtgttttttgggaataaagattggatttttaagaacatgtgaaagtgaaagtgaaagcgaaagtgaagaatactgtgtcggaaatcactttcgagtcccttgtggattttcttttagtaccaatcattcattcaataaaaattgctcaaatttacctttttctttttttcttctttctcacaaaatagaaaagattgctttttttttaaaaaaaaaaaatggtaaatggaaattttattagtagatcaagggtaagttttattagaaaattataatgtatctttatgtagtaatgtactcatatctatttcgatatttaaataattttttagtcaaatttttttttatagtcatgtatgttatagttatttaagatattttgtaaaatttaaagaaatttagaaaaatttaaccagtcaaaattagagtttaaacaatgtattttacgcgtaactattttattttatacgtatgtaatataaattatttcaactttaaatactactttttaagagaatatccacaaggacttgtaacattttttaaacactttattgaaaaagagaaaaagaaattatccattgacaattagaaaatcacatggacttgtggctattggttaatgataagttctataagaaaattagttatccaattcatcaaattacaaattctccctaagggttaaaataaaaacaaagtgttctcactattgcaagaaaaagatataaacaattcacttgtaaaaaaaaatgtttagattacctttacaaaattccttattagatcaaatactattttcttggctagattaaaaaaaatcatagcttggtcaattttctttcctatttttttcttaaaaaaaaaatacttttggaaaaagagaaagtatttggtgacaactatgtatttatgaagcaaagcacatggagttgtgattattggctcatgtaacaaccaacaaacttgatcctacttctaagcccccattgacattgcctttaaaattttcaaaattaatgaaaaaagttgacttttttttggcaggacttgtcttggtttactctaatccaacttgattacatgtttctttttctcataatttgtaccacattatacataaacccacctaaaacactaattagctatagaaatatgtttat

SEQ ID NO: 191341 - DNA, 1210 bp, Cannabis indica
aaaaattgcaagtatgaaatagtaacaacagctgtacactacagtaagatggaatgaatgagtagtgtgtgggaccgttacgatgtgccacgtggatttaaagcttgctctccaagatacaaaaaatgcaaattcgcacattttttatctcagcccttcattgtgagactctcgcattaaatgaacggttcagattaaagaaaactttccccccttccacaccaagatgtaagagcttagattctctctctataaaaaccaccgccattagccctcgttgaaggtcactcctgcactctgctccactctccgattcccaaattctgtttcattctctgatacccaattctgatttcttaagatctctgtaatggaaatgggaaaccaagcttcaatttctaaacccaagtcgaaacccaagagtagaatccctccaaagagaggggaagtgctgaaaaatgttataaaaagctttacgaaatgggggaaagatgatgaagaagagagggcaggttctctgaccccagtttcttctccatctgggtatgcctctgaattttctggaccactcagttaagagaaatatccaagaattccatgcttatggaatagaagaaaagaaatgaaaatggggtttttatgtataataacaaatataaaagttttcttcattttcttttgtaaataattatttgattctatgggtgaagcttgttatatattgttgtattttttagttcaattttgttgggttcttcaattttgccattttaatgttatgactttgtcagtttcaaaatggaatattaaatcaagtatttattaatctagtagcttaattggtgtactttttctttttttctctttttatgtcttaagagaaattcaaagaagaaaaattaggacacaaccagtcttggctctctatgcaaagtgatccctggactggaaataatgatatgtgtacatttattttacaataaaatttctccttaagagaaagaagaaaaagattgaggtaatccaattatgtatcttatccttgcaacaattaagaaaaactattatacaaacaaacaattgtgggtggctgaatttctcagtagttttgagctcttatagttttgggttattggttcgtaactatctaatagaattgaaaaaaatcgattcctctttttttttattatagtatatgcaaaaatagtta

SEQ ID NO: 191342 - DNA, 2387 bp, Cannabis indica
ttaacaaattctcacctcgtggtggtattaagcaacactgatccctttagcattttttttaatagacttttatatgttttgttttcaaataacataacatataatatactagagtaaatagcggcacaagtacttaaagttttaagtttgtaagcggcataagtacccaatatttgtttttagcagcataaattcagtttcgtcagtactaaccccgctttgaatttattaaaagagcatttagaagtaactgatactatatgttttcgtctagacccaatgatctagaatatgagctttatatgtgtcctgtttaaaacaataacagtttgtactgagaaaattagaaaaaaattacagttttacaaacctttagtacttatgccgctaaatataaacattgagttatgccacttacaaacttgaaatttaggatacttataccgctatttacccaatatactataatatttagttaattttcttaaaaatttggcattggaaatagtcataggaaaaatcattattgtcttgattgtgaaatttgtgtgtataaaatataaaagctattttttcctggaaaatcacaggtgagaattggtcaatgctattaggaaatggttccaacataattaggcaggtgatgaggaggacaggtggccagctattattggccactgacaaacagctcacattcaaaggaaagagctgaggtccaatccaaacttgtgtgtttctctttgtatttttcaattttgtatgaattgaatgcttcaaaatctgttgatcaatcaaaacacattaatttcaattttgtatagttaaatgggcatttgatccaatcaacagattttttgtatgtttagtcatctatagggtattgttttcatgtacatataaaccttaaaaatgtatacaaaaatttttctcatattaattataataattgcacttaccaccaactcataattgtttacataataaaaagggttaaattttgatatttagggctaatctacttaattgggatgagttcttttgttgaatttgacacagattttaaagaaaaagtactaaaatttagaattaaattactaatttaacttacaattggagatgttcttagtcaacattttaaaatcttgtgcaatttttttttcttgattgatatgttttgggaaatataaatgcaatgatctttcatttggaatttatttttttcttggaaattaattttacttctctaggaattaacaggtattggtgagaaattggaacttggaatttgatcaatgacagttgattaattatgtatattttacattggataacttgtaaagatgaaaggttaactattatcttgctattggtgtaaatgaatattagatctcgtattttactaaattgtaccggtaataaaatgacatatcttattgttgtaattgcggaattggattggtcttttgcatttaatctatttattagttcttttaaatttgagtctctaacagtgatttacgtgtctctaatttattttttttttgtaatgaattaggattattattagagaatagttctaatttttcccaaatatttttatttatattcgttgtacaactaatatggttattcatcaataaacagttcatgcatttaggatagttgaaagtaaaaattaaaactaactagactgtaattgaattttcgattctacgtcatcattgagtttcgtaatcgtttgagttacggttttttttgatctggcgttcggtttcgatttttagaaaaaaaaatggttaaactttaaaaccaccaaaaactttcaaaattgaaaaacgaaaaaattactaaaaattgccaaaaattatacatttaattttagatgattataattcctcaacagttcataaaataaaaaaagtaaccgaccaatcaattataaaattggtaaaaaccgatcataatagaccgaatttcagccatagatgattttttaatttatcaaaaacaatatgacataacctagtgtgctttatagcattgccatgtaataatgtaaacaatatatatgtaatcaatatattattgtactttgtacaatggttgtttaaatttttaggaactaaaaaaactaatttaattaattatattgtaagagttggtcggttaactttagcctaacctatagaacttttgttcctctttaaccaatcaaatatatgaaatttaagaatacatttacaacttgtcaaaaaagaatacataaacaaaaatagagagtgagacattatactataattaagataatacaaaagaagctatctaattatgattttttagtgcaaattaaattaatctttttttattaagataatacaaaatagcaa

SEQ ID NO: 191343 - DNA, 2857 bp, Cannabis indica
aaaaaaatgtagtccttttgtccatatgcacttgaactaacttggctcatgattcctcatattatatggtgctatactttttttttcaggtatctttacggctttgattgcccttttcactgatctaaatgtacttctcaatcttgtctcaattggcactctctttgtcttttacatggtggccaatgctgtgatttataggcgttatgttgctgtggggactaccaatccttggcctacattgtctttcctctgctcgttttccttaacatccattttgttcaccctcatatggcaattcgccccgccgggcaaacccaaagccatcatgctagtcttcagtgccttggttgccattgctatgttgcaaattttccattgtatggttccacaagcgagaaaacccgagttttggggtgtccctttcatgccatggattccatccacatccattttcttgaacattttcttgttgggttctctcgatggtccttcctatgtgagattcgccttcttttccgccttggcagtgcttgtttacgtgttctatagtgttcacgcaagctttgatgccgagggagatggcgctcttagtgtgaagaacgtagaaattcacttggaaacaacagaggataaaagccaagataatagtgttaaagtgtagaaattacttgtcaatttattttgttgacattttaagtcaaaacttttttctttttagtaggctttcaatgggtactgaggaagaaaaaagaagatagaaatagaaatagaaatactctgcagttttgcaggagtagcaccaaattgtatagttgggttacttgaaagggtttggcctttaggtgtgattccattaatgtacatcaaaaactgcagtataagaaatggacaagaaagagcagttttcctttcattttcttcacttgaatttccattagtctaattatttcatatttaattactgacaatgacattttgtggtggaactagtcactattagatatcgctattatcaagtcttatttacacttatttttttttaactatttcagtaagtgcctttatgtatttttgttttgataacgttggacaaaagataaaggtcatccatcccaagaagagtttggtggagtctaatgctaagtactatttacttttgatgagatatatatttaattatagctagtactagtaccatctactaatctagattcattttcaagtactgaacattagtattaaatttgccatggatttcatgatatttaacactaatatttaattgaagcatgatgacatcaatattagctttgatactcttaatattaactttatttcttacatttaatcaaccccaaaccatattagttgtgatacaactacaagattggttctgcatgttgtccatttagacaaaagagacctcaatattattttgttacaaaagctatccaatttctatgaagttatcgtatattatcattaaatagtagatataattgtagcaaataattaagttcgtatactaattcaatgatcatatattgtatccaagtgtttggtatgggggttttgtttcataggaaggggaatataaattcaaacttatgtttggtataattttagtggacttataataaagtgggttctatttttaaatttatttttatagatcatctcaaattgtttacacacttagtttgagattctcttaatttaaaacctactaaatgaaactcttacaccatgttatttggtaaatactattttagaccttgtattttgtaaaaattattaattggacgttctgttttgttaaatgacaaaatagactctgtattttctaaaattgtataaataagactctgaattgattttttgtcaaaataaagcttaataataatttgatctagagatattatgataaaattggttctattttctgaatctgttcgtgttaaaaattgtcttaaaattggttataaaaaaataaaatttttgaaaattgagttcatggttttatttttactattttggaaaatataaaatctattttgtcatttaacaaaatagaggattcaattagtaacttttataaaacacaagatccaaaatggtatttacctttattataatgaatgtatgtctttaaaaaaaagaactgaaattaggttgagaagtgtagcacaaaatgaaaaattaatgaagttatattgtgtaattattttattttatttgttttaatttttatttttattttcatattctttaagatatatttattttatacatgatgtttttattatacttttaggttaatataaattatctactagtaaagtagatatattttattaaaataaaatataatggtatttttgattaataaataaaaaaaagttagtactaaacttattctaaaattataggaccatactatcattagtcaaatgtttccttttctcagtgaagaatttctttctttcttatttcaagtttcttaatatatttaacaaattgatttttgtttgaattcttattttaaatgtttttttagctttttattatttaattgtttgattgattttttgaaaggattgtctttatcaatctataaaatccttaaaatatgttgaagggaaatttgtgccaataataatactactaatgatatatataagcaacttatttatttgtttttcattttttaagaaaattaattcattttaatttactattgattctttttctcattttttgtgttaattttatagatttttttttttttttttttttttttatttttaatttatttgttatggtacgttattattttttctaaggggaaactaat

SEQ ID NO: 191344 - DNA, 1856 bp, Cannabis indica
aaaactatatttttacacaaaaattataaaataattgaattacttatatttgaaataagtaatctagcaaattataggggcaaaacaatgttttccctaactatttcttattttacagctcttaacaaaaactacacatttttcacatccattgtttttacattagaagaactttttaattttctcaaaattacattaaccatttttataaaacaaaacatagataacaacacaactacaaattatatgcaaaaaatatgttataaaagtgttacattgttacaaattattttacgctcagattcgtaaaagtgttacattgttacaaatataatttaatatcagaccttatatattttaattaataactacaattattcacattttataattacacctataatagttttacatctttaaataatgttaaacaccattactatcctttaagtaattctcaatagcaatactcataaattaaccttaaagttatcccctatttgatatctcaatctcattgttacttttacattattgcaataggctattagtgagaagagcaagctagttttccacttttttttttccctctattatatataaagccttaattataagtataacaaaccaaaaaaaaccattcaacattcaagaaacttccaaatatttctacatatataggtatacactcaaacttaaaaataaggagtccaaattatataccaaagttagactttttttttcccattaaaatatcaaatggccaaaggtacaaaaaaaaaaaaggattttctagataattaacaaacacaagaataatgaattacaaaaacaaaagtcttaaattgtaggcaaaggggtctacacaactacataacataataacatacttttttgccaagcttcaaaacctcaaacaaaatctctattcttggttaaatccacttttgtgtttcaaatatttgaaggtcattttcaactcatgtatccaacttgtgtacatgaaagtgggtaatatcccaccaagtagtggatattcaactaattaaactaacatgtgtaataagtagtatgagacaagtcatattgtaagaaagaaaagtaaaagagtatccaagatggagatcattgaaaatgagtagctatacatataaatatatattagagcaaatcatttttggtgggcaattgttaggtaaaattaagtaagaaaacataaacaagaaggggacacaagaaagaaagtttgaaaaagttttatctaagggaccccttgttattgaaattactactaaaacaattaatatataattagttttgtttttttatatttttttaatgattatttagaatttttacttctcaaactattaccattattaaattgtcatgaatcttttggttagttaaaattttttttacaaactatttacaatattgaattataagacattcaataaattttatcacatgtggcatctaatgtgttattaccatatcacatctgtaatttaaaataaaaattaatgtacaattttaaaaagtatatttccatatcaataattaataaaaaaaaaattaaaatcagtttttttattattatttatatttaagtattagaggcaaaatcaaattaaactattatgatgattatggttgtgaaaactcacatcaacatcaacaaatgagaagttaataaatcactaagcaaaccattatgagaattgaaattaaaaattctaagctattgaatgaataaatagtaaaataagatgaaatattatgtggttcgattaagaataacaaagtgttatcttgtctatttactttacgaccagaaacttgttaacttaatt

SEQ ID NO: 191345 - DNA, 5393 bp, Cannabis indica
  modified_base (5358)..(5358): a, c, t, g, unknown or other
ataaagtaaaaagaacaccagaacaaaaatgataaagtaagaagaacaccaggttttgaacaggttcgccctcatgagtgtggtaataatagcctactccccttgtgctgtattaacttgagagaaagaacaaagtgttttcctctctaaaaactcttataatggatctctgagtaattctcttagatatctctttcctctctagaatctctctttgaagcaattctttcatcccctttacagtgaggttaagccactatttatagggacttaatttatgagggatggcttctattttgcttacaatgcgtaaaattacaatgattacataattaagatatagaaatagaaaaactataacaggttttccatatttatctgactcaatcccacgattgtaggaattgtcttcgtatctaggcattacaagatcattctgaagtaattaactcctcaactcgaacaggttccctttagagccttgaaacaagacagccgtctccatcgttaacagataggctacatcttctccaataaaaggatcagagaagttaagcatgtttgtagccacccacaaaacagacttcgtgtggtcgctagccaacgccacagcgcacatggatccacaactaactttcacatcatagttgatctttacccaatcattaggaggaagggaccaaacaagaaactcaacagcctttgacgaagcaaataaacaagatccatagtctacgtaacaactagagatagagtcaatacaatgtttaattttacttcttaaattattgtgtaccttgtcattgcaagccctccaaaccgtgtccaccataatcgatgcatagaggaacaacgtctccacatcaacaccctaagattttagattccacaaaaatttcacccaatcccaaacacgagcgcctaaatccaaaattggcatcactcccgaaggtgattctcactagaggtgaaaagcaaagttacaatagaggaaaagatgccctatcgtttcctctccctccccacaaagaggacaagaaacctcctcaatatgtattctcttagcgaggagggcgcggataggaagagcattagacagaatgccccaccaaaggaccttgtgacgttccaaaactttagagttccataacttattccataatgcaggtgcaacatctcattaaggggcacactcaagagctggaataatgcaggcaaactttgtagaaaacaaaccattcggttctttagtccagacccacctatctcttccctgaccacaagacttaccacccttgatgatgttattgctcatcttttgatcaaagagagtgcagattttagagatgtcccactccctgttctcgaggagtaaatctgcaacttttttcaaatcctcaagtggatgggcattaggctttaggtagaagtcctggccatggatgatccacaaatcatcccagatattcgtctctttaccatctaaaataggcttgcaggcacgcacatttcttcagaatatctttagttcttacaacactcttccagaactaagaatccgagtttttaaaggaacaataaaaaaatggcaacccttgagatacttagcgcttaacagtactttatagcacagtgactgttcctcatcgagaagggaccagtccccctttgccaacaatgcttgattcattgccaaagacttttggaagccaatgccaccctgggacttcgggagacattggtgatcctaagcctttaagtacaaaccatgatttccttgctcacaaccccaccaaaaatctttggccataccatcaatcttagaggcaagcttcttagatagttttgttgtttgcatggtgtaaactggcaaggcaagcccaacaggatttattagagtagctcgaccagctttagacaaaaaagttaattttcactcatggagttttgaaacctagttatctaaaataaagttaaaatctatatccttttggcaagatctaaacaacatgagatccaagtaattaatgttacccatcacattgttgagccttagttcctacattatgccttttttcaaaccctttgtaataccctaaggtttatggaaccagattagcaaccctaactagattaattatgtattaatgagaaattatattattatataatataatataatataatatgtgaaactatactgataaattgtattttaagacctcgttggtgtattaggggcatttttcgttattttgactcgagtagggtaaaattataattttaatgatatatcgtgcttatggactatattattatatagtatatttgttttgtctatctgtaggtgttttttgacaaatcaaaatggtatagtcacaactaggtattttagaccgaactggatttggggcccaaaattcatttttcgagatctaagtattgttttatggtgattaatgagaatctaaaatttatgtattgtgtgtgtgatgaaatgactaatttaccctaggttagataagtatgcttataatgactataggggtattatggtcattttaacctcttaagctttattcaacaaaaacaaaatttgagaaaattaaaaatcaattcatggttctttctagctcttggccgaacccctctctctcaatttcctaccttcttcaattttttattaattttggaaattaaggcttggattggtgtatttttggaagatttttgtgtttggagcttgtaaatttggtggtaagctctttaatttcttttactttaagttaaattctgatttttaaagctttctatttgttgttcatgatgctcttgaaatgatgatgcatgttcttatttttgagtgaaacattaataattttttatgtgtttgagctattgatactatatgggttgcaatttgagtgttttgtgtgatttttagggttgaaaatgtagtatgatattatgggttttgactctatttttttctgggcaaatatggttggtgtgaatattttgatgattgaagttcaacttgttggttatagtgaggttttatagtatgttgaatttgtgtatctttggtattgtttagggcttggtttgatgctctaattggatatcaaagttagttttggttgtgttgatttaaaatttgtgattatgcataaattggaagtggttggtatgagttttaggtatgaattcaaagttgggaaaatggtagcttttttttgggttacagggccccttgtcgcggccgtggccttgctcgccgcggcgagaccctatttttccccctggaatttttgggttttttttttcaccataattttttgactttgggacgttctttatatagttggaaagctcgtttcgaactctatgtgcttatctgtaattggaatgaaaattatgtaattatgtgaaattgaattttgggattaaccatatatgtgaaatatcaagaattgtgactaggattaccggtgcttgccaaggaacacccggaggtttaggaatctccacatacttgggataccaggtaagacagtagttagcacgtagaattaagcgcggtggcgctcatgtttggtattacgcttgtgattaaatgaaaaattgggattagggttattacactaaagtgagcagttatatggtctaggattattactctagtgattaaatgactttgaatgcaatgtcatgttatatatatgttgaaataaagaattatgcgcgtaaggtataattaggttagacttggtaatcagaaccgagataaactgttcgaagccttaatgtaaatagacgtatgagcgcaacacgtaagtctatgctaaatagacagtagatgcggtggcatcagtatttatctaaattgtgaatatattgcatattattattttcactgtttttctgggcttggctcatgggtgctttattgtgcaggaaagagtaaatcagtttgtgatcaaccatgagttcgagggcttggcagtggattatatatgttcgggtcatattagaccacgcgggttgggtctatcgattgatgtatttcgtattcttggttttgtcgcttaggtcgacatgtaaaaaaaataacttgtaatattttgtaaaaatttaataggatcctgaaatgtgagaaatctcttttgaaatggtttataaagtttaaacagttacaagttatattttcattccataaataatttaaagtttaaattttacttttatttctagtaatcttagtttagcaagattagattatgtttatcagaaaatcttatcgtgtctatttgttaggatgttacaccctcactaatattattgctccaatcacagaatttctcatccttttatgttttcttttatattaaatatataaataagttaataataataataataataataaattaataattacacgaacgcggtgcaaaccaaagtctaaaagaagattttaaaaatatatatatactgttacattgacagcctgtctttctttcacagctgctcaaactttacttaaaaagcaaaataggaattgtgaaaatattgtgcatctaccattattaatgacgccatcacacagaatcatgcatgacgtcacatggtttgctaagccaaatgctacgaaaagtaatatatttatatataatgctacgaatcgtagagtaccacttatatataatactagtatagataatatattattgctaatatctctatcaaagtgtagcttctgtcaatattagcatatactttgaaaagaaataaatcacataaattctctctccacaaacttttcaacgtaactaattgggtcatcactacttggattgaattcccatctaatattatatatagattgatagagaagagaggcttaaaataggacgaaagagatagagagtattggtttggtttaggcagatgggagaaatagtagggaaatccaatagtaacaatagtataatttcggtagcagattcgatgggagagcaacaatttcgaaccacttcttccttaaaaactttttctaggaaaagttttgattcttttagaattcatagttttgatgaggagaatccaactatcattgatgggattagttttcctcggcggcggaggcggcggccgccgtgtccggaaaatggcctgggaataataataataataaggaggagctaaaccctcaggactcatggctacctatcacagagtctagacatggcagtatatactcttctgtttttcatgtcttgacctctggaattggattccaagccatgctattacctctcgcctttgcatctcttggatggaacgttttttttttcncttttcttttcaactttttaagttgtatagtaatt

SEQ ID NO: 191346 - DNA, 1524 bp, Cannabis indica
cttcctctcattagttgtcgaattttcgccacattttcccacttgccaacattggcatacatgtttgataagagcacgtaggttccatcatgctctggcctcagctcgaagagtcgttctgcagcttcgattcccaaatccatgttcccatgtgttcgacaaccagaaagaagcgattcccataccgccacacctggctcggttggcattgaatcaatcaattctcttgcttctgagaaattcccagctctacatagcaaatcaatcatccgggcgtagtgatcttcacctggggaaacaccgtaagtggtcaacattgaatcaaagtaacggcgtccttctttgatcagaccagcatggctgcaggccgaaagaattgtgagaaaagttatcctatctggttgaatatcttcttttaacatctgctcgaaaagttctaatgcttggcgaccacgaccgtgttgtgccagcgctgcaatcagagcattccatgaaaccgaatccacataaggcattgtaaggaaagcaagctctgcagcctcaaaatcgccacatcttgcatacatagtaataagcgcgtttccagccgagaggcttgtatcatgacccaactgaattacctgagcatggagttgtcttccattctccaatgctccaagaacagcacatgatataaccgccccagcgaatgcataatcgcagggttcaaatccttctgatctcatctggttaaaaagctttatagcttcttcaccatatccattttgtgctaaagcagatatcattatggtccatgttaatagattcctctctggaatctcattaaaaaaggatttagcatcctcaattcgctttgattcaacatacccggataagattgcattccatgaaacaacatctcttacagacattttgttgaaaatctttcttgctgtatcaatcttaccacatttataatataatgtaaccaatgcattactcaccggcaatgaaaaaaattctggtgtaaactctgcttctgttcttaaaatataaccatgtatctgtcttccaagctgaaagaatccaccatttgcacaagcactaatgaaatgagtgtaagtgaaatcgtcctgtggaacacctttcgaaaccatcttcctataaatctgaattgcctcttcaaaccggccatggtgaacataacccgaaattatggcattccatacaattcccaacttttcactcatcccatcaagaaattctctagctgcaacaaggtcattgcacctcacatatccggtgattatcgtcgtccatgacaactcatcctttttcaccatgtcatcaaacaatctcctagccgaaagcatcagtgaagccgaagacaaagaggaagctagtgacgaagatgcacacttgacataaaccgaaatcaacgaattcaaaaccgaagtaacaaaatacaatccgaacttcacaaccacgcaatgcatttgttgacactgcctttcatcatcaactacaagtccaaaagcactaaga

SEQ ID NO: 191347 - DNA, 1378 bp, Cannabis indica
caatataattgattatcatatttggttaactgattactccaaaaatagcaacaagttaccttgatggaatattgaagtttttgagaaaaacaaaatttagagatgaatttgtgaaggtatcctagaaaaactccaaggtattctatcaagtagctagaaaaaaaaaagtgaaatttacacataatattattttgtaagaaaaaaatttattatacaattaagtagaatctttttttatggtaaaatttctacattttttttttacatgtacaaaatttcatgcttcattgatatttttgtactaggaaacaactgaacacactcgtggctttgtcttctccaacaacacatcaacaacgagtcgtcgaagaagaaaatcactattttgttatctaaagaacatgaaaatgagtggtctccttcatgaagcttaagcattatatatttcaaccaaaaaagaaaaaaagaagcttgagcattatattagaatatgagtcatatgcataaacttgcatatttggatggttttttttttatataaataaaatcattaattatccccttaaaaaacattatattttaatatagaaaatgttatcttttgtatgtaaatccaaaatagttacccactagttattaaatgtcagtgaaatataaacttttattattattattatcattattcaaaattttatctattcggctggttataattataagaagaaaaaatggcagttgtggccaaattgattgcatatcataacaaacgataactttcattaagtgataagatagtcatttcacacattacaacgtagaaatcttgccatttctatgtatgtaaagcagaatcactacaccaaaaataggttttaataacacttaaaaatgtcacgattttataattttagtaacatttatacattttgtaacatttgtaagaaatgtgggatatgcccatgtgaggtaaagtcaaatgttattaaatagttgtgaggtaaagttaaatgttgctaaatagtttaattttaatgacacttgaaaatgtgactaataaatattttttattaattttaaaatatttaaaataattttagtgacattttaaaattgttattaaactatattactcacaattataaaaatgtcactaaaatatttttatatatatttttaattaattttaattgcctctcaattatattactcacatttacaaaaatgtcatttatttattattttatatataattaaaaatatattactggtttcttttatgtcattttttcaaattaacgtcattgtatttttggttaaatattatatataaaaattcatttcaaatattatactagtataatgataaacaaatatattc

SEQ ID NO: 191348 - DNA, 3547 bp, Cannabis indica
aaaaaattaaacaagaaaaaaaagagtatgtgtccattgacaatattgagtaatttttcacttaaaattactcttgaaaattgtatagtggcaagatcacttcaataggcaacgttcattgaagatgttctaacatatatcaagtcttatatattttaatttatattataaaaaattaataacatttgcaaagtgttgtggtggtggtgttaagtactagtgtctaattagcaaaacatttttctttaaataaatatattaaacaaatgtcatgttcttcttagttctattgaatattttgttgctagtatattaattgcaatttgcttttttttttttttcaatacaaaaataaagcaaaacaatactgcagtagattgcaataagaatcaagctgtgagatttaccatctaagtatttacaaatctacaattccttctgatttcaccttggtttcctgtgaggacattgatgttgctcatcttgaccattgactccacaaatgaatcaaagaaaagcttctcatctgaggcataagctaaaacctgtttaaggattatcccttcatgatcttggctgatgagtacagtgtcagatcctaacaagccttttccttgcaaaaggttgtgaaagtaatggttgtcaaattgagctggagtcacaaggtcaagaggagctaatctgtgatctttcccagatgccgggcatatggaccgaagaattcttcgaaatgtggtgtatctcttgtacctgtcaaattgttcatggaagaaatccacatcataagctctctgtctgaaacttgcacatcttgcctgccccattgtgtggcttcctgtggtcacaaaacaaaaaaaaaaaaaaaacaaactttgtttcaatgaaaagaattttattgtttctactttttcttgtgtgaagatttgtatactttatgtcccttgctacctgataaggcaaccaagtctccaacatctagaccttgttggttgaaattggcaatgagagtctcaagagaagaatttggtgcagggatgaacttgttggctccactgaagcttgcttctaatgagtctctcctacctaataaaacttcccattttggtcctcctctctagtaccaaatgacaattcaaatggagaagaaaatgaagaacagaaaaaacttgtcacaaaagcaaaatatacttgaacaaatgcttctatcaattctaattcattacttcatgttgaagtttctagcctcaccataactatactctctttcccataagaaaatatgtaagtatatttatgagtagtattgtacggactggattggatgaacaccctatacaaggctgggccaaaaaaattctactttttctgagtcctaactaaacttgtggccgaccctgaaagtgtgagagaaaaagaaagagatgtaccagatgaacagaatcgcgagcagcaatagtcagaatatcagcacaagaaacagtacaaggacatgacatctccaagtagtacttgatatcatctatgacctcaaatcctcttagtgaattcaagttaggagtagcctgcttctcactcactattccttcaaagttatccaaaagtactgatgcatcacacccctaactcaacacccaaccataaaacaaagttcaatacttgaaaactattcaaaccctttaaacatccaaatatgaaagatgagaatgaaaaagattaccataacgaaacaatcatgaaaatgaagacgaagaagagaagcagccattcgaggctctttgagcaccgcaatctctacttggcgcctgatgatctcttctgcatggggacaagtttctttgtaatagttatggacaagaggtggtgttacatcttcactagatgtatttttacaatgtaaaacaaaagctaagagaatgaatactatcctcatcaagtattccattcttgtttttctgttaggatgaaaatgacacattcttgtttatcataactataagctgttaaaatcttagacaattttttgggttatgttttcttttaccattttgtttttttatttaagtttcaaacccaactcatctgaaagttatttcttttgagtgttgttaatattatacaacaaagttggtccaaccaaccataccaaattagtcttttctatttatttcattatctttgtcctggattatgtaaaaacagtaagtaaaagtgattaatttaaattaaacttgttttttttagttcggtgaaatataagcttcatcgtcgagagaaaaacagtccagatcacgagttaaggctcttaaataatcgttttgtcccaactcaatattattatacagtgagagactcacttatcacacaactcattatttgactactagaccccccaaaaaataaaataatattaataataagggtatatagaggcataagtatccaaagttttaagtttgtaagcggcataaacccaatgtttatttttagcggcaatgtttgtaaaactgtaattttcttccagtttcgtcagtatagactctattttaaatttattaaaagaacatttggaagtaactaatactacatatttctatctagatctaatgatctagaattttgaattttaaatgtgtcctgtttaagacaataacagagtctgtactgacaaaattagaaaaaaaattacagttttacaaacattgggtacttatgccgctaaaaataaacattgagtttatgccgcttacaaacttaaaattttagatacttataccgatatttactctaataataacattcgctaacatgattgtatttttatgcacaaggcaaactgtatatagtgggaccatttggatgaaaaatgttaagagatatataaccaactttgtgaaatgactttgcaatgtattatgtatataggaatgaatgaacttagatagggccaggaacaagatatgtcaagctcaaagccaaattgtatttattgtttaaatttcaaattttaattattaaagttctgccgacttgtgagaatctaagtccactaataaaaataaagattggccaaacttttcatgcaagacaaaactataataataaacataatgagttttggtctcatttggcaaaaccaatttctccaactattcctatatattttacaatataagccatccccacctatttagttgttaaggcaaacaaaagttacacgtcataaactatatatatacattatctttactcaaaataagaatttaaataaagagacataaatgttgtctgtccaataaacatacaccaaaattaaaaacaaaaaaaaagaatgaaaaaccacatcaaaaatcagtaatgaacttaagtgtcttgatgagaggtctcttatgataaaatagaccagatttgtttggcttttgtatgtacattcacaccttattctctttcactaaatctctctgtatagtatctcagtatagcttggtcatatataacactataatcttcatgatgctgcagcattctccaatgcattggtcaaaaattc

SEQ ID NO: 191349 - DNA, 1056 bp, Cannabis indica
tttcatcaaacaacttctccgcaccaggcaaattcttagactttctaaaaaccttcaaggtaacattgtaaagaataacctccctctcaggtttcaagttctgctgaaagtacttaagtgcaagaaccgcaatctccgcattaaccatattattaagaataacaaccgcatcttgctctaaaagtttaccacttaaagttcccaaaacttttaaaacttcatcctcgtttgcattacaagagtttaaagattcagctacttcgactagattagtgtacctggtatgataagatttcttccgaagttgcggtgctctggggcttctgggattgacccagatgtagcttttggatgaagaaccggaatttccatctgggtttcctgtcgtcgcagcttccccaacaacctcgttcttggtttcttcagtaactgggtcgtgtacggatacatggcttatttggagagaaggtgttttgtattgagaagaaagaaaattgagcttcgaagggtgattgaagtttcttattctagggtttttggttgaagatagagataaggaaagagtgtgacgttcgtggacgattggggagtgtgatgagcagagcgagtaagccatgttcgttgctggctctctaaactagaggagcagtgcctccgtggttgtttctctacgtttggctttatggattaggaggagatgactttgattacgataatacccttaagatttggacagtgtgagatcatgtaggaatgaacaaaattgtccattggaattatcaaaaccgttgtggtgtaaaatagtagaagcacgtttgaaatgggcttgggccataactctgggtggttttattgaggcaagcccagttggaggatttgctgattttatatttctgggcctccttttggtttgtattactttcatcattaatgggcttgggctgataatagaatctgtctgcaaatgagtgttttatcaagaatgaaaaaaatacaaaacaatctctcaaaaaaaaaaaaaaaataacaagaacaaactacacaaagtaatgacat

SEQ ID NO: 191350 - DNA, 3835 bp, Cannabis indica
ccctgcatcaacagcaataggcctaccaagatggtccatctcagattcaagttcttcaatgcttttgttaatcaaagatgtgatgctaggtatcctagctctaattacagactccagatgctaaaaacaaacattacacagtcaacaagaaaacctatataacggaacaaaaattcagaacggcaataaaataatcattaaattaaaagaaaaaaaattaattaaaaaaatccaaacctttgagagaagctttgccagatattctgaacccattttactagccaagtgcccatagtcaggactagttgcaaaatactcacgctccttgcgccttgcgataatcatgtctacatttttattaatgtcagcttgtgaacgattaacaattccaacccaaggatgttgcagcctataagatcttccttcaagaaccttacttgcagaatagaaaacagagtgaggcgagcacggataaagttttagaattactacttgttcataactgactaataaaatatacaatgacatagagattaatcacatataagagactgttttcatagatgacaaatgcattaatatgactttgatgtaaaataacaaagcctaaatactagctagctaaggaactttgaatataatataaagtactgaacaatccattaactataaaacgacagccatttacaatacagcctgtagttaaaggaatatgtgtagcctagagagagatggccatggaaatagatcttacatctaatgcattagttcctttgtccatcaaatcaagctttgtcagcacaccaaaagtccgttcacctgtgacagtttatgttataaacaggaatagacaaaatgatatggtaccccagctaatgactgccaaaacaattgactaagaaaatgatagatcatacctgcaggatcaacctccctagcaagtttgattgcatcagatgttgctatgtcctgattggctggagaaatcgctaatatgacacaattaggctacaaaaaggaaaaaagcacaaatttatctattagaacatcgatgatgtgcagaagaacttggaagaatttttattgaaattaattataaaggacagctgtaaaaatccagaaacaccagtacagaaaaattgaaccaacataaacatcttgtacacaaaaatagttatagaataatgagtcgtaacaagtacttgtacggaagtgcgcgtttaagtatttaaaacatattttctaagcaagaacctttgcagatgtctgcaaatgccaaatgttaaagcagaaaagaaggaccagttttcaacagaagaactcaattaccttctcaacgtaagttcgaaccatggattcgatatcttcaacaatactctcaggttgcccctctgaatagaattagcatcttttcagccacagaacttgtaaataacatacgcagaataggaattttaaattagcaattaacacaaacaacgtaccaatggcaacttttgtcaaaccaggtaaatcaatgagagttaagttgacaactgccagatgtataaaaccaaaaattagtgtgaaaaagaattatattgactgaaaaataaaaaaaaataaaaattcaagatgcctctcactaacttagttgagggacataaactaaaaacacagaacaagaactacaaaccataaggggagtagatactgagatggatgggaacaggagatatctgtttcgacctccccgttattctatcagtttcatcctgaatttctttacgaaccgaggctgtaaagacagtggaggaacaaaagattatcatgcaagtattatctcagtcatacacactgtaaaggacagtggaagaaaaggtgatcttttaaaaaataaaattaaattaagaaatgcttcaaaatcctagtttccatcagatattacctttaaataaaatttaagaatattgtaagcaaaaatgtacagggagatatatgaaagtataaactgaaattatttacatctaccaaacagttaataacattagcaaatctgtagatgaccaattgtaaacttgtccaaaatagacgcatcgaaacccacgatagattgaacataaaacagcccatataaactaaacaggtcaccaaaacattaacaaatcaactccaaaactacattagattcctaattgccagctctcgcggtaagcgtctcatgttttcgcataataattatgtaaaactaaaaattgaacatcaatttctgtttcatatacacgcatgttatccaggttaaaaaaattaacacaagaatgaatgagcaacaaatttgatcatgtacaaacagatatgaataaaatacatacaaaaatctgtgaatctcctcttgggtaggtgaagaaactcggcgtattcctgagttccatcgtctgtcttgtgaagctgcaagaccaaaggccgccttgtcacgatccctgcaagttttccaatccaaattccattatatatataaatacttgtaaaacaaaagagtaaataagaaggaaaaaaaatacaacaaaatttaaacgttaaatggaagctttgttaacctgatcctctaggtagaaagtcacgtccaacaatgctctccaacaccgaagacttccctgaactctgttatcaatttccaacaaaaaccagaacaatcagatactcatactgaccactgaaacagtcaaacgttctctctctcgctcgctctctctctgcctctaaacccacaaattcaatcaaccactagaaaacctcaggtctctgtttctaagaagaagaagaaaaggacaattttcgtgctctaaaatccataacaaaccaccacctttgcgaatataaaaccagaaattgaaattcagaaacctcaagaactcaaccaatcatcacaaaattccaagttttggcgcgctaaaaccctccaaaaaagcatataagttgttgataagcgaaataacagagaacgaagacacacctgaccaccaacaacggcaacagaaggaagagcctcccatagagaggagaaggtgttatcgccacctccatagtctccgagcatggtacaagcccgctgaatccgattgaccaaaccgatcaaactctccatagtagtcatcttgagctgtcttgttcttggtgttgtagctgagtcagaagaaaccgtagagaaaccgaaatagaatacgtaatcttagtagggaagaagaagaagaagaagaaggaggaagaggttggaaaagacggcaatggtaagggtaggggtaggggtaggggtagaaatggaataagaaaaagaaagtggatatttcagacaagaaagaaagaaagaggagagagtaaagatatagtgcgagagaggcacaccgttaagtttggaagaatgtcttgtgttgtggattggtttccagaaggaccggacgcgtttgaatttttgaattttgaaaaattgttgggtttaaaaatcacacttactgtgggtcccacctttttctattatattttcactgtttctgaggttgttggcggcggtccaatctatttcttcttattattataaataaataaataaaatctatttcttcttcttcttttttttttttaaaaaaaaaatttccagtttagtccttaaaagaaaatcaaaataatttgcaaacctcttacaatttttttttttttcgcaaatctcttactttagctataaaactactcagaatagagtagctaatatggttaagaggtaagttatttaaggtaagagtaaaaaaaaatgatgaacaatattgtgccatcaaataaactattatgtgtttcaaaaaaa

SEQ ID NO: 191351 - DNA, 1783 bp, Cannabis indica
ggttcctagacctctaacatcttctttatgcaaacacagtttgtcttaagtgcaccactatccattgatagcagaaaagaaaaagactattcatatgtaccatatataataataaatgaaaaaaaacaaattgagtcacacaaacttaattttatattatatacccactacaaaaatttttatttttagtcacaacaaaatttgtgactaaaagtaaaaaaattgtgactaattataaattattattcttgtgttgtgactaaatggtccgtggctaaaggtattagtcacaaaaaattataatttattgtgactaaatgtgtttttagtcacaatacttgttgtaactaaaattaaattagtgacaacttatgtgtaaatggtatgttatagtcacaaataattttttgttgtgactaaaagttacatttagttacaaattttttatgtaatggtacaaacgaagcacgctcatttgttagtttcctcaaatccttataaaaaactaatataatagtaggaatattattatgcatgtcataataaaatgattttaagaattatcttttttagaaaataaactacataaataataaaacgatgtattaaaatttttaattgtgattgatttactaatttttcttcccttaatttataaatattcaacaactttgtttgtttgttaactcttattttttttaataaaaaataattaatttttattattattaatgtgattaaatcatagaattgattaaaagtatttttcttttttttttatgatgatgtactctctcatcatgataacttattattgtttactgaaatttagtctttgtccacgaagtagttttataagctttttagcaatggactttttacagctttgtagtattttcaagttgtgattcgtgagcaagttttcagaaacccattcctcgtcctttgcctactgaagaccatcttaaaagggcaaaacacactcaagctgttgtgcaagaagctatcaatatggagttgggtgcgtaggaagaactgagagttagtgcactaggaagaactgagagttaccttattgcttggaatcactttatgattgatgcctagagaggaatgagtgatccttttaataattacatagagatatggcatgaggatatgcgaattcaagtgaatcagttgaatgatttagtccaacgaattgtggtgagcttcgatgtggagaatttattcatgtatcctacatagtactctccatacccggccaccaccgccaactcctccggcatactgatgtggcgttaggtgagttcttttcctaatttgttctttcaatatgaattttcagtttgggggagagctaattttattttgttgtattgtttagttgttaatttttagtttcttttgttattttgtgttgttttaattgtttatttagtgtcagttgtaaagccatttattctttgctcgtaaacaaaattgtattaaactgtgtgtttggtttaatttgttttagagttcaatttaaatgatttgtggaaaatttttaatatgttttgaaaatgcaacattgtgaattttatgtatttgcttgactaaggtttgtggtttgataatttgaatttcatacaagaacttgcattatttggcatttgaggcaaaattctcgataacatgtgttttgaaagtgattaaggcaatttttggatcgtttgaacctttcaagtcaactttgatctgtttttttctaattacccattctaagtctaaatagtcgact

SEQ ID NO: 191352 - DNA, 3157 bp, Cannabis indica
caaaattggaataaagaactagaattagaatgagtgaatgttataagaatattaatataaatacattgttgtccactttttagaagtatctttctcatttttcttatgtcaataatgctctttcggccatagtagacttattaccaaggctatgatattatgaaccaataacaattatcccacatgccaagccatgcattaagaagaaaaaagtgaaagatttttaatttatttttaccatagttttatgcattatataataaaaagggtcaagctttctttaacttttatgctaaaagtgacacatttcaaaattaaacaaacacaagacaaaagagacttcctttgttgtatggcctttaaagtcttttggcccatttaaatattcctcatggcccattgaccttatcattgatgtgacatttgggtcaacaaatatatcatcccattccttgaattcttcccatatatttagaaaaatttagatgatgtactaatttttgctattttcttacaaaaatactgttaggcgatattttttactttgttttttataagtttcatactgcagtatactgttttaagttttcactggtgttctactggtgttttactggtgttttactattgttttgagttgtccagctttgtgttttactggtgttttataaaaacatagtatttttgaaaatatttctgtgtgacaatatttttgtaaacattaactcaaattccagtattttttgtaagtttccctatatttaaggaagaaaagcacatgctacatcaatatttgatttacaaaattagatgttttggttgatttaaatataataacaaatgaaataagatgtttgaaataaatttttaataaaatgaattattgataattcttaaaaaatctttggtttgtttactgtaatactcattaggatatcttatgatttattctttcgtgatatctgttaaaattaatacaataaaaagaaaattagtatgactcttgcgtaagaatgacacgcacaaattttaaaaaaatatataatgatatacattatggttatagtatatatttttttaaaaaaaatctcattaatttaccatattaaaatagaatttaaaatgattaaaattgcacacacataatattatgaatagttatgtgtaattttgtcaaaataatcaaaaatatatatatatattgtaaaataacacctatagaattttccaaaatgtataattaaatttatttaacatatgtataattaatttgacatgtaataatgttcattggaaatatatatgaatacacaatcttttggggacaccaccatcatcaaaattattgtgctttgtttaccccttcttctcaatgactaaaaagacaaaatgtgacataatgaaaactaatacaatttgttagtttgcttaatgtacattctatattttaatttgacacatttagaagatgctttaaaatgttacataaattattaataatttagatttgagtgaacttgacttatacttgaagttcacaccaaatactactacactaccaaatgatatcataaaggtactccaagcccaaggtggtctcatcattaatctatatctattatcccactatttatttcatttttgtataaaacaaatatattttattgttccaatgataacatatcttcaaattcttattacttgtgtcaatgagtattgttaaagtttcaaagtagggattaatgtattcattatagcatcacatgtgagatagtttattgtatatttgaatatgattaaatgatgatgatctttttacatgaaataacactagaaaaaaaaaaaaaaaacaaaaaaaggaaaaggatcaaatcgaataatgacaaattatacactaaactttttcatatatgatatatatatctatgctaagatctattagtaactattattattgagattaaaataaaatatttattggattatatttaatagttttatgctaatctaaatatgattcaattatatactaaatattaaattttattattcgatccgatttaatttagagtgattcatgagtgattttaatcactttgtactaaaaaaaaaaattaaattttattattctattcgatttaatttattttagtcattcaatattttacatctagcatttattagattggattagatccatctaactagaaaaaaaaaatgtaaaattttaatgttaattttcatatatacatatatttattttatgtataataatataaaatcaaattactcaattaaattaaatgagaatattaattagttcgattagatattagaagtattggatttttagacactacatctaatatctagaatttaattaaatattaaaaaatatattcaatttaatctcattataattgaacatctaatatttaatgatcatttatacacacctctaaattaaataactaattcagaggaagtaaaaataattttaaatctagtataatggttttatatatatatatatataatatttatacttttaaatagtttattttctatatttggtattattttatttagcattgctcataattatacagactgtaataatatgatttaaaaaaattaaatttataattaagtttaaacttttttttttcttttattacaacaaaaaaagaatacacttataacaaaaaaaaaaatacaatgagggagggtcatagtgatagactagaaaaataaaagtaaagtaacaaagatttgaatttgaatttttgttcaaatttacatttttagaatataaaataataaattgtcattaaatttaaaattaaatgataataatatgtttatttttgggtagagtaggcacgaggattaatacagaatgattcttctgttatgaagacagtcgtttgaccagtttagaactttagagcacaaaagtcaaaactatttatgtaaaattaaatatattttgttattattagtattaggtacgcacattttcatcgcgtgtgttctaatctttaccttaaatcatctcatagtcataacttagtaaaattctaccctatactttcttaaaatagaaagatttatcaatgctcttatttattttatattaattatttaaaatatttta

SEQ ID NO: 191353 - DNA, 1748 bp, Cannabis indica
ggctaacccagcctctcatctcatctcacgtaattgttactttatatttatattgatgaattgcattttatgtaatatttttgtgtatactggtattaatttttataaatacctaaatatataatattttaatataaattaaaattttaacataatatcatataaaaatataatgtatatgttacattttaatatatataatacaatacaacaaaatacaatatgacataatacaacctaacaaaccaccacttaaagtttaaaagacacatttcagtttcgccatcttttcctttttcttttacctttcgaaaagatatatgtactcaattaattaatattccacatttctttcaaaacaataactgaagtcttataataaaacaaaactagtactgtggttaacatcaatagaaaaattgtaataagaatatatctattaaagcagaagaacaaaaatctaacacatataataagataaaagactctttatatataattaattaatctgtaaactaataaataaatcaaaatttaaggggtgattaaacctctttttcagtttttagtcattaaatagcaagggaatagagataaataacgaacctcgaatagaattataaatgaggttaaacaaattgccattactggacaagagattcaagcccatttcaatggcagatccaagagtggcgagtggcttggacacaaagctgagagtcttttgggcaacaatggagagaaatatgatccaacggcgcccaaaactttcctcagtggcactcgaagaatcaacgaacttccttttctccatatcactcgaaaataatatgtgcatcaaatcaaaaaaccccacttcttcaggtttcaatagcatatagctagctgaaaaatctttgttacactccatatccatccctactacggtttcacccatatatgtctaattaactttatatatacttatattctctctctctctctctgatctatatatgtatatctatgatttgtaaaattaatatattgatatattgatgaaaacttaggtttagagactttctatatttatagacacagctcttgtcgtgggagaacggttggccgagtcataaatctgaccatttggtttagtaataatatattataagatgagttggaaaactataccccacttttgaaagtataataattaataatgaaagctattatttattattattactgttgtttaattagagtctgatctagctagacacaagtaataagaatacttttcacgcgttaggtagatgcatattgaattatatatatatatatatttatatattcccaaacattattacaagttctcaattgaaatcattatattatatatatatggtggtggggatggtatcactatatatatatactaattgtgtagaataaatcagaatagaacacaattcatatataaactttaatattgtgtttaattgattattatatataatttattgatttattcagatgcatacgctataaattattttgtaaaaatttataactaatttattgggaaataaatgtgtatagctaggcacaaatttggtctggtccttttaagtttttcttaccattgacttaggcctggtcgtctttggttatgtgctgactagatatatatagtaaataaacgtgtttctttaaatgttgagagtcttcagacaagttgaccaaaaacacacacacacacgtatatatat

SEQ ID NO: 191354 - DNA, 3378 bp, Cannabis indica
atcaatcgtcatcatagactttggaatcattagcactacttattattagtagttagtactactgcagagtacgtgctggtgtgcataatcatcagatataagtagagatcatctaagcattttcaagtcagcttgttttgccaccgaaaataaaacccaaagccagacaaaaggacaacagtagggtgagcttttagaatgtaatattttagttccatttattatgcatatggtgcaacttgcaatggcctatatcaactaaaatcaaggctgtgcttctctggtccttcctcttacaaaaattagctctgacataattgaaagattgaaaaataatcatatttgagtaaaaagctgagttgtatatttgagagttccaagaagaaaagagtggcaagtattagaaaacattagattaataaagggtaggctgtgattctcaatgaaattacatgcaaagcaacgtgatcaggcttagttatccgtgtcctgtgttggggtcaccaagcatcgtcgttgtaccttcctccagtactattctaaatttcaattctaagttttatcttagatattgttatttactatacaatgtttagggtctgttctctaacatcaatactctctcccaactagtgcctgtttttggttcgtgcatcatccttttatatctattttatttgcatagaaatcttcaccaatataataatatattttaaaggacccaatagaatcgtattgctcaggaccatggacagagttggatttttggccattttaaaagtcagtgtttagaacgtggaggacatcacagctacaatgtaataaatttggcagtggcgtatagagcttataagatatgatatcggtagttagtttatgcaaaggaaaagctaagtttttgcaaatgaatataaagcataaattaccactaaacgacaattcaagaaagatatatctacgatattggtcgatgctttgaaatatattacgaagttatcattatgtatgactatacgttatgaaacaaggcttgtggggttgttgcatgagtgttcctagtgattaattggcttcttgggggacaagtaggtgacatgttgacctagtgattcttgtgttgatttacttggttttgtgaaaattatttgatggaagttttattcgactgcagagtcaggagacaaagctttaaatgtgctccctctcattgtctcaagcaaagagcaaagagcacagagagagtaattgcaggtgttgtcctcgatgttacatgtacaaattaaatttacaaaatgaagtaaatgtgtgttttgcatatacttcggttctgatcagcaaaaacaatactgcattttatttatctgaatttttgaagcaattaaaatacctgacaatcatattatctgaattattagctcattttcaagtaattttctaatatgttgctcaaggactagttgagtactcctcagttataagcattgaaagttatatatcaacttacaagttatcatacatatgtcctaatgttgagtatagtaatctcaaattaagagtttagcgtggggaaaccactttcttaacacctttttttcagcaacaaagaaatgaataatataatttttatagtaaagttagccgattaattgctattttgatctaaattcagcaatgccagttggcaaaaaagaatgataaatattattcttcaattaaaaccttcctcagatggttgcattatgaaatatttaattgtgcatatgactcatgagcctccgaaacattatatatataaagaccaatgccttctcctattctgaagcaaagacagtatatacaccattaaccacactactctcaaacaagaatcgcaacttaaacaaaaacaaaacaaaaccaaacaaagtaacaaacaatggcttgttggtctcctgagaatgccacaaaagcttttctcaaagctctaaaaatggtaaactagctaataacattattattactaataaacattgtctcttccttatgttctacttaattatcttattatgtgaagtttctaataaatagagtttgtctgatctgtttttctagggtaaaaatgggaaagaaccagatgtagcagagttcatatcagctttggcggcaggcaacaatgcacaactcatggtgatggcatgtgctggtgctgcaggagcaaatgctctggcattggttgcggcaagacatcaaacaggtgggcgagtagtgtgcattctaccaagccaaaattacatcaaggaatccaaggattctctaggaccttactccaaatgcattgaatttttcataggaaatccgaagacccttttgccagataacttcaaaggagctgattttgttcttattgactgtgatattaaagaccacaaagggatcttcctagctgctcaaaagggtatttcagaacatgttggagcactcattgtggggtttaatgcccttagaaagggatcatgggggaatgatttaagagcacatactcattttttgcccattggagaggggttgcttgtttcaagaatcactagtccaaaaaaaagtcattgggtagtgaaagtagacaagtgtactggagaagaacatgtttttagggtcagtaataatacttcgccaagaaggcagtggattgaagcttgattagttatggtttttttctctttggttaagcctcccaaacccaataagttagaggaggcgcttattattgctatgtaatcatgtttagtttaactcaagtgtagataaagggtgccacaaataaacaaatactcatcagggtccttgaatttttggggagaccacatagatgattatatataaaagtcatataaatatatgatcagcttataattactattatttttcactggaattatagatctgattctgtggtgtggtggtgatattgtatattagtaaactccagcccttttctctcttcatcatgtgcgtgattatacatatggactgtaggcatatatatttttttaaataggatttaaattaattatgcaatgacatatgtatatatacattaatatcaaactgctgctaaaaccaaaaggaatatgcttaatttgtattttttaaattttaatatggttttgccaacttaaacaagattatctttcgattaagtttttggtttattgtggctagctaacaacaagataagatcagaaaaatgtagacatggaagatatttagaataataatttcattgcttcattagttgaaaagatgccttgcttgacaatttcagtcctaccatgcagaaaagaccaattcaaaatttgatagatgcccatgtaaattaaaataaatctgatatatatatat

SEQ ID NO: 191355 - DNA, 2465 bp, Cannabis indica
cctaccacgacaggacctgaaccatagacagaaattacggttcataagaagcttaggttgagtaattcaatgaggttagaattttaggagaaacgggtagcaagaaagggtagggaaaacaatatgatgatgccatatcttctccaccgatctagaaacagttaaaatttagactaatacataatgcaatctgtcactttctaacacctacaaggcactttgacatgaagaaacttctaaaagtgatggcatagaaaagattttgactataacttggaaatttgagaacacttttgagcatgtgcaaatgctggacgtgcacaaatagaatttcaagaaaaactatacaaggaaagaagtgatagatacttccatcattttggaagagagtgaaatttaccagcctcaaaatattgattttgatcattctaaaaatcaaattgcttttgaaataaaaacaaataacaactctggtgaaagcaattttaggaactactgttgaaaatcaaactggtaaacaaaatggcctggcactttaccttcctcgtgatacgggggtgggaagaactgcaagtagcaaaatgtagcaactgtaagccctgcacaaaatgtttaccccattgtgaactcgaacaacaaatgcttttgaaaagttactaaacaaaatgaaaattctcttttaacacaaacctaggagacctccagcaaacacatcttgccaatggtgccagtagtcatccactctagaaatgcccacaagtgatgcaacaagtaaaggaagaaaaacaatgcatagtttggcaatgtgccctttgcgatcaaagacttttacttttccggacaagtatagagatagaaaacccaatccagcaaaggaccctgcacatataacaagtgtaagaaaataaatttttcatcaatctggtctgcacaaacacgttcagtggtaatacagaagagaatatcaagtgctgcttacaagaagtatgcccacttggaaaactcttatgcccttcctttataacattgatatcaccatggcatacaacatctccccatttatcataaaactatgaagcatcaaagttttaatagtttagtcaacgaaaattcatgagattatacaataaaatgttttttatttttttgaaaaagaaaggaacaaaaaaaaaaaaactgtgctagaaagaactgtaaatcaggaagaccatacatcctttccatcagggaaacaccgccagaaaaagtcaggacgaggtcgtccaacagcattttttatggaatctgtgagaaccccagttaccagaacagagaaaaagagacctgcattgacaagatatacgaaattagtaatatgacgttaaaagaaaaaaaaaagccataaatccttatggagccataaatttcatcacctaatatggcatgatgaagatcgtagacatctctcctacggtaatacacaaaaagaaaaattgctattggcaacagaattgcgtagatctatgagaaagaaaggaaatacaatagttctcatcagttgacctaattttttaatgtaggagggaaaacattaaaaaaatgtgatgagagcaaaactcacaggaacagcccaaataggcaccgtgttacttttcaagggatattttagatcagtcatcatatctttcccaacaaagcgataaaatggatggataatgtacaagcaaatctctagcaggacaaggagcatgagtattaaccaatcatgcatatgtgtcttagcaacactgactccatgggatcttaaagtatgcgagccaagctgaacttcctgcattgcactctgctgctaagcagatatcaaagcattagcatctttcaataatacttcagtttattatcatatgaaaagtttgttgagtgaacaacaaaagggaagtctaaaataatggtcatgataataaataatttagccatccattataactgaacaacagttaagagggtcagtgctgcatctgccaaagataatgcattatccgagtacaggaacagaacaaatttttatgaggggagtttatatatttaaggagatattgaaaaaaaaaatatatctggatttacttctcatgtttttttccttcaacatatcatcaacaaaacaaaaggagacaaaaaatatagagggcacctccatccctcctgcaaccatggaccgttcatttgtgataaagtggccttccaaatatgaggtggcaaacaaaaaccataagcattgatgaaaatgctcatgaagcagttgtaaaaaaatgcactcacataaaatagataagcaaacttaagctgccaacatttgctatactcaagaagtaaacgataaagggcaagtatccaatgcattttagaatctatagagaatctaattcatgatatgcagattcaatccagtaggccaaaacatggaaaaaatttaaaataaaataaaa

SEQ ID NO: 191356 - DNA, 3861 bp, Cannabis indica
ctaaaggatttaggatcactccactttttccttggaattgaggtacacagagatgaaagaggtctttatttgaatcaaggaaaatatgctaaagagctacttgttaaagcaggaatgatgcatctcaaaccctgcaccactcctatgacagtaggtaaacctctatcaaaatcagatggtaaacttctagcaaaccccccaaagtatcgaagcatcataggtggcctgcaacacttgacacatactagactagagttatatccttgctggcaacaaattaagtcaatttctgcagtcccctacaacaacacattggagtgcagtaaaaagagtgcttggagatactttaaagggaacaacctatcatggtcttcacatcaaacctttggatagacttgctatcacaagatactcggatgcagattgggcatgttgtcctgatgatagaaatagtattgctggatattgtgtttaccttggagatacacttgtatcctggtcatccaaaaagcaagcagttgtatctcgttccggtacaaaatcggagtacagggcccttgcacaagtagctgctgaaattgcatggatacaagctttacaaaagagtttgatgttcctttaccatgtactcctgtcacatggtgtgacaatatgggagctagtggattggctattaatcttgtttatcacgctcgcgcaaagtacattgaattagatgtccattttgttagagacaaagtgattaacaagacacttgaagttagatatgttccctcaagtgatcaaacagctgactgcttaacaaaaagcttgacacaacaaagatttcatttcttggtggacaaatttggagttgttgaaagttcaaacaccctcaagtttgagatgggctgtgaagaaatgaaaatatctcactggttttagaagctgtgagctgtcataaccgaatagtgtggtcccaatgtgtaacaaattcttgttagaatattccctgctataatgattaatttctaattgtgtaaaaaggcctaggtcattattttgtacagtggacaagtcattataaatacaagcaatcagccaatgattttgttgagctgagttttcattcttttcctcttcttttcttttggtctctattttcatttggttctcaaactcctatgttacccgggttttcctccaccacaaatgaagcttcccaataaatttgagtaggagtcggactaagacaagtgacctcttgtctcttttttcttttttttttaacttgtgccgcaaaatatttacatttcatatgcacactgaagatagcatttcagaaaccacatactgaaaaacagcctgcattatgtgtataagaaacagatcaatctctcttacaaagtgtaaaagtattcatgcaagtaaatttccagaaggttacgaatttgaccacacaatcctacattgaagcctttttgtttcttgaatgatgccattaaaagggttgttaaatatcttaataaatgtttagagaaggtagcttaataggcttgtatatcggcttattttgctttgttttgtatatactttagttattttagctaattgtatgataattgttaatcattatgttttgttcaggttttcttttggaaagttcttctaagtaagatgttttcccgaattgattagctgaatgtgtattgagaaatgattttttttggggaagacactttggaaatctttgcacttgtttgttcacttatatgtagcttgttgaatataaatatgacggaaagaagttctcaacaattttctttctagacaccttatatttgtgagtgataaaccaaataaacacatcatatctcatgataaaaactcaaatatgatcaacttagagtagagaaaatgtttctatggtcaattattcagttatgaagaagttggtgggtcatgatttgtttctgttctatggataagaagaggataggacatagactgattcttgtatgcctaaacattttttctttctgttataattgctattagtattactgattcagactacttcactttgtcatgtgcagttattcattatcctatcctgcaccattgcagtcgggaccaatcttagccaattcatctgtatcggcagatttacagcagtatctttccaagttctcggtcatatgaagacaattctggtcctcatcttaggattcattttcttcggcaaggagggactcaatttacatgtagtcttgggtatgctcattgcaatcttgggaatgatttggtatggcaatgcctcatcaaagccaggaggaaaagagcgccgaagctattctctccccacagccaaatccccaaaacatgatgtcttattagaaccctctgacacagatgaaaaggtatagaattcacaaagaacaaagaagaaaaataaaatatatattgaagaagcagaagaagaagaaaagttgaataatttgggagctgcttcacattacttggcagatcacttaaatttatcacaattttttttattattattatcaaattttgtcataaattcaattttacaaactcagattcatatttccggaagttttcataggtttttgttgaacaggttaaaatttcggcaaacacattgttctacatttattttttcatagtaatttatttccccctaggcaatttttacccactatgctcaattatttatcttgcatttgtataatatttttgctaatgcgcttgggattccctttttattttcactctttttttttttatccctggtgaacattgttcatcatggaccagaatacatgctaaaatttctgtggttactgaatttcttttgacagaagctaaattcattgtctgtacatatgagacatactgtgaaatagagttaagtattattagtttcttggatgcattattatattttgttcgctctgcacataatacatatcaccagaacttgaataaaaaaagctcattgaatgccttacttcagtgttaggtaggcacttaccttaccttaggagcaacctgaataattgaaaagccgtacaggaatttattaacagacttacttgtggtcccattatatcatatgttagatctgcttacttaatacaaaactctatatgaataaacagtgtcacaagccccatgtttgcaattttttgttagacaatagggtgctcttgcaaacagtgaagtttcagttaataatatagggcatttatggtattttgttttccctgaagtttttatggtacttgatatctgcgtttggttgtggctatctggcaccatggttagtatttttcagaattttaaagttttagaagctgctcattactcttctgtgttatttggtcaaagtttaatagggatgataatttgactgcactattaccactgagtgtttctagtagctatgattttcaacattgcaagataataataatatgatctctctcgcttctctaaatttttgtcagatacactggtgtctaccacttattagcattgttggtatcacaaaagctgtatttactttagtagttttcaatttgaatagtctataactttaggctgctataatcaaatgaaaattattatttattattattattattttaaaatttgtagtaaaatgatcttttcaaattatttattatttatattatcttttgctatataaattaataatttttctttcatatatatatattttttttaaaattagaaggatattacttaaagattatgatatatttatattagttttgttaaattcttttttatttaaaagttatgttaacttttctaatttttttatgagttattgtg

SEQ ID NO: 191357 - DNA, 580 bp, Cannabis indica
cctttgaacgattcagagatctcaatagtggaaggcccaagtatgttgcatcattcttcattctcttcatatttaggagctcagaaatttgtcaagcaaggttcgtggaaacaccctaagagaaatggactgtcaatttatggtagttaactgcttggccagaccaagaacagtaatcttgaagacatttcaagaatcccttagcttccttcaaggacgcttggccaaacaagattatatcatccgcgaacataagatgagtaatggccagaccatcttttgaaatcttgaagccttgaatgcacccttccatttttcttgttgttatcagttttgataagacgtctgcagctataatgaataaggtcggggatagggggtccccttgtcgaagcccgtaggagggtgtgatcatgccttgaaccgagccattaattaggagtcccatcttcttaacaaaaatgcaagtttcgatccatttgacaaaagtagggtggaaacccaaccctcttaaagtatttagaattaaaccccagtccatcttatcatatgctttctccatatccagtttaatcatcat

SEQ ID NO: 191358 - DNA, 1593 bp, Cannabis indica
aaatcaaatcaggtaatgaataccaaaatctgagcatatataaaatatcccctaattaattttgtccaaattcaatgaatgtgaaatatttatttatctcaaaatcaattcctttattttattccataaatataaaatattctaataaagtgttcatagattgcactgagatatcgacagatatatgttaggcaaattataaagccatcagattaacatatcacggtattggtgaagtgtacatagagtttcactgagataccgatatatctatgctaggcttttgtctagaacattcgagacttagaaatagactttgtgattaggtgtatgagtgcctaattacaggtcagttatatgtttatattttatacttttcttttagagtctgtcgactcacatatttgttttcttagtgttggtaagggcaaagcaaatgctgagcagcagtgagtttagagccggattaatattgtacatttcaaggcagttagacttggaatgttcagaccttcgggacgatatgggctcggtttattagtcattgggcgacacttttgttgttgtgtattttgttatgtttgaaaataatatgggatcccagaatttgtaaattgtattttggttataattttattattatttaaaaagtttgttaagtatacttttcaataaatccttcggttagcaaaggcgtacatagtaaataaaaaaaacattataacacgcctaagttagtaaggcattacactttatttttctctatatatatcttgctttctttttccttctctacttagagaagaaggtgtgaaatacaggcttatatcacatctatcatccagagagaaagtttacttcacaaatttaaggaggttttaccttaaaactatcaataaaaaattctcattttattgttatgattacaaaaaattaaaaataaaagtgttataaaacaccgttttttaatattcattgtaactaaaattgaataaaatgaacaaatacttatgagggactatagcataaaacatctctagaagagtcttcttctttgtattcaatttattttaattgattgcaaatgtgaaatatatttccctttcacacaattcctccaagtacgatgtactctaccaaatggaatgaatccggaagataaaggaaaaaacaccatccacacaagtgtatgtatatatatgttgcacaaaagcaaaatgtcgagtgggatccacgcggaaaaactaaatgaagataatatgatctgtaactgtaaaggaaacttcaaaatataaatatgctttcataaaactactccatgcctatgtcatgacccattaattaaaggtttttttttttttcttaattgtagggctttacttatgattaagcatactatagtcccactgatatatgtgatatatgaacgtactgtatgttttatgtggtaccaaatttaatttaattataattttttatttgtcatctatgttttatttgaaaagttataatttcattggaaaaataaaaaaaaaaaaaaaaaataaataattgtataactacaatattttatgagtttggtagagtactatt

SEQ ID NO: 191359 - DNA, 9481 bp, Cannabis indica
gattggattagattttgaggtctcactacattggattggatcggatgatgatttttcaaatccaattactaattggattggattggttgaggagaaaatgattggattagatcggatgcccacccctagttcaatcagcttcagggaaatttagttttcttcaagaattacccttgctcggtttgtcatttgttgataatttgagaggaggatattttaaaaactgtcttccgtagctcttatcaatttgatgattatggtaatcaaggattttctcaaaatacacgtcatagtgtatgttaatgatatccttaggcaccctttattaaaaaatgaagtgtggacaaaatctattgattgttttaaagtgactatagaatcataatcgacacggggtaagattggataggtcaagattttgcagaggtcagagacaattagtggaattgaaattttttgggtttggatgagttatggtattataagatctcaatgcttttaatagggttaattaagaggaagaagccatctatatagacagacaaatattgaaactagtttatttccaagagttgaagtaacaattgattatagctttggcattatcttgggcatcgaatcaagaaaaattcatgatctattgcaagacatccagagaggatctgaagtgtattttattctaaattgatagggttagtgcttattctccttgacaattgaaggagtataggtagtgttactcaaattattacctggaacttatgaacagaagttttgtacttagaagttggcagaactatttctacaaagaaaacttaaagtatttagctactcaaaaagactggaatacggattagaggaagtgattggaattagctcaagataaggactacataactttttattacccgtggaaggccaatgcagtggcagaattcctaagtaggaaacgtcctaggcaagtttttcactacaaccatgattttcccctcagttagtagatgtcatggttgaagttaagtatggagtttgtgctaggtaaactcagtgagttaacacttcaacaaagtttacttgatgaaaatagaactgttcaattaatagatttaaaattcggtgaaaaacggtaaggaagccttaactggcttgtttagagatatcttaatattagatcacctaatgttacgtcataaaactcaagtttgtgtttcaagaagtgttgagcttagaagcgatattctaaggaaacctcgtacccctccttaattgtttttttttactattaaggtgtactaagacttgaaattctacttatggtgtagaatgtaaaaggatgtggtggaccatgtattcagatgcttaatttgttagttaattaggactaatcattagcaactggtaaggctatcatgatttgttaaatatatcgagtaaaatgagaagagattgctaggaatcatgagtatggctaatttcgtatggtactatttcgatacaagaattagcatagaaagttctaagggagatagtatgtctttatgcgaccctaaggtccattatttcatttaggaaaccaaaattcatctttaggtgttaacaaagtttatagagggccattattatatagttgaagtttattatagcttccaagcattagacaaatggtaagtccggagggaaatcaagtattaaatgatatactacaagtttatgtgaggaattacaagaatgtatagaataagtatctattttgattaagctctcatgcaaccaacaactatcaaagtgtaatagggattgttccgtatatgatgttaaatggtatgaaaagttattttgctttgaagctcggaataggaaatatctacatccaaggttagttaagtagactagtatgacaatagagaatattatggtcagggtacttatttctctaagaagataataaaatttatgttaaccagaagctcaaaaattcagaaatccccaagtaggggaaatattttgaggtcaaaggtaagatgtgccctaggttcctagacttttagaacattttgagaaaatcaggttcttgtttagccttgtgattatcattggtagcatacatgatgtttccatgttgtatgatgagaaatttgactcataacttaaagttataaaagcctagaacttcagttagacctatcttatgaagagaaataatttgaaattctcgataagaaaggtaaagttatttgaagaagaactatagtattggtcaagatacttgaagaaaaattaaggtggagggaaccacctcggaattaaaatatgacctgtgtgctcaatgtccaaagctattcatattagattttgacgatgaaatccttttaatgtgggaataattgtagtgactgcatagttaaatcatgggaattagcagatacttaagaggttaaagattagtatgtgattttgtgcctcttagtagaaattatggcatattattagaaataggccttaagaagttattttcctaattacagagatatatttgaatgtttagtgcaataattatgatatatgcaaatttttatgaatttcatgttttacgccagtaacagtggaatgcgacatatagcctatttagtcacttagatatagtttagtaatataataatagtggagcgatatagtaagacatttggatgtcaggttgtttacggggttatagtttaagactattttatccctaagtatgttagttgcttcctaattaagaacgggtaaataagtcttttaccctataatagaattatccttttagtgggaattgatttcttttgtaaagcttatctttagaatattaagcttaattaagttagaatattaagcttaataaaataattaagctagtatttctttttagtcatttactgaaaagttagaaattctcaaacctctctctactgggccggtcaccaagaacgctaaggaaaccatcaaattcattctcatttctgaccaattctttgaagtttgagctgctgaagcgcaaatgatgggtgaggtaaacttccctcttctttgttcctttgaattctagtcttgagattaggtttttgtgtatgtttttgagttaggttttcttgtacgaatttcctaagtttaattgaattttatgaagttggtatgtgatgatttaagtaattttaagcttgattgatttcttgttgttttgttcgaataaagtttagagctcaaacttttaccttccattttgggttctgtttgagaggttattatgtagttcttttgcttgaagtatgtttgttgtgaccttattaggtggtttggaaggtttgaattaatttggggtttaattgagttgtttgtcgggttttcgggtttcctacattgaatcggtcaaccagttcaattttaccctgtagaaccagtatactgcttcccccagacaactttagaaaccaattttctggttgggaatccgatttacgcgggttgtagaaattttggcaccttagattttcatattttagcaatacttaggatattgtcatgtcatccattaatagggaaacttttagtttgactgtaagtctctgaaaagtgatttagtgtataatttatgagttttgcgtatgttgttacttaggggtctgtaaatcgtcgagcagcagtttccacttagggttatcaaaataactgcatttggaatcaaggtaatattagtataatagttgcattatgtatacatgtttagtgtgcatgttgcttgacgtcagaataacatatcagggtatcagtgaggtatacatagagttgcaccgagataccactatctatatgttaggcaagtcaatagccatcagattagcatatcagcgtatcactgaggtgtacatagagttgcattgctaggctatcagatagtataaactaactgctacaacatcagtacaactagaaaactatgtataggctggattcgcaattagtcatactttgtcgagaaccttcatgacccagttatgagatcgtgatttggtgtatgggcgcttgattatggtatggatataagtttatgttcatgattatgattttcttaataagtctatcgatacacaattattacatgtatgtgcaggtaagatatagaactgaacctctgtgagtctaaagctaaagatgaagattgtacatatcaagacggttagacctggagtgttcaagggttttgaaatagtttaggctcacttttgttggttgctagacgacaaattttgaaagtataaatattttgtaaacttatgtaacttttaagatgggattctagattatttaatttttatgtttattatttaaattaagttattcaagaaagttttaaatattcacgttttataatgaatcatttgattggcaaaggtgtacaaagtacttagaaaatactgtaacacgtctaatctagtagggtgttacattaagatggagatgaagatgaaaagatatttgaaaattattctctctattgcattccagatctgagttacgccaaatgattttctaacaccttcttagatctgagaatgggctatttataggctctaattttctagagtagaaaattttcccaaggggacaaaacgttgctttcacgctgtaggccacaggtgttggaggtggcttggcacctcatggttttgtcggtgtcatgtggtccgtaattgtaggattgtggtccccggttgtaggagcgtaatccccaattaaagatgtatgatccttacttgcagattgcgtaagagtggttacaacaaactctttgtcgggtccataaaccttgcaggttagttattgccactactcatacctccttactcttagatgtttcaatggcaaggttgtacaattttcccttgtactacttgtcccgtgattcctagcctaacgtcatccttgtcaatatgaattcacctctcaccttatacatacaacccccgaaacatattcatgcaacacacataacggctcgcatgcgagagcccttacaggctcgcatcttaacacctaatatacagacacatggctcacacgtgaccccccatacactccataaacacacgaaaccccttccccacacacatacgactcgcatgcaaaccccactacactagcacacacactactcgtaacccccccaccacacacacgattgccatacgagcccccatgctcacacacacacacgttacccccatacacgcacacatgactcgcatgttagccgcctatgagattgcattcgagccccccacacacctacaccatttacacacgccgtaaggcctccacgtgtgctcctatgcgggtctcccactcatgcacacatgcatgtttgtgggattcacggggtaaattttgggattttgcacgtgtatcccgacatccataagtatcgtctttgagaaatatgcattgggtgagtaggttgactcagtgcactcttgcttgtctctctgcccttaggcaaataatcctgaagattaggagcactaatttttgggtttaacaataattctctatgtattaacaaataaaactatcttatctcaacataagaaaatatgttaatacatattattatttaaatagtaaaacaaaaaatacaccatcaagctacaaccgtgaatggacttttacataaagtttcttatccttttattttcaaaatcttgatttatttctctcttaccattgaaaaagaaataaacttttgaattgtaagagatttttatatatcaaatggaaagataaaatcaagatataaattacaacttaattataaaaataatacaaggacaaaagtatgagattaattatatataaatattacaacacatatatacaatgggtgactactcaatggttacatttttattgtaaccataatagttacatttttgttgacatgtaatagcagattctcaacatgtaaaaatactttttttagaattaaattaactattattaattatttcttaaaataattaatttttaattttgaatatttaataagaccctttttagcaattaatattaataattttatttttataattaagtctcaaatatattttttttaacagttaaactatttaattataatatttacaataaaactttattattttataaaatttaaactttcaccccttctaaatatatttttgagtaattaatcacaaagtttgagaaaagtacgaaatactagaatatgagaattcacgatttatacatcatatctaaactcccatttcatctttatatcttcaagttacatgtgttagatagaacttgaaactaataacttcatatatgtatatttttatcagtaacacatattcaagatcaataaacagtaatgatgttctaactttgttgacgatacatagtaaaaattaataattaataataatcaataacatcggttggtaagtttatcaagaacacatgttcaagatctataaccaataatcattaataacttttaaattttcaataatacatattcaagatcaataagcaataacaatattaactttcaaactttttcaataacacatattcaagatcaataaccgacaacggttagtaacttcaaacctttcaataatatatattcaagatcaataaccaataacgatcaataatttttaaacttttataattttttctttttctatgattccactctgatcaattgatacatatatagtataataatttagaactgcaaagaaggaaggtaaagtgacttgctctctgagaaagaaaaattacatgacagagggtggaatgaagtacaacattgtcgagtgcggcaaaaaaattatttttaattttatataattgctataagattttaaatttttttggaaaaaaaaaaataaatcacttgaatcaatcttggactgacacacttatttggcacttaaagtatcgataataagattgagtgtatagttacatttaattagaggttattcttactattttctattaattaaggttattggtgtaatatttttaaattgtaagggttttactataaatattttaataatttaaatccaaaaagataatttttaaaagattcttatttagtaacaaattgtaaaaaattaattaataattattagtaatttaatttcaaatataattaattttaattaagattttataaggaaattaattttcaggttactatcagcttacaagtagggatgcacattttctccatggggatggtgccccgcggggacccgcccctaatgaggcggggattccccgtctaaatagggaatggggtggggacggggatcaaattttgtccccgaatgttaaacggggcggggaaggggatgacactccccgccatgacagggacctgtttaatttatttattattttttattaatatttatattttataaatgcatttgtatttatttagtatattaatatcatttttataatttttgaagttgtgtttttgtataataattactatatttaatagtaaataatatgtaatatttaatctttatgtaatttaataattttatatatttaatttttttaaataaattttatttttacaatagaggattccccaccccattaggtgatttcccaccccatccccgatgagaagtaagcggggatgcgacggggatagggattaattccttaatggggatggggacggggagagcagtccccgctaattccctgtcctgtgtgcatccctagttacaagttatttatttatttatttattttaatttctaaattaattacaaccatctaataatgatcttatgactaaaaataactgtatccatgatggttacatatttgatgtaaccattgaaacatcttccgtatacaatatatatacactatatatattatatataataaatgtagaagagatgaattataatacatgtaacatgcaatatatattatataatattaaaatatatatacatacattcgctcacaactttgaatgtagattagtggagatcattatgagttgaacaatgtattacaccttttcaaaagcttatttttcctcgtctaagagaactctcatgaaaatagatttgagaattatcaagattgttagggtttctagcaaagtgatttgtagatagaaacttagtttatctaaatgagcacattagactcttttatatagtgttttaagtgatcacactaaggattgacacataccactttatttctctcatataaatgagtattaatataatttctaacaactatatttcataacttttgaattctatcatcaatttggtgtaacatctcttttattacactaaaatgtgctcaaccaaaagaagttacaaaagtaattaattttgtaacttctctccatgttacaaaatgtatgttacaatttataggttatatgaaattatatattacatagtttagttgctaaataatatattattaataaaataatatctattatctcattttaatttaaatattatattactaaataatataacatccttcgtttaaaggaggagatcgaagtcctggacctgatggaatgtccactatgttttatcaacaaaactgggatattgtgagttctctagtaactaaggttgtgcttcatgtgttaaatgatggaggaaatctagctgtgtttaacaaaactttgataactttgattctaaaaatcaagaaacccaagacaatgaaggattttcagttaataagcttgtgtaatgttatttacaagatcatatttaagatgctggtacttcaattcaaggttattctaccacatgtcattttcgaatctaaaagtgctttcttaccaaaccggttaatcgtgaataatgttcttgtgggatttgaacttgtccactctttgaagcataaacgaattcgaaaaggatatgctgcactaaaactggatatgactaaagaatttgataggactgaatggtcgttcattgcggcagtcatgggaaaattagggtttaatgttcggtggatctctctcataatgaattgccaacatataactcaattttcttctcattaatggggttgtatcaggtttagtcactcctaaacgttttttacgtcaaggcgacccattatccccatatctgtttcttatcagttcagaaggcttatctcgattattgaggtctaagcatccattggtcaacttaaaggattaacagtatctcatcatgccccagttgtcactgacttattctttgcagatgatagtattttattttgcgaagcggatgatcggtcttatggtgccttaaagcgtgctttggatatatatcatagggcttcaggacagcaactcaatactaataaatctgtaatgtcattctccctaaaatccaac

SEQ ID NO: 191360 - DNA, 1027 bp, Cannabis indica
tctctctctctctctccttattttcttttgcttctttttcttattcttaatctgtttcgtttttaattggcttatatcagttgaatcgcttcacattaggttttaaaggaagaaaactatgaagcttttgatttaactattgatgtagttagcaatttaatttagttatttgtgagcatttaaactattatttgatttagatttataataacaatttttagcgactcatcattatgcactattttataatttatcataaatatggtcatatagaagcttcatttaatttccattatatcatattcatgcacctactagtgcaaatcgcaagaacaataaagttgttgcaagaggagaaacttgagtgaagaggttagaaatagatctaatgaacaatatttttttttctcttaatactgagaattttaaacaatttttattgcaatttgtaggtatatacaatattgtctcaacttatttttattttctgttctatatttgttatttgtgaaatgtatgtgcttacaaagtatttttctcgaacagtagagtgcactagtgattaagaaagtaaacaatgcttttactaattttttgatccgattataaatgaactacttttgccacataggcacttaactttagacaaaagctctcttacaagatggttgtgataatagttttaaacctttaagtcattagaggcctcatctaatacatcaactaacgaataaccaaggacaactggaagtagaggtatgcctttcaccttattgtataatattttaatattttccaaatgagcagggagataaattaagtgctgctttaatattttacttttataaatatgagattaaattgattattacttgttgtatgtttatgcctttgcaatttagcctgagtttgtcactttctatttctgtcataggatatttagttaactaactgtgttagttaatctagttgtgtcctaattaatgtactaggggtattctacgtataaatacctctaatcatttct

SEQ ID NO: 191361 - DNA, 546 bp, Cannabis indica
aaagttaaaacaacttcacatcatttactcatttgaccccctcaaaaagtctcatcactattcatttttcttttccttcctccactaactctttaaatctttccttttattcccttttttttgttcttaatttttttaagataccaaaaccaattcatatacgcttttatgctcaacctcctcgaaccaaaataattcagtgctaaattcttagagcgaataacatgaaacaaaactgctctcgaaaattcatatttaatcatcttaaaaataaattttaaattctaaaggtttgaatccttatcattactaacaaaattattatatctaaataaataaataaaaatatttacaaaaaaacatttgataaagttaattagtagggttagaatattagtctaggatgagtgtatacatattcactaataatagatatactgctagtggctttccctctcacttttcactcactttctttctttggttggccacttacgctatacccatctcctttttccttctctcaaatgctagtggttctcttct

SEQ ID NO: 191362 - DNA, 1389 bp, Cannabis indica
aaacaaacaaacaaattaagacatagtatggggatgagaagagatggacaaagaaaatagtattcatcaccatcatcagagtccatctcttcttcctaacaacactactatcgccgccccattaaccgctatcccgaaagaagagtctcctcgaaaaccctttaacggtggtggcggtaatggaggcggggataggttaaagagagatgagtggagtgaaggagctgtttcaagccttttagaggcttatgaaagtaagtgggttttaagaaatagagctaaacttaagggacatgattgggaagatgttgcaagatatgtatcttcaagagccaattctaccaaatcaccaaaaacacaaactcaatgcaaaaacaagattgagtccatgaagaaaaggtaccgatctgagtccactaccgatgcatcttcatggcctctttactctcgccttgatcttctcctacgtggaaatggggtgtctccagctgttgccgccgccgccgctgccgccactacatcttccccggctcagccaactttacctcccatgccaccttctcatcttgccaccaataacccacctttattgctcttggagcccacaccggtggcggtggcggtggcaccactaccgccgccgctgccgccacctcctccgctaccagctcctccacctctaattggaaccgcacaaaattcacatggatctaatggggtttgagagactaacaaaggttagttttttttttctttcttttttattgtgtaatcatatatttattaattaggtcaacttttaaccaatataattaaacaaatatatattatatattaaataaaaaaattcctattacatttttttaaataatttctctctgtgttaaaaaagttctactatccatttacaaataataaaatatttcagtcattattagtggatctgtattgttttattctccaataattatctcaaatatttggttatcaaaaacaaaaaattatctcaaacattaaatagctaaatcatctctctctatatagtatttttttttattaaattaattacaaactgatctgatcaataaaaactgttgaattttaagcctctataggaagagaaattaatgctgtaatagtaatatatgttaatatccttataattaaatataaattttgttagagagtatcgttagtcaattattaagtgatttaaaagttgttaggcattattgatgcttaatatttttctttttgattatttaaacgtttatatattacattgtataactcgggacacaaactcaagatcttcaacacacggtactcttttatagctactttgtggtcactgatacccaatatggatgctcaattaatatgaattat

SEQ ID NO: 191363 - DNA, 612 bp, Cannabis indica
tgattcattatttgttttgggtgttattcataattttatttatctatgcttgtaatatagtgtatctacttatttttttatatggtttagttgtattgtgtgaatgatttttttattagtttacttataatgtcaatgtagttttaaaaccgtttttatcataatatttctgtttctttttttatgttgttgtatatatgcaagaataggaatacaagttcaatccttctgactattgcatgtccaagtacgtctctacttgcacttgcagtgttatttccaacacgaagaaaacaattttggaggatgttatgaaaatattttgtgatagtcaattcggtcatttcttggatgttcttgagtataaattttatcaccaagttgtttaagttgttcacaacctttgattatgggtttagattttattgtattgtcttttgttgttttcatgcttatatttttgtgcatgtttcctaattatgccgatatatattatttgactcaatgatgaaacaacatttatgcaagctgtctaattagtaaacctaggaatatagttgtagaaattatttgaatctttgaattgctatgttatgtataacacctttttta

SEQ ID NO: 191364 - DNA, 2664 bp, Cannabis indica
acatttcactactcactggaatctacatcagtcacaccaaatggtcaaaactaagattatcatagaaatctcagtattcatatgtaaacacatattaaaatcagaagcagaatgaaagtaaacagaatatgaacctcaatgaagatctagaggaagtggatgcttagaatatgagaagccctagctcaacctcaacctcaacctcaaccctaagatttctgaagcgaatacggcgtcttatatatacatgtaaaaccctaagccctgctctagggttttccatagtgttgtttgttgcccttttcttttagaagatttaaatattaactacacgtcgttttgttcacaaaatgttttacccaacaaaataaactacgtgtcggttagatcacaaaatattactgagataaagaaactacacgtcgtttggatcacaaaatgttgatattctctctatctctcaactttcttatttttcattctgtctctcttactttaatttttcaattcgttataagggaaaaatcactttaattttttatttttagctcgatttaaggatgttcaagtaaaaggtactattaagaacatcaataataataactactggttatgttgttatttgagaaataaatccctctacttcactaacttgactcgaccacattgacaaacaattctcgtgacaacattagtgatgctctaataatttcgtcttatactttccagatgagatctaactttatgtgaatgtaagtgtgtatttaaagtgacaccaaaatataaaatagagttgtgttacaaacaaacaaggattggttttgggctcaatattgacactgccacaacgaactcttttggatctttcatggcaaaattaatgattggtgcaaggtttattgcttcctcttaactgcttcatttggtgcataacaaggtctaaattttttcagattgcatttgcttgtatcaagatgtttaggagcaccaactaaactactgcaaatttttctatgctaagttgcctttttctttgcctttgcgcttttagctttattacgattcatatcaagtagctatgttattattttggtcttctaatttttaatgcttattaagaaaatttttatcaaaggaagaaattatgcaataaaaaatatattaaaagtgttttaattgagatttgaaccataattttttgaaagcatacccatcaaagcaaaactacttaattttcaattttagttcacaaaataattcatttcaatatcttatatttgatcatttacaaggatcttattgatgtaaaacaaataacatacatacacattccaattttcttattacaacacaacaataatatatagaaaataatacataaataataacttaacacatcaatttaatagagaatggctttataattaaccaacttgaggagttgtggtaacaactccactctcatcaaccacaatacgaaccctatcacaccgaaactgaaaatcaccattaaaattttccggaacaacaatggcggtcactgcagaattttccctttcaatagtctctttagcaacctcgccactcattcctagcaactcgggccatattgtctttcctgtcaaaatttatataatattaaacatttgtgacatttataaattaaaagaaaaatggtaaaaaagtttggtaaattttggtaccttcacaactcatctttgctaaaacaatataaagatgaagcctttgaaatatacgatgcagattggagagtatatgtttatagatctatgtattgatatatttgattttgagaatagattagagagatgccctatttatagattttgaagagttaataaacatttgacacttgtgtattatatatacatttatataattttttatgtattaaagtacaactgtacaagaaagaatacacgcatatacattgaatatatatacatttatatacacgtttgaattgagatttattttattaatttaatttgataaaacatatcaaaccattaaatttttagataaggtgtaacataagaaaatgttctcaatatttattttattttgacaaatatatttatcaaacaaaaaaattcaggaaacaagatctataagttttatggtttcgttgggtaattagaacttaaaatatgtatgtatctatgtagtttagtatgaacagaatataataaaaaatgaagttgagtacctatcaaatttaaaattcataatcttgttccacactcgtaagctcttaatttctgagcttcatattaataattatcatattatttatatttttatttttattttttaaccttattaattaaaattattcataaatttacgatgctaacattagtaatcgctacaagaacctcctttaattaacataggtcattatttaactaaaaaacatgttttactaaaccataagttatatacatttgtattaggatatgctaagaatctatatacaaaaagcatataaaatactcttggtgttagtaatatattatagtctatattgtgtgtgcatttattgacattttgttgtgttttctctttgtacttatctaatttatacgtgtatgatatgtttaagataacatacactataagaaagataagtacaaaaaaaaa

SEQ ID NO: 191365 - DNA, 4835 bp, Cannabis indica
caggtaaataaatcggtgtactaatttagattcaactgatatcatgtttttactaatactattataatttggagactgatacaatgtgttgcttcagattttttaaacagttcttggtactctttgccatacatcacacagctttatcactctttcgctttgttgcttcaattggaagaacacaaattgtctcaaacacacttggaattttcacatttttaatccttgtgcttctaggagggattattattgacaaaagttagtaacttaaaactctaatgtttaagctataacatttttttaaatgttattaagttgtattcataacattttgatctctaaccatttttctccctttcctcatttatgctatagatgaccttgagcattggatatcatggggttactatatttctatcataacttatggactaaatgccatagtcataaatgaatttcttgatgacagatggagtgtggtaagatctaaacatcagtgacacttaaattgttatcattcatgaaagattttaccaactcaattatttgaaattcatgtatgacttaggcctctaattgtgttcttatactttcttatagccaaatcaagatcccaaaattagtgagcttacagttgggaaagccatcctcaaggccagaggcatccctgctgaagaaaatgaattttgggtttgcattggagcactttttggattttctcttcttttcaacatcttagtaattgcagctttgacttatctgaatcgtaagctatttttaagaactattttctaactataggtttcatattatggtagtgattttacaaagttatcaaaatcttttgtaatatatcagctataggagattctaaagctgttgttccaaatgaagaaagtgagaaaagagaaatggagtcatttcatagaggttagagtttttcttatttgtttactattttttttgtaagtcaactaaataaagcaatgaaattgttaaccaaaaagaattctattactctttttagtgcttacctttttcttttatgactatgtaaatgatttgatatgacagagaacggttcttcaaaagatgttagctctaacaaagatgaagaaaagagaggaatggttttacctttccaaccgctttcgatcgcctttaaccatatcaactactttgttgacatgcctactgtgagcaaattcaacacattgttcacagtcctgcataagtttcctttgaaatgaagattgattaacatattttgtgtatcttattaggaaatgaagagtaaaaaatatgaaggagatcgtcttcagttgttacgcgatgttagtggcgctttttagaccggggatactaactgcaatagttggtgttagtggtgctggaaagaccactcttatggatgtcttagcaggaagaaaaacaggaggatacatagaaggaacaatcagcatttctggttatccaaagaaccaatcgacatttgctcgaattagtggttattgtgaacaaaatgacattcattcaccaaatgtcacagtctatgaatctctactctattcagcatggcttcgcctttcttcgaatgtcaatacagaatcaagaaaggttaaaggcttatagtcatttgctatgctacttcacagttcaatatctttgaatcatgctaagtatgataaaaattacatgtaaattgttcatatacagatgtttgttgatgaaattatggaattggtagagctaaatccaataagagatgctttagttggccttccaaacattaatggtctttcaactgaacaaaggaaaaggctaacaatagctgtggaattggttgctaacccatccatcatcttcatggatgaaccaacatctggtcttgatgctagagcagctgccattgtcatgcgaacggttagaaacaccgtcgacacaggtagaactgttgtttgtactattcatcagccaagtatagacatttttgaagcttttgatgaggtataagaaaatggttccattctttgttttagtctaatgttgtgttttcctttttatatttaccacttgtttgtgttgttgttgcagttactactgatgaaattaggaggacatgtgatttatgctggaccacttggtagccattctcataagctcattgaattctttgaagtgagtattatattaatattgaagaaaatgatctttttcttacattgaaaaatagactaattaataactaatatttataataggctattccaaagattcccaagattaaggatggttataatcctgctacatggatgcttgagatcactgatccatattttgaggctcaaattaatgttgattttgctgaaatctatgccaaatcctcactttaccagtaagtttgacttgtattgaattatatgaaatcactttaactaattagtactttttgttaaaagaaacttaaagtcacatcaatcatattgtgaatcaaaaaagttgtcaagatacttttttgtttcccttcttaaggtttctttttttttcatctcaagattgttgtgttttctcttgactcactttaggagaaaccaagagctaatcaacgagcttagtactccaacaccgggctcggacgaccttcacttccctaccaaatactcacaaccatttcttgttcaatgcaaagcttgtttttggaaacaacactggtcttattggagaaaccctgaatacaatgccatccggttctttagtaccacaatcattggtgctatatttggtattgtcttttggaacaagggacaacaaatgtaagttaatctttcttttgtttattatgttagagaacttcaaaattattaaacaaaaacaaatctcataacaggaccaaacaacaagatgtgatgaacattttaggaggcatgtttcttgttgtactttttcttggaggtaacaatgctaatgcagtgcagcctatagtttccattgaaagaacagtttcctaccgtgaaagagctgcaggaatgtattcagctgtgccttatgcatttgctcaggtaaattcaaagattttccttagttctaaattagtatcatattcattgttaaaatgtggaagtgtatggttaaggtagtagaataggtgagtgtatggtaaagtgcatgagatttcatctcaaaattaattggcaatgagacgagtagcccatacatcttatttagtttcaacacattatcaatgtgagactctttaatattcccctcaagatggtagcttatttttttttttttttgctcaccaatcttgcactactcgattacaagtggctattttggctcactatccccgaatcacaagcggatcttttagctatctttttagaccagttttttggcttcggatcggttactcgttagagtttaatttggctctaataccatgttaaaatgtgaaagtgtatggttaagatagtagaataggtgagtgtatggtgaggtacatgaggttccatctcaaaattaattggcaatgagagaagtagcttatacatcttatttatttttaacacattatcaatgtagaactctctaacattcatagttctagcaaatacatgtcggaagtgttaatggaaatggaatagatagaataacattatataacaaataagtttattcattattctaaattgttgaacttctttattatattttttctttctttctttcttggcaggtggccattgagacaatctacacagtaatacaatcatttgtattttcaattatactcttctctgtgctacgttttgaatggacagcaggaaagttcatgtggctctactactacataacaatgtgcttcacctatttcaccatgtgtggaatgatggttactgcattgactccagggattgaggttgctgccattgtcatgtccttcatcttgagtttttggaacttgtttgctggatttttccttactagaatggtatgtatacatacaaaaaaaaatatttaaaagttaaacttagtacaaatttattaacacacttttttattactgatgttgtagcaaattcctatatggtggaggtggtactattgggcttctccagtagcttggacagtgtatggcttagtaacctctcaattgggtgataaagatattgagattgaggtctatggatttggtactggtattcaattgaagatgtttcttaaggaaagtttgggttttgactatgattttcttccagttgttggcattgttcatctagcttgggttttactcttcttcttcgtatttgcttatggcatcaagtatctcaattttcaaaaaagatagttaagctatattaccattctagtagaccaagatcttcatacaactatagtaggaaaataaaatatatcatgaaagtcatgatactatatgacaatcgatacgaatataatttgattaatattaaattatgtaagttaaattaatggtttttttttacaattcaaaactaggttttttttttttttttttttgtatttttatagaattctatacaaaaatccctatagcaattaacagtgtaacttaaatcgcaatcaaaatccgtatagcaactcacacagaaatcacggaagaaactaccgaaataactaaaaatgtaaatttaaaaaaaaattaaaaaataatatatgagataattttcttaaattaaaatatgtaaaaaccaaatattaaattataccatttacattacctcaagtaatattagactattaagtgcctaattcttacagcaagcaatggtaggtggaatactcaggacaat

SEQ ID NO: 191366 - DNA, 995 bp, Cannabis indica
tctctcaaaagtaggagagagaactttttattaatctcctgggtagattctgtggtactaagtgcatagaataagccaaggtagcaaattaaacagtgttatactcaaaagataaagggcactgatacctactcttgatccagcaatatgccatattaacaaagtaataaatcagatctgaaaaaaaacctaaagaaagtccaaatttattacaagaaacgccaaccataaggacccatctttttaaattaagtatcattaattcatttgtgtaactatatccctcaaccttttgcttcattcagtttttaagtgttgattaatttttttcttttaatttgagtttttctaaaagaaaattagttttcaaggttttttcaaaaaatattaatgagtttgttagatttttataaataaaattgattttataaattattaaagagatatttcagcaataatgctaaatttttgtgacacatggcatggcaacattaataaccacatcatcagttagcagtttgtataaatgaatgcaatcaactgcaaagacttggtatcataggccgtccaaaaagttgaatataagtacaattactagcaaagctttggtattattgccacaattaagattattaagaagaagaaaaaacccatctagcctggtttagtaaaaatagctactcagcttaaaacttaatattagaaagatataactatgaaagctgtaaatcatcttacatagaacgaacagatgaaacatccaccggaggacctccttcaattgtatttacgatctcagaaataacaggttcaggatcccccttatacaattggaaagcttgcctgaaacaatagaaggaagtaatgaattataggtctagcataaactcttctaaataaatgagcaaaagagagaggggaagattgagaatctagaatagttatcattccaccatctttctaattgttgacaaataagcttaaacattttatgc

SEQ ID NO: 191367 - DNA, 950 bp, Cannabis indica
aataataataataataataataataataataataataggagagaagtaacttgaaaaaacttttaaggaagtataataatctgaatatggttttaataaaatattagatcaaggcaaaaattgttattaaacattcaaaaaaaaaataacagcaaaattataattaaaataaaaaaaaaaatggctagtcgtcatgacacatgttaaaattggttagtcgtcatgacacatgttaaaatctttacgtctttgcttgttagtattggttgttttttcaattaaaacaaaatattcttaggtttttattaaaggcattctacagagattacataattaaaataagaagaaatatataacttctgattacatgataaacaattaaataaaatactcaagccataaataatattatttgcagatcgtttaataaaaataacaaaattattacacaactcaactaataatatcttacaatttaaaataatactcctaaggtaagaaattataggaatagagtttcttaatacttgcacgactgtaagattatcaatttcaactacaacttccttcccaaaattatttttaatcttgctcaaggcttcccacacttctaagaatgcttgtacgactgttagtattggttgttatttgtcaatatcaacctcttaattattatcttcccctccccacctcataattcattttcaaacgaaataattgtttttatttctacaaacatttatagatgagcagcagttaggagcacacagattctatttccaaatttaatatgcagtatcacataataataataataataataataataataataataataataataataataataataataataataataataatctgttataatttatatatgcagataataatttatttttttctccttcacagctttatcttttttttttcttttt

SEQ ID NO: 191368 - DNA, 3348 bp, Cannabis indica
attaaaacagagaaaagaaagaataacactgaatgcttcaatcttcttcaaaattgatgtatccccaaaaaattgcataattcgaagtactcaattctcaacttatcaattcttatagaactcttcaagtgtaatataaaaaagcattggcattaagcattagtagtgtgtatcaacaatattattagatgatgttttaagattggggcctttaaacatttctcataatgaaataatctataaaatgtagaagctagttaatgtaacagactatagagatttttctaaaactccaaaacgtttataaagttatcaatactttaaaaaggatagatctttaatttcagcaattatgtgataagaagatattttgtagtaactaatgaattttttactttgtaattgtgcctaaagagaattattacaaaataatgtagtcttttgtaacaattatttactcagaacataattctttagggatataacaatcatttatatgttgtatttcaatgaaaaattacaatatatataaagctatttaaaaaatttaatcaactgaattttaatctattaaattacaacttaattattaaaaaattgaaaaactagctcataatagctgaaatataagacttccattgaattttaacccatatggttcacaaaatgttgatatggcctatatgcatgcaccatctcaataccaaatgtgtaatattgcttataaattaaaaacttggagactaatttatcaaaataaattttgggaacaacttgtcaaaatttatatgtttaaggaccaaaataattttaatatattggtcccctaatttaattttttcacaaattaatccctaaaattttagtttatattagcaaaattttttcacgaattatatgaacatcctttaactttttgtgttaaagaataaagaccactactaccctttacataactctcctaatataaagttcaacaaacattaaaagcaccaaataattcccaaaatggtaaaaaaaaaattcaaaattttcgaaccaaaaatcttaataggatgcccaattcacaagagacaagaataccaattaaaaattaaataaaaataaaaatattaaaatagactaactttctctctgtgtaagcgcgcaaaaactagacctttgggttttggccaaaatcgatttcacgaagccaaaaacaaaaaaaaaaagaaaaaaaaatggcgctttgtttcagtttcaaaaaactcccaacctccctccattttcatacctctacaaatctactatttccttcttcactttcctctccctccaatccaactcctctttccttcaaacgtaacaacacagacccattttagatctgactagcaaactcttttctttttcttctgccatggccgaccaagtccgaataactcgtttgtctaagaagaggtctacggacgaagcggcttcattttctgatgaagacccttttgttagtaagagacgagttgtattgggtgagcttaggaatttgactaacgccgccatttctcctctggtaaaccctaaaactggagtgaagagtaagaaggttaagaaggtcgtacagaagaatacaaataaagatgaagatgaagatccccaaatgtgtggtccttatgtatctggcatttatgagtatcttcatcaaatggaggtaatttgggatttttgtttttttgggggtttcctttgatttttgttttgttggtaaatttctgataatgggttttgatctgttctgatactcagattgaaccaaagagaaggccatcgccgagttaccttgagaaagttcagagtgaaattagtgccaacatgagaggagtattggtggattggttggtggaagttgcagaggagtacaaacttggttcagagactctttacctatctgtttcttatattgatcgattcttgtcattgaacaccattgccaggaataagcttcagttattgggtgtttcttctttgctcgttgcctcgtaagattctaacccttttgaactaatgttaatgaagatgatatgttgaatttgatttgtttattcatataaagttttgatttttatctttggtttcacttgtttagaaagtatgaagagattaatcctcctaatgtggatgagttttgttatatcacagataacacatacacaaaagatgaggtatttaagctttaccattccatatcagaattgggtttgttcaataactttcttattgattctcttgtattaactttgtttgtaatctttaaaggttgtgaagatggaggctgatatactaaagacacttaaatttgaaatgggaaatcctactatcctagcatttttaaggtaaggattctgttaatactgatttacccaattaatgattttccataagcattaccattatactcattatttgcctcttttgttatgcagaagactcactattatagctcaagaaagatgcaaactagttgcaaataagaccaaaacacaagctctcaatttgcaacttgaattcttggggtgttatcttgcagagttgagtctcttagattacagttgcctaagattcttgccttcaatggtggctgcatctgttgtttttctggcaaatttcattctccttccagatagtaatccttgggtaagaatttgataccaaaatgtgcaacagatctggtttattgttcagctatatcattacaattatatgattagtagtcactaaactgttttgtgcattttcagtgtgcagaactgcagaagtgttctggatataaatcagttgatttgaaggaatgtgtacttacaatccatgatctttactttggtcgaagaggaggaactcttgtttcaattagagataaatacaagcagaataaggtaaccttatttttcatattgatcagtcacattttcatgtcttgttgatttgattttgtttgatgtgtaaagtgaccaatttgcttacccttttttatgtttggtttgaatacacagttcaaatgcgtggctagtttgtcttctccaccagagataccagtttcttactttgaagatttatgttaagtaattaccactgattttgagatctactaatctcttcataatgtaaccaattgaagagagctgttatacattatacaaccttgtattcaattgaatgagttccaatctcaatagagcaataacaattttgtcgtataagttcaattagcataccattgtaaaaggaaaaataagctcaaacaatgaacttcaagaacacaaagagcaataattaaaacagagaaaagaaagaataacactgaatgcttcaatc

SEQ ID NO: 191369 - DNA, 1979 bp, Cannabis indica
tttttactcatacagttttcatgttttaatatttactctttttgatctttctgttatgttatttcaaatttaataaagaaagtcattttaggatgtgttttcaatcctttcacagacaaaaattatccccgcataacagtattacatgtcaagtttcaacataccgtaaaattggcaaatttcctttgaagtctaacttttgttccgatgaagtaccaccgtacaagtccatcacgaatatcccgcctttcttagacaacacagcaagagcgtgcttgaaataccgcaccaaatcagctcgtgaatgaagacaacaacagctatagttaaacgcacaaacaatgtccctatcgggaagtgtcaaattccccatgtacttatcaccaccagccaaggaagtagagccctctggaacagtagattcgacttcatcatttttctcttccaacgaaacgttcctcatttgctcctgagactcaaactcgactaatttggcctcattcggattcaatacatttccatggaaaagagacactctagagtacatatcagccccgattttgtttatgttgttttccatgcaccatgttagtgcttccaagtcgaaatccaatcctacagcagtccttctcgagtcacttcggagccactctgtactgccaaacacaaaaccagtaattagatgataaggttgagatggcataccaactgagaaatagcacaatgaccctaaactttatcgattaagtcccacaccgaaaacttttttctttttttgaaactagaatccttgcctaaccctacaacattcggtgggaatcaggaaactatagcgattgctatctaggtaccaggaggtgctcaaacctcaaaccttgagctactcctattggtcaccccgaaaacaaatttaaatcaacaccaaaccaataccaagaatgcaaaacatgttgtcaaggtgatgtttcttttctcaaactcagaaatcatcaaaacactcttatgctatgaaagactgaaattgaagacctagcaacctcaagaaagtatcaaactcaaaattaaccccatcattatgtagtgattgaagttgaagcacattcattatcaataaaataacctccaaagctttgatacaagactatatcaaaatactagaacaacatatgatttgttaacttaaccagcttgaattgataaacacacacaagttcaaaagcactaacaaaccatgaacccaaaactcaactgagtactataagaacacaagtggatttagctttggttactctaaaaccacattcttcaaatgctaattaggattatttttccgtacatgcccctggaactcctaaagtaggaattgtccatgtactgaatcgtcgtgcccagaaagtctttgaatccaacaactttaatatgctaaagtagttcttttctacataaacttaataaatcaattcaaagcaagaatctttttctcttaatatgaaatgctatgtacctgagaagagcagtaccacaaaaatcttcctggaagtgaagaggtaacctcccacccacatacataagaaaaaacttctgcaaataactgatatctcctttgggtgactgttattcatacaaaatcaataatcaaacattttacacacccatgtaaaaaaaaacaaagaaaatgagtgagaaatggtgaaacctgaacagattgttggtaaagaaggaattttgatggagtttccgttgatgggtattcatcattttcatcgtcttcttcttcttcaacttcactatcaatgtcttcttcttcttcctggtctgagagattgagcttagaagggagactagtgttattgctatagtcttcttcatcatcgttaaaggctggtcttcgagaatgcttcggttggtgtctcaatttcttatcttttttccccatttttgactctttctttgaaccaacaatggctggctcctcaaag

SEQ ID NO: 191370 - DNA, 2471 bp, Cannabis indica
gagtttgcattgcatcatacccattactgaagttttgacacaaagtaaagtaagaaaacagacattctacagtatatactaattacttccttgttactctaaattataaaattaatttttaagtcatttcacaagtctctcacttttatagacttgacatattatacaaatagtactgatcaacatactgcttcttgccattcttgaggtagcgcaggaggttggactggaccataacaggttctgtaaatatgaaactttctccttatttcgaggagattcttccatatcctctgacagagggctttggctcccatctttaccaggaatgtcatactccacaccttcaccaacaaatatgtcctcttcttctactctagcaacagttgttgggccttggtgttctcttgaatccacatgatttttcctgggaggaagagggggtgggggtggcaggatttctcgttcagtttgaacctttggaaacccactatcaggctttgagtgcttatcatcttcatcataatcatgagccagagcagatatctttgctgtaattaaaattcacacaaaatttcttccataaagcataaccaaaggtaaaaacaatgacaaaagggtgatgtcaagaatatagaagtcaacttctagcatggttaaatattctgatcacttcattgggaaaatgtgttttggatttccaccattgcatatatcacgtaaataatgtgaaactatacattttaaattaaaacaaatctacacgcttaataacttccattagcatcaggataatataaatacacaaataattccttgttcggacataaaccttttctctctggggtaactgttttatgttatataaaatgattcaaatctgactactgagacacttgatatttacctcaaacaagaataatctctatactatttatgaaatgaaattttctaacaatggcatgcttggcaacatccacaaatttctagctacaagttgattatggttattacctttcacatctctatccttctttttctttttgagaaccttcccggaagatccaagacgtaaatatgacatgattttagaaattcgatcaagtacagaaccatcaacactgacagtaaccatttcctgcagaacggtaattacatgaaattttgaataagatgtccgaaaataagattgcacaaaggttcaacaaacttaaacctcaggctgtggacagtcagctctactcctatgcacagtagtcggaatgtcatgagaatatccattttcctggtataatcccccacaaatggaaacagaaaaagtgtcagagcacaaataatctcacaggattaatcatctggaacaggcctatgaccagaattcccattgcagagctttaatatgtcttaatagtagtagaaatgaaattgaaaagcaaattaagacgtccgtcggccatgataatttaccatgttaaaaatgaaagccattctaccgggaaggaacatctcatttgatttgataacagtttggggcttcactatccattgataaacagactgaaaacacagacatatgttaagcaatttatgatctaaaacgaacaagagggatatttctttattcagaaaattaattgaacctttgcagtcgccgtgcgaaatgatacatgttgatcctccttagatgccctgtcataaaacaacatgaatctgtcagtgcaggtgctacaatatagctacattactacctcagatgaaatgagaaaaggtcctctgttttcaaaagttgtatcaccactagcaaaaatacaaaacaagaaaaagtaaacaaatattgagaacaagaaatgaaagttttcgattagataaatctattttccattttccaaggcacactaagtgaggtttcattaagtgtttttaatttaaaacagactttcgtacatttgttacagaaataggaaattaatgtatgtcagtcgatcataacaaatgaaattacacttttccaataacaacctggaattggatgtcctaaacttcaaagacatattagagtagaccacatatttgcaaaatgcatgtgcatcttattatccaataaatatggctgttaaaattgtcatttagttacacttgatcgtgtctcaaatggtatccttgttaaatagaatctacatagtcagaatccacagaatatggcaagactataaaggccttaggaagttggcaacaaagaatatgcaagttacctaggttgttttccatcactttcctcacccgaatccggcttcttgtcaatttcactccgaattttattaagtaaagcataatccaaacctttcaccaggtgagtatgctccacatcacctgagcaaaagatagaagggcttttagccataacaactaagaatctctaaataataaaatatatttcatgcacagcaccaaagaataccaagaaaaaaaaa

SEQ ID NO: 191371 - DNA, 2697 bp, Cannabis indica
agttttttctactattagtccaaatatcaaatgtaatattggtaacttttgtaatgcctgtcaaattggcaagctacaccaatttagtttcgaaagaatactcaataaaactaccatgccttttgaattagttttaactgatgtttagggaccctctttttacactgctaatgatggttacaaatatcatgttagttttgttgatgatttcacatagtacacttggttatttcccatgaaatgcaaatctgaagtcaaatctatttttactcagttcaatgcctatgttgagaggttttttcaactcaaaatcaagagtgttcaatctaatttgggaaagagtatgagcctctataaagcatgtttaaaatcatgggaattgttcaaagaaattcttgtccccacacacattaacaacaagctcgtgttgaaagaaaatacaaacatgttgttgacatggggctcacacttcttgctcaggctaacattcccttgcactactggtgggaagctttcacctcagcaacctatttaatcaacagacttcccattcctactctaaatcatacgtcaccctatgaaaattattttctcaaaaacctgattataatcttgtaaaggtcattggatgctcatgttaccccttgttaagggcatatgaacatcacaaagtctctttttgatccactaaatgtctgttcataggttattgcatttcctccaaaggctatagatgccttcaccttagtggaagagtctatgtggcaagaagtgtcacattcaacgaaactgaattcccattccaaaaactgttccctaaagctatcacaaacagtacacagcttgcacctagaatcatagaccccacagcttttcaggtacctactcaagctcccacacatcaagccaataccccaaccacttctactttcagtttgactgcttcaaaccagtcagtagctccacctatgatgtctcatttcccagccactcccatctccatctccacctctcaatctagttttgattcagtacaacaagaccattcaccccaacacagtacctctattcaatccaacttggatgttcaacatccacctcttactcaaaacactcacctcatgctcaccagatccaaacatggaattttcaaacaaaaaatgtaccttgcaactatttttaatgacactgaacctaaaagtgtcaaagaagccttggccaaccccaaatggaataaggccatgaataatgaaatctaatgccttaaagaaaaacaagacttgggcacttgtccctccctcctctgaaatgaccattgttcacaacaagtgtgtttacaggataaaattaaatgctaatggatctttgtagaggtttaaagctcgcttggttgccaaaggtttccaacaggtccctggagtggatttctttgaaacatatagtcctgttgtcaagcctttcaccatcagacttatgtttactattgttgtcacctatggctgggaaattcagcaacttgacatcaacaatgccttcctaaatagagagttgaaagaagcagtatacatgtaccaacctcaaggctttgttgatcctcaattttccaaccttgtgtgcaaattaaacaaggcaatttatggtttgaagcaggctcctagagcatggtttgataaactcaaaacctcattactatattgggaattcttcaacagcagggctgattccagtttatttttcaaaagaaaaatgacaagctacttatggttagtatatgttgacgatatattaattactggacaggatgccactcaagtccaacaagttatttcaacacttcaatccacatttgctctcaaagttctaggacctgtcagctatttcctaggctttgaggtagtccgagatggcaagaacttatatctcagtcaaaacaaatacactagagacctgttgaactccacataaatgcatgattccaagtcccaatctactccaatgtgctccactacaaaactatctcaacatactggtactccaatgaagaacccctcaatgtatagaagtgtattaggggcacttcaatacctcacaatgaccagtcctgatattgcctttgcagtcaatcggttgagccaatttcagcaagctcctacctcagaccattggagtgcatgcaagagaattctaaggtatctctcaggcactctagatggaggaatgcagttcacaccagcaacaacacttgatacacttgattaactgatgcagactgggctggtttctatgaagatcgaaagtctacatcaggatattgtatttattttggtggaaacttggtgagttggtgttctaagaaacaaacagtagtggccagaagcagtacagaatcgcagtatcgtgctcttgctctggccacaactgaactcatatggatacaatctctcttgaaggaaattggttttcaaagtcagcatttcccatactttgctgtgataatttaggagctagatcacttgcatctaatcctgtattccatgccggtaccaaacaaattgaggtagatctccacttcgtacgcgacaaagtcatagctcaagaactggatgtacgatatgttgacactacacaccagattgctgacattcttactaaaccattggctgctgccccatttctttacgtcaggaacaagttaac

SEQ ID NO: 191372 - DNA, 1791 bp, Cannabis indica
tctttttaaaccccacaatacagtcctaacctgagaagacccaatacaagaacccagttcggatccaaacagaactacatcatcatcgaccttgcaggaatccacatcaccatcccagatctgataacaccacctttaattggaagcacagaacctcaaaaagattgtcgaatcttcgatagagttacacaagttgttgatcgagaaaagaccaagaggatcatgtgtgcacaaacacaagcactcacacccgaccagagccatgctgaagcccaagaaaagttgacggagccctagttgaaaaatcaaagaaagaacatgcagctagtagctaaagagaaagtgataaaaccttaagagagaatggagagattggagaactttttagtacttacaaaatatgtattctattcaatgaatttaaactattaaagatatctaaattgaataaaatcttctttttaaaaaaattaataattttcattaaaataataagtataacataactgtcactatattaaataaaaaaaaaaaatcttatctcatttcccaatttattataatggttttgacttttaattgtatttttcctaaaccttcttctgtcttcttcaaccttttccctcaccaacaaacaaacccaccagctcaaagtcaaacctttgtaactcttttaattctcattctgcaacaattttatttatgttttctttctatactctcaacaatatttatcatctctgcctcttcaaagctttccttttttcatctaagcccaaagtctaaggtttcactttcagtccatttcttcatgcttaccaagttttttcattttgattcttactaattctaataaatttatcttcctattattttgtttgcagagaaaattcatctagagctataaatttctgatcttttttacatgggtaagccataagccatattctttattgttctttcatttaattgatttttctaaatggattttcttgatcttcaggccaaacccatttgagttcttctgttttgttacaaattattaacttttttattggccctttgcaatcataaaaactcctcatccaaattttattcaatcttgggtttgtttcattgttgtttgtgttctattaaatgtttgagtttgagaaaatattttatgttctattaaatgtcttaaatcaactcaatgtgtaatatataattcatttgttgttggtatattattgtgtgtgcatatatttatagaaaacaaaaactgttgagcttgatttttggacgttttatcacagaaggataagtttataaagctcataacttctcacctaagaaaaggaaagacagggattgaagaagaagaagaagatgaaaacaaataagggaattacaataacactttcaagcctcttattgcatgcttcactttttatattggtaaacttttcttctcaaatttcttagttctatgtatgtagagtgaaagaagaataccaaattgttaagagtaatcaagttactcttaacaatttattggttaaaattacttctacaaatttgtctgtaattttagtatgcataggagtgttgttgtcaaccttctattataacttttttgtcaattttcgtgctaaaaacacattctaaaatatattttttcatgacggtgatcgttatacttacatcatctctgtaagtttttgaaaattttcgaatagtttacagtattgaaaatacagttgaagttttttgaaagcacgtggtaaattagaatatcaggaactctgtttt

SEQ ID NO: 191373 - DNA, 2209 bp, Cannabis indica
tttagtgtaattaagtttctatgacatataagatacaaaagttatcgccaataataatcaaaaaaggtgcgcataaccctcattttctctatccatggtgaagaggaagagcgtggttcgaaagccaagatctcgtgtgactgttcgtgaaaatggccaggacttacaggaagagaaggaaattgatgaaacggctttgcatactggactgaatttgattgctaataggttgaaggattctccataattgaatcctgatgctgagaactcgatgtcaggaggattaaattgggcgactgaggtggagaatgagactaatctgatagctaacaaggatgaaattcaggaatcaacaaagaaggtctgtagctcttttgcgaaggagaagatgaactacacagatcctaaattgatctacagataatcgataatcaaggagggaatcaagattgcttaaattgatctcgaagaagtaaatgagcaattgatctgtatggtccttggggccaaccctccaatggcaatttttgaaggttttataaaaagaacttgggatcatcttggagtagctcaagtagttcatatgtcaaaagttctgataatggtcagattcaactacgaagcaactagagaccatgttttggaggtaggagttctacaatttgacaggaaaccggtgattattagaccctggtctagggatttgaatgctatgaaattggttcgtactgtgcctctttggatccgtcttcatgatctaggactccaatattgggggaatagatgcctcagtgctttaattagtatagctgggaatcctatcatggtggacaaacatactaaagatcacactagggttcaattcgctagagtttggtggagatggatataattgattcccctcttagatcaatttagtatttcaattagtatgggacattagtggagcaaatcatcgattacgaatggttaccagtgaaatgcaaaagttgctcgggctatggtcacattatggcagattaccgtaagatgattcctaaggccaaatggactaaaacagagggtgtgaaaactaaaacagaggatgcgaaactaaaagatgctgacaagcagagtaaagtattcactaaggagactattgataatcatgttgaagagaaatgtgagcaagaggatgctgagccagttgatgataatcagagaaaggattggattacttttcaaggaggatagtgaatggaagatctctgagaaacatggagaacaaaaactagaacaaagaaaacaaatttggtaattgctttgctattttacaggataatgttcaaatagtggatagtttgtgtgtgtctaaagaataggggatgttaggaatactacctcagtccattcatctaatcagggatagctgtaatatagtgagttggaatgtttaggagtgaataacatggataagcaggatacagttctagagttttgtaataagaataaaattggtataggggctcttcttgagacaaaattgaaagaggatagaataaaatagatgatggaaaataagtttgctaattgggactattttttgagtcctactatagagggtctaattttagtagtttggaggagaaattttattaatagctcagacaccacaatttctgcatttgttttgtcaagatagttggtcataacacttgctttttgtattactttctttatggttttaatactatggatgaaaggaaaactttatggcaggacctgttgatgttaagacaccttgtggagccttggctggttttaggggactttaatgttgtcttcaatcttgatgacagaacaggagggaagatgatcactcttgcatgttggaatatcttttaccaagatctagatttactaacaagtatgtttttaacatcctaaatatgaatctctgaaacgatgaaaataaacacatgaaaggtatgagaaaccttacattggttgcagcggaattaaatgactcattcctctcagatctctaactcttgtatcctttctgttgcagagtatcaccaagatcttgttggaaatattttactaggatcttagatttactaacaagtatgttgtttaacatcctaaatatgaacttctaaaccgataataaataaacacatataaagtataagaaaccttacagtggttgcagcggaatatgatatct

SEQ ID NO: 191374 - DNA, 1890 bp, Cannabis indica
aataatataataaataatccaatgcaagcaaaatattaactattatccccgattatttccttataaccattagatttattatctatggctataaaaacttctataccatagggataaaataataattcttactatagacatgtccaaattttatggtatggttggaattattgttttgtccctattggtggggatagttttataatcatagatgataaatctaatggtaaaaaataaataagtccatgataatagttaatatttgagatgcattagattatttattatatatattttaataaatattaataacaaataataaatatttgtacaaaaaaattaattattgtttctctctcttctctcctcgctcttgattatatcgcttataacggtattttcttttagtgcttcttctttgttcacttgaataatatttgtttaattataatatgaatgaacaacagttgtgttttaaaacaattaccgaatgagagttaagatttataccccttgctcaaaaaaaggttacgctggagaattgggaatgggaaaactgttagaatctactatgacacctggatatatcccaaactgccactttctttccccgtcccagaattctaatcagactcgtgtctccagccttatccttgactctagaaattggaatgtcaatagaattaaccacctctttaccaaggacattgcacaagacattctctctctgccacctcccaacattcaaagacctaattctctcttttggcaatttaccaactctggacattataccgtcaactcatgctaccactttgcacagagatttaagagagctagtaaaccaacaccctccaatcctgactcaaatgctggctggtggaagttcctttggaaccttaatctcccttcaaaaactaagcatttcacccacaaactctgtcatgacactcttccaacaacaaaaaatctacattttaggaaaagtagccctacacccttaagccctcgatgtaaaatggattatgaaacttctcagcaagctttatttgaatgcaagggtataaaaaaagcttggacaagtacacctttcacatctccaattaaaacctcaaaacggaaaaaatatttttgatactttgattaataataagtcctaattaactaagaatgagtttgaagtgtttctctgtatgctttggaaaatctggaataacaggaactcttttgtgtttagacatttgcaggaacaactctctacaacttatcaggaagctttagactatctccattcgtacaagcaggcgcaaggcaagcagcctaaacgtgcccaggatgacactacaatcatcacttgtactccctcaaaaacatgtcaatttaagctcaatgtggatggagcggtttcagcaaaaaaggagaaaataggtgcatgggctctagttcgtagctcgacaggacaaatcatagctgctttcgccaaaagcaatcatggtatgatgcaaccaagaaatgcataagcgtggtgttattgcaaaccctacactggtgtcaaaacaatcacattttaatccactaggtggagactaactgtctgaacctcgtccacgacatcaaatcccaagaaagtatcttctaaaaatattgagctcttattgatgctctcaaagaagtgttagcttcctttctcattgtttccttttcgcatgtcagctgacaaaggtatacaattgcacacaatcttgcccaaatatttattgggttaattgacacttggttttggtctgacccctacccatgttctttccaattgtttgtgtcattctcccctagaaaaggttttaaattttctaaatttaatctgaaatatcttatataatttttgttgga

SEQ ID NO: 191375 - DNA, 2683 bp, Cannabis indica
ctaaaaatacatttagtcacaataaattataattttttgtgactaatacatttagtcacggaccttttagtcacaacatatgaataataatttatagttagtcacaaattttttttatttttagtcacaagttttgttgtgaccaaaagtaaaattttttgtagtgattgattcaaaatgtagaattaaaaaagtcatttgccattagggtatataatatgaatcaaaatgagccattaatttcagactgatatgttcaaaattttggcaagtaaaaattaaactatcatctgcatatatagatgataataagcatttccatatatattatattaatatataatgtttaaaaatttaataccctaaataagccctttattcatcctctcaactacgtgtagatacctttcagcaaacttttctctagatgctttcttttaagaaactacccccagttctccaccggtcaaaccaaacacactgcgcgcattaataatatatgtgaaatatgctaattagatatatagtcttctataattagaagtaataacattttaaatttgtttaatcattattacattacgttattaagttatcattaaacacactaattaattatcactgtcacactatctataataatattttcttcattcacttcctcattttctgtcaatatgtgcgggcaacgatatattaattgcatcacagtgacaaaaccacaactaataaatactacattgtgtttcaataatagtcatacagtgaaagctttaacatacgcatggtcgtctttcaagaattcaagttagaggaacaataatcacatgtaccctgctgcattatgaattatttattgtgataaataaattgtcatgtgttatggtagtttaatttggaatgagatataaaaatatttgtgttaagaagaatagtgtacagtagaaataacattttttatttggcgatcgatttgttgtttcctacactaccatatattagaaacacttggggaggtatatatgtttaggggattaaccactgtacagtactatacatgtgactagtagtataactagaaagttctataaatagtccttcgagtcagaaaaaaaagttctactgtaaatatactagaaatatttataaatttataagttgttaaactattatatgtagtgtaaaacatattatgttaatttcacatagtaattaatgtatcccaacttcaaaatatgaacagtttatttttagtaagttggtcttttaatgatacagcagccatatgagtagtattttatgtgattatattcacatagaatgaatagtagagtattgaatcatgattatatcttccgatccgtaccgtagctatactgactgtatataaaaaaaataatgtaatatgacactaattactttttgttagttttatgtacagaatttatacattcagcagtagactcgatcgagtcgtatatatatatataaatatctgtctactattatcattttagtatgagtccatggacagcaacatatagcttatgctagttttaaactaatttataatgtgtattatattattttatatttttcagcatcaccaagacacttgagaggtatgaaagatgctgctatgcagaacaggaaagcaaactactatcaggaaaggacatagaggtacgtacaaatacttacatacatatgtattttttttttcaaaaaaaaatagctagagtattcctttcccctaattaatcagtgaaatatttttctaaacatactattaattttaggaaagtttcaaaaaatttatggtggcaaaaataacattagaacagcttttattgtattaacgagagcctaattttttctactcatcaaatataagttagagatgtattcaataaaatatatatttatatatatatatataaaaaagattctctaacttaatatatacaatatgtacttatacatctgtgatataataataatagtagggatatgtgcacataatggtaattatataagttattatttttatttagactggatctctatatttgtgtataatttataggtacacacatcattattccttctaacccgatcctataatttgttaatatatatatgtatcgttttcgtgaggtagtataactttatgatatatatatttttttttttgataagttaactttatgatatttattattgtctctatatatatgtacccgtatgctgtactattatcagaatttagaaattaatgctatttatttataacaccccaatttcaagtggtcattatcatacatacagagtacctatcaagagtatctaaagctgaaagaaaaagttgaacaccttcgacgtacacagaggtaattcaaactcttatgaggaatttattatctggtttggatttttgcaaatgacaatcatgtaaacctaagttttttttcaggaagatttatatccttgtatatatttaaactaaatgcatgagaggtaattaattcaacatttatatatggtttataactaatttaaatacgtgattgagtttaaaattttcttaatatcagtcttgtcaactaaagtccaccaaataaacccttacactaaataattccttatctttttaaatcaaactaattaatatacatatatatat

SEQ ID NO: 191376 - DNA, 2669 bp, Cannabis indica
ttcaggtagtttagccgccaatagcccttctatttattatacacattattccacttatgtttatctttttaatgagtgtttaaatttttttttataattctatttgagatatcaattttttttttcaaaaatatataatgggtactcgatgggaatccttctaccatcgggtaaacttcgccccgtccccgctttaatttaaacgggtattggggtgaatatgaggtaaatttaagaagagaatatagtgtgggggagcaatctcaccccacctctgtcccgccccatttacatccttatgctcgtccaaataaacttacctttggtgaatgatttgtgtatgaaattatcaaagctctacaaatttcctctgtcaatgcataattatgctgaaacttttacgaaacatccataccagactacactttctatttcttacgtcatatttgatcgtattgtatagtgaataaaagttcacatcagtagagattttctctgttttcacaagcttttcagttactatgtcttccttgatagagattttctgttgcgaactgtaacttaatagagaagaacttatgaatataagatttttaatacaaacttaacaaaaaatacaacataattagtgttcaaatatagtataattactgtgaactacaccaccaatcaatggaactgatgaccaaaaaaaaaatgattaattgtacattacaatggcaaaaacacaacttttcggtttgtacattttctctatattataatctttagctttttctttatttggttacaaaaaaaattcaattacatacaaacaaacaagtagaaatcaaagcttatatacccttttattcatctgaaaatacctttataatcatcatgcccaggtaaacctttgagcacatctcttaatgcatagtaatggctatcgcatttgtggtcggatattaagttgctcgacagcacaattcgctgaaaatgttctcccgggtttctcttccaaagtgtgaaaaactctccaccatttctagattgagagtccaagttcctctttaggtagtaaacagaacccggtacaaacaattcctccggacatggactggtagagcgtcttttatgttctgtttcgggggttgaagttgctcttggagacttaggcatttctttcttgacgttaacatctgtaagagaagacagcaaaaattggcaaagataacacttgagttcaatagaaacacgagtaatggcgggctctctcaccagacgagttttcattcccgctaaactttgcatagtcagcaagttttcgagctacatcttgcactgatgacaccacttgcttggcatttgcaaccaaatctatgaggcttctccaatcttccttctcaactacactcgtcctttgaataccgaaaaaattaaagaagaaacaaattataaaatttcttaaccattacaatctcatagctctttccaaatgtctaggagaagtttacttaccaatcagtatcaagaatctcgttcctcaaccgagtaagagaagctatgcttaacctcgggattatatcatcctgcaggggagtaaaacacgagagagaaataagaacagaaatacaaaatgaccgatgttaaaatgcaatttctcacctgcattaccacagttgaaacgaaatcagagcagttttcagcaagttctttcgagacacatggtggtgttgcataaccaatagcggtaacattgtcggggctaaaacccagatccttaagcgacttctttcgaatcattattgctagtaaagaagctatagcaccaccaagtgaatgccccactagccttaacctaaatccctgttagtgagtcaggttcactacaaaaacaacttaaaaactaataaccaatgctttaacataaaaccgaaaaagaaagaaattgaaatattcatcacctcatatttcgccaagcactgttttatggtttccatctcgtgattgagaaaccaacgagcagcttcagctgtgccaaagtgagttgaatagccttcaaatgtaacttcactatcacttgaagagacgatatcggtgataaggtcgtagactgtatgagttccgcgaattccaagaatcacaagtttcttacgagtgtccacccctatataatacccgggcctcataacactagaattcttaacaaatttcaacacattgctttcccgaagcatgctatgccttgcgagactggtagcgttatccttataagcaccttttgctaattcggtgtggtaaataaggtcatggacctaaaacaaaacaccaaaactgaaacctgataaggatcacacagatcttgaagattaagactcaataataatgaaaaggtgtagtaaatacagtggaatctgaagatatctgaatgcctttaacatctttaatgggatttattgatgcttgacgaaggtataaaagatacaagccaacagtaagatcgctcaaagtccaatcctgaataccaatcttactccgttgaatgcttgaaatgatctccgaaaccgatcgagcactaggtggggatcgatttccaacatcatttcctgcaactttgataataaattgactcttcagcataaccatgcatttatgatgaagaaacacaaacaatacaatctaacatt

SEQ ID NO: 191377 - DNA, 2434 bp, Cannabis indica
aacacttcttatgatatgacaagctttgaatttatttctttcaatttatcttaacaatcaaacatatgattcaataaatgcgggaattttgttaaatatgctcatgcataattaaatacaagtttaaagtttatgaacaattatattttctttcattaatattctcaatatataatataattattttgaacaccttatatataaaatacccctttatataagttttttaaggtgtaaatataatacttaatatttttcaataaaaataaatctaagtttcgaataaaagaatatgtgactgtgaagggattcacaaacaaaatgcaattttatccttcatttataatatttatcttattttatttttataaaaaaaaatttctccataccaaataaaattgtaaatgtgtcatgtcgtcctaacccagattttgaaaagaccataaaatataggtggtgctgttagaccataaaaaatataggttggcttgtgtcatccctttattttataggatagacctgatgtaatgcccgtatttataaatggactaattcagatttaaactcattttagtatatttataaaacatcataggtcgggattccgagtttaaaaccactgttgaaaatacatgtatataaagttacacatcattaataaattttttttttacaacaacaacatataacttaaaatagtttatgatcgaaaccctccaggttgcactgccgcgatatgtacaatcattgccgagtcccaactcactgctcctcctaccaagccttatctttacctacacaaggtagcaaactgatgagtcgacagactcagtaagataagcatacaacaaatcatataattgacttgagtctaggcacacatacacccattcataagtctaaccaaatgattaagagcgttcttaatggttggtgttattgaccatgatatcacccactaccagaactatgatcgcactgcgggattggcactatgttcgtatcgctatgatagcatcaatagcacccaagagtacaactggccatgatatcactcttaaccaatactgtgcccgtactgccgaactgacacaatggttgtgccactatgatagcgccaactaatactctttgggggtgaatatcactcttaaccagtatgatgcctgtactaccgaactgacacaatggttgtgctgctatgatatcacccaaaacatatacaatcacaaacacaacatgcgtatataatatgttctatggtaatcttaccttgtttccgaattcaagtgtgccggaaaacctgagtggaaaattacgcgctgaatggaggccccatgtcacaacataaaagtgataagtgtttactctagaacacttctctaatgctcgaaaagaacctagggtttttctactaaactttgtggtaaggacaccctactcaaatcttctccaatcaccaccaaactttccagggcatcaacatataacatattaaacatattccacagctcacacaacaattacaccaagaattagaaagtgccattgttaagcgagctttgagttctatgaactcatacttgctcaaccacataattaaacaataactacagctcaaagaagtctcaatcatcaattcaaatctgttgaaaacacccctaaacgaaactcaactaaacaaaacccaaaatcctttaatcaacaaccctaaacttatcaaaaccatatcaatatcaagaataggatttgtaagatcttactttcacttaataaacctcaaatcctagctgaaattctaaaagaaaagatgctagccactgatttcttttagattgagttgagccgaaaaaagaagatgaaggaggaaggtggttctagatttgttttctttcatttctatctttgcaaaatatgtattattattaatattgttattattatcatcaattaaaggagagtccagctgccactaataaaataggacacctatccacaataaattaaaatgaccaaattgccctttaaacttacaacttaagtaatacaagcctaggggtaaaatggtcaaaagtcataaccccgctcaaactcgataatatctcaaatatttgacgcactaaggaaaggttctaaacttatccatgtgactcagccatccaacgcatttttcttcgtcaccgagcaaaaatcataaaaattgcataaccatatacaacacaaataatactcctagagttttataaaatcttcgaaattaagaaattatagctctagtgcccatttctaataatgggacccataacataataaaatcataattaattataaaaatattaacaattaatgttaattgcttttactaattcatattctaacatgccgttattacacttgaatttcgtattgtaatcggaatcatgtcatactatac

SEQ ID NO: 191378 - DNA, 2413 bp, Cannabis indica
atatatatatatatgtttaagacttttactcaatttttatcattttctttgaattttattattattatatttatggttgaatagatttttaatgtttattagaggaacttcaaattcaaatacattataagaagtaaaactatattattaagaagaagaaaaaatttgattaagaccttaattagataccctttaaaagtcaatgtatttatttttctatttgtatttttagttgtaattaataatattatgtcaggttataaattttagtaaaaattaaagtttagatttctatattttagtcacgtgaaattagactaaattagtattttttgttttagagaagacacacactaatataaataataaatattaaattatagagtttttatattagaagtaatttgcagcataaatcatacgtaacaataatgtattatttatttattattatattaaaaaaaaattaataataattgccacattacaatttaattttacttaacacttaatagttacgtatctacataaattacagaattataacttaaatattattatcgttaaaaattaaacttaaatatttatttataataaaaaattacttgaatatttatattataaattactctttaaattattatataggtacggtaaattggtaataagtaattatgtggtttattcatatagaaaaatgataaaaataataaaaggtgtctcaatttgatttattaattaattaatttattttttgttataaaaaaaaaattatttatttatttttgtcttctaactttaaatagatgattggtcagaacacgtctctataatccatgtgtaaaaccctagatagaaggagatatatattaaatattaattttagtaatatacaacactcaacaaaatcgttcacgtcgtttactgagtcaggcccatatatagtgacctacccaggcccatttttaaattatatacaacaatatttcctaattattatatatatatttttatcaatttgtttcactatgataatatttataattaaatttaacttgagttttaaaaattatttcaattatatttgttttactttaaacattaacaaaaaaaaacctcatctgcctatttttaattattttagttgcatgacactttcaataaattattaaaaaattatgaataatttactaacagttttattatcaaaatttaagttttgagatttaaatgcaaatgaaataattagaagatttagttgctaaaaactctattttagcattcttaataatctatttttttttaaaaatataaggctaatttagatttttgttcccttaaactttgacatgtaccaaatcatacctctgaacttttcatgtcgtaaaaaattcctctcgaactattgagattgttgaatttaaagatttttgtttaattttatttaaagaaagtttgacgatgatgaaaatttagagggcacaattttatacatgttaaagttcagggaacatgattttgtaaatatcaaaatttggggcacgatttaatatatagacaatctacatattaataaaattgaaatgaaattagaaaaaaaaaaatccttaaaaaccaacaatactcaatagttcaggaagaattttaacgactttaaaaatttaaggacataatttaatacatgtcaaaatttaaagagtaaaaatctaaattagaccaaaaaaaaaaaatgatggtttagaatctttgtataacattatattacattgtcatatcttattcatatatactaaaatatttaaaatcgattctgaaacagtaccttaccctatatatacatgtattgtatattagtctacaatgaaagacttaaattaattcactcattcacacaatcatattatgaagttaaccctaatgaaagtgatatatatatatatatatattaatatataaatatttatacacaacatggaagagacagagaatgttaattagaagatttggagaagaaagaatgtcaacatatgttgacttttggtcaaatatattaatatcagaaactttgactatattataatatgatttgatgtattggacatactaatacctacacgttgcacattttagcctatgggtaggtgttgtaggtctactacgtacggaactcacttaccacgtttttatttttttataaaaaacaaagaaaacaattggatttgagaattataaatacaatattttatttagtattttctagacgtgttgttttataattggttaataatactgtctaaaatttattaggctaattaagattttttttcgaactttgacttgtaacaaatcatgcctctaaatctttttgaccgttaaaaattcttcatgatttattgaaattgttagattttaa

SEQ ID NO: 191379 - DNA, 1654 bp, Cannabis indica
gtcctctgttttccttcatgttatgaagacaaccaagaaagaacagctttttcaacattccattctcatgactcacagcattttcattttttcattcgaaaaactctgatatgcatttggttctatgattgtggaccgagttcagtcaacagtgaacaaaggtttttttttctttctaaacaaaagaaaactcaaacggaaatgaacagagaggtactgcccttattcatagaagtaagatatgagattctgagagttagaagacgacaacgcagaagagagagagagagagttttgtctcaaaggaaacctcgttcgagggcacagagtaaaactatcgaatttgaagagaataaagtgcagagacgaaggaagagagagcctcggtcccctcgaggcttttttacccccaaaatccaaggtcgacccacctaagctcgggacttggggaggggcaatggttaatactttggtcaccaaaacacagacctacccaaattgacctgaccgaactcttctctctcacacaaaaacacttaactgctgcccgcggtcagcaaagttaggtttgatctactacctcaagtagcactgtactttagtgtacgcattcctttgtttggttttctacggaggagagaaacaaatttattttatattttcactcaaaaaacaaaaaaaaaaatataaaagagagggcagaagggtaaaagtgggagtttgtttaacagtctttgacagtttattttatctttatttttatttttcttttgagaaatttgacagtatttttcaggttattttgtacataaaatatattgaaaaattttagaatgactcaaaactcttgaaaattatattttagtccatttgtttatagtagtcaatatttagtaaaattttaaaaaatttaaattaatttaatacgtttaaaaatagaatttaaataatttattttatagacatatagaataaaattatttgaattttgtttttaatatgttaaatttttttaattttttcaaaattttataaaattcttaaataactacaaacctaagataaattaaaaaaaaaaatctaaatgttgaaacacatagaaatgtatcattggactcttttaaagagtgcttataggtattaatcacttgacttaatctttaaagacgtgttggcactgtttgaaatagatattaattaaagacgtgtgggcatttagctttggaagaattgttaccttaattaataaataaggtttgatagtgggaactttttgtatggaaaggggatgttttttgcattgtaatgtatgcggtttttggggttttgggggcagattttgtaatatttgtttttgtggtcctaaacctaaacctaacattggaagtaaaattcattgtttcaataaaaacttcatttgttgctttttaagcaggacaatgtgttactatggtatttacaagactcctgtccaaggcaaatgtcccagctttggggtggtcttatatagtttgagcaaattcatttggtaacacattaatattattagttcactcttaatactactcctactcatcggttaaggtgatttttttttttaattagtgtttaggaagtgcctacctcgaaaaaatattatttgtttagttttgca

SEQ ID NO: 191380 - DNA, 1432 bp, Cannabis indica
aggtaattaacactccagatcatactattccattgattgtagtgactactaaaatgagttacttatattccacagagaattacaattccaaagatcattgaagatgaatggtttcagaaggattatgttcctagttgcagcaatgaacattacgaggacattgacttagatgatgttaaaacagcttttgactcaattgaggtaaaatgattagtacattcccatgacaatgcagcaacacaaattttgtatcaatgcctgaagaatttttgcaggagaatttcactgagacgaatacgctcaaatcatcaagttttataaatgctttccaattgatagccatgtcaaatgatcttgatttgtcaggtctttttgaggaaaaggcaagtccataccaaaaaaacaccccattgcttgtatgaataacatttttcttaagtgaataatgatgaggccatttttgatattacatataggatgacaacaacaagaagacaaagtttgggtcggagcatgcaattcatgaaaccataaagaaaatagaagctgctgcaacagatgttagtttatcagtagaaagaatgaacaacttcaaggtgcaaatactcttcagtcatgaatgcttcactctgtccatatacatataaattcaatagataaagcagacaataaccctttttttaatccaaatttatcagatgaaaatgcatcgaaaaacgaaaatgacaagatgttgtagatcatatattgaactatcagcagaggtaatatgttagtgataaacttgtattgtaccatgcaagtaacttcagtctaactgttgaatgtggaaagtttcaggtgattgcagttactccaaataattgtgttatagaaatatcaaaatctacaggggaaataggagtatacagagaagtatgatgagaaattaaagttaattaatgtgtttgaaattatcttctatgtacttttgtaagtaacacaatgtttctattctaatgatcagttttgcaaaagtttatcaagtctgctgattgataaacccgaatcatcacaaaaacaagagccagacaaagtcaacagtagcagcaaaagtacacaagaaaaagaatggtgataggcaacacatctttgtagagtcaacctaacaatgttttcaaacatccctatatctggctaactattttactcttttcctacatccagcttcccggacataagttcaaaagaaagcaaagattgtagtggttattcatcttcatagtgattaccttgtctttgcctcttttgctacaacatttgtcatacccggctccaaatgaatcctgaaaaaattgcagaaataaattttcaccgaattgtatttaaacaaacactaaactaaattaaaagcattcatcttcatttcattaatgagggagagagagagaga

SEQ ID NO: 191381 - DNA, 2405 bp, Cannabis indica
tattaatcttaccccgcaaaaaaagaaagtctaacaaatagtattatgctttgttacattgtgctttgttacattgctcgttattgaaatttcttttatcaaaaaataaaatcagggtctggaaaaactaccacatgtacaaagtatgcatactaccaccagaaaaaaggttggaagcctgctctggtgtgtgctgatactttccgagctggtgcttttgatcagctgaagcagaatgctactaaagctaagattccattttatggaaggtaattttcgtttattgtgacttgtgagtatatacattttatactgactttattattattattattattttggcttgagccttaatattaaaaaatgtacactttttcttctaatttttgttccctttcaaatttgatactgctgtaaataaatcatgtcttagcttgagcccttaaattgacaaaaaacacttcctcctcctccttggttgttttcctttgcttttctatttagcacttcagacaaagggcttacttctgtagtgaggtcttcagcattataagtaattatggttttttctttctttcttttgatacagctatatggagtcagaccctgtaaaaattgcagttgaaggtgtggaaagatttaagaaagaaaactgtgatcttataattgttgatactagtggacgtcacaagcaagaagctgctctttttgaagaaatgcgccaagtttctgaagctacagtaagtttttttttttggaaattcattcctctttttttcagatttcaataactgggaaaaaaaaaaagttctaataaatatatttatttttattatgtttcctttaatgctacagaacccagaccttgttgtatttgttatggacagcagtattggtcaggcagcttttgatcaagctcaagcgtttagacaaagtgtttcagttggagctgtaattgtcaccaaaatggatggccatgcaaagggaggtggtgctcttagtgcgtaagttccattgcaatgtctcattcttttcattcaatttttgtttacagcccggctctttgttaacttcgacaatttactttggttttgcatatttgcagtgttgctgcaacaaagagtcctgttatatttattggaaccggagaacatatggatgagtttgaagtttttgatgtcaaaccatttgtcagccgactcttaggtgtgctcctcattccccccttttctttcttttttgaactgaacttatattttaaataagataacttatagatattaaaataacttctatggccaggaatgggagactggtctggatttatggacaagattcatgaagtagtaccaatggatcagcagcccgagctcctacaaaaactttcagaaggaaatttcacattgaggattatgtatgagcagttccagaacttaatgaaaatgggtccaattggccaggttacaacatgactttatctgcctgaattccttcacatgatgtttagatttgattttaatctgtagaggctggttcatgcaggtcttctcaatgcttccagggtttagttccgaattaatgccaaaaggacgggaaaaggagagccaggcaaaaattaagcggtacatgacaatgatggattcaatgaccaacgaaggcaagttaacagtaattggaaaataattcttcaatctatatatcaaactcattgttctgagtctgataccttactggtaatattatgttgcagagttggatagtacaaaccctaagcttatgaatgagtcccgaatgatgcggatagctagaggctctggtcgccccgttagagaagtaatggagatgatggaagagtacaaacgccttgcaaaggtatggagcaaaatgaaggggcttaagattcctaagaagggtgaaatgagtgctctatccaggaatatgaatgcacagcacatgagcaaggtactcccacctcagatgctgaagcagatcggcggcatgggtgggttgcagagcttaatgaagcaaatgggcggtaacaaagacatgatggggatgttcggaggaggaggaggggagtagtaaaagatgtaaagctctatttactaaactcatactaccaactacacggctgcatgcttacattcttttcattactcagccattttgtggtgatgtgaaagacaagcatcaaaccctttaaaattttcttttttgtacgtaattagcctaaaaatttacaagggtattaattttttctttcttttttggagcaaataattagagaatttgcatttaaccctttcaattttatacttctgttgtgttttatttgtttgttgagagtgttttattacacagtttaggttttagaccaggcaatacttaaaataagataatatatt

SEQ ID NO: 191382 - DNA, 2694 bp, Cannabis indica
ttaatttatgttttattattttaatttcacttctagtgctaaataatatagagtagagctacttttatctccacctttcatattctctatcatttccttccattctactttccatcattcttaccaaacatagcctaagataggataattacattatgtttggtggagtggagagaaggaaggaggaagaggaatagaggaatggatgaattttcttgtttcacaagagggagagatagagggagatcttctaaatacacaacttttagtcaatgaaggaatttaagacaattaacaaaaaaaaaatcatattaaatgttttttttaccttcaaaaaaataatatataattatattaaaaatgataaaacaatcattttaatatttattttactttttatccttttaactttactcttaacactaaacaacactcaagggagaacaattatcattctcatccctccttcctaccaaacataacctattctatatccatttgtcgaaataaccatacataataattttacactaatattaaaatagattcgataagctatctatatccaccgacacatatttaacaatcaaaaattagccaaaaaccggtttgttcttacatagagtgaatttatggctagtttcacttttgatttgtatgtgtgtattattttctgccaccactatttcacataccatttaagaaatctccatcaaaggtatgtagattaaattaactaacattgtggaaaagtcttgagaatatgtgatgaaaaaaattcttaacatatactaccatcaccacatgtttttgtcccatattattttaagggataaatatttgttggattgtggatcaaccattttaatttgatggtgaaataatttgttcagccaatcaaagtaagaaaaaaataaaaataagatggctagctaaagagtatatgtacatgtattcttctacatgtctatctatgtaaaatatttttctttgattgtaaagctatattttactagattgtagtaactagtaacttaatatgtttggtgagagggaaggaaattagtatgggggacagtttaagaaaggtagagagtatgatggaagtggaatttgaggataacatgtctccttcatattatttggtattggaagtagagttagaatgatgtaaagttaattatttattaaaattactatattattattttaaaatatatattatttatttgttatgaaaggtatttaggacatttaatatacttattttgtcattttttcttctttttatttttgaaaagcctgaattttgtacatttgaagaaaaaatgtaccattctatatctattttctccattttctttcctccctaccaaacacataatttattttccaacccactcaaaaattcttcctacatgtactgtaagaatcaataatcaataataaattgatctctctcttaacaagagataataaggcaaaattagaagtaaaattttaaacttacgactttctctatttttaagaatatttttataataacaccgaataatattatttaataatatttgatgaaattaatatttatatgaattgccaaaatattttaagtataaattctgaataaattaaaatttatcttaattttaagtgaagcgaccatcttacttagatttcaggtgactttccccttacaatcaagtaagtagataatttacttaatttgaatcatgcaagactgtccaacccgtattgtggtacaatattctttgtcaaatttgatgatagatagtttgagttgcctaaatgatgacccccttgctcatggttttaataaaagtaagcatttagagtaattattggcaatattccattcataaaaagtacttgatttttctcaaaccacaccaacattctgaccaagccaaaggcataaagataaagtacacataatttgatgctgcatttcataatgtgtcttaaacttaaaaaacatttcatattttggaacaatccaatccaccccaaagcataaaaatattctcaatttgccaactcctcaatttcccacttgtaacaaactcatgccataaaaagcaaattagtacaccaaattatattattattattataaataataataaaaaaaaaatactagatgcccccatttgaaaggctccctcattataagcaaaacaatgagtatttcctctataaacagtcaaaagataaagagcactcctttttttggtttcacccatttaactacattaattaataatattaataaaattaacaatgagtgctaaacaaactaaaaaattaaaaatatatctttatataaataaataaaaaaaaaaagcaaaagtgaagccacctttagtggaaggagataaggcatgaaatatgattgtacctcttacctattctcaacctttcccaacccaacccaaaaaaataaataaaaaacaaacctttaacacaaatcataacaatcatttacatataaactaaaacttttgtttctccaaagatttcatttttatttccctttcttatttttgatccatttcccatctcatatctcaaaccctttgccatggtgattttagtacaagagtttgatttttgttgtagccaagagcaaaacatatcataaagctttcatttttatttgtctttttttttttt

SEQ ID NO: 191383 - DNA, 762 bp, Cannabis indica
tttttattttttaaataaaaagatcggtgactatgggatgatgctatttttgtttttaaatgatcatatgtctcgcaagacctggcataggctaaggtgggctacgcacccagaaaaaaatattttgttttaaagatgtaattttttttttctaagcctctttttttatcaccaaaatagatagaataatactaagtaaaatcgtacacaaaacgtcgaaatataaaaaactttaataaattgggttgaaaataaaactaaaatttggaaccaaataaaccagagccatctgtaaccaatgcagcaaacgatagcagcagtgagttcaaaaccaataataagatcttagtcgagctcttcaatctcaggaccaacaccgccgccgctggatggtggagcatcttcctcgatccatcttggcgatgattggctctcagcctagctccttcatcttctcatcgaattcatcagacttttcgagttggttaccatcaagccactggatcatagctccattaatggcatttacacacaatttgatccaaaataatggctgagtaatcctattatttttctaattatttggtaaagtgaaaatagcaataacaatgacgggggtatatgtgtgagagcttttatcctttattggtattatgaaatctatgtttagtgagaacaaatgcttgttatattaagtgtaatgtgttatgatgctccatttagattactacagagaaagaaacctcacccacggatccacca

SEQ ID NO: 191384 - DNA, 1640 bp, Cannabis indica
tcaagtagttcatgtggttaattcgttagtcaatatgattttttcttatggcaatattattatattaaaagcttgttgtctattttttgtaatgtgtgttgtttttgtaaaacgatgtgtgaataaggttgcgaacttgtattttttaaggagctcttctttttgtgttggtcgtattattagtgggaatgatattcctattgatttggattccttgctattgcaagatctttgatttaaaataaacgtttgaaccttttattaaaaaaaaattaaaccataacatatagactctaaatttaatcaattataaaatattgaagtatgagacaccatagcaaaattccaaaattaaaggtattttgacccttgggagtactcattgttcgaccacacactaatatcacgagggctagctcaccctacaaaaactcttctatatgtttcgttgtaatcatgtaatgtatatataagaatgatctaaatctgatttggaaaaataaaaaataaaaaaaagtatatatatgaatatgatctaattttacaagtttatttaccgtcgacaattagtagtacttccttgttttatagcggtctcaagaaattgattgatggatgaagggtcacgtaataaaaggctacactgcccatcgaccaatggtacgacccaaaagccaatggaatctaaagaaggagctcactgcctggaggtgataccggcttccatggaggttcaccgggttgagcaaccgccggcgagaagtttctgccaaaaactcaagaacaagcttttagaaatgtttttcccagatgaccctttacgccaattcaaaggccaatcaactaaacggaagtggattctcggagctcagtacatcctccctattttacagtgggctcctcattacaccttcaagctcttcaaatccgacgtcgtttcaggcctcaccattgcaagcttagccatcccacaggtctcaaacccaaaaagatatatactttattttcgtcttttcttgtcttcagtataaactcattgaaaaaagctctgttttttaatcttaaaacagggaataagctatgctaagcttgcaaatcttccccccattgtcggtctatgtgagtagtttatttctttttttctcttttgggaatttcatactataaagttaatgatctattctgggttttcaccattttttttttcagattcaagctttgtcccaccattgatatatgccgtttttggaagctcaagagacctagcagtgggacctgtttctatagcttctcttatacttggttcaatgctaagcaaagaagtttctcccattaaagatcctgtcttgtttcttcaactggcttttacttcgactttcttcgccggtctgtttcaagcttctctgggattgttaaggtgactattattatcattatgtagtcgtttttgccgttattttcttcatttttcactgtcgtttctcatggagaagcattgcttttcgtttcgattttgtttctatcatccatgcaggcttggattcctcattgattttctgtccaaggcaattcttattgggttcatggctggagctgctgtaatagttctttacaacagcttaagagtcttcttggaatta

SEQ ID NO: 191385 - DNA, 1247 bp, Cannabis indica
attattcttaccatatatgtatatgccagaagtatgtgatctattagaagatttaagtgtataaattagacatttaattttataaataaaatagatagtacatatggataatttttccagccaatggcatattgccacatcagcttctcagaaacatatcatacctgtgcatatgctctgtcctgtccttccttccaacaaaacatcccaagtcaataacctaatataatttaatcaagctagttattatcatgtgttatcaattaatatgtgccactattaaggtttccaatgtaaaagcattttttttaaaaaaaattacttcttaacaaattaattatttgcatcttttatatttttaatcagctaaaattctagttttatatataatgatgtcttgttttatttatactcttctaaaattagaaattgcacacatgcatgcaacatatttaaataacttatttttattatcaattgcttgaatatataatggttataattctggcaaaatatgatttggtttaaatgcaaagcatgttatcttataaatatatcgcacaagcaaattaataacgggatttaattaaaagttgataatgtcattcttttatacgctgtattatttgggcaaagaatcccttttaagctaaaaacacagcctgttttaggaatcatgtcacgtggtatgtccatctactaatcaactatcactctatgaaggtttaattttattttatatcaagtttatatgacaatacaagttacaaccatatatatatgatggaaaatatatttttttttcagaagagaaaagaaaaaggtaatgagcaagagggttcgtgtttctcatttatgattataccaataatcttagaaagttcatttaatagatgaggggaggtggaagcatacagcattgtctgttacctgcgcctactgctatcacagcatctatattcatgaatctttgcactcattttcttaacacaatttcatgaattataaaaaaaaaaaaattgacctatagaaattaataaaaaataagaaattaatgtttatttagtaccccgtgaaattttaatttaaaatcttgtttcctaaaagaaaaaaaaaacaatcaggtacagcataacaaaatttagttgaaatttcattgcttttaataataataataattcaaatttggtggactacttaaattgaaataaaaacatttataaatgaaaaccaaggcgtgttagtga

SEQ ID NO: 191386 - DNA, 1676 bp, Cannabis indica
gtctaaaatattgaataaatctaaattaaaccaataaatatttatgaaatacatttaccggatagaaccgattcaatctaacatccaatgaatgttggatcgataggatgactgaaattaattggatcggattggatggtaaaatctaacatccaatatataattggattgaatctggatagacctaaaaatattgaatgtgatataatattgatacacaagtactcatacaccaatctaagccaaatatcacaaatatatacacacatacacaaaaattaacacaaatatctatctaatctcccaataaattctaacacttaattaaccattacactaacaaaaaaaaaaaaaaacacttacctttgccgagggagagggagggactgtcgatagagtcgggactcgggaagaggaactatcaaaaatcacccaaaaaaataaatataaagtaagaaataattttttattttttattttttttttctgtaaagaaagtaaataacacaaaagtaataccttttaaaaaaataatttatagtacagattacctctgtgacagcggagattggagatgatatgaaaattagggttaggagaagtggaggagactggcctgaatttgatctatataaaggactattacgggggcgacgacatttcgcccctaataacccttaaagttcgtccctaatgctcaaacactctgacatccctaaattcaaaatttttagggctggcttcaatttctagccaacttatccagcaaattgccccatttctagcgatggttattagttggtaacaatgaacaataaccctaactaacttcatgtgttcttctgtaactgatggaatgtattgaattagagattaacaataaagctggaactaagagggagttgttggctttatgtgtcccttaattgtgattgtgtctgtaattcaagtttttgacataaagtaattattgtgaggagatgaataaaaagtcaattactgtataactgcgtgggtttaattgatttgagattatcagattggtctctcataagctttacttcacaaactcaataatggccttttccctactcttaagcctttcctcattaacaagactgattctagcttttaaaaacacatgaattcccataggagacttattaggaatccttggtcaagcacttctcataatgatgaacactatcaacaacaaatgaatccttgtcaactcatccaaggcactctgagttttttttttttttttttgttacaattcccaaatgggactcagaaaaactgattatggaaagcacattttctagctccccaaatatcaaaacagtcctctttaaagatcacatagtttgggctaactttaaacaaaattatctgttgttctttttttagtgtacacacattattcactggcaacttaaatagtatttatgagatagttacttaattgtattgctacctgtttctcaatttagctttaactgcttaatgattatattacacaaaataatttatctttttgacactcagagaggaaacataaacattcccatataatgtaggagctcttatttgtaagaggaaattaatggaggttttttttcttctttcatttaaatactaacactatttctttggtaaaaacttgtttcccaact

SEQ ID NO: 191387 - DNA, 4150 bp, Cannabis indica
ttgttttgcttgttcacgactattagcctctgatgagactttgtccaataatcgtgtggtggattttctatctaatacctttggatgattgtttaattgtcagtggagtcgtatcggtcgctggagaaaaatactcagggccaaaagaacagtgttgtttccttgtctaaatggaggatcttaaatagactgcatgacagaaatgagactttatattaccgagtaagttacaaaatcccattttcagatgttaaagactttacatgacttttattttattcaatgggatgctggtgcctttctctcttcaggtccttatcgacaacatcaaagattttgctccgattatatacactcccactgtaggattagtatgtcaaaattactcagggttatttagaagaccacgtggaatgtacttcagtgcgaaggacaaaggggagatgatgtcaatgatctataattggccagctcaggaggtacagtgatcatatgctagcttcgtttcctcttcctctaaaagaaatcttgaatagccactgtttcctgtatatcactacctatctttttgaaatagtttattctgtttgctcattatcttgcaggtagacatgatagtcctgactgatggtagccgtatccttggcctgggtgaccttggtgttcaggggattggaatacctatcgggaaacttgatatgtatgttgctgcagcgggtttcaacccacagagagtatgtgctgcattgtgtttgagctgcttcattttctccagtttatgtgtttgttttctataagtgtttgtcgtaatacacatgactgcttggtgaattagttcactgttttatgaaatggagtatataattctgactagtgttcctttcacataatttcttggacatcgtagtgatgcagctattcccttttccttttctttaattttttttctgttgtgtgtgtgtgtgtggcaggtactccctgttatgctagatgtcggaactaacaatcagaagttacttgaagatcgtctttgtaagtaatctttacttttgtgtgaatcttatttttttctcgggttttattctcctatataattgtggctgcttgtgtcatgtttcttcttatcatgacttttcatacatgctcaaaggagtttaagtttcattggtctttgtattgaatgtccttttacattttggattttcttttacttccctttttgctgtaatgatgtgctcccaagattttctgtaatataaagaaaattaaaatcaattaattattgatatcttttggtacacatatgttcttgctttctgaaaagatttatgaggatgtatactcacatgatttcatttgatagatttaggacttcgacaacctaggttggaaggagaagagtatctatcaattgttgatgagttcatggaagctgttttcacacgttggccgaaggccattgtgcaggtttaattctcttagaagaatgactttcatttttaagttctgtttgtgtttgctctgttgacctgatgtttgttcatttatcagttcgaggactttcaaatgaagtgggcttttgaaacgctgcaccgctaccgtaaaaagttttgtatgttcaacgatgacatacaagtaagtaaattcctggctatcatcttatatcttcaataaaactaagtagagtcaaatagactgttctggataatttatgtgttactcaacagttctatattcttcacttatagggaactgcaggagtggcactcgcgggactattgggtactgtaagagctcaaggtcgaccattatctgactttgtgaaacagaagatagttgtagtcggagctgggaggtattcaaatttggcaacttaatctagtgttatgttttggtctattgcatgtgcgtccatttttcaactttgtctcacctcttgtttattttgtttatcagtgcagggcttggtgttcttaacacggccatacaggctgcagcaagaatgacagggaacgatgaaacaactgctaacaaactattctttttgctcgacaaagatgtaaggttttactatttctgcctgcttaagtagtcatttttgtagaaataaatttgtagttttctcctaacttcatgcacatgtctaaaattataacgaacttgcatatttgtgctgagtagttaacggattgataattccaataacgatgtaatatagcttaattttgtgaattattattgtctggacgtctgtcacagaatttctcgaagattttcttagctactaatatgatagtacatctcattattatttcatgcagggtcttgtaactaaacagaggaataatcttgatcctgcagctgcaccatttgctaaagacccttcagagattgatgggcttagggagggagctagtcttgttgaagtggtaagtcttgcagaactgcttgaggttttctctgatgagattcagtgttattttttggctttctttattgttgcttctggaacatgaatatcggtactccgagacaacatttttaataatgaatattaaaataactacgatcttaatgcattttaggttaaaaaaatccggccccatgtgcttcttggtttgtctggaaaaggtggtattttcaatgaggaggtgcgttcattttcatctgcgttcagtctactctaattttgcagcctttactttttgcttacgtttgatgtctgatgcgtcttaaattttatgactataaatcagtctctttttgttttcctcactatgaagctgttgtataattagatttgatctctggaaattaattttattcgaggctattgcgcctaaaatatgttgtcaaaggaaaattatgctcggtatcagtctcctctttgacaattgcatgcattttcataatggtttgagcttttatcaggtgcttaaggctatgcgagattcagattcaagtaaacctgccatttttgctatgtcaaaccccacaatgaatggtttgcttctgggatcctatcgtgttcagaatttcttcacggaaacttaagtttggtgttgttgaccttttatattttttctgatgcatgtgttacaaatcagctgagtgtactgctgctgatgctttcaagcatgctggtgataatatagtttttgcaagtggcagtcctttcgaaaatgttgatcttggtaattttctttcctcgaagcatcgatttcagttttattatcaagctcctcttctcgttctcttgtctcgtataatatattccaaaaacttgcatattgatttgcaggcaacggaaagataggatatgtaaatcaagcgaataacatgtacctgttccctgggttagttttccttcaatttcatcattttaagccaactatgcttatatcttgatggttgtaaactcatttttcggtggccttttgttcagaattggtttgggaacacttctctctggcgctcattttatctcggatggcatgttacaggcagctgctgaatggtatattaagacttcttgcttgctttatttagaatgataatagggaaaaaaaaaagcataagttacgctaaggacgtgtttgtttcctttaatttgctatgatcattataactattattctaaaatagtcaatgggaataaattttttgcgccattgttagtttgcaattaatcctctggaccttatttggatcttagtaatactatcccatgaatttttcttttatgagactgtcttatagaacttggtgtgtttttttcaagaaaaaagtaaaataaaataacacccttgtaatgccctgagtctaagtgtacaaaaaacagtcgtcaagaagattcatatacattttctttatctttttttccaaacaatgtctattgtactacagctctgatagaactgatacacacatatatgccttacagtttttaataagctctttatctttggtaggtatctctatactggtttggtaggtatcgtctatactggttttgggaatttgggatatggcgtatttttatgttaaaaaattaaaatacgtttacttaggcaggttttcaaaaatatagtaaatctttacctattattttattgttaaactcttaaaatacctcgaatttctattattc

SEQ ID NO: 191388 - DNA, 2512 bp, Cannabis indica
tttttttttaaaaaaaatagtatggtgagtgtttggatattaaaatgtattatttggtacactttttttatatttgtaataatatggtataattcttcatatgtatttcacattcaaaaatattgagttttgggcctaatattaaacaatagaagcccatcattccaaattttacaatttggcatttttggaaaaaataattaaattaataattatattagcaaagtcaagttattatatgaccttttgagattttttcgtttttttttttcaaaattgaaggggctaaaaaatgattaatgttgagagaaaataagagagtaaatttggttttgtaataagtaataaaatgtgaatgaaaaatatatgaattggtaggtaaataaatcttaggtggtttgcataaatgagaacttatgtattagttgtctttcccaatcccaactacgtccataaatacactgaaaaataaaataaaaatttagttaggacttaggaccataataaattaaaaaaaaattaaaaaaggcatatgttgacacatggcacttgagaatgatggtgatggtcataataggtagatagagagagagtgtgagtgaatattaaatcaaattttaaaatttatgataaattataaatttttagattattttggatagtttaccgtgttgaaaataagatttaaccagtcacttattatatgtataaaaaaaatgagcgtacaacagaatatgtaattcttatttttttgtattgtaaacaatttagaatttttttaaaatttataagtgattttaagtaaatataacatacacgattataaaaaaaaaaaattgaattaaaaaattttcttgtatgtcgaacgaaacaaataaaaatttaccaaaatattcttttaaaaggtgcagtgtagtgtagacttacctaatattaacatgaatatgatgtcaaatttctttttttactttacaatttatttatttaattttaatttaaaaatgtgacgagaattttgtgaggacaaaccaatctcaccgacacttaaatttattttggattttgtaatgtgtaccaaacctcaatccaacaaaattatacacacgttgtacaaacactcactaataatatcatatcaataccccttttttttatttttattttattttattcacacaaaatccactaaagcttatttattatgtatatctttttgttggccccaatagtttttttttgttctaagtaagattgtatttataaaaacaaaattttaaaattatatgtgagtaactatattagaaaattagaacaatttaaaatatcacaaacagagcttgcaaggctaattaagatttttgttcattgaacttttaagttgttgaaatttttttttgaattattgagatttttgaatttaaggatttttttctaattttagtaaagaaaatctaacatgggttaaagttaaggggtttcatttagtacatgtcgaaattcaagagatgtgataagaagcataatttagtacatggacaatcacagaatgagtaaattaaatgctactggacaaatagtctttaaatctaacaatctctataattcagaaaaaaattttaaagcacaaaaaaagtttagggatataatttgatacatagtaaaagtttaatggacaaaaattctaaatagttaaaaaaaaaaatatgtacaatgtaaataactattctaatattttttttttgaaaataagtagaatcacttgtataactacatcatatgaaaaaaattgaattattttccaagtactagaaatagagacattcttaccaatatggacaaaaataataatactacccctactataatatatgtatatatatatatatatatttctaagtacattcacattggttgtatatgaattataaaactttattatttagtaaaatgtgaaaacaatatgtatattgattatctcctatttataatgtactgaaatcattaattgaggttaggcctaccattactaattggatattttatatgtttttttttaagaaaaaaataaataaagtagatgagtttattgtgtgtcggtcattctcttcaaaagtatgtatataatatatataaataaacaaaagtgtatttaagaaattgtagatctcaaagtaatatcaaatttcacattttttatggtttctataaatctaagctaatcaatgcccaatatctctatatttatttatgtataataatttattaattaattataataaagtaattatttatatattatttttattttttttaaaaaaaattatagtttgagttgtttagttaattttatgtaagttattatatgattttgattgtgatttaagttattttgttagttgttaaatggattttcttaaaaataaatataaaaaaattgttttaaaagtatataaaaaaaaacaaactgttttatatcatttcttcttatttttttaacattaaatattatact

SEQ ID NO: 191389 - DNA, 4050 bp, Cannabis indica
ataagtgtccttcctgatagactctgttttctcattctttttctaagcaaacccgtgaactctttctgtgaccacataatttaacaatgccaatgccaatgccgtctcaagaaccaaagtctttctcagaaaagggaagcatgacagcggtgattcttaaatgaaatacaacttgttttaaaggttttttttttttgggtttctaactttcttccaatggtaatggcaatggaaaaccagttttttcctcttctttttcttcttactctgttaatggcttttctactagtcaaaccttcaaaccagcttgaccttcctcagactcaatcccttctcagaatccaacagtatctcaactttcccccagctttaaacagcttgaaaaacgacgacacagacttctgcaacattgaaccaacctcatttttcactgtcgtttgttatgagaacgacataactcagctccacattatcggcaacaatgagttccctcctctgtctcaagacttctccatacattctttctttactgctctggccaagctcaacactttgaaggttctctctttggtttctctcgggctttggggaccattgcctggtgctataggccatttatcgtcgttggagattctcaatattagctctaactacatccatggcgctattcccacacagcttctccatttgagagatcttcagactattgtactcgaccacaataacttttctgggccagtcccattttggctcaactcactcccaatgttgactgttcttagtttaaagcacaatttgctaagtgggtctctcccaaattcattggggagcttgaggaatctccgggttctcactctatcagagaataaattatctgggtcaatccccaactttagaaaattaacaaacttgcaggttcttgatcttgaagacaaccagtttggaccaaatttcccatctttgcccagaaaattagtcatacttaagctcagaaagaacaggtttcgcttaggcatctctgctaatataacctccttttacttgttacagaagctggacatttcgatgaatgaattcgtagggccattcatgccatctttgctgtctatgccttcaatttcgtaccttgatatttcagggaacaagttcactggagtgctttctgagaatatgacttgtagttctggtcttaattttgtgaatatgtcctcaaattacttggtgggcaagttaccttcttgtctggttttgcctcctaaggacggtgtcgttttgtattctgggaactgtttgttgagtgatcatgataagcaggaacaacgacagcaacaccctgttgagttctgccataaggaagctctggctgtggaagtcataccaagaagagagaagcctaagattccaaataataaaccagttctggcacccactttggctggtgggatagttggggcaatagcggttgttggtgtggtttcaatgcttgttaagaagaagtatggtaagtacactcttaaaaaacctacaacaacgttgattacagagagagtttcaacagttaacacagccaaactactttcaaatgctagtaagttgtacttttcttttggtattaattggaaaaggctttactttcaagtttcaactgtttttctttctccttttcatgttgattcttctttttattttgatttgtgcagaacatatatcggagactatgaagttaggagcttcgcttcctgcttatagaactttctctttggaagagctcatggaagctactaataacttcgatgattcagctttcatgggggacagtccaaatggtcaagtatgacaatttttgaatagtcttgtttttgttttacactagatattcatatatgacagtaagtaattattaatacattattgcaacatttagaacagtaataataggcatacaaacatacttctttgtcatttatttatattctaaagattatctattgatttataggcccagaatttgtgagctggccagtgttttgatactatttggttatgaatttaccattttttgttgatgaacaaatgttttggtactcatttcttaatcctaaagggagtaggaaattctcaataactctattaagtatcaaaacaccataaacagctcaattatctgagtattgtgaaagattctactgccttacaagaaagttttgctccagttgtacaggggcaagctctgtgatggaacgctcataacgataagaagcttggaaatgaaaagaaggcgaagtccacaggcctatactcgtgatcttgagatgatttcgaaactaagacattgccatttaattagtgctctaggacactgcttggagtgccaacttgatgattcaggtgttagcagaatatttctcgtcttcgagttctctcccaatggaactctaagagactgcatctcaggtaaagtcatttcccattccaaatcaacttctgaaactcctagttttagagcgccacaaaatatacaatactaatcctgctagaatattcaatatttagccttttgatgagtgttactgttacccgaaaggactcagtctcctttggccaagtctataaaggcagatttggacattgtgagctgaaaacttggttaatgatacttgttcttcagaaattttagtttgtgctataaatctcaacatattatgattgtctttctcagcatgaaatttataatactagctccatagttcagttggagatttctatatattaaataattaacagaaaagcaataattgagattgtgctacataatttgcttggcaggtactcaaggactgaaactcaattggacacagagaattgcagctgctattggagttacaaaaggcattcagtttctacacaccgggattgttcctggagtgtactcgaataatctgaaaataacaaatgtcatgttagatcataatcttcatgtgaagatcagtagctataaccttccacttttagctgaaaacagaggaatggtatggcaagaaacttaaaagttttgatatgaacacataactttgtttttctgagttggggttgttttcctaattgcttttatgtgcctttcaggcgagtaatgtagtttcttccacaacaaaggaagtggtcaagataggtaagagcattcaaaggtcatgtcttagtttgttcagttaattatatgttaatgttccatctttgtttaacatcttttctgtccttttgaagggtgaaacatgaggataagaatgatgtctatgacataggaattatcttactagagatcattctaggaaggcctatcatgttctacaaggaagttgattctctaaaagatcttgtgagtgttttctttatatagccataaaattcatctgactaaaacaaaccccataaatttgcacaagtttgataactattttactctattgcagttgagagtaagcatagcaaccgacgatacgggtagaagaagcatcgttgatccagcagtgcacaaacaatgctccgacgaatcactgatgacaatgatggagatatgtatgaggtgcctgtcgagtgagcccgctgataggccttccgtcgaagatattctttggactctgcaattcgcagctcaggttcagaattcagggagaggggaatctatgaacagccaagagtcacatggcgcattgtcttgagaaattgccaactgcaaactttgcaatcttaccatcaactaaagaacagtaaattatgtgccaactccaatagcagtagattatactaagtgtataagtaaagctctttaaatggtgtgatatcttttttttatttccctatgtgaattgatgatctagctctatatttattttatatatatacatgagataagtgtagggcgtccatcatatagaactagtttttttttccttttttttttttgaaagcttagaactaggtcttcttcttcagtttactattgacaacaaatttctgacataattaatgaacaaaatgttgtagacattgtca

SEQ ID NO: 191390 - DNA, 3701 bp, Cannabis indica
atagttgaattatatttctttcttcaaatacagaaaactacgaaagtgacacacttgctcggaagggagatgtgaattaatttaagtgtttgttaggcttagagggcgctgacatgtccaccactattaaaacactttttattactattgatttgcaaaccttaatggatacatacatacacacatacatatgcaaatgatatgtatctatctatgaatgtttagttttatgtaaacattaatgtaataatataagcacgtgtccgccacccatttgccactttcaaagtcagacatcacaggcgccaaacgtacttccatccctcttcaaccccagttaggcaccaaattataacttttatattttattttatatctatctatatatatatttctctagctgcgtggtactattggacatgatcaccttaaccttcttgtttatacatgtcatagatatattagttatggtgatgatgatgatgatgttcaattctgttttgttctgtttcttattcttttgttgttgttcttcatcatcattagctgttgtttcaagccattataacaatggtggtggtggatcaatagatggagatagagttgcattgttgtcattcatgtcacaaatagtttcagaccctcaacatgttcttgaggattggaactctttaaagaataataataataataataatgtctgcaactggtttggaattcgttgcaatagcgaaaaaaccagagttgttgagcttgatttaagtgggaaatcactcaagggaaccatttcttcttctctttccaatctttcttctttgaacattcttgacttgtcaagaaactcattccatggccatattcctagagaattaggctcccttttggagcttggtcagttgagtttatcctctaattttcttgaagggaacattccttttgagttgggatatcttaacaagttggtttatcttgatttaggaacaaaccaccttaaagggaagattccattttcgctttttgaaccagtcttctaattctctgcaatatgtagacctttctaacaattctctaagtggtgagattcctcttaagaatgaatgtcagctcaaagagttgaggtttcttttgctttggtctaaccaactagagggtcagattccaccagctctttcaaactcatcgaaactcgaatggctcgatttggaatcaaacaaactcaatggggagttgccttctgaaattgtccaaaaaatgcctcagttacagttcctttacttgtcatataatgattttgtcagccatgatggtaacaccaacttggaaccttttttcacttctttacttaactcttctaacttccaagaactcgaactggcgggaaataatcttggtggggttataccatctagtattggtgatctttctagtaccaatcttgtacagatgcatttagatgagaatctaatatatggtaatattcctcctcaaatttcaaaacttgtcaacctcacactcttgaacttgtctagtaatctcttgaatgggacaatcccatctgaattatgcaagatgggaaagttagagagagtttatttgtcaaataattcactctctggagagattccatcagctcttggtaacactcctcatttgggtcttcttgatttgtcaagaaacaaactttcgggttcgattcctgatagttttgctaatctttcccagttgagaagactgttactttatgataatcaactctcaggtaccataccaccaagtctaggaaaatgcataaacttggagattcttgacctttctcataatcatattacaggagtcattcctgatgaagtttcaggtttgagaagcttgaagttgtacttgaatctttctagtaatcacttacatgggcctttaccaatggagctgagtaaaatggatatggttcttgcgattgatttatcttcaaacaatctctctggtacaattccaccacagcttgggagttgcattgctttagagtctcttaacctttcaggcaatgccttaggaggttctataccgatttcgattggacagttgccttatcttaaacaatttgatgtgtcttcaaaccacttagctggtcaaataccacaatcttttcaggcatcatcaacacttaagcaactcaacttttctttcaacaatttctctggaaatgtatcaaacaagggggccttctcttctctaaccatggaatctttcttgggaaataaaggtctttgtggctcaataaaaggcatgagaaactgcagaagaaaacacaatgatcatcatcgccttctcttcttgtcaactctcttgccactatcagctgttcccattttctgtatgctttgttactcactaataaccaggtcaagaattcgaagtcaactttcgattttcaacaaaggggatatagaggaaggtgaagaggacaaaaaagaacttaagtacccaagaatctcataccaacagctcattaatgccactggtggattcagtccttcaagcctaattggttcaggccttttcgggcatgtctacaagggtgttcttcaagataacacaagaattgctgtgaaggttttggatactaaggcagctgggattatttcaggaagctttaaaagagagtgtcaaatactaaggaagactaggcacagaaatctaataaggatcatcacaatctgtagtagaccagactttaaggcacttgttcttcctttgatgtcaaatgggagcctggaaaggcatctatatccaaaccatggattcaggaatggtttgaatcttattcagctggtgagcatatgcagtgatgtagctgaggcagtgtcctatctgcatcatcattctcctgttcgagttgtccactgcgatctcaaaccagcaatatacttcctcactgatgaagacatgacagctttggtgactgattttgggatttcaaggttggtgaaaggtggtgatgagaccagtaacattgctataacgattcgatatcattcagctcagcagatggcttgttgtgcggatctgttggatacatagctcctggtttgtactccttctgttacttcattttttccttatttactagaatcaaaatattatgtcctttgtactttttggtcttgatatttcaaacactcattaaccaattcaatttcactatttcctggtggattttgcaaattattagtgtgtgattatgactaagttccaaaatattaattcaccttatctaaacttcagcattattttatggtcaaaagagcatgtcttctttacaatgcttcaatcctaatagttttattgcattgattttgacaaactgcagaatatggattgggaaaacgcgcttcaactcaaggcgatgtgtacagtttcggggtcctcctgctggaaattgtcacaggaaaacgccccactgacagtttttcggttgaaggttcaagcttgcatgaatgggtgaaatctcattaccctgataggcttcagccaatggttcaacaagcactagagaagtatgctccaactgcattagtcccaactcattacacaagaatttgggccaatgcagtgttggagttgattgaattaggactcatgtgcacacaatacactccttcaacaaggccaaccatgcaagatgtggctcatgaaatgagtaggtt

SEQ ID NO: 191391 - DNA, 2468 bp, Cannabis indica
cgcgccttatcttttttatcagaggagtacctaccttctaaaattcaaggtggactctacatctaatctaatctaatctcttgaaaattctatctatatggtctgtctgcataaatgttacattagcaaatagcaaagttttatgattcaaacaacactattgggaattcacacaagaggcatggagtttgagtctttccttcttaaaatcgagttttagagatttataggtattaacaaaacaaaaaacaggattggaagcactgtaattaatcgaaattaaaataaaacattatggttattattttcattattgttaacattagatgaaatggccttatttgaggtttttgcctcatctattggaacagtatctacaggctctattgtaaatctcactgtaatttaacattgaagaatctattatgtgtggatttaaaaatttattattcttcatgttaaaatattgctctgttaatattaaataaatagctttcactttagatggaagcaaaaatagttggctaaaataatagaaatgctctttatagttttcaaacataaggaatgaaattatgtgtttatattctaaaaggtgatcggttttaaaactccattgatttggttctgaaaaatgtagaactgaaactgtacataggcaaatctatttaagtttagattttgtttggtagaaaggaaaagttggagaaagaaaatagagaagagaaaaagtgaaagaaaatggtaaaaatagaaggtgaaatatagggtgggacctaccaatattagggattctactaatctttgttcaaattaatctctttttcaggtgattgcttcctagattgaatcaagagagttacttagatagataaacatagaatacaattattaaaactttatcaaaaattgacttggccatacctctcttcatcttaatggtcaattataagacaaggaaatctcacaattattaaaaaaaaaaaagaaaaactttctttgattgataatgtggaatacccttagctagtttgatttataatttagctttgtatgaaaatagtatgtggaaaaagttacaaaactaaaagaaaaatgaattttgaagcacatatgaagaactcaataatgtataatgactatgattaatcactatcaatataatctataaaaattaatcattggaagctctattataaataataaaggagcaagttcctagaagaaaccacactttgaatagtcttaatcaaactcatagtataattaacaaaacaatagagtgattatttggtggataccataagatttatgagattggagatctttttattttataggaggtggcagatttttggtctcataaaatgttcatcaagttatttggtgtttgtattttgttgctttacaattatgtatttgattattatttcattcataaattgagcattcaaatcatatagtgaaaaattccaagattgttgtatacattatggggtccaaaaccaaattattgaaaagcttaagtctttttaatgattttatgttcgtacaactattgtacattttattttattctcttaattgactaatcatagaatgcatgtatacatatatataatctatataaatacacttatatatatatagagaccccacttcccatttgattgcaaaaaaccacattattttgaagaatccaaaaatgaatccatgttagctgctttccttatcgatctcaaagtatacaatcattcaactcataattattttttattaatttttttttaaaaaaaaaacctcaatcattcagtcttggccacgtgcacatacaaatgtttttgcttggaacaatcttgttctcttgttctttgatctcatctttattatatagatataaatataaatatatatactttaatattgtgtctgtggttatgtacaacctcactaatgatttcttccacttgaagacatgaagaataaacatggaattataagtacattgtaattctaatacttagaaatgatgtttagaaagtaagactcaattggatattgttgaaattaataatattgtaagttaagaaacatggagaaataaattaattgatcatttttgccaataataaattaataatatagagttataatttttttttttaatgagataagagatttttgttttttggaatgaaatgaatataagagattggatgggataaaatttaatgaaattgtgatcatattatcaaatttattcaatctaatcttacattaatggatgttattattagagaatttgttgtcgtgatcaataagaaatatttaatttattttttattattttttacatataatttttttaaaaaaaaaattgggaggccatggtatcctccaactccctagctttcagtgttcgtgatttatgcatttatttatgaccattgctattggacaccagtagt

SEQ ID NO: 191392 - DNA, 2728 bp, Cannabis indica
aaggagcatgataccatttgtaacaatcacttagtagaactaactcctaaaaactagcctaagagaggagggtgcctaagtagttatagatcatcaactaatcccataatagtcgatgtgggttcctaacatataactttgtggaattttataattttatagttttctcatgatatttcctttaccttcgcctttaggttgttgtagcaacaattgcttttggtatggggattgacaagttaaatgttcgaaggattattcactatggttggccacaggtattctctttttagttgttctttgatgtttgttgtttctcgctctttcataattatgctttatggttgtatgataaccatgaattatatttcaacttgaaattaatttgatttcatttatctcatgaggcaaaatgtcccctaaaatgtgactattcatttttagatggacaaaaataaaattattttttttgctgcataagatttttagatgaattctggtttatgcttcttgtaacatatagttgcactgtagagcctggaagcatactatcaagaagctggtcgtgctggaagagacggaaagttagcagattgtagtaagcaagtctatgtttcatgtttttggtgaaacagtaatttcttatactaaattgcaaatttgaggggatgaagcttctttatcttatttatatttttatttgttaaaaaattaatcttataatatgatagatatttgaaagttcatttttttcttttttgaactcctatttgatcctcaatggactggcaagatgaatttaaatttttagtatggaagggggtattgggtttttactcatttgaatctcaatgaatgttgatactcaacaaaacatagttgcaactcattatctgctttctcaacagtactgattgcaaacttatcaagaataccgtcacttttgcctagtaagaggactgcagagcagacaaggcaagcatacaagatgttgtctgattgtttcaggtttatagttaattcttctcctcatatactactatgtttcattattgtactaaagattattttactccagtggtgtacatcgaatcatatgtttatattgcatatttcttctttatttgcaggtatggaatgaatttgtcatgctgtcgggctaagaagctcgtggagtactttggagagaaatttgctgatgagaagtgtctcttgtacgcacggttttttttatcctcattttagtcgtgatattaaagtttgttttcttgattgtaaagtacttttatgacatttttcatgtctactatcttgattctcattatcatcaaatattttatttcaagaaaagcagtcagggttggcattgtttcacatatatacattaatgtttccatttaaatgaaatatttatgtgcatatgtacgtacatttatgcaggtgcgatgtgtgcgttaatggacctcccgaagtacaggatttgagagaggaggcagacatcttgatgcaggtcattgctgcctataatgtaagtagtacgattattgttatcataaatgcgatgtgatgaattaacttttttatatttgaatattaactataattgctcaaagcattcttgtgttttttgggtctatctagaagtagttacaaactgaatcaatagagctgtgtaaagtatcagaaattacaatatgctcatggatttagtcatgatgtagctctagatttgtgaacggaatacacttttccaaactccaatcatctcatgggtgacatgttgtgtttcagggaagtagaacttttgacgatgcctcatactttgacgatgcaagtacacaacaacgattcaggggaaagccagatctcaggatgtttgtcagtgaaattaggttacaggtatcaaatttccaattccttttcacaatctctgtttgcttcattataagacatttgttaattataagacattcatttgcttctttaaattttatcatatgatggccattgcagtctcaaaaattcatggcaactgatctgctctggtggcgaggtcttgctcgaattatggaaagtaaagggttaattagagagggagatgacaaggtataccattttaactatttccgtaagtatattattactccaatgtctatatttggcagaaaattgtcttgttggcttgggtttctgttcaccgtcgtaggagtagcatgttgttattgcctttagttgacagacttgtttttaataagtttgcactgttttggtcagaaccatgttcagattacaatgccagagccaacagagcttggtcttgagtttctgcaatacaaggaagaccaaactttttgtgctcacccagaggcagatatgcttgtatccatgaggaagactgaatcttattcgagtttctcagactggggaaaaggctgggctgaccctgagattcgacatcaacgtttggagaggatgcaacccaagacaaagcagagaaaagcaaaggggttaagagggtcaagaaaaagggggaaaagaaaatcaaataagcatactcctgatatgactactgctagaggtagaatagcagcaaaattcaccaaagcaaatggtaagccatttccgtcttaggtgatttattgaaaatttgtaaccatgaactgtgtagagttggccactctatcacgaagtttttgaaaaagcaagatattgaatgattttttatttt

SEQ ID NO: 191393 - DNA, 1507 bp, Cannabis indica
cagaacttgaatattctggttattttgattggcgatttgctgtgaatcggagtatgtgacaggagtagtaacccctgtttcagcttctgtttcttgatccttgttcgacattcgtaaaaatcagaggcaaaaaaaaagaagaagagagacgatgactggaaggacagtcacggatgaacgccaccttcgccggagaagaagacacagccagatgggagaggcggaagcgatcgagatcagaagagggaaagcattctttcccgctctgataccataacacgaaacagagtaaagagaagtgtttattgaattgaatttagaattgtctgaatgaattacaagagttaatgaatactgcttatatatatggcaaaaggggtcacagaccgacttaaagcaacccaactaacagcccaactaacttgaggaataaacgcaggaaaaggaaaataaccaaccccaacagtagctaaaactaacaaatcctaatacatattttattgcttagattggattaaatggtaaaaattaaattaatataattataaggttggataagattatatttacaaatgaaaatgtatcaaattaattaagattaaagattagttatacatatataaacgatatttggatgaaaaagtatataaatatatataatattttctccctagcttactcaaatacatcaactttaaaaatgataataataattaaaatacatttcattagggtcgctattaattagcctaggaaggatgttccgaaaacttgtattaattagtgtataaactaaaatatgataattttctttgaggctttgtttgaataaaattttagaaattttgttgttgttgttgtttgttggatttgaaagaaaaaaagagttgtttgactttaatttacggaaggctactaacggagcaatcgaaaacttttgaaatatctatctatttatattttttattatttatttcttaaatattttaatgaacaaaattaagtttctatattatctaaatggtgggtttcatttaatataatttttcttaataaaaaaacaatattacttaaaagtactataagcaaattaattggtacttttaagatgaagaagaaatacttagtgaatgtagtgtttttttgcatcattttaatcaaatttataaattacaaatgaataaggagacagccaacataatatgagtatataatcctcgaaacatattctgaatatgattaaacacatcagaaattatagattatctaaaattttatctgatgaaaaatgaaaattttataaatttttaagaaatttgaatgaaaattttgtaattttttgttgtgactaaaagtaaaaaatattgtgactaattataaattattattcttatgttgtgactaaaagatccgtgtgactaaaggtattagtcacaaaaattacattttattgtgattaaatgtacttttagtcacattatttgttgtgaccaaaattaaattagtg

SEQ ID NO: 191394 - DNA, 2867 bp, Cannabis indica
tgaaaaagtgagatagtgatgcatcaatttaaaaacattccaaaatcgttatataactttattatcactaaacaaaaaataaccgaacgcaaagcgcggtttgtttcttaattatttgtataaagtcatttatgtaaatagattgttaattgtgtatattattgaaaaaatccctaaaaacaaatataatgtgtaattttgacttgtttatgtgagttgaaactattgggccaattaaaaaggaaaaaagagttgttgtgtatgggtcagatgttggcccataacgaataatttggtggtgaaacgtggtcatttccagaccaatatccatatccaagtcatagccatacggatgccggaccttcgtactccggcgaccttccatcgcttccctcaattccattcgatcatcaagatcatcatcactctcttcttcttccgcatccatcaggtaccttctttttttgctcttgatttatccataaccagttttatacacatgcatacagtatacgcatttatgcttcctaattcagactaactattttgctcaactcattcatcaactacagctctgcctgccgcttaacttgattctacttttatgtttagaaattcatgttgaacttaattttagcttaactttacgaaaacaacactgaatttgagcttgttgagtgaagcagctcatgagtagttcactgtctaaaactctctgacagttttttatttatttaatttaactttttccatttagggtttggtttggcttccaaaggaacatcactttaggtttttcgacgggcgctaactaatgtttagaagcaacaatgtcgttgccagactattccaacgccaaatttgcactcctcctcctggcacgattgtatgtgtttcttgtcttttgagattctgctctttagtactatttttatgtatccaattggtacagtggtctctagattctatattgcacctctcacatgtgccaaagctagtactatcaaagatgatcaatgattacagatgaaataaccctgaagctgataacttgggaaaatgataggaatgaattgaaagcacattaggggaaacttagaattcttaatcttacttaaatgctttcaggttcattgcgccagacgattttacgagaatttagttcctagccataccatatatgatattgagtgcccagatcatttgttccggaaattcacagaagatggccaatatctcgtatgctttagtagaaaccatcaggagttgattgtatacagaccctcatggctttctttttcgtgcaaggacgaagattgtgatatccatgatcttcctccccaagcaaagaagtttgatagtttctttacacagctttactgtgtatcacttgcttccagcaatgagcttatatgcaaggatttcttcctttacatggagagtaaccaatatggactctttgccacctcaactactcaaattcacgatgcacctgctgttggtggagccattcagggagttccatcaatagaaaagataacttttcatctcttgaggtgcgtgctcttagctttatacatttcttttcaagcctaataagacatattgtatgtgcataagttactattttttttttgttttctcttttctttcttccaaaagattcttatattctgtctatttttatttgacttaggctagaagatggtgtcgtactggatgaaaaggtctttaatgatgattttatcaatttagcccataatatgggtgtcttcatgcatgacgatcttttagcagttgtgtcacttcggtatcaaacaattcatattctccaaattcgggattctgggaaccttgttgatgtgcgagcaattggagcattttgtagtgaagatgatgaactttttctcaattccaatgttccagtgagtaactttttttgtcatgttatttatgagatgaaaaaggactagcactcaattgttttgcttgcatactaggatggtagaagtacagggagtgctctctatgaagagaccctgtcatatatgctgatacttgaattttagaaagaaaagacattgacttcgcttgcaaagatatgattatgaacattgttgtgtcttttcattttaattgctttccttttcttaataataagaggagggagggggggaatccgggccagaatcagaacaattatagcaacatgccattgttctcgaacaaattacaacactatgaggaaacttcattaactgtgttaatgttttgttgcatcttttatttatttactattatctgtattagaaaaatgttatacagagcaaaataaaacaagaacaattactcaataaagttccattcccttcataaactagagaatggaaaatcaactcctttacattatgcagcctaatagccacccataacctggtcttatttcatagactatttacatggctggataacccttcaaaagaccttttatttctttccagccaaattccccccaaaaaaagctgacacagaagtagctcaaagaatctccatctccttgcctcccataataagaaatcaaagttcttcacatggagcaggaataccccaaaacaggctaaattcgtttagcaatttgtaccatctgcataacacaccccaatttggagaggttgccagaaaaggctttctctttttgaataacataatgcacattctatttccccagagcagcagcaattaaaaaacaaaatctaaatgtgggtcggattgagatttttcaaagaaaatcagcccaattcacctgctgaatggagtcatggactcatcagttcttaacaatcaaaagctgatttgcttgaaaagat

SEQ ID NO: 191395 - DNA, 1982 bp, Cannabis indica
ctagttctgtaacgtaagatttttatgtctccatgtatcttctcctatattttaatttaaatgtcgtttcttactctccttttgactaatgtggctcggcaaattgttgcatatatgtcgttttatttgataaatggggggttttatcgtttttgctgctttccagaccttctaaggtggtttgctctgtagtctttgctagctaaatttcatgttgcttttcttcatgtccacagtgtcgtttgacatattttatgtcgtttattgtttctgttatgtagatttgaaacacgtgcggcgcgtgatcgtcacgccggtgccgtaagggctggagaggaatttgtggttgccgtggaggatactcgccctggatacgtggccgctacatttaaaactgctgaccagttaacgggccaggcttttaacgatgtcggttctatggatgatgaaggcccattaaaactggaccgtacggacaaagaccgccaaggcaagatgtgatcaatttcagtattttgggccagaactataatgattgggcttttttgttttgggttctcttatcgtttggttgcaaggctaataacttgggttttagattgagaccattcaatctctccctatctccatgtaatgtaatattcactcgggtctttatggcttttgcttaactttgtaacttcttttttatatataattaattaattacaaatatcatgttttgtactcttttttaagtcgtcgtttttaaagattggcaaggcacaaccaaacacatcaagaccatagccttttttttttaagggagtataaaataattgaagaaaatacaatgcacatgttatgttgagagactaaaatttatacaactaaagtaaattaaggataaatattattttggatttggtgtttggtaaaacttattaattagatttttttgtttgtttgtttgttttgttttttttttttttaaattaataaaattgatcttgtatatattttataaatagaattataaattgaatttttttgttaataatttaatttaaagattttatgataaaattgttcataattttttgtatttatttatgttaaaaattataaatggttttttagaaccgtggtaatttaaacaaacaacagaaatatggaaagagtaaaacataaatctgacaatttattttcataccgaaactaactttaataattattttaacagttagatttcgtcataaattactcaaatctaataaaaattactcctttttcttggtgattaattttagttttatagaatattcttggtacccaaaaaaaaaattcttaaaaaaaaaagaataaagtgcgtattaattatttgtaaaggtacatcattttaattatatctcgaataacaattaattaatgttggcatcttttacatgttcgtagatcaagccaacttggatttgttttgtttgttttcaagtccttatttttgtgtaccacataaacgattaagagagcaatggtttcaaatatcaataatttgaagaaataaaaacatcattttcctcaaatgttttgttgttttttgtagaagaacattcgtttaggtttggaacttagttaagctaaagtccaagccaagataattgttgttttttccttttttttcttttcccaattgctataaattgcaatcttaacacgtctatgttgataataaatcttatcagttaaagaaataatgaagaaaaaccacttaaagaaaaagctataagcagggttatatattccctgtatatagaaatattgtagttatttattgcgacataaaatgaagaagtatgtacgataaatatgtataagatgtgggtcattctctagtgataaagagttataaattttttttttagggaaaattcagttgatttaaaatatcctgttttgatgagtgaaggcttccatatgtttgtctctttgtgtattaaaatata

SEQ ID NO: 191396 - DNA, 789 bp, Cannabis indica
attggaacatttttagtttttttttttcttttttcaaacacatttatttattttctgcttttagtatgatatcttcacataatgtctttatctcagtctactatctaaatcctattaaatctaataactattattatatatcaataataacaagtacccaccttttaaaccattttgttaattaatgttatttttgaaattttgaataaacaatcattaaatgaatttttaaattattaaatcatttttgtttaatatataatttttaagaatacctggtttttaatatcacattatattatattatcttttacttttttagattgttcatttttttttaataaaattgttacagatttatttggtaacttatttttagttagtgattttttttatgtttaactgatagagattagagaatctattttcttatatgatctaccaatatttgagcattaataacctcacaaatcagcatatgaatatataataatatattggttaaatgatattcatatagatctgtcattagtataaacatatatatatttctcaaatataattagaaacaaaacacaaattaaatatatcttttttaattagtagtttattatgtatattctatttttaaaattttattctaaaaatatataattgtttttttaaaatttcaaattatttaaataaaattacaaccatattgctatttacacttcgaaaatttaaaaaaataagaacaaagtacaaattttaacttctcatatatataaattgagttgggcatggagc

SEQ ID NO: 191397 - DNA, 3422 bp, Cannabis indica
gcacacgtacagtgaatgacttaatatttacactaatcattagagatcactcttatatatgaatgagtttgaattgtcattaattacatggcatgcagctgggagacaagaacaagttacgagcaagaggtctctctaaagcgctgtcttatatttatatatacattaccaaaaataggtctcaaaaactattaagatagggagctaataagtaaccccaaaatatatgagtacccagtcaaaaaagctaataatttacaacaacctacatttatgtatgccctactaacctctctaaaacgagctaggtccctaataataaacttcctatctaaaaggaacaaggtaaataatattcaaagtcctcgaaaaagtctctatcggtcaagtaaaagttgtacaaaactccaattatttcatggaaagttgtggtggccataaaagatgcattatttcatcattgccattcaattaaatctcctattaagttaaccaaaggctatatctccatgtgtctcacagtgagtgagagaaagagagtaaaactacagctctctctctcccatggctgctaagcaaacaaatttcaaacccttcaaccccaccaaaaaaatattaaatagaaatagaaaaggagccgagtaaagcattaaagactttaacttttatgtttataaaggtcaaaaagattcaatttcccaaaaagcacttcttttatgagatggcattcagacaaaaaactttagagaataccctttaaattggggtagaaaatgtcaaaacgatatagatataagttcattaaacaggagaaattaattaatgctttgctttggttataatttataattattttcttaattgaacaacttgtagtgaatatatgaatacagatcatccaaaaaagctgaaaattgattccaaaaaaggtgcgatttctgaaatgtgtaaacttttatttgcactgattcctaaacttgttggaaatttagaatatagaagacaatattcaccattaacttttattgctgctaaaataatattttaaattgattgacgcaatcgcctatgctcttagtgagacctaactaagatacatgtaacactctcgatcttgcctcctcgtcatgcataactgtctggtctcttctatattatatgtatatatatttaagtgggttccagacttctatagtactattccctgccttacaagaaaaaaaaaagaagtgataacattcatgtgatgataatgtcaaaagagatttcataattgattcttagaattaaataatagtaatgagattaatttatcagagacacatgatatcatgtctgtcttcaacagcaacttaacttaaaatccatgaataagatgtacaataggtttgaactcaaaaatcaattgtccactaagcaaaagaagagagtatggaacattaatatttatatttatatatatatatataaatacagatatacctgaagcaatgcagctcataattatcagtagttgtttcttgatcagtctcacattataattaaagtactgccatgcatttcttcatatcaaatcttagggaacgtacgagtaagtgataaagtaaaggttatcttcatctggtaccggaactcattttacaatttatgaaaaaaaaaactataatatatatgaaagtaagctatgaagggtaaggccaaatattttgggggaatgttacgttatagaaagaaagaaattaagcaatattatcatgtatatatattgaagtgtcttgagtcacgaaacgaatctatacatattatcacaatggataacaagagtagggttttgagcgaatagattataatacaatgcatagacacaaatgagttaatttctttatttcatctatgatatgtgttgctatggtatattacatataaatatgtatatgagaaataattgtcatctgatgagtgtatagtacacatctaatcaagttttaggagacaacaggtgtaagaaaagagaaagatatgacgaaacaacattatttagggaaaaaagacctaaagttgaagacagctaaataggcaggcaaataataataattgtattattagatctctatgtataacttaatctgaaacaatcactgcatcttggtgtacccatttgcctattcttttggctaacctaccgaaaataactcattattatgatcttaatcccaaaatatatttgacaggggttctcgtcacaagtagtagatcttgattaattaaaaaaaaaaaaggaaaaaagattaatccccacgaaaccctaagtgagagaaagtaaaaagatttgataattaaacgtgagaagtaattacataaagagaatgtttagcaaagataaaaaccagatctgaaaaaatggcagaaaaagacagagaaatcacatgctagaagccatcatgagaaaaatctgaccaatgatggagcaaaaagaaagccatcatgataacatgatcatacagaagaaaaaacaagaaaaaagaagatggaaagaaaatcagagagcaatgatgaagaaaaaaaggtttctttggcagagccccaatacattttttttgtttttttgaaaaaacaccatcattatgccaatgatctgcaaaacaggctatataaagtacacaacatcacatattaattgctcaagaaaaccaaaacccattacgcaaaacaaacccaaaatagcatatatgtacatataatgtaatttagagaaagagaaaagaaaaaaggcaaaaccttttcacattgagacatgcagagtagtgatcacctaaaccaagcgattggtataaaagagaaagacatttgtttgggggagaagcttttaattggggggaatgaagcctggtccgacgacccactactcaaatcgactgcttaaaaaacagatcaaataatcacaaagtgtatcctcgagccagacaacgttccccgcaaacataaaagcttcacttcttctcttcttttccttttaccttcatgataagaggcttataaagctagtaaaccaaaaggggtttgaaaaattaagattttgttttgtattggtgtctctcttatctcttatatatagagatagatgtcccccaagagtttcggctagcttcaagggggataagagaagagagaaacagaaagagagagagagagagatgaaggaagaagatgatgatgatgataatgatgatgatatgaatgagaatgatatgggaaatgaggggtttgggacttgggtttataacaactaaaagagattggaaagccaacgttacaaaagacaaaacatagctgcaaacatggtcccaccacaccaccacctcccctctttagcttctcacttccagaaatgaccacgaccccatgcacctctctctctctct

SEQ ID NO: 191398 - DNA, 1091 bp, Cannabis indica
gtgtagtatttcatcattgtctcctgtcttcacttgtgtgatcatccttctgttttttcagtgtttgaagtttaagactgaccaagcacaggatgctaagaaaatggagaagctcaacaacatgtttttcactctgatggctcggggtcctgaaggtaccatattttttacaattagagttgttcttaactttgttgtgtctctgaaaattaaaactaaagctactttagatcctcttgatttagttttaatcttgaagaacagtagaataggatgtaaagtagcatgctttcatggatttctgttactaatcttatacttaagtcaaaaatcaaatgagctatgtaataatagcatggcatcctccctaaaatgaactgtttattatcatattttattgaaggaccaattatacaatttttgttcatctgttatgtgcagcggatacatcggaagttaccgggaaagagccgatggatgcacagccaaccaagaaaggaagaggaaggaaacaataaccttgttagctaataggaaatagttactttgacaaatcatgtttgacttgtggatagatacctctgaagaaaaagaaacaagtttcggtagccattttttgcattggcatttagcaaaatcatcatgagatgggagtcttgaatttcttcttgtgagtctcaaaaagctatattcacttgcaattttctggatttattacactcttcactccctctaacttgtgttttatattcaaactaatgaatttctctagtttacattaattgctgttctcgagaaagaagctatttagtttcatcatctaaaaacttaataatatatataaatactcgaaaaatgagatcagaaaaagctgaattttgttttcgctcatgtaaatgaacatgaaattagactttaaatataatagctttgttcaaataaaacacaaaatattagaatatcgaaataatgttttcccccaaaaacattggattagctcccaagtccaaccatgttagtggagcagagaataatggaatcaatgcattcttttttcctgctttaaaatttatatacatataaatatatat

SEQ ID NO: 191399 - DNA, 2083 bp, Cannabis indica
atgtactaaatcatgcccctaaaacttttacttagataaaaatccttaaatttaacaatctcaatagttcaatagtcatttttaacgaccataaaaatttagatacatgatttaataattttttaaattcaggtataaaaatcctaattaactttttttttcagtcaaactaaaagttttagtcgaagcaaaggaatagatgagggtacctcttatttatattctatttaatgattttgtttttacgaaataaaaaaggacatttttattagcattatagataacaataagtggttgaaattaatcagcacaaaaactaggaattcaatagctcgtcattatttggaaatataattataaacctatggccccaaataaacttaaagagttcttatttatgaatcatgaccagtaatgcaccaagggcttttctatttgcaatgggcacccccataagtgtacttagaggtacataaaatgtaattattataactttctattgttacttaaaaaccaactgcatatgtagctcttatcattcgaagattacaacaccattgtacaaattaaacacagaactatacgaaagaatttcatgttctagaagatggatggtttgaggttgaaaccaacagaaaatagtgtctatttcatgttccccatagctcagccaatccttccctgcagtctcaatctaactaacaaagaccacactgaaatatcagctaccaaaaagtcactactatctagatttaatttctttgccgtcatatactggactcaaccatctaaacagtatcatggaactcaaaaatccattgttactttgttgttgttcatatatctgcatgtaagtctcggagagagcaaccatttgaggaagcgtttcttcaacatgcagatcctgcatggcgtacctacaaaatttgatgcaatattttaaaatctagcagttgttaatgcccacattaaaacaaattaatgagaattaccatgattcttccgactttctctggacaaataccctgtaagaaccctcaccaggctttccatcatgaacaatattggcaattaaatcatattttgagcgtaatctctcgttttctttaggtgttggcaaggggatgtaatccttcagttcaaggttctttacgggaaagttaactgcaatggaaataatcaattagcaccagaaggtacacaagaagcctaaagtcttgtcagtacagccccttgtaaagtatgtcttcaatgacgtatagtctcacctaatgtaggattcttctcaacaaagaaattgttttttgtaaatctccgcatgtgtagaatgatatattgtggtaatctggtaacccgatacctcattcttgctatgcgaggtcggactacttcagtgatcatctcaccatcaaatttcttcagaatgttgaacagagggacctatgaacaaaatggaattcagtgtttatttgagaaaataaaaaagaaccagatacattagactcgtcatatttcaaatgtggtaatttaaaaaaaaatcatgatgatggaaaaaaacatattggcttattaaaatgcctctcacacagaaacaattctaagatctgaatgcagtgtgtaccttaaaaatatctaaatttcacgacttaaactaatctacaagtttgaagattttgtttcccctttcaagtgacactttgaaacagagagatgaaggtgaatttcttcaaattaatgtgaagagcgtgcatattatggtccatattttagaagttgtttttttttatcctggcttaaacttcaaataatttttttttcactttaatccttactgtcggtctcagaacttatatttaaagcctttattttactatttcaccaaaagtaaaaaccctaatacctgtggtataatatttttctccatcacatcttggaaaagaggaggtggtggcaaatccagtccaagcattaagaatggcattctgtaagtttctgtgaaaatgccattgtgctgagtaacaccatcaagctcctcaccatcttctttcttttcagtaatagatttgttaggagtctccttcac

SEQ ID NO: 191400 - DNA, 4194 bp, Cannabis indica
aattgtaaaaaaaaaaaaaaatccaatgtagcagatttatccaaactcaaacaaatgagcatttctgtttcaacttcagagaatcatccaatccttaccaattgttttggagttttacttttttagtgttgaatttcagaaactaccccacaaaggataactaactcacagaaatgccaaattccccattcacaacatcccatttatttaagagccacacagagaaaccatataacaatacattcttccaatggagtaatatgtacactcaaaatatacatacaaacattacatagttcccagttgaaatagatgtgattggttaaaaaaactgtcatgtcactgtatgtaatgtttgagtgcatattttaggtgcaccattactcttatccaatttctttaagaaaccaattattcataaactttggcaactattcttttttctctttcttttcttaacaattaaaaactgttttaagaatgaaaatcactctacaatgtcactgtgtatatacttctttgggaagacatatccatataagttatcaaataccaatttagaatcacatgcatccacaatgtaataaatttttaaattaagagttccaaatagcatatatgtaattggatgcaaatctaatggatatcagaggttatgcttgcataaaaatggtcttagtcaattcaattacacaagattcacaggaaagtcagattgtcaaaactagttcgctagaatttacacatcatgtaatctttactattataagttactaaaatgcatcaatatccattacacatatattgcatgtctgattttagcatgttttgaactttggcttgcatcatgaaaataggagcttatacaacaataaaaattgatctagaaaagcatacctgcaagattttcggcagcaaatcttagacaaacagcttttagttcagaggcattgcaccggtcagccaaagctaggatttcagcaacagatttcacagatatatccttgcagagatgagactcacacattagtctgagcctatccagaccatacttatcagctgcagctaatagttttccagttaatgagtcagataccaaggatgtaggcgacgtacttggtgtttcaagctgcacatcctctgttagggaatctctgtatataaaatgcaacatggcctgttgaatataatagtaagtaggaacattaggttaaaatccatagaatgacagtaataattctgaaaatagaccactaaagaaaaaatgaaataacatttcttcaattgaaatttcagacataccttgaaaactttaggttctaaatctgtgatttcaacctctgtattatcttcctctagcccctcaaagaatttagaacgaaatataggggaccgagcagccaataccaacttatgtccacgaaacttttcaccagccacaacaaaactaatatctgaaccttccttcttttccaatagcatcccaaaatgtgtaccaatatcagattctgggacccgaatagagtgtaatcgtggacaatctaccgctgaaactacaactccaactgtacaattgatttttaagcaatcatctttcaaaaagtctgaagtttcaagcaaagctcgtctgaagaaacgcttgtatcccctaaagtacaaacaaaacaaataaattaacatcttaaagatacatctacatagaaattttcaatgtgtgcactctataattcattgtaggaagtagcaattaaatttaacaagaaatcaaaagtccaggtgatccaggtttgagagaacaaggtaaggctagcgcatgtacacatttaataaaatcctaaaaaagttcacctaaaaataaaaaataaagaaaataagaattaaaatatataattgtaaattgttttattcgcataattgaaacttaaatggtgtgtccttcatataatttgcaaaatttaatttcttagtttttacctaaaccttacaccataattttatatgtctaagacaactcgtccaaaatttattttcgggtgcctcacttatggcgaaggaaaattgtggtaacaaactaaaaattaaaaatagatgaaagcaagcataaatacatgaacaccaaagctctcagtacaatcaaataaaacttagaccatgataagattatcttggtgcaaaataactccacattctctagtgagatcttaaaatgacatggcctcaaaaccttttgacttctttagtgagatcttgaaaaaacaagccctcaaaaccaaagttgcaattgcaacccagaatttgatcttcccccatgcgtcttctacctcattattgattccttcaaagatcctcccgtttaattccatccaaactgcacaaaaaatggcaagaatggctgtgctccacagccaagaagttcttcttcctttaagtttacacaatagcaactatcttcagatttgggcagttattttttaaagatattatgaagatatattaattatagtaatttgaagtaaaattatttctatatgatatcaattataagcggtaaacaaaaataggtgctaggggttctatcgtccttgtataaattacacttgcactgaacccatataaacctgggagtggaacaaagatttttcagtaaaaataatcagtcatacccctttaactacttggacgccagaaacccttcttacaaacaagaaactgattttgatgaacggttaaggaccagtgaagtgattccaaaattggcttaagctttttgatcgtgtctgttgtgtcttgaaccagtagatatccgcctggtctcaatatgcgatcaatctccgcaacaatttctaccatgtcacatctttgtgtaaggtttcccaagagatagttggaatgtagtagataatcttagcctggtctaagttttatttgacttataaaccaaagttgcaattgcaacccagactttgatcttcccccatacatcttctacctcataattgattccttcaaagatcctcccgtttaattccagcaagaatggctgtgctccagagccgagaagttctccttctccctttgagtttacacaatagcaactatcttcagatttggggcatgcactaatgtataccaaattcactaagcactctaacccacgaaagatgactggaagggcactctagaattaagtgggaagtcgtttccccatttttcttgcaatatacacaccaacccaaggataataaatgataggaccatcttctttataatatctcacgaacattgagtttttttaagagatagaccacactagtgaataagaaaagagataggatctcactattttagcccactagatccacaaaacttccctcctagtctccccttaatgaagatcaaataggaaagataagcagccatcaaccaccttctccactttgatctgaatccttcttcataagtaccatatccagaaagtcctaatgcacatagtcataggctttctcaaagtcaattttgtattcttcacattatgctatcaaccttaaatgaagcccattcatacactaactcactatatccttttcgaaactctgaatactctttgatttatactgtcaaccttaaaggcagcagcccttttcgggacaacctagaattttagtaactccagccaataagaacatgcttattaaaacttaggcaaaaagttataatcaaaagtgataagtctactttcaagcacagagttgtttaagtgaacaaactgaactttaataatcactttatttaatctaaccctaaaaggaaaccgacaataaacatagcacttatatcaaactagccacaatacataaaccttgccacagccctcaagtagatataatatattcatgattcacgacattgttagttactaagcgtgatggctttgaagctcagtgagctacaaatcaaaacatgtaaacacttatccacaaaacattatcctaaaattgatgtttcatacaagaatatcttaaaggtgccacaaatcaaaacaggtaaaaacttatccacaaaaacattatggtgcactacatgatatattttcctactatttaattactgcaaactaaagaattttcacatccataggatccatattccaagcagtatcaaaatcaccacaaaagtataatgtccatcaataaa

SEQ ID NO: 191401 - DNA, 6433 bp, Cannabis indica
aatattcacttaaaataatttctcctctggaccatataataaatccattgaatggagatcactaatagattatgcgaaagttctcacaataatttgagggataatgtagcaaatgagccacttggtcctgtcatgtttgataaaaaatgattttcattgaaactgtacatttgaacactgcaaaaacaaaaaaaaaatttgtattggaacaatcgtagtttggaggccggccattggccaaaaaggtccaattaaaaattttctctaaccttgaagctggcatttggaagagactcctctattctcaaaacataaacggtgcatgaaaagagaagtgaaacacatggcttgagcttgccaggccactaaatagttattctattttctcctgggttctgtggttacttaccttaaaacaaaattttatttccatgggtacacgtgcaggtacataattagagggggccttggagggagagcttattatttgtttctgtttcttatataaaataataatgggttttgaccagtctgaaattagagagggtggtcttccatgcaataaactacgttcttttccataatcttgctccctcgttttcattttggttcaatatccatccatccattttcctttttaaaaattaaagctctcttttgtttgtgaccctgctctaaaatataaattcttcaatttgttttttttattttgtcaggaaaattcttcttgactttgaaatcatttcgtttataatttagtttctacaaataatagaaataattaatggttcctattttggcaaaattctgacaatagaattattttggaccaaaataagcatattttaacttcggtgtttggtccacatacaagcaagattcttgttcttgttattctcattgtccctgtggtaagtctgtctttggaaattgagtctctcttaagttgaggtgactgttatttaaatgttaattcagaagccttaggtgctgtaatacatataccattacatattttattatcattattacctttcgcgccgaaatttgtttacaaatgtagaataaataaataacaaaaaatcatcatggtttatggctcttcaatggctatggtgtttaagtctatcgttggtggatttccttgagaaaaatttctccacaataagtttttggaaagtagacagacaattttagattaaatctaaaaaaaaaattatattgtaacacagcttattcgtgaattgattattttgtacgaacagaccaaaggcacggagcaaaataaaatatgtttaatctatgaaaatatgtctaaatcatcattgctattttccaccaaattagacacatgtaaatttcttaaggcaccacaaaagaaaaggggtaagaaaaaagcatgtgtcagtcttggtcttaaacgtaaacctgtaaaaataataaatatgtaccactaggtaaggtaccatcaaagtaagcaataaaaagatgaaaaaaaaattgaaaagaggaggacaatctgcaacaagaacaaggaagcagaaaaaacttgggaaaaataacttaaacacactattaactcatcacctctttttagtatgtaacatatttggtatcactggaaacttcactcttcatcttgctttaggcaagttttcaggcaagtgagggtaatggagaaaaagaagaaggaacataaactagcttctgcttatagtcaagaaccagacacgaatgatcactctgtatgatttctcttcttcttttatcatatttttgaaatgggttttgtttgttctgatgaaatgagaagtttttctttttgatgggtttcatgcatttactcctttgtaatatggctttgtagtttatgtggggtttctcaatctttattcttttaggctctttttgttttctatttttatgattcatcaaatatgatatatatatatccatgtctcgtaagacctctgttatgattttatgtggatttcagtacttgcaacttctacataaggaattgaccaatggaattaaaatagtagagaatattatctctaaggtgtgcttttactgacttttagtgtttcttatcttttgattcaactcttgactgttatcttaattaccttaaaacagaacaaggaagaccaagatgaacaaactgtggggaataatatcaaaactctttgcccttcaaatgacaatgcaacatcagaaaataatcaccacaccccagttcttcagtggccatatacacctcagaataatgctgctgttgatcagtctccattggcatcaaaaccccatattcatactcaatcaccttcacctgtcatcataagccaatggcattttccccatcagcatcagcagaatttgaccaaccttcaggtcccccaaggccagctcccattgaattatacccaaccaacacctcccttttggttacctcaacgaactgctcacacctatccgggcatgaatgtgccttcaccagcattttctccatatgagattacttggcaagctcctgctgcaggactaggaagtgcatcaacagctcaaaatcaggttcccagtgtgtgttatccttttggatactcataccagggccttccaggtaaacttgtacacatttctgaaaaagatgtgatcttttttcttactggccttgactgattttattaggtgcatttatgatgtttcattggttttgattgcaatataagggggtataaagaaacaagattgttttcttttcctgctcagaaaatcaatttctttaccattattgttcatgcagatgcaaaatcgaaaattttgaatcatgtaaacgtgaatgctttttttgtttgtttttgtttacaggcccttgtgatccattatcattatggggtcaaggtcaaggtcaagcacaacaatctcaacctctatgcacatatgcatttccaggaacttataattactttccttcaccaccttcagtaatgcttaacagttccacatctactggacaagtcattcaaagaggagtaattaaaacaacagcaaaactttctcagaagcaccagcaactttgggatgctcaagtatgagtacttttctttaccttatctataattaacttcctaatatctcaaactttatgtataaacgagtcatttttgttgttatgaggttgtagtcagcagagaatgttcagctatggaatgtaatcaatcaattgcaatcagagataggtgattacaagaaccagttaacaaggctagaagcagaagtttcttctttcaagccaaaagtagaagagcctcctgctagaacttccgggactgcagtagctgggcaaccatcaaagagaggaagaccaaagaggtcagttgcatcagttgatgctggagcttctcctgatgagtctcatcgccgagccagagctaggaaatcagccacatctaaggttcagtctgagaccaaagaacatatttatgaaaaggttgttctaaataagattgaagatgtagacaagtcacgccagtcccttgctactattgctactatagaacaaaggtacagcgaaaacatgttaaacaataatgctgcaaattccagtggcaatgtggagactaatggaagaaatcttatgatgccagcatttagtaatcaagctcctcctcaaatatgtggaatggtactcacaccctcttctgaaatgaaatgtagcagtgataagtccaccgaaccgaaaactgcctactcaattctctctcaacaagccacagcaatgagcactaatagcaacagaagctcttctggttatctgagtgcaactgttaatgggaatcttggctggtctgctgctaatgttacttctgaagaagctgagagaaagatgttaagtataggctgtcaaggtttctacaacagtaatgtaatcagacaagaaggaaagcttgttcctggatggagctttgtgaatggagaggatgcttctgaagagcttgaagatgcagctgtattaggatcagcaaaggatgaaaatgaagaaatggaagaagatggcagctcagaaaccgaagatattgttgaaacgaaagatgatggcgccaacaatgaagatgttgcagtaggtactagccccaaaggtctttctcctttaaataattggtgatagaattccacttatcctaactcacttccatttggttgaactttcatgcgttatattagtccataaacaagaagagcaatgacaaagaggaattattatgtggtaatgacactgctcatttgggttcactttcagtacagagaaagtttggctcaaagttttgtagagggcaggatgtttttaaccgtggaaactttagtagacattcgaatgatcataattggtgcataacttaagcagtttctacaatttgttttgtttaaactttatcttattgaattagtgaaagcactaattatcagtgctatgaattttgttacatacagttttcatgagtaatgactgtgtttgtgttagagttttatattgctattgtgtgtgttgtaaattctaacaacacataactcaaaccaagaacaatcaaacaagtcaaaaccaaattaactatgaacaatcaaaccagaaaaattaaaatagaaagaaaaattgcagaaaactaaagtaaggaacacaatatttttatataggttcggccaacttgaagggcctacttcctgttactcccctgagttatcttctctattaaaataatgaattaaaagcttgagttgctgagtgccccgtagagaacaattacagatgaatacccttgaaatttagcttgagtttcaattccaagaacactggttttggtccagtatctctactctcttaactctgttgttctctctttctatgtctctcttcaactcaatctcactctctcttaattcagtatgaattgtgttgcaataccagaatgactaaaggcctttaaataagcataataaagactcaactaactatcagatacactaactaacataatagaatgctacaacaatttatacaaaacttactgaaccaatgttgtagcattcgaactcacaaacagttgattgttaaaattgttataatccaattcgtttattctatgaattaccaaataatagtgtggagagataataccatatataatatatataagatgcatgagctacttttctttttgccatttggttttgagatgtaacctcatacattttaccatacactcactttcatcttactttctacaccctattcacaccacacttccacattctaacatggtatctattatcttaaattttttccacctcatgtggcatgtcgatatagtaaagattgaggacacgtagaatacaacttgtcaataacgggacaaaatcaccttacacgacatgtcaagtgtcaagggttccaaagcaatcgaacaaaactataaagcaataagcaaaaggagttaagcagactgtcaagaccctggccaaccatgtctagctggccaataaggtgactatcagaacaaagaggcttgattcgaccaaggaggcctaacctttgcaaggaaagctatacaaagaagctagaaaggttggcaggcacataccaaggctggcaggcacatactaagactggcaggcacataccaaggctggcaggcacatagtaaggctagcaagaacatagaaaactgataggaacatacctggctgaccatgggaggtcataggcgggccaggccctaaaaaatagcgctggctggtcaagatttacagacaactctgaacaactgagcacatttgcgagacaagcctaacaacccacgaaaataggaattttctctcgagatattagtcctattttctaaagatttagttattcttttttataacttaaataatagataacaagatgttaatatccctattttaaagggatatctttacctatttgaatgagaaatttttgtaagccctacactatataaagaacattagttcactctctcaaggctaagtcattccacaagcactaaagggtctctacaagtcctttctcatgatccctcaagccttctacacgtgtgaaggtctctctctctctctcaaacttcataatccatctatgcctcctaaacaccaagtcaagtcccttctaaagttcttcacaagatctcatcaatcatttatctgtaataacacattattcttaaattataatacagaagagagtcatagctagaagaaattataaggttttcacctatgatctgcatggtcttatctcaagagtgaatacaactaaaaggagagtaggtcattgcctgctaaataaggggtccaaacctctataaatatttgtgtcatctttactattaattgttcttatttacacatggtg

SEQ ID NO: 191402 - DNA, 2126 bp, Cannabis indica
tattaatgtatgatccctggccataaacataaaatctaaccagttttgtcataacatttctagatcagattattataaagttttattttgacaaaaaataagtttatcgtcctatttatacacttttagaaaatatagggtctattttgtcatttaataaaacagggagttcaattaataacttttgcaaaacacagagtccaaaatagtattttgttcttttttttttcaccaacaaggaataacatgcatgtgtacacaaaccagagactcttaacatgcccgctctcttctgtcaaaaggtctgtgtagaaatattggtaatggagaggcgacatctatttggtttgacccctacgtgcctcaattgaacaagtgtccaacttcgctcttggatgcaatacatggtgtagcttgggttaatcaattcatggatgggaaccttgggtggaatgtggatatgatcagggtatggtttgatagggaggatgccaatgctatccttaatattcctctccctcagaatgacactcaggatgggtggctttggcttggggaatcgaatgggaacttttcaattaaatcagcttgtaggattgtctctggttggtgtccaaatgaaccgaatgatgatagatggaaaccgatctagaagtcttgtattcatccgagattaaagctcatttggtggcagctagagagagatgtgttcccaactagaggtaaacttgctaacttcattgatatatctaatgtgagttgccctatttgtggtgaaggtactgagacggctttccatttactatgggaatgctctcttgccaaagtcctttggttcaactttgtgtttggacttagggtggagaggattgctatcagtgagtggaaacagtggtgcattggttcatcgctcctcaaaatcggcctttcaacacatcctttgatgaaattctaattactggcctgtgcttagttgaggtaatgtggaaagaagaaatgatataatacatgggaaggatagatcccatgtggggcaaattagtgtcaatctgaacagacgcatctctgaacatagatcatcagctaggggtgtaattgaggaggttctggtttggacccccctccctccgaactcttgggtctgttgcaactatgatgtggctatggggcgagaagggtcagtggttgcaactgttatccgtgatgaatatgaggtaatcttgaatactaaggctgaaaaaagtgttgtctgtgatcctaaaattgcggaggctcaggcggtttgtatggcagcagatttaatggtggagagaaaattcgagaaggtaatgttccaaagtgataatttgcgtgtggtaaactctttttcgattgagtttgacagtggagctgacttcaacttggtgaaccttcgcaaaagatttcttagagcatgtagcatgttcaaagaatggaaaattgtccatgtccggcggatgggtaatttcatggcacataatcttgcaaaatgggcaaatgctgatggagtagtggggattattcaaccttctacacttgacaacaatgtcctgcatgattacgtggagtggcacaaaaatgcaggctgagttggtattgttgctgatatggtttttaggttctgttgctgttgctgtagtagtagttttcttttttgttactggtttttagttttgcactttgttttggttatttcagtgtttatttggtttgttgctactttgtagtctgtttctctattaatctattagggtgctttgacacccccttttccataaaaaaaaaaaacatgcatgtgtacactatggcacacattttattttataattaattatctatcctgtaaataaaaaaagaaatatgtacacttgcactttgcacactttatttatgagaaatgttaagtggaattaccactccttattatttttttttattttaactgtaatattattattggtgtaattaagtatcgaatttcatacaatttaatttaatatcttttaaaaaatagcaataacaattgtatggcgatactttagatggtaatagataccactagctagtgttccataacaatattctttaggctcgtttgatacgccgta

SEQ ID NO: 191403 - DNA, 2998 bp, Cannabis indica
taaggttgaccaaaccaaactaaaagtcaaataaaagtataaattatattaaaaaaaaattagtatttctggaagagtgcactgcggtgtggattagattgctcaaagagtttggtgttccatggtgtaggcccattcgtgtagagtgatgttgttgtgtaaacctaaggggatagttctagattatggacagtagccattctggctattccttaggttgtttggcttgagagaaatcaaagaatctttgatggtattaagaatgatgtaggaaacctttgggagaatgttaaattctgggtagcaacttaggtttacaaaacaaaaggcattaagagctttacttttcaagatcttcttagagaattgggacttaattttcactaatttttcaaaccattacggttttagatagttttaatgtctaggagcttattctgttagcgttatgttcatagttttgtgttttatttttctattgtgtaactatgtttttcctctgccataaatgaccccgttataaacttgggacgggtcagtctaagacatttgacctgtctcttttaaaaaaaaaaatccaaaccgcattgcacctaatagggttcacaaccgcatcatttagtgtggtgtgggcaatttgtgtggtgtgagcattttgatgaacactccttaatctatgccctataagcaggggcgaaacaagaaataaaattgaggtgggacgattacatatttttatatcatgtctgagacttcagaattttaataagaattataaaattagatataataaaatatttattaatcatgttaaagtgagttttatggaatgacattttatattttcaccttacacaattgttaggtagttcaaatctcaacaataatattttagttctttttcaaaaaaaaaaaaataagtatttgtataaaggcctaagaaaaaatctatttacacctaagctccacatagcttaggacggtcccataatttcagctaaggcgaccgtcccacctagtctacacctagcttcacccctgcctataagttctactaggtacaattacactgaagaaaagaaaataaaaaacattgatggctcattgtacctgtgcagattttcattgaaatgaccacttttagtttgctgactcaatgaattatctcccatgtaaagcaaggaaaaattccagtttcctgcacgccaagcagcctcatactgcagataattgatggccaaaacgaaagatgatgaatacaccaccaactaaagaaaaaaaattaaaatttcaaagacaagggaaaagattaatattaagttaggaaacctgcaattcagtaaactctagatcatgctgaaaatgaccctgccttgaagtcagcccttggcaatacaaatccagcatgtgcatacaaccaatttgttgtaaagacctaataagacctttataaggctttctcatctgatcttccaaagcagaagttgctggattctgtgttggcaaagtctgttctagtagtggctttttagaacggtaatccatctgcactgaggcagctgatcgcacttgtaggtcataagattcaagagcctttccccaatttccctcatgctcaaaagtagttatttgagaggtcaactgataatgccatcaccccaaaggaaaaagaaaaaaaaaaaaaaaaagaacaaccatgagcacatgcttatttcatgaatttataacagcagaaaaatcacagttgcaaaaggcttgagcaaagcagactttcactctttcatagatgtccatcagaattcaggtgataaagttctaacttttcacatgaccttggcaaatggaacatacaaggacaattaagacctattatttggggttccaatttaaaaccgatctcctaaaatattgtaatagattaggatatcattattgttatcgtttccggtttaagggatagaatcaggtaagatattaacctagccgttagaatatcccacatctatagtgtctggaaacttaagaccatttatatgagtatgagctacttcactcattcctaattggttttgagatgaactgcatatttcttgccataaacctcattctacttcctaaaccacattggcgattgagtcatcaaagattggtgagcaaaaatagtcgccatcttgagggatgttagagagtctgacattgatagtgtttggaaacttataaccaattataagagtgtgggatactacattcatcaccaattagttttgagatggaactcacgcttcttaccacgcacctcattctactttgcaaaccatttttccacattctaacatgctagcatacaaaacatcatgcaatcaactaatcaagagatgaatgaataagaaaaactacaattgacatgtgtttctctcctaactttactacaaagaatcgttaactagcttcttttctctgctcatgttggcttaagctgatatagatgttctgtactagaacacttgtaatttgtttattagcttcacaaacttcaaaaggtacagcagtgtgaaaaagtactaagatatacgtaatagtatctctctatttatatatgtgtctcacagccaccataacgctgcggctctggcattctaaaaaaaattaaaagcctgcaatctggcactttgatagactagtgatgacatggcattcttcaaaacctctctctacccactaaattataacaaccaatctggatggttaaaacaatcaaagcaaagcttgtttagtgtattacttacctttaactacattcaaagataagttgacatgtattgcttaccttgtgggactgaatgattccatataagctgtcaggttcattgatatgagtgactgctgagacaagtatctcaatatgttgaggtagctgaaccaaaaagaccaaataatacagattagagaaatggtattaaaccagataatatctcaagctaaacatacatagatatac

SEQ ID NO: 191404 - DNA, 2520 bp, Cannabis indica
tcaagcatgtatcattttccctagaaacaaccataataataataaaaaaatgttctcccctctaaccgagccaacttaccaatgagctccaccagcaacaatataacatagtaataaaaatgatacgaaaacataaataatgtttgtaattcgcatagttctttttaggcaatagaaactagtttgtttcaatcacataatttattcaaatattaaatgggaaatccattatgtatgtacactttaccagggagattcctcttaagcttagactacatttctactgtaaatgtaggattttgcaaaatgcaagaaggtaacaaatcctattaggcttactccagaaattaaccagtaaaagtaatcaagatgagcccggtttaagttattcgaaaaccagctatctctttcatctctactagttgcattgtcaataacagagataagaatgccactaaagaagtgcccaataccagttacactaaggtaaagcgcaagtcctatgcttctcaattctagtggtacttggtcataaaaaaactcttgcagaccaaccaaagtgaaaacatcagctaatccaaatatcagatactgtggtaccaaccaccacacgctcattggaaccgttacacttggcttgtccaccagctcatactctttagcaacagtgagccttttcatctcaactaaagctgctactatagttgatatagcagataagagaatcccagttccaattctttgtagcattgtaattccagatggatttgtggttaatgaccttgcaatgggaacaaaaatgcggtcatacacaggaagaatgactataatcgaaatgaacatgaagcactgaagtgaagcaggtgggattttgaagcttgacacaattgttctgtccatggtggctccttgtaatatatacaaagttgagatttgtgcacacacaataccatataccaagcatgtagaccatatgggaacaagcctaagtacagcctttgtttcttcaatctcagctatgctacaaacacaatcatgatcatttggtcccaccatagccttattaagaaacttaaattgttcatagctttgtttagacaagaagccatggcaatccaaaggacaagtcttttgcctattcctaaatgctgcaacaaatacactacttatcctcacaaaaggacccttctcattctttccaatgctgtacctataagttttagttccagccaagaaaacaaccaaggcaatgatcatgactatgcaaggaatcccaaatccaagagcccaactcagattatcttgaatgtagcttaagatcattaccgttgctgtagcacctgctgatataccaaagtaccaccaattaaagaacgagcttttggatttggattcctctggatcttgaccatcaaattggtcagctccaaaagcctgcgtgcatggcttgtgtccaccttcggcaactgcaacaagatacaaagagaaaaagaacagcgccttagtaaccgcgctggtttgaggatcaaaaccatccattaaagaaggcagaagagccgaaaacgtcaacaacccaagtcccaaaatgtagagcagagaagccatgacgatggtagagtaccggcctagaaaagaatcagccacccaagctccaaaaagtggtagtaacaacgccgtagcgcaccatgtattgacgttggtcgccgcagccgccgttgactgggcgagagacccagtgagataggtgacaagatttgaactgatcccatagtaagcgaacctctctgcaatctcagcacctatgatgaaagaagctgatctccaacggcccgtgttggatcttgaagcctggtggcctttgtaatcaatggcaccttcgacagctctgactagtagcatcggagtttcggtatcttcggccattatcagtttcacacactcaactctcaactatattgtttgtaagtttattcattgtttcggtacacgtacgttagaatgatgaggtgaatgttttgtacgtgtcattttcatatgatttctttgttctgcaaagctaaaatatatattaatttatagaagaagcagctaaatattacaacaaggcattcacagtttacacatttatatatatgcttagttgatcacgttattaagcatgagtgaatgtgaaatccaaattttttaaatttgtccccatttttgtttgctattattgtaagatcatatgatttaattattatgttgtgttaattaattctggattttttttattaatgagtgattttttagttacgtatcactaaatgtttttttttaaaacaaaaaagatcttactttttcattttatcttatcaaaagtcccttctttagtttgaaactgtaaccatttatcccatttcaaaaaagaaattatagccatatttatagtttttcataaaaaataatcttttatcacaaaagaaatcttaattacttttagaggcattttttttcttttttttttttaaaaaaaaaaac

SEQ ID NO: 191405 - DNA, 2396 bp, Cannabis indica
ggtgagatgcaattaaaaaatgaaagagataaaaagtgaaatttgatcgagcatgtaagaagtaagacaaggaatacttaatcaaaccacattcaaggaataaagagataaaagagaagggattttgatatgcttgatgtcaacagacctcggcatcacccaaaaacaagtcatcgatttcttcagcaggctccaaccagttgagctgaaatacaagatttaatatctgtcatcattcttaattcaatccataagggagggtcaaaagagtagcttcttacagaatcaaccaaaactggaatggaaccctccaaaccgacttttgtactggttctttgagatcatgaacacaagattttcagctgcatttagtatactctgtaaatgaataggaaaaatgattcaattaacacagatttaccaagagtaatattgacataccaaataattaggctccttcaaatgaagtacaaattatatttttgacagaatgcatgcttttaatgctataatgttcaaaaaaagcaacttcatgctaaccttctcttggacaagggactcatcacgcgaactttgtctccctataatagcaataagtgtgccttcttcaataacatcagcatcatcaaatgcaaaatcaatctacaaaggagaaaatgtaatattcaacttgagatgatttcgtaaactaatcaaacattctgtacctaaagtaaaatacataactaaacagatgaaacattcaaaaactagtccagtaacttctcattttctaatggttctttaaatcagattttgtgataaaacacactgaaacaatttatttaataggtatagaacgccttagctattccaaaaaagttctcaaaagcaccaacttaaaaatgaaatctttttttacactcaaactggtacatacttgagagttatcttggtagtcctttaatggtattccttccttggctgcttcattagcactcacaacagaccttcataaaaatataaataaataaatttagttacataacagtgtataatgtagtactagaagatctcttacaaattttcaagatatttcaaaaaatgtaagatgcaaaaatcaagattcaaacagtttattgcacacgagtaaatatcaaaacaagcacgtgtaaaatatactatttgaattattatttcaacatcctaaattattctgaatttcctacaaatttatacaaagtctaatgtaaagaaaatccaaagttacaattcctcaatataataaaatactcaaaatactatataataattaaaaacaatcattacccaacaatgtttctaatattataatcactttcctttcttcacatcacaactctaagaacattcaacactcattgcatatgagcaattactaggcaaattatgaaaacttgcctagctgaaattcttatataatctttgtatgcaacttttatgaaatttgaaggaatactagaaatgagcattttgaaatcatatattataaaattgttcaaagaaaaaaaaaatcatatattataaaaggaagctttaaaactgtgtgtatatatatatatagggaaaaaaacatggtcagcttataaactcacatgggtactcccacaatatctttgaaagcacctgtacgaagttgctgacccagatactgaatcgccattgtagaggcttgaccggagcccaacccaacgaccatgccacttcttatgtacgtgtccacctacacatccaaaagcttgatgggtttatgtctaaataaatataattttcaaaaaataaaaacatatttggagaatacgaacagtgtggtgagctgcttttagcagaggagaggaatcggtaagacttgaagctgaaatcctgagtggacaatgttttctccttctgaaagtagtagttgaagttgaagctgaccaaagaaggggacttgcagagacggagaccattaatggctgtaatggtgatgatttggtaagtggcatagatgaaagtatgggtatggacgccattcctgttcttgtctcatctcatccaagttatgaggaggtgatcgttttcttcaaatcacaactgcgcctttggctcttgtgggactcacactgacactgatgactggttgagaaagggacccccaaatgctgactagactaaacatgaaaatggcatgtattttttcttttttttttaagtaaagaaccagtatcacaattagattaaacatgaaaattaatgataaaatatattattattattaggtaattaggatttttatcatgtaataaattatgcgctctaaatgtttttggtacgttaaaattcctcttaaactattgagattgtttgtatttaatggtcttttgtctaatttcattcaa

SEQ ID NO: 191406 - DNA, 2887 bp, Cannabis indica
agtctgctaacaccaaagaccaaaatgtttggcatatgagacttggacatccaagcttaagtgtaatgaaaaatatgttaattaatgaaaaagtttcttttagcactctaccaacattctgtgatgcttgtcatattggtaaatctaagcacaaacactatcgttcatcaccaaaaacagccagccaacctcttaaaataattcattctgatgtttggggtccctcaccaattttatccaaagatggttttaggtactatgttcatttcatagatgaatattctaattttacatggatttatcctctaaaacttaaagcagatgtcaaagaaacattcatacattttcacaaatttgttgagaggaaatttgattgtaaaattaaaactcttcactcagattggggaggtgaatatcgcagtcttgtgcctttcttaaactccttagggattcatttcagtcatccatgtcctcatacacaccctcaaaatggtaaatccgaaagaaaacatcgtcatatagttgaaatggggctcacacttcttaatcaagcttccatgccattgcactactggtgggaagcattccacactgctgcctttctcattaatcatctcacaacacccacactcaacaataaatcccccactgaagtccttttcaaagttcaaccaaaacttgattttcttaaagtttttggttgcgctacatttccccacttgcgtgcctataatcaacataagttggattttagatccaccaaatgtgtcttcattggttatagtcccaatcacaagggatacaaatgcttgcacccctcaggtcgtgtctatattgtgcaaagtgtaacatttaatgaaaatgattttccctttgctgctggttttcaagtgtcaaattttaaaaattctgagataaatgtttgctctaactctattcaatacagccagtggtttccttctatgtcacatctcttgcaggaaaatgaagacacaggtaccattagagttgacactgatcatgattcagcacctcccacgttatctccttcaacaccagcgtctctttctggctcttcaaatcataataatcagaatgccattcaaacctcagcaacatcatactctacgcggcctcttgaaattaatcatctgtctctatttcaccatccaaagcctcctccaccagtcgaccacataacacacctccatttcatcctcccaaacaacctagtcactccatgattactaggtccaaagctggaatttttaaaccaaaattatatcttgcagccactacttcatccagccacttcaccataccagaatcacttgaacaagctctcaaatcacctcattggaatgctgccatgaatcatgaatactttgctctccaaaagaacaacacatggaagcttgttccccgtcaatcctacatgcacattgttgataataaatgggtttaccgcatcaaatacaactccgatggttctctcaactgctttaaagctcgcctagttgctaaaggatttcaacaacagcctggtatagacttttttgaaacctttagtcctgtggtgaaaccatctacaattcgtgttgttctctctcttgctgttacatttggttgggacatccaacaaatcgacatcaacaatgcctttttgaatggcacccttgacgaagaagtttttatggaacaacctgccggcttcattgatccaaaccagcctaccgctgtctgcaagctcaacaaggctctctatggccttaaacaagctccacgtgcttggttcgacaaattaaaaggctctctccttgctctcggtttcaaaaactccacagctgattcttctcttttcttctacaacaacaatgatgccttactgtttgtttcgtctatgttgacgacattctcctcactggaaatcacgcttcacaggttgctgccctcattacaaagttacaagaccagtttgctctaaaaactctcggctccgtagcatatttccttggctttgagatcagtagggggcctgatactcttcacttatctcaaaccaaatacacaattgatcttctacaaaaaaccaatatgctaaatgccaaatcatgtcctactcctatgaaccaaagcaacaagttaagcttgcaagatagtgctgagtttgaacatccttctatttatcgaagtgtcataggagctcttcaatatcttactctcagtcgacccgacatagcctactcggtcaacaaactaagccaatttcttcaagcgcccactcaaaaccattggagtgcttgtaagaaaattttgagatatcttgctggttccattggagaaggaatttcatttactcaagctccaaaacttgtaatcgaaggattttgtgactctgattgggcaagttctttggatgatagaaagtcaacaaccggctactgtatatattttggcaacaatttggtaagttggtgctcccgaaagcaaaaaacagtagctcgctccagtactgaagccgagtacagagctcttgctcaggcctgcactgatgtcgtttggctgcagtctcttctcgctgaaattgggtttaattgtactgaaacagctgttctctggtgcgataattcaggtgcacgacaactcgcatccaatcctgtttttcattccagaacaaagcacatcgaaatcgatgtgcattacattcgtgaaaaggtgttgaacaaggaagtagaagtgagatatatacctacccaagaacaagttgctgacatactaaccaagtctctcagcatctctcaatatcactaccttaaaaacaagttggctgtctcacactctccacagcacaacttgagggagcgtgttgaaaaatgaaaaatgaaaa

SEQ ID NO: 191407 - DNA, 4419 bp, Cannabis indica
aactttgaatgtaaagtattgtcttcttcaaacacaataatagaaaaagaaaagacatgggcagatgggcttgcctcaaccatactatgtcttctactacttatttcatctaaccttaatatggataattgacacaagatttatggggtaggaataggaattattgtgcaatctagattacaaacttatatgtttaatcccttgaatacataaattatccaaaagttacttttgatttcataaaactaggaagacaattatccaaaagttactttttttttagttacaacttacccagctcaaccatcattagcattacaaacactaaactaacaacaaaaataaacaaatattgctccagtaaagcaggtgggcattgcatgaaactggtatcgaaattcttatttgggtagcgtttggttgagagaaatgaaaatataagagaagaaatgagaatatgaatagaaataagaatagaatggaataaaatttaaatgtaataaaaaaattaaataaaaaaaaatttattaaattttttctttatgttacattggaataatttttcctttcatttcaaaatgaaatactcattccactgaaagagtaaaaagagcatttcattagaatgacattccaatactttaaaatacaatcaaacaaatgaatggaatgaaaatagtttccttttcatcccattatttcattacttccaaccaaacactactttagtgtaaagagcgtccaccatgagtgacggtagagtggccgcttaaatctcttctggtcaaaagtgtgcctaattgatacattcgataacacaacaattagttattatggaactttattattctacaataaagttctatactataggaccatttagggaaaattgagtatgatagcaattaagaaaagtaaagagaaatttttgtgttgctgcatgcattcttggggggccagttttgtttgttgttttccccctccttatacaattctaatttaaaaacaaaaataaataaatgccacagccaggtatctaaaagatgaaactgacttgttttgtcaacaattagttagtgtgatgtattattagttaaataagagcatctaatctgttttggaccacataaagttttaagaacatcaccccttggggataaaaaagcaagtttatgtcataatcttgactgttgatgtgtcatgggttgtatctaccttaacaggcaacataaagagatgagatgaattcaggcaaagaaaattgattgaagttacttacccaataagaccaatggattgggccagcataaacagaccctttagatagccattatcaacaatctcatctatctcttgcttggtcacttccaagaagaggaacccaattggcaccatctatgttaaggtttcaacttgcactgcatattccaatgtgtgcctgcaaacttctgttgtcacctcttttgatccttagtgttgaaagcattaaaatactaaacaagtttatatttgttttgtgtgtgaataaggtgaggataattttcccctagagccgattttgtggtatcagagttgacgaaatctccatacctgtgcccgattcctggcactcgaaatacccttcttcttcataccttcaacaaactcatgagattctgtaagtatagagttatgagctctagagacacaaggaccatggtcagcacatagaataatgcatatctaatcaacaataaatgcatcaagactcagcagctaaacatcaaaaatcaagagaaactataaaaatttacacacatgatgagcacactagctccataaaaggctgtgtttgaaccataacagagaaataatgtcaccaacaccatagccttgcccaacaagagaaaatataggaacaccagcataacgtggctcttcacctgaaaattgaatgaaacaatttcgttaacattaaacagcatggctcagaaaattaagcagtatctttcattagaacttccttcactggtgaaaattttccctcttcagcctggaaagagcaagaattaacaaaccagtttgtcaaatgtctcattgattacagcttcaaaatcttcaaatgaagtaggaacaacagctcctgcttccctaagtgcttcattcttatctctctgatttatgtaatgtaaaagattaaacaaaatgagcattttactagtcctgccaaaaatcaatcaagataaatgaagttatatgaccaagcagagaatattcaactaatccaagcaaccactggtttgttgaccttcccatgttttaaagcttctacaagagaaagctcatcttctccaacaagctccccccaacaagtacaaccatcatcttaatctgagtcagttaatcagactagaaaatgaacaaaacgtaaggaaaagtctagaaaaatatcagcttgtgagatatatattagataactaataacactagacaatcatatgtacaaatatttaagtaaccagcaccattgacatggtttagaatcactgaattctatgaaagttaagaaagaagatctcaagtacctgtggaatattgttaaatctcagaacatgatcagaaatagtagaggctggaaacacatcacctcaatgcctacaatggtcaaacatttgcaaatttacatgttatctttgcaattattgataacacaaatgtagaggaagacaaactctatagaaaagcaagcacatatgtctaccttcatagattccatctgttacacgagctatggtattgtacatttcattagacatcccaccctgtaatggaaaaggagaattatttcctctgtcacttgcactagaaggttataagaacacttttttttgaacaatgaacatacattttattgaaaaataatatgagagtaatacatcatgaagaaatgatggagaatctattcaaactagttcactatccaccactctaattcatgattaagaatatgaattagtaaactagtaaaatctctaacaaagatatttgtaaaagatgaactgttcttcagcaagatcaattagcagagaaagacttaacaaaacaagaattctatgaacaattaaagaaaataacagccaagaatgaagtggattgagctatgatcaatgtgattcattactcaataccaccatgaatcatgaagaagctttattgatgatctttaattacaataacagagagaaaagtagtgatccaagccactgtgacaatgtaatcaaaactacaaattgacctcacatggagaagctatttcaagaatagacaatttatttttacatccctccattctctctagaataggctcgatcacttttctttctatttctttttgtgtatcaatacaagtccctcaactaaaaataggttgtagtatgctatttatagaagttggttgaggtagttaagtaactaacacagttagttaaggttagttggtgatgtggcaggctcaaagtccttaactgtcttaattacaacaatttccaccttaattgagacactttgaggagatgagacttaagcttcttcaatgttgagtaagattaaatagtgtttaaacttgtctaggatgacacattttgtaagcatgtttgctgggcttacttggacttggttgctggagatgatatctctgatgaagtgcagctttatatctatgtgttttgatctctcatgatgcataggattcttcatgagatagagtgcacagtgtataattgttctccagagtttaaccccagctcagtggtgaaaccctttagccatagtgcttctttaatggcttcagttgcagcttctgttgaagacagagcaacaactttttgcaatgttgctttccaactgacacagccaccaagtactgtgaacacaaaatcagtgagagacctccttgtgtctagacacccagcatattcaaagtctacacagctagtgactacttattttgtaaatgactcatttccaaactttattcttaagtctacacagccagtgactatttctgttgaattgggtatgaatagacatataagaattgaaaccttagagattattatcgctatttttttaaattgataatatatgaaagtaaactttttgaaaacttctaccgtaattatctcaataaataataaatgaatgaataaccttattatattcaaacgtttcatctctatacatatctcagtctcaattgtcgtttatttatttatatttttttcttataatttttaatctaatgcaataatatatatatatatatttgatgaataatttaatattatttattaaacatgaacttaaaaaaattgtgcaattatttatgactcgtatttttttgctggggatttgtgagtggtgtttaaaagatagtttgaa

SEQ ID NO: 191408 - DNA, 2714 bp, Cannabis indica
ttaactcaggaactaaaaaataatgaaagaaaactaaaaaataaatttaaatgttgttttttagttaaaaagtgagcatattattcacacaaaaagtataaatcgatattttatcatttattgtaaacagatatcattttaattcattcaattaaaattagtctgatttaaatttagtgggtgtgtctatttttcaatttttggtaacaaattcttttatttttagaaagaagtctttgtatctttcccagagcacaacacaaatattatagcatagtttggattgaaaaaaagtacctacaactacaaggctacaacaactaatcaataattattatctatttatttcaacaagagtcagggtatatatatagttcattcataccactattaatggtcacttgctacgacaccttatataattattagaagaaagatcagaaaattttaaatttattgatgaaagcttcgcctttgggattgggatacaaacgtccattttacttaaacctcattcactaccacaaattttttttcgaaaaaggccatagtactaaattattattattatttttattcatataaaagttgtaaaaaataatcataaacaaaacacaaaatttagtacaacaaacaacgttgcgtttcattagatttacttaagcagaaaataacgatgtacttgtttattaattacttttgcacagataacggcatttcgaacgcgaatccttaggataactattatcctcatctatcctcagactcattttcgtttggaatttagagagcttacacgtcgaaataaaaatgagcctaattatagaaaaaaattaaatatatttttcttcacaaaacatggtaaacaaataatcttcattcaactctccgtttcattctcacctataccaatttctgattcaagctaacaaaaaaagaaaaaatgggaagccaagtccaaaaagtattgaaagacagaaaattctcatccatttttattctcttcagcaccattattctagtcctactctacaccagcaccacagacaaccctttcttcctttactctgataataatactactccaattataatcccttcagtctcgacctcttcttcttcttcttcttctttgtccgtacagtccaatctccaatggaagctctgtgatggtccagttgccgttgattacataccatgtttggacaatttcgtggctataaaggccttgaagaaccggaggcacatggagcgccgcgagcgccattgtcccaaattcagtccccggtgtttggtgcctcttcctagacattaccggatttcggttcgctggcctaagagcatcgacatggtgagattagtattttgttaataagactttgtttgtttattggatatttaaaacaaaagggtacatacatatgaatatggaattggttttggtcacattattatgtgttttacttttagatttggtatgataatgttccacatgcaaagcttgttgagtacaagaaggagcaaaattgggttcgtaaatcaggagattattttgttttccctggtggtggtacccaattcaaggatggagtagataactatgttaagttcatagaagaggtaagtaacatcatgtatttacaatagacaaaaattataatatattatatataaatccattttgtgattgtactgatttgacttcagacttcgccacttattaaatggggaaagaacataagggttattttagatgttgggtgtggtgttgccagctttgggggatacttgcttgaaaaaaatgtcctcaccatgtcatttgctcccaaggatgaacatgaagctcagatacaatttgctctagaacgtggcattcctgctattatttcagtcattggaactcaaaaactgacttttccagacaatgcttatgatttgatccattgtgcacgatgcagggttcattgggatatggatggtactgtgtttgttaattactataagcccattctattcatttaactcttttatctttttatgtctaattagtttgatgtttttggttgaaaattacaaggtggaaaaccactgttggagctcaataggattcttaggcctggtgggttctttgtttggtcagctacaccagtgtatctcaatgatgaaacacatcataatcaatgggagggtttgtcatctgagccatatctattagtaatattatttatctatttattatatttgattagtagtcctgtacaatttactgatatattctcttgtggtggtggtggtggggatggacagctatggtgaatctaactaactctatatgctggaagactgttgctaagagtgttgactcatctggagttgggtttgtaatataccaaaagcctgtcacaaattcttgctatgagaaccggaaagagaataatccaccaatatgtgatgatacatataggaaaaacaattcatggtaataaataagaatgatcatggccttaatgaatcaaggaattgggtttattagtctttgcacattatacatgaataattaattatatcattttggatttgtttgacaggtacgttccccttagtagttgtctttccccaataccagttgacaacaagggtaaattgcttagtgggcctttgccttggcccaataggcttactagtagacctgtaagcttatcaagtgagcaaga

SEQ ID NO: 191409 - DNA, 3859 bp, Cannabis indica
ctcttgaactttcaaccatgttaaatgtactaaattattattattatttttattatggttgttgttgttgctttatttttgagggagagaagtatataaatatatatatatatatggacagtctcaacttctttaacacacacttgctttttatataacagtacttatttttcttttttctttttttttttttcttttttagtttttgatgataggtgataatagctagtagagatcatgataagtatagtttatactatttatatatgatgatgtcgatggccgtaaatatatataaaggaagaggctagcttgaaacggcctaccaatctccctaagcggttttaaaaatcattccccaatgtgatttaggatattatatatagttcattgtcttccatcgaagaggcgattataatatccaattcttttgctaagaaatcccacgtttggtaatcacccctttccaaggaagacagtgaattaacaatatcattgattacaatgaaagcttcctttgtactctgtcatattgtcaagccaaagaagagagaaagcttagcccttaaagcaagcctgattcaccttcacatccttcagtgactcgaggtcttctagagtgaaatcactctcaagtttcattttaatgaaagctttatcgtcaaaatatatatttatatatcccgcttcctttggaaaacagaaaaattgcagcagtgcatgaaaatttgacaactcaacggcagcatcatcaaaaaattataactatggctgctaaccttccaaagaacgtgaaccccaactctaatatttggattctagtgactaacttgacatgagcaatattactccacaaatttacaaaaaaaaaagctcgtcattttctaaactgtgtgatctcccatatatgtgaaaactctcttcctaaatcctcgagctaagtcaacaatttcagattctctcatcatcctaatcatgtcataaaactgatcacttagatcttttcgtgccaacctgtttgcagtatcaattgacaagcaagccctatctctgtttctcgtcaataattgcaagccacatctctgtctttcatcaataacttcagattctctcatcatcctcaccgtctcatcaaactcaccacttacatcttttcgtgccaacctgtttgcaatatcaattgacaagccagccatatctctgtttttcgtcaataactgcaaggcggggacagaatatacaggattcgacacaagtctattaagaaggataagcgcctcacgcattagtaatgtcctgtacagaaatggtgtgctaaaatataaacatcatgcagaaaaaacatgaatgtaaatattcactgaaatgcatgcttcaaaaattccagtcaatattttatgaaagcaatgttactcaaataataaaaagagatatgcagttattgacgaaaaacagagatatggctgccaatcgtgcataatatttattatttacctctctttgaatatttcataggaatcgggaataatggttgcttctgtgtcaatctcagacaccattacttgcagaattaacataagaaagtttgcatcgttagatagcttatgactgacaagaatatcaaatccagattttccagaggaggccaagatagccagcaaaacaatagcattccttcgaagcttgaactcctaaaatatacaagaatgtcagaaagacaaacaaccccctacatagagctggaaataaaaaaaaatagttctacagatgaatggagaacgagctacttaattttagtgcatagtaaagtaataaacttgtgcaacatccagtacttacacagcaatgaaagaagcaatatggtgtgatagcatcatttttaaatatacatcgtgagctgaacatacctacagtgggtttatgttaagttacacacaatgagccctaagcattcaatcttcatcttagacatggtcattgaagagctaatcacgatctcttttatttcaattcatcagttcttaagtatataagggtaacttattaacttttggctttcttattaagtcaaagattataagcttattatatgactttgagagcaattgaaactacagaaataaaaataaacacttattcaatggtaagcattgattgttcaatttggagtgtttaaaagatggcacttggctgaaaaaatgatttaatcgattggagaaactaatataactcaactcaaaaaatatgttagtatttttcatagtggaaaaatagttgcaaggtatttaaagaacaacaatatgttagtatcagcaaccattattaaaatatactttcgcacacacgaaatgggaaaatcaattttcaaaagatttgaaactacattctgatgaagaaattcagaaaaggataagagatctgtaataggggagttcttacctctacaccatttccagagcatgctacacaatctgccaagccctgaagtgtagctgacctgtcttctgtggtatcatttttcgaaccagtatcctttctttctgtacagccagagcaaaacatggccaagagtttcggaccttcaatgagaataattatagattgttagtaaacatgaaactgcaatgttacagaacaagatataggaagcatgaacaagataaccaaacaaataattaaaacgataaaacaagcagatatacttttaagaagagtactaacaatttagtagaagaaacagcagtcgaatagaatgtttttgcacattcaagccagtttcctttctgagcagttttaagatactttcaaacacttgagtattacaaaacctgcatccagtgatacttcattcaggattaaatggcatcaactagcaccttagaatattaaatggaattacaaaaagaaagttctgggcttacttttccctctcagtgtaaggattgcatcttattaaaataatgttcataatggacacagcttccagccttgcagattcttctgtaattctcatggcagtttgaagcattatattaaagagagaaacccagtccacacgagaaacataactcccatggctagaactcaactttcccttctcatatatagttttctcatcagagagtttggtgagtggaagataacccgcatacaaataagagttctcatcctcaataatagatattatatctgtcttttctgcagtcccagatccaggatgatgtgaagtgttgttcccagagcaaagaccatcaaccatgatattatccctgagcagattgtactggaagatcaaatcaaagttcataagcacaagaacaacaaaaatgcaactatgacattaacaatgtacaggtactattttcagagaatatcatatatccacctgcaaaacattagttccatgtcataagatggcaaattatctactacaaccatttccgtttttgttactagaatcaacagtcccttatatgaaataaaggggagtatagaatgttgactgcaagatctcacttcttttcctaacgcaataggaatgcctgtcattataagaacgtgagttgtgttacctggacgctctgaacttggactaaaacagatagaactcttaagtttgctcagggagtatgtgggacattcctccttttggactcttttcctagttgaataaatacgtaactttttattggtagcggtttctttatggatttgtagagtgtgttttggaaacaattctgaactttctcaggtgagaatagacaaggtaagctcagacgaagattttcaaatggctcattggatgattcttttggaagggactcggttaccaactcttttatggcatgtttactaaagg

SEQ ID NO: 191410 - DNA, 4482 bp, Cannabis indica
ctactgtgctgcttgaccactctagaaatcatgtggtggttgtttagtatgataaactaaaaaaaatttacccaaacctaacgttttccttccttccccccttctctcctcgaagttaaacgtccattaactaaaaaaaaaaccctaattctaactctcctatctactttagcagagctatctcctttcctcttctatctactggtccctagaaaactcagttgaatttatgttccggtcattctttctttacacaaggtacaaatggaaccgtccaagccaaccactaacactcactatctttcaatgccccatccacttgcactgttccataaaaaaaaaaagaaaaagaaaaaagaagccaaacaaatccacacacacaaaaaaaacagaagccacaagcccaagtctttcttcaagcatccacatccttgtctaaagactaaaccaatctctagatttccttttgctaagctaaatgaagactatggcttttcactagctgtcctaaaattctttcaggactttcacgttagctgtcgggagctggtgctggagcttcttttgatgcaacaaatggtgattgaacactatcagcttctgaatcactaccagaggaactccctgagtcggaatctgcaacgaaaagaagaaaaaaatgatgagtttcaggggagctgataccacattgccattatagatacaaacaaccaaagacactagctatgtaccactagatgaggatgaatcactactagagcttgagctgccagaactactagacccactactagcaccaccagcagtgtccttctcaatcaccacaggtgggaaatttcccattggaatatcctctccaatgtcaatatcctcctcagcagtatcaattttcttgcttttaactgcagtagcaacctctggagtctccatcaccaaagactacaatgtagtgcataacaacagaaaccattatttctccaaaatcaagagacaaacaaatcaagctctcaaacaaaacaaaggtaacagttttcattacctgctgattgctgttctgtggagctggagcaggaggctgtatgagtgactgccgcttaattttgctagcaaactttttgtaattgctgacaaatctatcaagctcccatagcgtctctgtatcaacagcctcgatatcaagctcaatttcatccccatcttgagacaaatgatcgctccttttcttcaatatctgaactagttgacccatcttctcttgcggaagattttgtaaattggctcccaacttagccttctcctcgtcactcatttgccttttgttgggatcctttgcttttggtttaggaagcttcatgggtcttgtgttccctgaggggtttgttaagggggctgacattgttggcattgggggcatagcaggtactgaaggcttcgtcaatgactgagtttgaactggtggtggtgagttcgaaaatgtgggttgtggtcgcaccggttcaggctttttccctactaccctagtctctaaatctatgttggtactctcaggagcaatgctttgagcaccagctccaagcgcacggcgccgctcattttcatacttcttgaaagcgggattatacatttcatcaaagcgcagcagaagctgctctgccattacatgaacgtctgaacctttagggttataaagcattgcattgttaaatgtaagtctcacatctgaagccaaatcgatgggtgaacgatacctatttttctcaagcttggacttgacagttccgagatccattggatttttgacgatttggtggtaatcgtggagattcaacccaaccacatctaccggggcattgaaaacccacccaaacttatgcttcatcagcttcgtcaagatctgaccacacctcttcaacatactcgaagcaagtttctcatcaattgggtccaatgccggccgtttcgcttccataaccgatccgtaggggttactccttttcatactagaacccatcttctccacaggtgttgtcatcaaacccgtactcatatctttctttttcttcttctttcctgtgagaaagttagagtccgggtgggtttgattagcattagggattctcttctctaccccagcggctctcggcgactccgccaaatgcgtctgctgaagaggagaaggccgagtcgtcttcgctgaaaacgacaaatgatgatgtccaggtcccgatttcaaatctcctgattcgatccgggacataagggctctgacctgttcaagttctaaactcagccgcttcccaagctccttaagatctcttctcgaacacgaagcgagattaaaagtgacatagctacgtgaagacgaaggcgacgacctcttctcatttaagctcatcaatttccgattagacgggggcaaatctcccgacgcctgcgccggaggcgtatcatacgactgacgtacggcactcagattagggttaggattgaacttgagaagagggttttttttagagccagtagcagcagcagcagtagcggttgtatatttcctcatataaaccttgttctcaccccaggaaggttcgcttcgactcgccgataaggctgatgccatttcggtccgggacgaatcctccggaccaacggctaaccgccgatcagagatccaaacccgaaacgtcggctactcataatcggtcggagaaaaaattcaacggtggccgccggcgagggtttaggtgtgtgtatttataaatcgcgagactagtgagagagtacagaagacagatttatagagagagaaagagagaagaaacgagggtttcagataccctcttgagaacgaattacaaatgagatggtcaccacctcttcttaaaggcattcagatctgcccgtccacgaatcgggcagattatccaccgttgatgcaacatcagacggtgcacgtgcttgtccttgctacccgttcttttgcccgtgccatctgtcacctacggtttagatccttcagtttgtacacgtggcgagttttcacccgctgatacttggggagggtgagattttcctggttctggtgggaattttaaaattttgggttggtgttttggggggctgataaataaaaaacggaaaatatttattttattttatttttagagagggggagttttgctcttgccggataattttaatttatatataaagaattgcggggtctagttttgtgatgacgtgggatttggggccatgtatgaagtgaatgaccacttaaaatatcttttttgctctagttttgttttttagtaatattaaacaacaatcaagtgatccaccaccactttttctaagttatatttcgataagttttaaattattttaattattatcattttttatttctatttaccaactttatgtaggattcatatattagcaataaaagaaattacactcaggtttgaattttgagaattataattaagtaaacattattttttttttaatttcaaaaaaacaaacattattttttcaagcaattatatattattacacaagttttatttgattcatatctttttttttaatgtaagtactatttttaaattgaggtgttcagaaaattatgtcatccaattacattcggccaatttaattataattaatctagcaaaattgaataactaattataattatttagatgtaaattttaaaaattcaattgaatcaaattaattgttagatgggacgttaaggcaagtttgcttttgatgaagtggccgctaagaaagttaaatgcattcggaggttggaagagcatatcgcttaagatgtggttttaattagttgccaaacaagtgggagttgtctagctctatgctcaagtggttgagctagctcttactgctgagggtgcgagaaccaaatataaaagagaaacagtatgaggagagattcataaagcaaacgcctaatgttggtcccgataagggcactgaccctggtaatcggaagaaaatgcctaatgaaccgtcagctacaggaccgaataaaagattccaaggtaaccaaagttttcgacgtggtggaaacaaaaattggtgaacctaaccagagggccgaggtgcaagagacgccatcaaggtaaatgctaaactagagtcgcttccagtgtggggtagtaggtaatctgaaaagaaactgcctacagttacagcaaccggaatagataggtgatgacactttagttcttgctcaggtgtttgctttgacccaggcagaggctaatgctggtccttctaccgtgacaagttaaatttctattggcggtaacttttgaaccaaaaggtgaggacacattcatgttcgtgggcaagaattaagggtctcgaattccattaatctcagcttaaaggcaagagaatcgctatgggatggatttatcagtttcctatccagtgtggtggatactacaaaag

SEQ ID NO: 191411 - DNA, 3209 bp, Cannabis indica
gatggtgagctgacatggtagcctgggcgtgactaaacggcaactgcatgtttggtggctagaatgtccggcttgttgtggaacagaaaaataatttgaggaattatatgacatctggtgcattcccatgttaaatgactcagaatggttaatcatctctcctgtagcaatctttagcctctcaacttccttcttaagtgcttcattcaaagctacataacattttagatgatatcaataaggtatggcactaaaaaagaaacattatttacgtacctgaggacaaagaaaaagatacagtacatgacatacttaccgtcacgtaactgagcttgttgctccatagcttgtaagcgaagcttaagctctgtgttttctgtactcagacctgtagtgtccctctacataaaataacaagaactgataagctcatggctcaataatgtgattaatagtaagatgactaaagcatgcagaggggatcctcaaaaaataacaggacagataaagttcaaattatgcagcaagaacaaacaaaaagttgaaaaaattctaacatcgacctcatataatctatttttttcatcaagaaaattgtatgaatactttaactttccaacgtataggttcctcgtgtcctgtgtgtggaatctttaaacaaattgtgaatcaatgccatgctaaaagctcaccagtcaccaacacaaacctggaagagtgtgagttgggcagatagagttgtagcttctgtttgaagagtctgaactttgcgctcgagttcttgtatatagcgggctttcctctcctttgagcgagcagcagactgccgattagccagtatcctttgacatataataaacatgtcaggggaagagagcatactaggaaatggaaaaaagtaatacaatatatagaacttaaaatataatgcaggaatttatttagcgtcaaattctcaaaagaatcatattttgctctcagttttagtatccaaaatcttttacaaaagaatacattaattaattgcctgcccttatcatatataaggttatatagcatgataatttcattgaccttcctagtctcatcttctaactagtgttatattcgttttactaaaagctaacaaatttccatgatgatgactaccttttcaaagccccaattgctacctgcagccgttctggtaatcaaatatcaatataaagcaaatactgcattcttacatcctcaagcataggatgctaaatattattattttcacattttcaacattatctgccctaattcaacagttaataacacatgattacctttcttgttctcaaattcaaagataaaagtcaggcaattcatagtaatgacgtaaaattacacaagtttaaagccaaatctcaaaggcactttgtgaataaaggaaacataactatgagatctatgatgaagcaaacttatattgttacaagatcaaaaataaaacaaattcatttgaattaaaacattcaatattccaaatcaccacattccactcgaaaatactaacaataaacaaagaaagaatcactcaatgtctgtgtttctcggcatcaaaacatacaaaaacaaaactttcccaattccaattgataaaaatcaaaagcatgtcgtataccttttggcacgcttgggatctattgtccaaagttcagcaagcttatcaggcggcatagccttcttggcatccataatctccccaaacacactagtcgacgtcgaagacccatcaaccgagctgctatgccgatgccttggtctcccactccaactcttctctccctcaccaccattattaccttccgctttaacctcggcaccaccaccactgctctgatctgcacagtttcctccggtagcattcccgccaagcttttcaacgtcaatgtaggtggaaaaaaggtcgtcctcggacccgatctcctcaaaactagccgttgacgatccaccggcgttgaacggatcagacgacgacagatccatcatatcctccggcatccgaaaagtgacttccgagtgagccctcctatgtcctcctccaccggaattgtgattggggttaagattaggttgcattgtggttgtggaggagggtgtggcggggaatgccggtaacggtgctaagctatttttgaaggtaaaaacgccattgttgttgttatgggtagaaggagaagtagtagaagaagaagatttggggaaaatggggtttggggttgaggagtcggattgtggatcttgcatctctttcttccttcttcttccgtggtcatctgatatcgtttctttctctctctctcttctttctctctcttaccccatttgttccgctagcttcttctcttcgtcacgaggaataattaaccgcctttttttattttcctttttcaaacaaattaacctttttaagttttctattcattttgggataattatttgtttatttatataaatttaaaaatatatataataaaaaaaaaacataataaattaatggtactttttttatttttacacttcaaaattaaatttttttatttttacggtaattttacataaaaatttatattgcaactaacgaagcaacctaaattacaaagcgacccatataaaaattaccgagaaaccaagaaactcaaaccataaatttaaaaaaaattaaaaaataagtatatggggtaatttctctaccattgaaggtaatttgcagcaaaagtctcaaaaaaaatttactttaatataaattagtcctaatttcgaggaatttttcgtaagtctattagcctaaaatttaattgatttattgtccacatatcgaagtattattagtccaaatgataattttaattttaaaaaataaaaataaataaattatttgaaaatcttaaaaattacttttttttcttattcttcttctccaattctagccccgattcatcccaacctgacccccactctcagcttggatcttgtcaacaagccaccaaaaactcacaacccaccttctcggtctctcctaccatttttctcttccttttttaattcttgaaaaaaaaatatattattttttatttcaattttcctacccaagcacctttaatccagctatcaaattggaattgaattcacctccaattcaattttttgtaatttttatttgttaattccatttttgg

SEQ ID NO: 191412 - DNA, 1304 bp, Cannabis indica
ttgtaaaatggattagaagagacaaaagtaagaaaaatgatgaagcatactttcttgttgacgctagcttctctcgtatatcacatctaattttaaaatagacttagtgggattagtttaaaaaggcgactcacatagataatgaatggattgatcaattataattatatagttttttttgttttcaagtcgaataggtgctgaattagtttgtaaggttaacaatttgaaatatatataatatcacagctgattcataaaaaaaattaataaatttagtataattatgtattttatatatttttttaaactaaatttatttgtacatgaaaataccctaatatatatatatatatatatatatatatttgttttagcaaataagtcaattatattacaatctctatattgtacataaggaatttcaacatacaccatgattattttttgctatacaatattttacgatattaccttggtctcaaaatcttcactataccattttgacataagttctcaaactaagttctatcattgtctcctatttttttttatatatatatatatatttagactataaatccttgtaattacaatatatttagcaaattgaacaaaacttataactttttgcacttctttgtgccaaagtattttgtttttagttctccaaatcatatatacataacattgagtaccaaaatataggtatagacatccaatccaatccaaccattttccacatcccacccaaccaattagtaattagattgaaaaattatcatatgatctgatccaattagacttcaaaatctaacccaatccaattactaataaattggatcgttttttcaaaatagatatctaattacacacctaatttttaatattagtataaaaatataaagagaaaaaatacgtaataaatatcaccttttatttaagtttaacattccataaaaataccattgttataagtgtaatgcaactaaaaatttaaaatgagtaaaacgacaacattaccaagtaaagaaatggaacaaaatatcataaaaataaatatattaaacaactaaatgttactaattcaacaaaaagaaaattcaccaaaaatataatttaaatatatattttttattatacataaatatatataaataattttttaaatatatataaatttatttgaatttagatcgatttttaattgaattttgagaatgacatccaataatcgattcaatccaattagaatccaacttttaacatccaatccaatctaattttttataattagattggaa

SEQ ID NO: 191413 - DNA, 1982 bp, Cannabis indica
gtatatttgtaaaataatcctttaaaacaattcaaagacaagtacattttagaaactgatcttgtgtattagagacccattaaaaaaaatcaaccgactaaaaatggtcaagtcccatcatttttttatatctttgcagtcaaaaataagaagctgaattcaattgtgggaagccttaattagtttttaaaaataatatataaaggttgtcaaatcaacactctacaaattgtaccaacatttagtatagaagaggtctatattgtctctcctagtcgaggggcatctagctagcgaaggttatagatccatacacaccattatcactttattttgcttatttattatttttactatgacaaattcaatgattcatgtctctctttaattaattaaattatgtttaattcttttgaaactgcattaccaataaggaaacaataaaaagatagattttcgtatgatgtctgttttatcattaacagtgattactagaatacttggaatttttaatattattgaccaagcagagaagagaaaaagaaattctactaactaagctgtgtgcacaaaatcatctgttaaatcgtaattaatttgtccaaatctagcaggcattattgctgaatgttagagacaatttgtactttctaagctaatccacatttttaattaattgcatattccaaaagctttaaaagggagaaaaagtgcttctttttattatgatcatgtgattcgttgcccagtataaagcctaaccctttgctttttttgatcaattttacacatacatcaaaatgatatctttcttttgggtcccaggccaatatgatgtgattgaatttctttgttccatcattaagttttaacattttcttcatgtcactaaatacaataacaatttttaaagctttttgttgcatatatataggacatccgttcatgtttctcctttcaaataatagagcataaaaaactactattcttgtaccaatactcactctttcatgcatggttggtaggagaaaattattgtgagcatatatttggctaagggtcaattctcacaaacactttgtggacaagacgtacaatatccatttcacgggcatgcatggcttcttacaaagacaatatggaagttggaactaacccattcccacgaaggtcctacgtacccctccggcaaaattaaataataattttatgtatagatttataatgagcattgttattgagtacttttggaatagttagtgattttatatattatttatgaaatcaaaatgtgtgaaattcattattaatttccactaatataacagtaccaatataatagtatgtcacattttgttaaggtgtcccttttcatttacaagaaatgactacttatacattacttgtcaaataattttatttatagacaactttaatttgttttggttcttaattttccgtttcattttgtatctgttaaatattaaagtagactgtcgctatgtacacagcgagcgtacgtgccataaattttattagtttatctaatattaattgtaataataaaaaattataaaaattagaaaattaattttaaaagattcttttttttctttcctttttttttttctttttcattacaaatcaacaaactgtcaaacccagaagcccaaatcttgtatataaatgtactacccacaattccgtgaactttctttgaaaaaaatgatgtaattcccttgagaatctttcattattctgcacagctttatcaatgggatgcattttacttatgtgaagagaatgacctattgaatagccttattaccctactcttttcacttatatatatcatttatatacaataaaaaaaaattacaaaaaatgtgaaaaaaaatcaaatttaaaaatatacatatttgaaacatattatataaaatcatacaaattgttaattaattatattagattattaatgagtc

SEQ ID NO: 191414 - DNA, 1927 bp, Cannabis indica
caaaagagtttaatacaataaaaacataaaaaacactgtgtaatgaagaaaagtattgacctttaatagaagaaccagtttcagaaggttgaggagtatgagaacctggaagagttttccaacactgaagggcatgtaagacagtgtccctaacaggcttgaccttatcgaaacgacatgactccaaagatcttacacatgaaggcttaagggatcctaagaaagaagctccacttgaagctatctctgctagtgctaaagaagcagcttttcttgttgaccaatcattgcttttcagagattcttgaatgctgcccattgcacttactaatatgttctgtgttggggcacctccagcctaagcacatagatacatattcagatcagatcaaaacaaaacaaaaccaaaccattgaatcaaactttttgttaaggaaaaaaaacacaaatttacagtctaacagtgcaaatgggagcattacagacaatacaaatcaggtctattggcctcatccctcagctatcaccagagaatccgaaatttccgataattttaagggacatttgcggcataagtattcaaaattttgagttgtaatcggcataaattcaataatttttttaacagcataagtacctaatgtatgttagtaaaactgtaattgtcattcagtttcgttattatagactccattaggtggagatcaaatcaaaccaacccaaatcattgaatcaaagatatttgttagaaaaacacaaatttacactcaaacagtgaaaatggaagcattacaaacaatataaatcaggcctattggcctggtcccactagagagcccaaaatttcccataatttcaaatcactataaaatgtgaaagttaagttaattcagatcacaatgacaacaatagcaatattcataagcaaaacacaacaacaacaacaaccaaaccaaaccattgaatcaagattaaaaaacaaacacaaatactgcaaatggagcattaaaaacaacataaatcggcctattggccttatgcctcagctacctcataattttaaatcacaatcacaacaatagaagaacaactcaccagtataatgctcctattcaactcaataatggaaggtttagccataaaatgaggattcttaagcaacttagtggttctaagcaacatcctatgcaaaagcgaaacaggtggattatgagtgttgtcaataacagcagccaaacacaaagcactcccacattgcacctgtctattctgttcaccaagagcttcaaaaagaggtctaacaagagtaacaaagagtctcccatccacatcaccatcaccatcactatcaatatcactaaacttagaagccataagagcaacagtctgaacacaagcatctctaacaacagaatcaggatccttaagcctcttcaaaagggtattaaccattttaggaagatggggtgaaataagttgtggaggatggtatctaagcaaactccccatgagtctaacacattctttacgaacagaaatcttgtgttctgaatcagtatcaagaatacaagacagaaatggaaaaatcccatctggggttagtgaatgagcagtcttttcaagctcatctacaccaagttggtaagtatctctatcaccaaccttgttcaatgcaactaccactctgtgtttcagatcgaaaagcacttgttgggcatttctcctattaccaccattactactactactacccttactacatacccctcttcatatctctctctctctctctctctctctctctcagagcagagaaagaagaagacttggagattaacaaagaattcaaacaagtaatataataataataataatagttaaagatttgtttttatttcttttactttttttgcttcaaatttcgcgc

SEQ ID NO: 191415 - DNA, 1764 bp, Cannabis indica
ctatttattccaatgcctaataatactgttgcaaacttgttgtgtttatagggaacagttgttcttgtattccaaccagctgaggaaggaggtggtggggctcatagacttgtagaagctggagctttagaaaatgttaatgcgatattcgggttacatgtggattccaaattacctataggtgaagtagcctccagaagtggtcctctgttggctgggagtggattttttgaggcagtaattagtggaaaagggggtcatgcagcccttcctcaacactccattgatccaatactggctgcttcaaatgtcattgttagcttacaacatcttgtttcccgtgaagctgatccacttgactcccaggtacatttcttcttctttcctctggcaatgttccctgataaaaattacttcttttagcttctttcatttttggtggctgaagcatataaaaatttgatattgatttagtgtgaaactatgtccaaatatctttgagggaatgacacgtttccttaatcattttaagtttcctttatatttactactaaggcagcttgctcttctaactaattttgcaaaagcttggctgctataactttctgtaattcacattatgaattttgtgtttctggttgaggctatactaaaagggaaaaacattgatttgcaggtagtaacagttgcaaaatttcaaggaggtggcgcttttaatgtcattcctgattctgttacaattggtggcactttccgtgcctttacaaagaaaagtttctatcaacttaaacagcgtatagaagaggtaaacattgaacattttgcagatgaattaacattttgttcaatgattaatttacttccctctgtcttctacaacaactagtatgtttgatgaggactcaaattttcaacaagcgtctgagttgtttttttcttttaatcttttggttttcttctttgcctctatttataagaagctcaactttgtttcttaataggttataaaaggacaggccagtgtgcagaggtgcaaggctagtgtaagtttcttcgaaaatgagaaacctttcttccctcccacagtcaaccatgaaagtttgcatgattacttcaaaagggtagctggtgaaacacttggaagccataaggttaaagaaatgcaaccattaatgggatcagaagatttttcttctaccaagaggtcatacctggatacttcttctttcttgggatgaaaaatacaagtgttggaaagcctgaatcagctcattcacctcacttttacatcaatgaagaagcacttagttatggtgctgcacttcacgcttccttagcttctacctatttatccgaattccatcccaaaaccactttaataggtggagaattacatgatgaattgtagttggtttaaagacaattacaaattagtatattggttcagctgccaagatgggttttcattttgcataaacttttactttaggaattgtttttatgatccgggtataattatacctaacatagtcttaatttccatttcagtttaagtatatactatctttttttttttcgtataaatacagacgagtaatttttttagttttctgtctaaaataaagttaaataattatattttaattacattggtaagaaatgtaaaaccgtacactgaacttttttttactttttttaatttaagtatttaaacttaaatcaactaaaacaaagacactctgtatcttgatatcaattaaggac

SEQ ID NO: 191416 - DNA, 1935 bp, Cannabis indica
aagtgaagatttaataaattcaatattgaagggaaaactcagctcaaaggtctgagcaatagataatttcattatatagagaattggggattagagaggtacagagtacctatacaaacattacacgtgtaaaaaggaatatactcagtacacaataataacagaaagttgttagccaataatgattgcaaaatcattattgggattccctcattctagtattctttgagattgccagctcatcattcaattcctttgaatcattttctttaactccacccctcaaacgaaatggggactgtgtgacattgagtttggcagtaagaaactggaaccgagtaggagtgagagcctttgtaagacagtcggctatttgatcatgagatggcacatatcgaatttccaacttcttatcaagtaccttgtccctgacgaagtgcacatccagttctatgtgttttgttctagcatgataaacaggattagaggcaagtgcacttgcactttggttgtcacaccatatcacgggagtggctgagcatttgaagttcaactcctttaacagttcttgtaaccaggacaattctgcagcaagatgagcaagtgctctatattccgattccgtgctagagcgagccactacagtttgcttcttggatgaccaagaaatcaaagaatctccgagataaacacagtatcctgccactaattttctgtcatcgggacaacatgcccagtcggcatccgagaacccaacaagagtgagattcacactaggagcaatgtgaagaccatggtgcattgtccttttaagatatctcagtattcgttttgctgcaccccaatgcacatcagtcggttgcttgagaaactggctgagtttgttgacggcaaaggagatgttgggtctggtgtggctaagatattgtagagctcctattacacttctgaacatggttggttggctgagaggagttccatccgaaatggacaatgccttcccagcagtcataggagttacactgggtttagtgttctcaagtttggccttctgtaacagttctgcaatatatttcccttgagataaataaatacctgtgttgtctctaaacacttcaatgcctaagaaatattgaagtggcccgagatccttcaatgagaaggtcagattgagtctagaaatgaaggcatgaacttcttttgagttgtttcccgtgaccactatgtcatcgacatagacaaggactaacacaacatgcttcggttgtttcatcataaagaacgaagagtcagcctttgaattctcaaatccccactgtataagtgtcattcttagttggtcataccaagccctcggagcttgtttcaacccgtagattgacttatgaagcttgcaaacatggtgaggtttttgagggtcttcaaaacccggaggttgaaccatgtaaacatcttcatcaagagtttcgtttaagaaagcgttgttgatgtccacttgtcttacttcccaatcatatgccacggctaaggtgagaacaacacgaaccgtggctgctttaacaacgggactaaaagtctctccaaagtccacaccgggtctttggtggaaccctttagcaactaggcgggccttgagtcgttggaagcttcgatctgcattatatttgactttgaacacccacttacagccaacaatattgtaaagagctgagaatggaaccaaggtccaggtcttgtttcgaattaaggcaagaaactcagttgacatagccttgttccacccctcatgctgaagggcagcagccactgaagcaggttcaagaaaatcaagagagaatgttgactgaccaagaaacgttcgaggtttaaaaatacccgctttgcctcgagtaatcatgggatgtgtaggctgaattggtacaacagtagccgtgg

SEQ ID NO: 191417 - DNA, 2735 bp, Cannabis indica
gagttctaaaactcaaagcttgctcaatcaacactatagcccctaaaaccacttcaaatcaacacatataaacatattttaacttctgaaatcaataacaaacaaccacagcaggaacaacaattgaaatctcaaatcatgcaaaatttcactttcttacaattacaagaaactaaaaagaaagttacaagaggcttaccttggcttggaaaatacctaaagctgctggaaaacacagcaatttgaagaaaaacaatgaaccctagccggttgtatagggtgcgaaggagagagaggcttgagagaaaagagaaatgcttttcttattttgaataatgagtagatgaatttttttttatcaaaagataatatcagtctaatatccatataaataattagattactaaataaaaccaagtccactaaaggacaaaatacaaatggcaaaaagaccattttgcccttcccacactaaaattcatataatggcacttaggagtatttttggaaaattctaaaattccgactactcccgacatttctaatgtctactttattgtcctgctatactaaaactactaggatgtgtttctaatagccaaataccgcgttctaatgtttctggacacaaaacatgcaaaattatgaaaattctatacatgacataaaaatgcattctaaattcaaataaatcatcataaataaataattcaatactaataaataattttcataattaagccctaattatctgataatttccaaattaaagctaagcggtctttacagattgtcagtgataaataaggttctgctattagttgatcaaatttaagctcaacaactagaaaagcacatacaaaaattctaatttaataaataatggaaattgtacagtttagaaataattcaaatttaagtgttttggaaccatctagcagttaggaatcattatatgcagtagccttaaatatggaaaaatagaaatccaaaaataaagaaaaaaagaaaggaaataacctatcatatcaattaacctattgaatataaaacaaaaattaaaaaataatctcggtaatcagtataacgtgtgaaaaatacaaaactctagtgcatgaatagttgaatagaatttaaggaaacaacaaatattctaaaattgaaaaaactcttgaaaataatacgttagaaaagaaaaaagagaacgagaaaagcaagagttttcacatctatcgttattataaaaaataaacctacatatatagtatatgttttggaaaaataaaaattctcgcactgccaaaaaatccaaaattgtgtaaactgaatcataaaattataaaaattttaagtccaaacttggataatggagaaagaatttaaggagaaatgtgagatctttatcatattaggcgtttcatattattaccattgagatttaccttgtaagatcataacgggaaacctcaagagcagttactcaaaccaatacttggcatgattgaataagttaactaaaatgttgaaagcaaattggatacaacaatcttgaggaaggaaacaacacctttgagtttattgtcataaatgcaagaggcaacaatattgtaaaatatttacctcaacttgaatccaaattgatatttttatcatattagagaagaggaaggacacatcaatggagaacttgaaaagaaggtggtcagagatgtaaacaagaaaaaattgaggaaaaagaaaataaccgccttcgaaaaaaataactctctttgcactcttactaatttttttaatactatgcctaattttttttttattattattattttattcatttattcattataatatgttgaagtttcacgtatatttagttgttcaattatttttgttagacaatatattttgattttaattatatataacatttatatataatttaatcaatgaataatgttatttaaaaaaaaatgcttattgtaaaatataataaggaaacatataacaagaaaattaaatgaaaacatgtttgtaaaagacatgggttatgactattttgaatattaaacagactgtgtttgtaaaagataaaagacaaaagacaaagagaaagagagcacaaatgcacaatcatatagttgacatgtggttcccaaaattatcaaaataactgaagaagtggggaaaggatctgcaccacgtgattcccttttagttaataaaaaaaaagagcacacaacacttttcttgtaataagtcttagtttccatacaaattcttcaagctcagcaacaaaaccatcaaagttagtcccatgtgtgttgacatcgtcaaggtcagtttggcaagttgtgcacacacaaaaataaaatacttctttaatgtccttggataagtcaacatgataagtcaaaattaaaattagtaaacttatacaccaatttatttctcctcattagataaataaattaatggggccaaagaaacaagagcccaaaggaacaagttcaaatgttatcatgattttttttattgaaatgtcactattgtcatcaatgtgacctgtagatatttataccattaatttactaaaaatgatagttttgttcaataaaactgtatctagaaagaattaaccaaaatcttagcactataatcgattttggcttgttgagtttgagatgtattcaatagctttttataaatggttccttttcaaaaaaaaaaataaataa

SEQ ID NO: 191418 - DNA, 1104 bp, Cannabis indica
ctaatcaaatttacaatctttttctcaggttcatatattaccaagagaaatttttggaaaatcaacgttcgagcttgctgtgttgttaatggcttggttaccactttggttagttgataaactaatgttgttcttgtcatggttagtacttggaaacattgaaaaatatggtcttaaaagaccaacaacaggaccattaacactcaaaaacacagaaggaaagacaccagttttggatattggaacattggacaaaatcaaatcaggtgatattacagttgtcgctggaatcaagagatttactagtaaccaagttgaacttgttgatggtgaaattcttgatattgattcagtcattttagcaactggttaccgaagcaatgttccttcttggcttcaggtgagaaaattgttctataaaaatcaaaactttattactctgttttttttttttactctgttttgtaaagattgaaactttatactaaattttgtattgggcttttttatttttttttcaggaaggtgaatttttttccaaaaatggttttcctaaggctccattcccacatggttggaagggtaatgctggtctttatgcagttgggtttacaaggagagggctttctggtgcttcctcagatgccatgaaaatagctcaagatattggtcaagtttggaaacttgaaaccaaacaacaaaaaaagagaacaactgcttgtcacagacgttgcatttctcagttctaaaaaataaaaaaaactcccaaaaaaaaatagaaaaaaaaaattaaatcataacaacaaattctcactaattgttttagtttgaggtgtataacaataacttaaaacaaataactgtatattacagaagaagaagatgatgatgatgatagtgatgatcatactagccctctccaaaggccctaatatttttttaattatttatttattttattttcattttttaactttagagagtttttttttcgggtcattttgtaatctgaggatgatgaggctttgtaatttttttttactttatatactagcttttgtaatatatactttaagtaaagtaatgatatgatatcaatgttaa

SEQ ID NO: 191419 - DNA, 3760 bp, Cannabis indica
taggcttattgggatattacaagactacatcggtagatttatcacataagccataaaagtgaaagggttaactaaagagggaaaacttgtcgctatcctataaggaattaaactcctgggagaattattgaaagacatcaaaagacttaatgtaggatctatgggagagtttctagactgagcagacggatttataaagcttgaagaagcagtttggtgtgtagagacaattgattagaaaaccaaccaaagtcacaccactactgccaatacatccgtccagactcaaaactcacaacagaataaggtggtaaaaggtcaaataatggcaattaacaaggcaatggaaaaaaaaaaggtatgttcgataataactctgaataacatcatcctcaagagaaagcaccaaagttcactgcctttactatccttactgaagagatagaaaccatcttcacgacaagtcggtctatggtatcatacaaaagacctccttcgatgaaaaaaagatatgagcaagaaggataccaccaagtactgtcgctttcatggagattgcggtcatgatagcaacgagtgaaataatctgaaacaagaaattgaattcctcatcaggaaaaataacccgcacttacgaaagtacattaaggccaactaggatcaaagggttggccagccagataataatcagaacccatttatgcccccacccatggatggacatctgcaagtggttattggaggccctcatattgctagagactcaaacaaagctagagagagatatgctcgaaccctacagtacgaacagaaagatggtgataatgccaggactctaagcctaaattcaatttatttgtgggtgcaaattcatgatttgcaattcgtgttcttaactatgaaggttgttcgggatggcagtaattatgtaggcacttttcttgaatttgatccaaataactttgttggggtttggtgtgagtaccttcgggtacgtgcaactctatctcttgagaagcattgaaaaggaagatgaaatttcgtaaacgtgatggggacagtttttacgctacgtttaggtatgaagatgtcctagtgtttttctttatttgtggaataatgggacattaaaagagattttgtccacgtttattcgacacaccgtcaagctctctgtttaagccgtatggtatggggatgaaggccacacctcgtcgacaccaacaagtctatgtttcaccgttcctccgctctgacagatctttcaatagctcaccacctcatgctcatcccactaatcatggagtcaactttgtcaataaatcacccactgattttacggatgcaacttcccgtgatctagcataatatcattccaaaaataaagggattgtggtttatgatagtcatgaagaggttgaagagctggcaaatgctgaattaaaaaggaaaatatttgttatagagcatgaaaatgtggcttccactaaaatcatgggccaaatgaataccgggtcaaaaaatatgaatgtggtgggtcgtggtgctcaggcccaccaaacattatgagttgtatcaattgaaattgttgtaggcttgggaacccacgggcctgccaattccttaaggacattgttgctcaaaagaaacccaattttatctttttatgtgaaactttatgcaagaaagatgtggtggataggcttagagaccaattaagttttgatggtggtttttgtgttgaggcccaaggtcacaaaggaggaattgctttgttttagaaagtccaagaagaggttcaactgttaagttactcacaaaattatattgatgtagaaatcttgctgccaaatacttctgcgtggcgtttaacatgcatctatgagaagccaaatagaagcatgcaattcaagacttggaagctcatacatgaccttgcccccgagtctcagctacattggtgtattatcgaggatcttaataacatcagcagccaattagagaagaaggggggtcgaccctaccctacgtccctcactgatggtttccaagaggttttgtacagttgcgggttagtcgatttggagcttcagggctatccttatacttggaagcgaagcaaaggtacgcctaatagtgtcaaaattcgtttggataaagctcttgtttctcacctttggcttgagtcctttccccaagcaacttttactaatggcgacttctcttcctctgatcatacttctattttcctaacctaaacctccatggttgtctggtaaaatgtatcacttctgttatgagaattgctgaagcagaatagcactcatcttcctctcattgacaagattaaagcttccggcactaaactggatacctggggtcgtgcgcatgtaatttcaaaaaatgtctgtctcatagcaaacaaaaattgtctagattgatatatagcacagatgctatgggtatgcaagattttgttactaaaaagactaattattttgaaattcttgcccaacaagagctttattggaaacaaaggtctaagcaacattggcttcatgaaggagacaaaaatagcaagtactttcatgtgtatgctagcacacggaagcgtaataacaaaatccatactctgcaagacagtaatggggttgtcaaagattgggatttgggccttgaaatcgttattaatgattatttttcaaccttgtttaatgctggtgtttcacagtttcaaatggttgccaatggtgtaatgtgttcggttgatcctgctcaaaatgatgaccttttaaagcctattcaagatgaggaagtcaagtaggctttattccaaacgcatcctgacaaagcgtcaggccctgatggtgtttctatcaaacccattgggatattgttggtaaggacatcattcaatttgttaaagatttgatactagcattttcccccatggctccaatgatactaattgttgttggagaaatttagacaacaccaaattaaataatataataaagatatacgcagaaaatgtgtgagtactcaacctagaatggcgagtattcaagctatgaacacacagacgtactagaaatataaagaacacaagggaatatagttgttcattcagatcacggtctgcttagtccactgttacaatgattttctgtcttattctatttcacgttggatcactcctttatatacaaagaaagtgtcctttgattacacagagattgaattcattatcaatccgtttgtacattgaatataacaattaaatcaataaaaacgtaaattcaataaatgaagaacagttttggcccgattcactaaataaagcaacgtatgcaacttctatagtacgagttgtctgttcatgttcttgcataagctcgtaggcctaagatgcataaaagaccagtcgagtctgggatgtctgcgtcctattcgagttgcttatacaaatatcctataataactcgataacttaggacatgtgagtccttatcgggttatcgagattgttgggtcattcggaccggcttgctgaatacgaaagcaatcttttcctctttgcaggaagacctttatagtcctcacatatatctttgtttgtgcgagtcttaactcgttctttggtcctgctccatgcgagctactcgaatgcgactagaaactttcaaggtcacatcatcccgctgagtctagtttaggcgaggcttgaactcaagaagtctcactgacatctcagctctcc

SEQ ID NO: 191420 - DNA, 1565 bp, Cannabis indica
aagctgctcgaacctattattgtatagattagtagtatattttatcagtattttttatatatattaataaaaaaaatagatattttactagggatattttatcagattaattatataataagatcgaatatatattggaatatcctctttaattatattttgtttgcaaaagaaatactagtacatatctatttagtatcaattaaagaagtagagaaaaagagtgtacacatgcagtgatgagacagggcctcatgaataccctgctcattaaaatctaaaaatacttaatagggcctaaaaaaatctctaaaataagttaagaaccacgtgagcaaaatgcaacttggcattaacaaatatgaagattcaacactaattatgtattgtagaccccactcataggttatagtttcttacactcaattgaattttgaaacgtatattatattgaaaatccatttaaccttttataatggttaaaaacccacgtgagccaaatgcaatttgaaacattaaaaaaatataattttcaacataaattataatcactcactacattatgcagaccccattcctttcccatcacattatatcttctcacatatttaatatattaatatcaaaatgatctgtaatgtccttacctaattaactttagactaaaatatttaattggtggctttattatgtgtcatgtcttgcatctggaataaggtaaaatggtcaagcaattatatagtcacatatatcatatcttttaattatggccaaaatagaagggcattttcgtaaacctgaagtctatataagaaaacttggctattgtgttatgtaccaagccaaacacaccaactgagaagccaaaccaccatttgaagttcagaaaacactccccaaaatcaagtcttatatttttcaagtctcggtctcacaactagtatttctagaactagaagaagagatggaaagctacacaaggaattcgagcatgatcaacggtggaaacatgtcaccaagaaatcctagccgtccgatcccaaagagaggccaagtgaagatggggatagtggtcggattggctcactctgttgcttccgttttcactcccagccgtcgatgagctgatgctggagtatctcatatgatgatgatgatgatggttatgattgtgaagatcgaggctatgttaatacaattttgattttatttttaattaatgtatgaaaatcctggctgtgtacagtggactttgcagtattaatgagattttcttttcctactcttttcaatataacttttgttggttcatacttatattatatctatgttcctttctacttatatatttatcttttcaaataggtacttccagtggaattaataaaattactaaaattttgagaagaaactctaggattaatgtttcatgagtgcttaattatatataaagtaaataatatgtggaagaaaccagaaaaagaaacgatgctcaatcaaaattaaaaaaaataataaataaagtttgggatacttttatttaattaagagccttttatgatatt

SEQ ID NO: 191421 - DNA, 2569 bp, Cannabis indica
atatatattttatggaatggtatcgtaaattcaaattctaaaaatccatacataccagccataaagaaatatatttttcagatttttattcttctcaagagcctgaagaagctaatctaatgtgatctaaagtgaaattcaactctaataagagtgcattgaaagtctcttagtcatcaaccatcttctaaaaaattatctaaaaagttagaaacatttatcaaaaaattaaataaattgtattacatattgtttatgtatatattttgttcacttgtgttttatttcaatttttttagataattaatataaaaaaaaaataatacaacagataatagttcatatcaatcctcgctctaatattggagacacatgtccttttctttgtacattgaaagtctatttttgttagccataattgtacgaagaattaaaaatactacaaaagtatcaatggtgtcaaacagaacagagaattaaatattaagtcagatcttagttaatttaataattatgatagaatattgttaattatttacaatgtgtcacttcatggtagtattacacattatgaaaatagtgtgaagggttgtaaatagtgtgaaagcctataaatatataattgtgtagtttttattgaatatagaatgagaaattagaattttagttcgtttggaagattaatattgtctcaaaaagtacattttataaatttatccgatttctattactctaacaagtattattaagtatcactgatgcttaaaaacgatactattgtataatggtatgtttttaacattattatcttttaatcataaaaagatgacttagctaaaagtttttatttgtagttaatgatataaattttttaaaacattatgatcatgaatgctaagtgcaaacctagtatattaaaatcactaattatttaattatatatatggtttagaaaggtaagatgttaattaagtcttttaaaaaggatccataaaaagatgtactaatttgcacaaaattgattttgtaaaagagtttttttatttttacattttaaaatatatatatttttttttgcatttttacaaaaatctacattgcagtcaatgaaacaatctaaatcacaatcaaaattcacatagtaacccaaataaaaactaccgtatttttatataaaaaaaatgatataacaaaactaagatttttttagtgaaaattacccaaaaatttatattaaattaacataaaagtatactataagtattgaaacatgtatatatatatatgtagtttttaagcaatgaaaacaatatgtataaatataaagaactttttaaaaagtgattttattttatagtaaattcaacgtacaaaatactcatctaagtagttggcacaagaaatcatttatataataagctaaataaaatgtgattgtttaattttaactcagttctaaatgctttatggtgaaatgcacacatatccatttttatatatatttaattaaggaattttttcagaaatatattctttgtatatcttatttataattttacagattttggttttttaaaaacacaatttaaagtaattaattaaaattaaaaaaatatgagtttttaattagaacaaaaaacagtgtgaaaaaaaaaaagaatatcaaacagtttattatttttatcgaaaaacatattttgataaataaaatagttcaaacagtataatttttttttctatattaacgtatttttgtaatctctttttaaatttgggatgtaatatataaaaaattctttaattaatgactatataatatatattctatatttataaatataattaaccatatatcaaaattctccttcaagatcaaaaacctctagaatatatcaaggccccattatggaaataacatctagatttacttcttttccacccaaattctgaattttaatttggaaaataattttatatactattttttatttttaaatttacgatttgagttgattcagtaatttttatgtgaaatttagttacgatttaagttgattcattagttgatatgataagttcttatgtagaattttataaaaatacaaaaaaagaaactgtttcaaaatataaaaaagaaatttcttttaattaatcacacatgtacattgttaattaattttaaattatatattaatgataacatacattccactaattagatcgaaaagtgagaaagatatatttcatataacattaattaatgacatgttacttgcatataacacaatttataaatgacacaatatgaaatttgattagaagtttcaattattgattgttagttagatagctagggtcatttcacataaagtacataaaaagaaataatatatataacaaaaaatattcataaaaaaaatagaaacaaataaatgtgggtattaaattttacatcaatttttaccccatttttatttatggggtctagttaaatctaaaggttattattaattaattattattattattattattattattattattattattattattattattatta

SEQ ID NO: 191422 - DNA, 2340 bp, Cannabis indica
ataaaagttgtcatatcctataactattagttattatgaatttaaatgtaaccctaaaaaatgaaatttccctttcaatatctataagcataatggcattgacgagaacatgaaacacatcttccactctacatgagtagcataatggcattgcaagagggcatgaaacacgtctcaactatcaagcatgtttaaacgtttcgttttatatgtatatatttctaaaaagcatactttattttattttattttatgtacatgagatataaattttggagacatgtatgaaattaagtagtgaactatattttttatttttaataaacattttatgggaaagaattttgaaataattattgtgaaaagttttgacacgagttttaacaatttaatcaaagaaaatgagtcgtttgcaaaaacgacacccaaccatcatcttcaggtagctttaacaatggtgcatataacgatatgtaaaggaatcacctcatttatttccatattaaataagtatagtgctccatgtttaacaaagaacctttaaaacgaaagagagtcataaaggaaacatgtatgagactatgacaccaggccaccaaaacaacacaaactcaaagagccttgaggatgtcatcagcactggagacagaaaactctcccccattttcgacgtttgcaaccgtcacctttaggttatccactactagagcaaacctcctagaacggattcccagtccttcctctgaaagatcaagctcaaggccgagagcgtgggtgtactttgcagctccatcagcaaggaacttaacattcttgttaccagagtaggtttgagcccatgctttcatgacaaacgggtcattgactgcaaaaatgagtgaaaaagaaggaaagttagatttggagattccaatttggtttatttcaatatttcaactccaggattgaacatttcaatcgaaccccccaaaaaattggcaacttgaagtgcagaaaggcagtattaaaatgcatattcatccacaaaacaaagtaatagtttggttcagtcatctacaagttcaagcaagaccatcatctttccacttgacttagcatgatataatgggtgctgtttacttcatattttaacagttcatacataagtcaccaatcaaaaaagtaaaccatttcagtatataactaaatggctaaatgaataaggaatatcattaaaatccatatcatgttggctagtataaaacaaatgcaacgaaaaacgaaatgttactaacatttcagctcaacatattggtaagtattcaacgagacaaaagagttcaatttctttaatattagtcggtgataacaattcgaacctaatacccgatgagatgtgtttgaaacaagctataactgcaatgcaaccacaattggatataatgcacaaattgactaatatagctccaaataagagcgaaatgatccaatgaagcttccaaaagttgtatttgtaagttaatacacaattaaacaaagaagattatcttcactcccaaaaatacccaaaagagaaaaaaagagatcaggcttaccgctaactaagaaaatttcgttgacgcccttagccttgaattcagcttctttctcaatgaaacccggtacgtgcttagtgctgttcccaaacataaacaataaaaaaatctcaatcaaaaaatattcatcgacaaaaaactgatgctatatgcttaacggatcgcaacttttcctacagattcagcaaccaaaccacatctcaaattaaccactccaagagagagagagaaatacctgcaagtaggagtgaatgcaccgggaacgccgaagagaacgaccttcttaccggcggccagagagtgtacggatacgttttggagatcgtcattttcgtcaaagaagctaagggttccgtcaggtaaggaatcaccaacagcaatcggggccatagttgttgatcaacggaacagggaaagtgtagattgggattggatagagcggtggtcggatattgagtggaaatgagtagggaagggtagttgactatatagagactagagagagagagtgtgtgtcggacttagcgaattgtatttagctggttttgatattactatttggagtccgactctaaaataataattaggttaagaatatattaaatttaaaaatttctcgctaattttatttaattttttattaatgtagtaattatttaaattatatttctgaattttaatatttattaaattatatttttaaattttaatataaattaaattgtaccttttaaattttagtaaaattgtacaaaattttttaatt

SEQ ID NO: 191423 - DNA, 977 bp, Cannabis indica
ttcattctggttacctcaaataaatgtatagtggttggtttagcctgtgtaatctgaaattaacatttgttaaacatacgaaacaacagttgaacaacccaaaaataacattagaaaaatcataacaacctcactattaatagttttaatatttctactttatctcgccgaaattgatggttatattttgactattctagtattgttttggtggttctgtcagtgggagtggaagataaagaccttgtttttttcggtgtttacagtatgaatgaaaaaaaaggctaagacagtaaaaatataatttttgccgtgtgccagtatatatgtatacctttacttaaaaattagtatttatgtaaaaaaacctaataaaaatgtatagacccaatttttattaaaaggaaaaagcccaaaaactcagttaatgggatgtaaaagtggaatttacattgtataagtttgataaatatattagcttttcagctttgtacatattttattatttttacatcattttatgacattcctatggggttttgactcaatttttgttttgttaatttttttactagtatcgaattaattattttaaaagttaatgtgacagtaactattagaatagtttttttcttcgtggcgtgaaaatagtcgactatcactaccaatttgttagtttattagtgatgtaatagtaatcaattactactataaaattagattttatgtttttagtaatgtgctgataagtaactagtgaacacaatcaaaatatttttcttttctttttttctttttatagtgatgtggtggtcggtaactagttactcctattaaaatattctttttactttttcttagtgatgcaatggtaactggttaccactataaaaattgcatgttatgctaataaaaatcaaaattgaaatttgaacaaaattacctcttaatcttaaaatgaataaaaaaaaaaaaaa

SEQ ID NO: 191424 - DNA, 2781 bp, Cannabis indica
taagcagatttaacactgaaaatgtcagaattctctcattcccaaatcatatcatctctattataaaaaccaaaaataggaacctcaagaatatcgtgaattatggactcgtcaaaataggctctgagtttaaccagattctaagaactggaatcagtaatgaaataagagaacaaaggaaaggggggagaagtatttgtgtgaagaaatttatgcctatgattaggaatccaatgatcatccaaagttctaattcagtttccatccccaactttccaaacaagtcccgaagccattaaatctctaccccaaataatacttctccaagtgtaggaagggttgtgaccagggacagcttcaagaatagaagaacgaggaaagtaactagccttaagaaccaaactaagaagggcattaggatttttgagatttttccaagcttgtttaggaagcatagcctgattaaaatgaacaagagatcgaaagccaagccccctttgaattttgattgatacaaaaattttcaagatctccaatggattttccgtgaagcctcggaagaaccccaccagaacctagtcatcgcagcctcaatacccttacaaagtttaacaggtaacctgaagcacgccattgtatacgcaagattggcttgaatcacagcttttagaagaacttccttacctgccctagaaaaccatttagcaaaccaacatctaaggacagaagcaaccttaactttgagaaaattaaaggaatgatacttagatctagagagacattgacgaagacctaggtattttcagataaaaggtctatcttctaaattaaaagtatcaaaaaagagatttttaacctcgtacagagtattgggagaaaagagaatagaggactttgagaaattgatagcctgaatcgaagccctagagtaaataatgaatacatctagaagagtagagcaagaacttcaatcagcgaaacaaaatataaggctatcatcagtaagaaagaggtgacagatggaaggagcatttctatagagatagtaatccctttaagaatactagcatcctgcttgatcttaagaagggaggataaaccttcaacacagagaataaaaagataaggagataagggatccccttgcctaagacccctagaaggtttaaaagaacctttaacaatttcattaattaaaaaagaaagactagtagtagaaatacatttcataccaaccagtcttgccatttttcctagagttgatggcatgaacaatttcttgagcaatgagaatattatcaaaaatgactctgccaaaaacaaaagcatattgaaaaggagaataattttatttagaacaaccttcaaatgattagctaaaactttagaaatgactttgtacagagtagaacaaagactaattggtcaaaagtccttaagagagttggcatgatgtttcttaagaatgagagcaattaaagtagtattgatagcataaaaatcagcaccgttattcaaacaatccaaaagagcatggacaaaatcaggtccaagagtagcccaattcttttgataaaaataagcattaagcccatcaagaccaggagctttatccccagatagattaaaaataacttttctaacctcttgagtcgtgaagggttgggcaaggaagtcaatctcaggatcctccagggagggccctaaaaagtctaaagttagactagtagcctcatcacagccctcagattgaaacagttcagagaaaaaagataggatcacacatagcatcaggattagtaacaacattaccaaaatcatccttaagatacttgatagtgttagtcttttccctttgagacgcaaaacgataaaaaaacttactatttttgtcactaaatttgagccaatgaaccctagccctttgcttcaaataaatttcttccttgtaaaggagagcatcaagctgagattggaggtgtttaatgcgaggaataaacttcctgccatcatgagcagaagcctgatgcttggcaatctccttttgaatatcaagaattcgaggatggaaaagttgcttaggagaaatacaagatccttaagagaaaagaaacttgttaagagcacccctaccactacattgattagaagtggggctccaagagttcttaacaatggtatagaaatcatgattctcaagccaaacattcttaaaatgaaaatctattaattataacttttgtattttttaattaaagatcttttaatcacaacatataaataataatttataattaattataattatattactctaaattataagttttatttttaaattataagttttattgtgacaaaaaatataatttttaatagtagacaatataataagacaatctaaacgatatattatatataggtcggttgtcgtattattattggatctgagttaaaccacttcaattttcaaagaagtattaaatacatctgggcccatgaaatatatggataatacattatatattttttgaattgaaaaatctcttctaagttgttgtgttcacattcctgggatcatgaccagaaaaataaattagatgcaccatcccatgctccttccattatcagttgcctttccctttacctgtctacaatcttgaattatattatgataataataaccgaaagaaataagagaacacaaaggtattgcaacattattgtatttaacattttgaccacttacattgcctttgcaatatattaccatggagattc

SEQ ID NO: 191425 - DNA, 1017 bp, Cannabis indica
ggggggtttgaaaaggatattaggagaaaatagtgatgttctcagacaactacaggcattacggggccccaaatgggatatgttcaaaatatggaatcccacatacccatcgaaagtgacaagaaagcatatacctaagtactgtctgtaatgttagaaaacaattttgaatgtttatgcatacaagttacaacatagtcttctggttactgctatataaacatgatgacataaaatatattactatacaattttcatcaatattccacaaaagtatattactactagttttaagtttaatggctcataccactaggtcgccattagaaagagagcaacacttcacggtatttcttgctacccctccagaggctgtaggattaaaatttcctttatcaataactgcactaaggcgagaaacagcttcattgttcaacctttgagagtctgtctccgaggattctgaagatttgtccaaagcactcttttttgaccaaagtggttcgcctgactctgcaattctaacaaaataatgggatttctcaaatctttgtagtaacaattcagttcttctcttgtggtcttccaatctaagaagtgattcactagtagaaacatctttcttagaatcttgcttttcctttgacaaattttcaccattctgaggacctacatcttgactgcctggaagattttcatttttttcatcttccaggtttccattttgtttctctgggctctttcccatgccatttttactcattactgcagcaactttaaatggagtaataatttctgtatccttcttacatgctgataagcatgccagtatatgaacttgctcgcctgagttgggcaaaacaattagaagtttattcattttaacatatatcttaaagaaaatgggagagtcaagaaccagttacctggaaaaacaaaggaacggtccaaaatgcataatgattttatatccggtgcatcattccaattgtcagtgttaggatagatggtacataa

SEQ ID NO: 191426 - DNA, 2223 bp, Cannabis indica
caagaatgagtgtcagagttaggggtattcaagggttactgtgtggttagaagtggtcctaatatctctcacttattatttgttgatgatagtttcttcttttgggagcttcccttgacaattgtgcccaattttaagttatcttggggtggtatgagagtgcgtcgggacaacttgttaatctgataagtcttcagtttgtttttcctctggtatttctagaggggctcgggatgctttggccaatgtttgggggttcatagagtttcatgccatgagaagtatctgggtctttcgtgttttgttgcttgtagtaaatctagtttgtttcaatcaattcaagatcgggtttggaacaaattatttggctggaggaaaaatcgtttttcagccgggtagtgtgaggttcttctcatgttttttatacaagcaatctctacttgtgctatgaatctctttaggttgccagtgaagttaatcgatgagcttcactgactttgtgctcgattctggtggggaggagatgatgatgatagaaagatgcattggtgtacttgaaagagattatgttggaacaagatggatgggggtatggatttttaggatttatttgtcttcaataaagctctcctggccaaacaagcttggagacgttattctgttcctgagtctctcactgctagggtgatgaaatgtttgtacttttctcatggtgagtttttacaagcgactgaaacttacaaagggtcataaatttggaagagtattccttggggtagggaactgtttgtggagggtgggcggtggcttattagggaaggtcgttttatggatattcgttctcaagtatggattcctaaactttcggcttcactctcatactctttcaaaggccatcctcttatttcgagggtcagtgatcttaagctttccaatggtgattggaatattgttcttattgatgagcttttttcatctgacgaggctagatagattttgaccattcccaaatgtttccaatctttggatagattaattgggcattacgacacttcttgagggtacacagttaagaatggatattagaatgttatttatttattaagcagaggtcaagttggatctttttcaggaccctcttcttgctgcaaatatttatggaatctttccatccctcctaaggttaaggtttttatttggggagcttgtcatgattggtttcccacctctcattatttggaagcttcgtaagctctcgactgattccttgtgtcctatgtatggggatgagattgagacttctttccatgctctttggggttgttggagtctccaatccattgtgaagtatactgattgtatcaggtcgtcttcttttatggcttgtgtcactctctacactttccttatggaacaagaggtgcatctctccaagtttgatatggacaaattgttggtccttctatggcacatctggtatcctcataataactgggttcataaccataagttgcttaatactgaaggggttcttgggtggtctctctcattcgcccaaaaagaatttaatgcgaatacaactcccaataattctatgattgggtctcggtctattgcttctatccctgcagtcatccctcaggttccaccttctttgggtcatgtcaaactgaatgtggatgctggactgccagaggtgtctcatcgcatggggtatggggctattattaatgatcatgtggggttctatctaacttcggcagttactcttgatattgggaccctttacccctccagttgtcgaagctatctccattttccatggtcttctcttatgtctttgcattggctataaagaggtggaaaagaaaacggactgctaaagggtggctattgctccttgaaaatagaactttgcttagtagaatttggaatggtattgtaagatatttacaatattttttgtagcttttgttatgattcttttaaattttataatcgttcttcgaattctattgcttataatcttgtcaagatgagtttctatagtgactttgtgagagtttgatggccagatatatttaatttgtgtaagttttttgatattttttggcattggcctaatgaagatttatctttaattcaaaaaaaaaaaaattattattagtacaaataatattaaaatatatttaaatgcaatatatataataaataaaataaaat

SEQ ID NO: 191427 - DNA, 801 bp, Cannabis indica
aaaatagaaaatactctacttagaacagcaagtattcaaaagaagcaatctttacttggtcgcaagagaaggctacttagtcatcgcatatatcccgatatatgcgcgacttgtataaacctttcttggtcctgcttattttatattacgcaaagtgtaatattgtgactagattctgtcatggtcacatcctcgcgcagattcaattcaaactaggttaattctaaaggagttcattcttgacagctcatcaatcctctaagaatatgattccatgtggtaattttatagaagtctgatctacacatttttaatgtaatcatttatatatataccatgtcccattgcatgataatatgtatttatcatttttttttttttacagcaatgaaaatgtacaattaagatgctttcaaacaaaaaaatgtacaattaagatacttaaaaaaaaaaatgtacaattaagatgagccatgccaagtcataaagtgccgcaaaatcatctaccaattgggtttaaatagcattgacatcactcccccacccttaactaacagctgcatcaataaataacactttctcacctttaacaccatattgggtttaacagttgtcagaattgtcgccttatgtatccacttccttttttctttcttttctttctattttttcttaagtaaaaaaaaatgtccaaaaaaaagaatataattactgcatgtaatacaaaaatttaacattttcaaacaaaagaaaatccaagaaggaaaaagtttcaatggggataaattccatcatattttc

SEQ ID NO: 191428 - DNA, 1077 bp, Cannabis indica
gttatttgattccatctttgattctatctgtccacaaatcgttctttcaccttgagataagggtttcactattttttttttgcttaacaattggggttttggtttcgatttgcacaggacaccatctttgatctctgattagtgtttttattttatttaaaaaaaataatttatcaaacataaacttgagcatcgaaaattactaaattaactagttgttttttttttgtttttttttttttttttctgttaaaacaaccctgttaaaccaagatttggaaggtagtcacttttaatatataaaaataatttttttgtcagactatttttaatattttagattcctttagttgtatattcactattgaagttgtttggattctaagacttttgaacaagtctgctcattttgtaacaagctgggcagcttctttgaactttactagtttggttctagcgaggggaggtggagccctatgtctccactaattatttgcttttgaaaagatatctttcctttagaccaaacaaatatttatattttaaactaaactagagcggctatacaattttgctagtatatattattattaggatttttttggtaagaatattagggtgtgtgtgaacttaggatagacatttagtggacaagacaaaaagtttagacagcttgtgccgggtacctatttttcagattgaaaaagataccatagcaataaccacatatagcactatgaatttggcattgcataacggtcaaagacattgaatgatgaaaagtaaagtcacactactacttttttattataaagttatacacgaacacatatatcaatgatcagtcatattacattatttatttatattatattatgtgaacaacacttatttatatgccttcaaaaatattagccaattaatatatctatataaagaaactgaatagaaaattgaaataggccatgtatatatgatatgaagttgtgtataactagcatatcttctatcaattccttctccaactatacattcaggcgaaaagattgtggccatggctgatgctttcaccagtgc

SEQ ID NO: 191429 - DNA, 3022 bp, Cannabis indica
ctttttccagctgtaaatatatagttttactactaatgttggtatcttccatattttacggccattgctgtgtatgctcattggctttctttttcgattgtttctcgctcagaccaaggcaggtgatgcagctaagaagaagtgaggttctgcataaattttggctccatgttttgcagattttttcttcattacattgttttttttcatcttacgtttgcttgttaaacttggacaaaagttttgggaaattcaactttgagaacttttattttccgtttgtgttgctagttactttttatcaggaaaactgctaattatgatgttacatggagacagattgaattttgatttttaagttattcatgatgaaaagaaagatcagaaaatcttgtcttgagatatgttttccacatttccataaattttgaaaccgaaagctacagctacaaattttattcaagtggcaaaccttggcttaagcaagggtgaatttaagtctttgtgcttgctaggcaccttaatagaaggaaagaaaaaaaaaggttattatttgaactaggaaaaacaagaacattttaaactaaatttagggtgaattttagttcttatacttgctaggcaccttaatagatgtaaagattaaaaaaaaacaagcttattatttagactaatttaatttatgttatattaaatgtactatttaatagaaagtgttgttattttaaaaaatattaaaattcaaatttaaactcacttatgtatctaaaaatatgtttatattattattttttacttaatccacatctacaaacaaaactatctttcttttattctttttctaaaataataaaataaaataaaataagttttcttaaaaacttattattatttattgcaattactaaaaacaaatatttttattatttacaaaaaaaaaaactgaaaaggtgtatgatattttaaaaaaaataaaagtattataattaaatttaaactataattaatatcgtgcaagtaatagaagcagaaaacttgtgaatatattattgattgaattggataatgtacaatgaagaattacatggtttatataaaaatcaataatgaataaccctcgaagtctttcagataattcgaaggtttggttactcgacttgttcttcttgggatcacaggaggtgatgatgttggaaattggaatagattgtcttgttgtgtcgaagattggtcatctgtgtttgcggtttttgttgtgtaatcctgcagaggagggttagaaaaagtaataatagtatgttgtgcaggataatcatctatttgagtattggtaatgtgagaatttgataaaacaagtgtagagaaaggatcaacattagtgtgagcactattgagtttataaaaagaaaaaatattttcatgaaaaacgacattgcgagatatgaaaaattgtttagtatttagatcatacaacttataaccttttactcttcttgggtaacccatgaaaatacaagtccttgcacgtggctcgaactttgttctgtgagcagtaagtgtagatgcaaacgcaaggcacccaaaacatctcaggttggtatagtcaggagctttatcgagtagaatctcatgaggagttttgttgtttagattagatgtaggtgttcgattaattaaaaaaattgtagtcacaagacattcagtccagaatttaactggaaccttggattgaaaacaaagagtccttgcaacattgagcaagtgctgatgttttctcttgataacaacattttattcaggtatttcagtgcaagtaaattcatgtagaatgtcatgtttagaaaacaaatccttaaaaacaagtttaggtgcattattagacctgaaacatttaaaaagacaattgaattgagtttgtatgtaagaaagaaactctagtatgatagatataacatcgaatttttgtttaagaagataaattcaaatgaatcttgagtgtttatcaatcaaattgaagaaatatctatgattaaagtgtgaaggtacatgatatggaacccaaatatcacaaatatcacaatgtataacatcaaaacaattagcagcaaaactattattacattatttagaaaatgaagctttttttgttttgcaagagagcaaacataacatggttcaatatgatgtaaatttttcattttacaatgaagagtatctttaagtaaattcaaacatttgtgagataaatgtcctaatttattgtgccaagtctaagcataaatggaaaagactttggtcgaaattggtgcaaggtccaaaatatagagtttatttatggattcacttttgctaatcattttctcattatgtattttctgtatataaaatttattagcaaaaaaattcatgacaagagtatttctatctgttaaactgctaatagagatgatattatattgaaactaagtgcataaagaacatcaatgatgatgagaagatctataaacttgacattgccacttttgtggaccattaaatgattattgatagggagaatcaattttattagagatataagatgaatactttggaataaattcatgttagaacaaatgtgcctagtctactatccaagaattattttgaggtaatatagaggtattggacagaattgtacatgggataccggtagaggaactaggatccatgaaagtcatactagatgtttgtgtagcaagaaggtttgagaacttgttgatattgattggcagttagttgaggcagcaaggtactattgtcattgggaggtggacaattttactggaagtttgcaattgaagcttctctctaaaaattgaagcttatgagacttaaactagagcttattagtatttttctgtaatctcgtgataaataaaaagtcgaaatagacgtagttccattactattgcgatatggagagtgaactattataaattttgtgtctctctaaactatatacttaaaacttattaatcatctc

SEQ ID NO: 191430 - DNA, 1162 bp, Cannabis indica
tatataaatatatatatactgtgtacaatttatttgtttctcattgttaattatataatatgctacatcaaaacgaaaatgaaattccatgcttggtcctttctgaaaatgaatttgatatgcacatcagtaaaaaacaacagaagcgaagaaaagaatagcaccataaacagcaaaggaagaaaaaaatagaggcacaagttttttttttctaaaaatacggttataatgcaatttgacttttccaaatttttagattatttttgtgtctgagataaagggaaaaaaaagacatgtgctggcatatatattactctttctctcaataaaatttgacacttgatctactgtcaagcaacacatcaataactcaacttcattgactttatgcatgtggttgctaatactcttttgaatttatataatatcatggccatggatagtaaactttttgtcgtatttaattcgcttcttaattcttcttcggtttcgaataaaacatatcaatatgttactgtggtctgagaaagagaaatgaaaaaaaataataataataattatcaatcatttaccctaaacaaaatataaaaaaagaaattacattccatcgttttcttttcttctaatattttagtacattctagtacatgtttgaatttaaaacatacctaatacgattatattccataatcaacgtgtataaatattaaattaattatatatggtcactaataagaggcccactaaccaaaaattatagtttggtgtaactatttagagcacttttaagcttgaacatcctctgtacatgactcttagtgggtgttcttattgtcaaagagctccaaataaacctgatcaccaaatgctcctattcctaaccactacaatcttcatcccaaattacaattttctaacttatcattattggcttcatttcccacctcaaaacatagcattgatttaattattacatactttaccagttgaccaatgatttaggtaatgtccccacaccctatatcatggtgggaagacgtatatatacgtttggctatatatagatatgtagcattatgtatgaaaataataaaaataataaaagtaaccctataaattctaaattaatctaattaactccattggaggaagaaaaaaaaac

SEQ ID NO: 191431 - DNA, 3607 bp, Cannabis indica
agtttttaacaattctctatgtatatatgagttaattacaagtgtcatactttggagtgggggcttaactaagagctaacaccctaatgtgatttcttgaagtcaaaaaagcaattctctcattatgattaaactttctattatggttgattaataattaatgttaaaagattattaatgatgtttggttgtttcctttacaaaattgttctaagtcaacccttcaaatatggctttaacttccacttgttatcggccaactcacaccctattgaatctaaatactaaagaagaaaaattaaccaattcatgattactatagcaaatttcagatggcaaatgttaaagagtatgagtaatactaccataccatgactataatagtatgtgttgttttgtattatatactatattttatttgattgtattgtattatattgataagcgtgaaaagtaaaattttcaattgaactgaccacaaaactaaccataacaaaaaatgaatattacgatatcaacgttttatttaaagttttttaaattatgacagtcgatttcaatttttacaattttaaaaaataatattaaccataaccgactgtattaattactgtataaatatatatatatttatatataatatactagaaatgcatgagaaatgttagtttagttagttgtgggacacttcctttgaatgcaagagcttataagttcgaatcccatatgctaaacaggggtatttattaaccataactaattttatatagtctatctagattcaatctaattatatattggatatcaaattttactatccaatctgatccgatccaattaattttagtcattcgatcgatccaacattcattagatgctggattggatcaattcggttctatctattgaatatatgaatatttattggattgatttaaatttatctaatattttagacgtattatccaatatctattacagtgattcaaatttatctatttgatcaatttatacacaccttgttgggaatcgaacttaggactggttacattgtaaaataggtgcttacatgcactctaccaaaacttagtttctaatatcactactacaaaattaagttttttcgactgttttaaatagtcgccaaaatattcctgttagtctctaagattgacacctatttgactatcaggtaaattgggtggaatagacaacagtgggaaaatgttcataaaagtttttctcgactatgcaaaaccgtcgacaatactgaccaatataggtgagtgtttaaaatagtacccttaaaaaattatagatctggagccatatctcaccgccgaaaccaaatttacactaccaaaatcaaatctcaccatatttcggttcaatacagtaaatatatattcattacaaatattttaatttttgcacctatccattaacaatgaaagcaaattccgataattatcctttgaagtacttagccatatagttccttttgtcatggattttcaagagactagtgggatttccacaacgaaaagcactaatgcaaaatgaaaagatgtatcaaactctcacctctggtttaccgtgaacgagaagagacgaggaagagaatgagagagcgaggtggagttgggtggcggtggtggtacgattgggtcgtcagctcgaaggtgattggcgttgaatgagaagtggcgaggaggagcaagataaagcgaggtggagcgagagagagcgacacactgaggctcgctagaggaggtgtcagtggttgggtgttgcttgctgttggaacgagatagccgagagaggagagatgagtttgtgtggttgagagagagagatcgaaaatatgaaaaatgggatctgaaataattggacttttatatatttaaatgagaattctcaacgatttaaaactgtcgagtatacttattctaactgtttaaaaccgttttcaaaccgttgcagattctcaccccatttttcaattttggtcttgtgaccgttttaaaccatcgagaatggtaaacgattgttaaaaactgtcggaaatactccattataacttacggttttaaacagtcaataatttttattagcgacgataaaaaaaagagtcaatttagagaccgccaggagtaacgtttttgtagtagtgtattatgatgcacaaaattatattcaattcgtttttgaacaaaaccgactataagcgaccgtaactaccaaatcggttacggtcacttatacattatcaccgcgattctatatattttaattattatatagttcttattacgtcatctgtgatgtaatacctaataacaacaatcaatataccttatttaccataattacatggataagtttataatatcatttcttaaaggttatttcctaaataaatatatagaatatttaaaggtcaaaaaacagccagcattttgatggaataaaaaacatatttatatataaaaacaatatatatccttgttttcatcaccccatccacaaacaacataaacctcaatccttaattctttcttaaaaaaaccaccaaaattttgtgtttgtgatccatgcaatgacgtaacaaagtttgtggttttttataataactacaaaattaattatataatataacaccaaagttgtgttatatacttgtgagtagtgtccattttaacaattccctaacattatgtttggtagaactagaaaagaaataataatagaatgggtgttcatcaaaccgctcagttcgtacaaaatgacaatgtggtaaatcttaattggttcaggtcactaaatttttattttttatttaaaattaaatttaaatatattaataaaaaaatgacacgtagataataacttgatactgactaagtatatattaaagtttcaaaaatataacttaggtgttattactgtcaaaaattaaacttaagtatttatttgcaacagaaaattataaacttaactatttattacatcacaaattactctataaattatcattccaaaaatgcaaagaaagaaaaagataacaacttttatttacctatgaatataatgtcttaaaattaaataaatttatttttatcatgattttaatagatatgataaaaatatttacactacttgtattaataaaatagagacatgcttaggccactcttaatgtatcaagtatgaaaagatgacaaactattattgatacattttaataattttaatattagatttgataaattttgatttaataaataatactagaacttattaattaattgagtaataccatatagcactttaaaatactaaataatagtactcaataaaataacacttcacaactttcatattagcacctaagtgctaggacagaagtattcatgttttttattattgtaaatggatagttttatatttttacattttaaaataatttttttgttttgtattttcacataattccatttaataattcacatagcaacttaaatcacaaataaaattcgcatagtaactcatacaaaaataagtaattactggagcaatcaaaatcgtaaatttttttttaaaaaaa

SEQ ID NO: 191432 - DNA, 2696 bp, Cannabis indica
aaaaaaatctctgttgacacaaaataactctcgctgttgaatttgtacagaatagaaaagcgagttgcttgatgaaatagcgagtgcatagctcctttgattttgtaatataatgcttgatgaatagagtgtgtagttgcaaagctccttcaatctactataatttgtttcatgtaatctaatcatactgtgtaatgttctaaatttgatgattaagtacactaatctgcatttggggatgcatacttgtgtcagtgtatctttttcttttttggttcattccttattaaagaaacaatattaaagtgttctatcacataatcagatggatcttgttgtggcctgttttaacagggtcacaccaacataagagaaaacaaatctaaatttgtgcattcttgataagaaatacagtttaaagttgtgtatttggtgtaggttcctgtacgacacctggtcttcatggttcatggaattggacagagattggagaaatctaatttagtcgatgatgttggtacatttcgccatatcacagcaagtctagcagaacgccacattactcaacaccagagtggcattcagagagttttattcatcccatgccaggtaagagatttttttatatgttagatcatttttccttcctcaccatcaccttattcatatgattgattaaattatcagtatacacgttgtctaacatttgttattcttatccatgggtttggttttcagtggagaaaaggtttaaagcttagtggagaaacagcagtggaaaaatgcactttagatggtgttaggggcctgcgtgtcatgttgagtgcaactgctcatgatgtgctatactacatgagccccatctactgccaggatatcatcaactcggtagcacatacttgatccctaatgtactactacctggattgttagacattcaaccatttttttaattgtttgtattaaaaaattaatacgtagatggagcataaacttgcatattaattactgtgttttcaatctttttacagtcggagtatttgaagtctgtttagttaatctttactttccattaacccccctccatcataatcaaatagcggtaaagtcctgggtaggtttttggatatttactacttcagattttaaaattgttttcttaggtcagttaggtgtcaaacatcgatgggtgatacttttttatttccttgttaatattatacaacatattgtttcttattttttttaaaaaatgtaatataatccaattgaatgaatgaattgtcgtaaagtgatcattcaaaattgtgctatggggggattttaaattagttgcatgcatgaatacactgcatgaacttttctctaacaaaactattcttttatgaactactacaggaaatcgtttataataaaatgccttttatgttagagataacagccacttttatgtcgtaaataactgaagagtaatattcttgaccaggtatccaatcaattaaatcagttgtatttgaagtttcttaagaggaaccctggttatgatggaaaggtacacacacataaataaatatatattgatttaaagttataaatctatatatatatatatttatatcatgctaagacttgtacaggtttctatatacggtcattctttgggaagtgttctctcctatgatatcctctgccaccaggaaaatttgtcctctccatttcctatggactcaatgtacagggaacatgctgaaggtgaccagtcttctgcaagcaactcttcactcaatctggaagttaaaacatctgcaagtaacaatattgaagacatggtgggttcaatggatgctaaaaatcagaggtcatcaccagctcttttgatacatgagaaaggcatatcaagccttgtatctaatcaaggggaaaaagattcctccgtacctgctacagcagatgatgaaaaaaagagtatgctgccaactcttttagtacatgatgtatcaaatggaaatactgaagatgtttctaccattgtggatactgttgcacctgacttcaatatattatctgaaagtgttttcaactccaatcaatcaagttgtaatgaagatgttcctgaatcaatttatgatcctaggggcttggttcttgataacagggacaacttttatggaactacggattatagttctggagtctgtaatgatgcctcagaactagtgtctgaagaaatatgtgcagagaaaaacgatccggaaaaaaaaattaaagcactgagtaaagaggtaagaaaaatcattatttcgagtacccgtctatgagaaccctgtatctcatatatggtaactttcttcctccgccagcttgaatccctgaaggtcaaaatagcagaattggaattgcaatgtgatggcgaagataggactatgaggctccacaaaggtgattgctagattatttagtatctctttcttgctttattttctttattctgccttttgttctagctttggaaagaagttttgatgtacttgataacagaaaacgaagcagcacctacaactgtagtaaagcaacccatatgtaacaagctgccagctgatcatcatgattccctgaagagttataccccgtatatcacctacacaaaacttgaattcaaggtgctggaggcagactctatatgcctctctctctct

SEQ ID NO: 191433 - DNA, 2253 bp, Cannabis indica
aattaaacaatctattttttaaaaattaaaaaaaactacaccgatacccaccctaaataacaatcatcaatataaaatttaaactctatacaaaaaaatcatttataacataaaacatttgaataacaatgtgtatattataggtttatatacacaattatgacattcttaacaattaattttataaaacatatcgtttataacataatttataattagtcactaaattcttaaacaaaaaccacaagaacttaaaataaaactaatatatacgtggcaagtatatatatatagatagattggaattttatagactcatgttttaggctattacgaaataagtgaagatataggcctccatgtattgaagacttttattttttattatttcgaaataaccaaagacatagattcacaattttttttctttatttttgttttcaaattttattttttatattgtaaaaaatcaaaaatatactacaaaaaaatttatttttagtcacaataaaatttgtgactaaaagtaaaaaaattgtgactaattataaaatatcattcttatgttgtgactaaaaggttcgtgactaaagatattagtcacaaaaataagcgccatatgtaaaaattatgggtaagtctacatgtacacccctctaaaaaggtatttcggcagatcctttatctattttgacatacagaaagacttttagtcaaaaaaaaaaattatgcatgcgtgcgttataattatttagactacttgtaactttttcagaaaattccgagtagtttacaatgttgaaaataagatttacatattttgttgcatgcgcgattattttttatatgtatgttaagtaattgtttaaaccaaatttttggcactttaaacaattcagaatttttaaaaaaatttactagtagttctaaataattagaacgtatacgattacgaaaaaaatttagtactgcaacagatgcgaggtctaccggaacaactttttacttgagtctgcttacataaatttccaaaattacatagcttttgaaaggcataattacttttgctgaaaaatgggctccatatttatgaaattctaacataataaagtattagacaatattcaaatcctaattttacaagttattaaaggtgtgttattaatttatcaaaagaaaaaaggtgtgttaataatttataaatttgaacattaatttttgctatgggtgcttgattgttgtcacgaaaaataaaaaggcaagatcatatatatatagcatgacaattaagaaacaaaatattggataccaacaaaataatgtattttttttttttaaaaaaaaaaagggaaagtaatgtcatttacctatacataatttgttggtttttaaaatctggtatttttaaaaaattgtctctctatatatattttaaagaaaaatttacaaaatatagtttaaatatagattttttttttacattttaataatttttttatttacattttttacaaattttttttatttacagattctcatttaattttttttagaaacaaatgttactttcccataataataactcaaaacaacattattctgaaacaataaataaaataacagtttgtattattatgaaaaaaaaaatacaccttatttttccataacagcaacgtcaaagcaatggtttttcgaaaaaaaaaaaaactttaaaaaaatagtaaaaaaaaagttaattccgtaaaaatgtaaaatatttgcaatttttatatatttttaaataatatcttttctaaataataaaacattattatatatatatgcttgtattttctttctctatacattgtatatatttttattaatatataaaataattttttctttcaaataataataataataatatgtcattttctaataattaagtgagaatttatttttgaagagaggtaacttttagtcttccactcaattgccgcaatgtcatataactattttatgagtagggcataagtcgttctctcctaaagtccaacatagcagcctccttccatttttaatagtaccacgtatataattacggataataatatatagatataaatatatgataaatatgatcaacatataatttatttaaattaaaaatatatttgatgatagttcttgtgagcatatatgcttaagccctaaagactttacagtaggaataattatatgaagtaccatattttttaaaaaaattatatt

SEQ ID NO: 191434 - DNA, 1671 bp, Cannabis indica
gcgacaaccacaattataacattcaagaattgtttcaccaagcggactatctttatgaaggcagacttccttgtgcttggctcgaacctacacaaggggaccaatatacttactatttcaaatatcagataaagatcatactgatatttgctttaacatattgctgtgttactagaaaatatactcataatcatattgcttcaaaaaacaaaatatatatataatcatattggatatgccactacggaactgttaatatgtatacaaggaaacccgtcaaatatttataagctggagtataataggcccattcagaataccaccatatgaaaatgtattcactaatagttaacaaagcacaagacgagactatcaaaatgtttaattacataatcagcatttactttgaaaatatcttctaagaatttataggcttaagaacctacaattgcttgtcattgcactttgggaaccatcaaatacaaattacaaacaaagtcttttgataagttcaggtcaataggtcaggcagaccacccaaatttcaaggaatatagtccaatagaccaccgaggctccttccttcatcaagagaagttaacacggaacaacaactcttaataagggaaaaaaaacccagaagccttacgaatgacaagtcgtccaaccagctttcaacattgcatttaagttctgctttagcaacatatttgtgtaaagttattatgtctgcaattacttcctatgagtcgcatccccaaattccaagcaaaatattctaactaaagtttattaaaaaaaaagacttaaatcattagatgaccgtgtatgtttatgttctattatacttaaaaaatggaccccaaccctaattatcaaaacgaattatgatcttaaaaatccaaaatgcccgaagttttcaatcctaaaatcttgatcatcactctcacttctcagttcaaagttctcgacccaattcgcactattaaataataaaccaaacttaaaaaaatcgagaaaacgaaaagcaactcaccagatgattcacaatatgcgacccagacgtgttcccccgcgaattacagaaccacttacgacacgaaggcacattacacctcacaacgcaagccgggttcgacaccccacaatatctacaagcatgctccgtgaaatcccccttggcataatcataattatcatcatccccagtatcctcaaagttaagcccactcatcccggtcgccaaagcatccacaacctgattattcgagctactactcgcccgtgccttagttgcactacccggcgcagtcgaaaccggcgaggcatcagactggtgatcggacccaggaccagcggctccaccaccgacgcgatcagttggttcagccaacgaatcggaaggcgtaggccaagcaacaggggaccgaatcgagtcccgaaactccgggtaatcgaagtcctccccttgcgtgttgaactcgaggaatgtgtaggcgtcgttgcccgcgtcgggctgcgaagacgtatcgaacagattactctgctgagaatccatcaaaaccaataatccaatagccttagggttttaggttgtggcgtttatgaaataggaaaattcaaacagaaaaaactgaaagaacaaagaggggttagggttagggtttgggg

SEQ ID NO: 191435 - DNA, 3736 bp, Cannabis indica
acaagaaattgggactgtatgctcggccacacattgcataatttccagcaccatagcttccacccacaattatagttacttttggaatctgcacagcattgtttgtaacgttactttctattctttcccattttttctttttttaagattctaaacaaattgtgtgcccgtgtgttatgcacacagcaccgcgtatactaacatgttatgaaagtaaaaatgaagagctaactgtaaagcactggagcattattgacacattggtagcagttctccgtgactatcatcataccgtgggggagttacttcactcttgtattttcaataaaattttgataggaaagttatttaacatattacataggatgcattctttataacaaaaacataaacatatgacaaaatataatttaacctttgaaagaagattatgcaaggaaaaatgggtaaacctattatgaacgaacctttgcacaagaaactgccatgaccagttttgctccagcctttgctattccacctgcctcagatcttgagccaacctaccaaaatggttgcaagctttatcaactttgaataaacttcatactttaatatttttattttttacctcgaacttgctgtgtgaacaaaatactgcagttcatccaaactcccactaaataaaaattaataaatgtaatgtaagcagtaactactctgtgtgcaaaagtgtatttgatcaatgaaatatatattttctggtgaaataaaacatcgttaccaattgtttcaaatcaactctccttctataccataacaaattctgtattaataccatggccacttttctctttgatgaaccaaaaaactcattcagacctttatgggctagaaagattctaaaatcatttattagtatttaagaaaagcgaaagatatgcaaacaaaatcaacagctttcaaaatacactaaatattgccatttcaatagaatacccattgtcctggtctagtggtggggtggggttgggaattgggatgagacctaggttcaaaccttggatctcttggtattgagacttagtctcaattaagcaccaagtgtgcttatgataaaaagataaagaaaaaaaatagaataaccataccctagataagttcacaagggggcatttcaactgggagactctatcccttatatgcttcttccctagttagacgaaacttaagacagatacagacatatttgtatttatatagtcacaaccccaaaatatagtctcttttaataaacaataaattgtcaagcatttcttcctcattctagaatgggcttaagaaaaattggtacccttattcagatatattgaccatggaagaaataatattaataaaaaagaaaattcacgaaccagtaacaaaagtaaagtactgtaccataaatccattgatattttgaaggaagaccaagggaatttttcgttgagcgcataactcaataaaatgagctcctttcagagcagactcactgaacaatataccattgtttccaattattccaactggctgtccaaaaattctagcaaagcctgttacaagggtctgtcgaaatacaatttaatgacatgttatagatagtatgaggaaatatatttgcagaaaaaagtagtgatagtaatgctcttacagtgccatataattttttgaattcgtcaaatttgctcccatcaacaatacgggcaatgattgatcggatatcgaattgctgcttatggtctactggtgctatagaacgaagttcacttggatcatacaatggttcttcataggaatcatatccaacatttatgttttggtctccactatgaaactgtccctgcccagcggtgtgtaagttcttaacgatattcctgccaatgacaagtccatgcagctcatctgcaacaaagataaatgtattaattaataggtgaatttcttgtcctcttagcgtacacctagatacaaagagatttctctcaaataggttaagaaaaataaatgcaaaatatcacatcacaactcatgcacagcttagccaacgatattatgtctatgggcagatgcacgtcctcatgagtgtaaattgaatttacttaaaacaataactgacagtattgcaaacgcatgtgagaggcaatatgcaaacaaattgatttaatataccttgagcaaaataatctgaaactcctgatgttttgcaatgaacatcagcaccacctaaatcctcagctgatatttcttctccagtagcagcctattaaaaaataatctttcaaatcaaattgggcttcctatgaattttaacatccatagaacaaacaactaaaagcaagaagaaattgagaaaaatgtttcaaaattagatgaagcacttcaaaattcagaagggcaggagcaaccttcacaagtgggggtcctgctagaaatatggtaccatttcccttgaccatgacactttcatcagccattgaaggtatataagcacccccagcagtacaagagcctagtaccaaagctacttgaggaatgccggcagcagacattaaagcttgattgtagaaaattctaccaaaattatccttatcaggaaagacctctgcttgcttaggaagataggctcctccactatcaacaagatatatgcatggtaatttgcactcagcagcaatttcttgggcccgaagatgttttttaacagttattggaaaataagttccaccctttacagtaggatcattagccataaacatacaaagttttccatgcactggacctattccagtaactatcccacctgatggtagagactcctcatacagctcatggcctgcaagcttcataaataagatagtcactaacatgctaagttaccactttcagaacactcatgcatctcatcatcttggggttcaaaagcacatcagattatcaactctgaatttgtttgcttaaatcagaattcaaaccaacatttgatcaaaattgcaacccattactaaagacacttgttaccttaaggcaatataattaacatgaacaatgaaggatttcatttatgctatatcattatataatttgctgtaaaaaaacaacaatttgaatttgacataattgttacaaacctgagaaagttcaagaaatgaagctccaggatcaagcaaacgatcaatacgttctctgggaagaagtttgttcctgctcctgtttctcttcacagcttcaggtcctcctccagcaagaacctttttttttttgttcacaaacactcaaaaattaataactacaagaatttccaatgagcagaagtaattaagataaaagaagaaaataccttattgatatgggattgaagatcggacaataaggcggccatggccttggagttgcgagaaaaggcttcggaggtttgatcaacgctgttaggaagaactccaaaggagttgtccctcgtttgaacggccattatgccggataacctccatgaacgtgaaaagggcgatactttcttcccccatatacgaagcattttctttctctctctgtgtgtctatggaaattgtaagctgagtcccaatttattgggttgggcaaaggcagctgagttttcgattgcgtggaattcctatccatttttcggttttagcttttagaacaaatattaaaatattaacatttgtgtctcttaaactcttacatgtactcaattatgttt

SEQ ID NO: 191436 - DNA, 789 bp, Cannabis indica
tttttttttttttttttactacatgatgataatgtaatgtaattacaaggctcataataaattttcagaaaaatctgaattaattttttttttttttttttgtaaagaacagataatacagatgttaaaaaaaatctgaataagttagaatgctgaaaatcaattcaaacaacttattacattttgtttgatataactgatatgtatagattatagattaaaaatagtcattacaaccctatatatatatatataattagagagtggttattctcatttttgctttctgcaggtaatgttgagattatccttcttattcttggtataatttccctgcaagtctgaggcaaacttggaggccttcccaatgaaatcagagacccataaagatatacgctctgctgtctgctcagcaacaccccttcctccactcccagtactcccatggccatgcatagctcctgcgctaaccaatcctaattccttttgttgcttctgataaataatgttaaaataataaaagtaactatgtaatgcaatataagtagaagtgtttctgatctatctaaaaaagttggttttctatctttaccagatgggtctttctttcgctatcttcttcactatctgaaataataggaattggtataacccccactggcaatatacaaatttgtctctctaacaacatagcgttctgcaattttttgtttttttaaaaaatattatttattattagctcattatgaatgaatatacatatatatatacaatgcatgtatactatat

SEQ ID NO: 191437 - DNA, 3951 bp, Cannabis indica
aatcggagtccgaaaggtccaggcctttagaattggtacctcagggacccaagagtaagttacatgtgaatattccattcttgaaaaataaacaggttaagattgaattttcaaaaccccaaaggcctagactatcagaaccaggacctcagggaatctagaagtaaataatttaataaataacctagtataaaagactaagtacataattaaaaccccagggttcactccgttagagctggaaactcagggcatctagaagtaaattcacttagcaataaatttatctaaagatagcatacttaatgaatttgaatcaaaatcatatggaccaatgtaattgaaaaccagtctactcctaagggacaatccaaaataggctaaaagtaattacatgcatcaagcctcccggttagggcgttagaatgtctctgcaatgttaaatagggggaccattgtcccccaaagaaaaaaagaaataagagagtaaaatgaattataaagttgcataaattcagccttgggctttggtgttggcctcggtgaaggatgcactttgcttttggacaatttggtcatgttttgtcatttggactagaggctccgagtatggtacctcctccaaaaggatactgacaagagcagaggatagtatgatgcctccactttctctacatcaggggcaagttgttctttagcaaggagaagagagttgtagtgtgcctcatcttcacccaatgccctcaagttgatgtcctttactagctctaaaggacataaagagcattgacaaaggcgccactcaaatcacagaatcttctctcctccgctaagactaggtcctcctccacatctttcaggttgagctccaagagaccacacttctcctcaacctccactaccttggcattggatgcattcaatttagcctaccagtccttttgagctaccacaaaagcatccttgagttcagtgactagcttcaacgccgtctacagaatgtaaacatgttctattttggcctcaaggtctttagatagatcctccaccctgtcatttgcctgctttagcttgacctccacatccttgaccttggccttgagggcgacttctctcttttccataatgaaggtctggtttttagcctggttgaagttggtcttctagccttcgaccttcttctcaagttttgagtaatcttcctttaatttatggtaatcgtccctcacagaagctatgacctggtctaagccagcctgaagacactcattaacctgatgattcactgtgctttgcatgtggtcttgggcactcttaaagtcagccttggccttctctaagttagccataatctctacctccttaccctcagcagcctcgtatacagcttggaggctctcaagctccagggtcatgtctgctattggcttagagaaatgttcaacaagaacggttacctaaaaagtcaaaaatagaaaaattgtatgagatggttaatatacaaccataaagctcactagtacaattgaaaaatttagaaaagagcacttatcgcaaagtttggtggcagagacaattggcaaggtagatcggttctctacttctaactgtagcctagcgtttcgtactcaactctctgagagtaacaaccttgtattggagagtgtcaataatgaaagacgccaactctttcctgagcatgcccttataatacgcatgagctagagcttggatggaatttagcaggtcctttgagcctttattacccttatcgaccttgcgctttgaggatagcaccttggccatatcctattccgtaatcgatggagcttcgtacctttagggaaaaatttgagaagcctattgcattggagcattgtactcgtcgtctaaggccaaacatggagagaaaggtagctggcaaggcaaccactccctttgccgagaccttcagtgtcagtttgggatttacaggttttagctcctacgatccagtggggttagcttctttgctactctgggagtccctcttctcccaatccaatttcgtagccctttcattttaagcccttcgctgcagagctagcttttgaataacctccactttggccttctttgccggtctatcaacattccccccgaccctcttcagtgggaagatggatctattcgcatcctctttctcctcctcatcatccaccgaggtaatgacctaggcaggaatagatacttttggggccagtagaatctagctaagaggagccaccgaaaggggtataatagtagtcatggaccctaaagtcaccttaacaatggcatccacctcgttaaccagaagggtagccatcatggcgggctgcctagaaccaaaagccttaatcctccgataggcctggctagcgcacaagccacctcaattcctacttccacttcaccaagtaagtcattgcgaatggccatctgttgagtattcaaaccttctgcaaaaaagaaaacaaattgattagatgcatgaagcaaaccaaaagtacatagaattattaaacaagtaaaagactttggtctggactcaaccgttgactccgttgtactaagggtctccctgtgcaaatagtgttatatcctctcgatccaagaaactcccatattggaagaatcccaagtagctcattaaaatgaaaggatctaccctagtgcactgtgatggaagaaagaagtggtttagactttctgcgatcttgtctaccctatccaaataataggtgaccagatacctaagatgatctagcttcagaaagtaagggtcaaagaccccctgatcgttattagctagctctttcaaacctagagcgtgaacaaggtggaaaggagacttatgtgttttgaatgtgctagcaccaagggcacctctatttgggaagatggcgttgaagtgaaattccaactcttccactttgttcacgggatcgagatgggccctcgcacagtcaaccaactaacactggtccttcttgatggcttttttcaccgtcgtggccataacctcggccacaacctttctgatgatagcgtggttagagcaaagtttgtaattatcaggggcatttgatgctttgtgagaagtgattaagcctactcactaaagattcatggtagtcaccaagccctccactttcaaggcctttggagtagtggtgctacacaattttaccctttcactcaggaaaggggtcattgtaggatagggaggttcatctatggagacaaaaataaatcattagattagattctatcaataccaaggaacacctaaaagaaggcaaatgggaaaatgctatcacttacccacaatacagaagtccaacgtcagttggatgcctcttcaacgggaatctagacgagaataaccagtactcttggaagtcatgggtatgcctgcatgaactgacagtgcatttaacatctaaacgcttcttcaacaagtaaaatcccaccttggacatgttccttcacatggggtttgactccaccttataaaagaaaatgatttcctcaagcgaggggtcctccacattcttattcttacaaaagatgaaccatcctgccaataatttatacacttggagaatgaattagaatggtgctagtcctaccttcgtgcaaaaatgcacaaagtagatccaaagataaaggtgcgctccgaattcgacgtgcgctcagctctaggacccaaatacatccacacaataacatggaatgcatatttcaataaaagttctagaataggccatgaatactcctaagctccgcgttctccttataagaccacaataacatgaagttgcagaatttgttctagtactgatgcatctcctagtgagaggaattagctgtgacagtcagccttgctcctccaacatcccaagcggactccttcgcagaatctgcaag

SEQ ID NO: 191438 - DNA, 3023 bp, Cannabis indica
aaaataaaatattaattttttatagatgatgcaaagattattttagtaccttaaaggatgctactattggagatgctttagagcatctctaatgataatattttagagaatgcttgatgaggtagaaaacgtaggtgacaaaatatagtgatgctataccattagagataaataaaatattattcttaaaatttacattgataccatgctatatatggtttttttttttttaaattaaaaattaaaaagtgcattatatataatagtttaatatagaaataaatttatatatatacaataatgggtgaaattataattataacattcttgagatgtgctataccattcaaatgtttttaaaaaataaaagtgtcaaaaataattaaaaaaaatcaaataaatattatatcttaaaacatatttagcactttaaaagaatactatcattaaaaatgattgtagatgctactagtggtgtacgtcggtcggtttggttacattttatttaaccgtaaagatcgggttacaaaaatctaagtgcaacctgcccaattaaaaaaaaaagtttcaacccacccaacgaattggtcggtttagtggggtaacccgtccaaaccaagcactaacatttaattgttatattttagttattgtgataatgagataaatataaacattaaatttaaagttcaaatcatcggtcataaaaagaatatagtagtttgaactttctattttttataaatatgtatataaattatataatatatagattatacataataaaaacatatataaaaaaaactcttttaatcgagttggtcaggttagttcaggttgattgggcgggttaatattattttcaatccactcactataaaaattgggcgggctatatttttattaggtttttcggtttgtattttttgtcaaattatctcaatttaatttaaacggattgttcggattgaacagtttacaaagatttacgaacaaccctagatgctacaaaagagatgtacaatattttacattattggtaattcgtctacccgacacctgtagagggtgcatataataataataaataaaaaaaaaaaaatagcaataaacgtcagaaaccgtgtcatctgggagttgtgtagttttcaccaaccaattcaatttaaaaatgtcatcatcgatgacatatatattaacatgcactgcattggttagaccaaaaaaatatattattatacaaatcttcatccattccaaagtttactatttggtcacatgtattcagatacaaccttccccatgtcaccatgtgcctaaataaatcatggatccatcatattatataaatttttcaatctcatttatgcatataaatttgtgattaaaatgcatgtgttaaaccctatataagtattccctaaaaccataagccaaaaccacctcttattatatgaattaatttttataataataattaccaattattgtggttttgctctaccaattatagtacttctatagtatacatgtattatcatattgtactacaatattatgtatgagattgaggcaacaatgctatccaattcaccatctccaaacctcgttatacccaattttcatagtggtttggagttgcatgatttcttcgatggcacccacaacattattagtgaagatcagtttgtgaacctattaattcgtggggctgaaactgatcaatacccttttgttaattttgatcactgtgattttattaatagcttcgttgacgatcatcatgatgatccaataatggttccacaagaccatgtgtttgatttcaataaaggaattagtactgttactaaagggcccataattaatgataatccaaataaaattacacagttcatgaatagtagtcttgctatgccaacttttgatcgccatcctcaggaagtaaaatcaggagatggtgatgaaaatcgtggaaatcattatgaatgtaataatgataaagaggatgaagaagaagaagaggatgacgaagaagagaatgatcggcaagagtcttctgaaaccaatactggaagtacaagtgcaaattcagccaagaaaaccaatgtgaaagccggtgacaaatccaaaactttgatttcagagaggaggagaagaggaagaatgaaggagaagctctatgcattgcgttctttagtcccttttataactaaggtactgtactgtactctacatacatatatatatatatatatatatttaatgtatagttcattatttcttatataagcatataaacataaaataggccaccagatttagtggattaaattcgctgccagatatatggaactgtgtattaactatgaaaccattgtcaacaatataataagtactctcatatctaaaaaatatgatgatcattattgttgtgtcatgtacagatggataaggcttctattgtgggtgatgctgtagtttacctgagggacctgaaaaagcaggcaaataatttgaaagatgagattgcaagtcttgaaacttcttcacttggatcacatcaaatataccaacaaaaaacatccattaatagtaacccaactcagattcaaatttttcattctaaaaacaccaatattaatcaactgattttcaaaaaaattgatcaggtaatacgattttaatttcattacataatattatatgtatgtatatgtatttgtataaatttggatgtggggtttttgtagatggacatttttcaagtggaggagagagggttttacatgagattagtgtgcaacaaaggagaaggtgttgcggcctcactttacaaggttgtcgaatcgcttactagctttaatgttcagacctctaacttggcttctaagctcgacggatttgaactaacacttactttacgggtatataatatttatcaaatgtcctcattttaaatttcctttaccaagcactactttttctctctttttattcattattactaaggattattgatc

SEQ ID NO: 191439 - DNA, 2246 bp, Cannabis indica
tagagaaatcagtattccaggtgaaagatctgtggtggctaattttgagaatgaatgtccggaggaaagcttgtaatagtttttcaaatggccttttgtgttattaagggttattgcagctgaactgccataaaaagtcatggctctgtttatactactctttcctcctaaaatagtctttatcatgtgtgttgtcatgaacaaagctctatagatttcaatacttgcttgctctaaatttggttggctgtgacagcctttacattattacagatgattcttttagcttgcatttttgcatgttatttttaggatttttttcaagtcaatgacaataataaattgaggtgacattctaagacactagtgattagtgacctacattcaatagagaaattttagttttttacatgtaggctcttatatcttattgttaagaaaaacatatagttcttataatatttattgtaccttttcaggttcccgttgaccaaaaacttccttcattgtatcttttggacagtatagttaagaatataggtggtggttatgtccagtatttctctgcccgtctacctgaggtaatctaacaagattaacaaactgttgtgactgttttctcagatgatataaatgaatgtataaaagttatctcaagaatctctagtaacttgtgcttttagctcttgcttaggtcttctgtgaggcataccgacaagttcacccttctcagcatcctgctatgcgtcacctctttggcacttggtcatcagtatttccaccagctgtcctaaacaagattgaggaacaactgcaattttctccatctgttaaccaacaatcatcgagaatgcctccactgagagcttcagaatctcctcgaccaactcatggaatccatgtaaatccaaagtatttgcgtcaggtggaacattcagctgcagaaagtgtaagttttttcagtggattatttcttttcaccacctcaaaacattagggatttggctgttaatctatttggattatatatttacaatcacaaatatccaaacgtgcagcattgtctctagatctcaactctaatctccactatgagaaacaaggaattgtagtaaaatcatgagaaaactctcatcaagcgtcctcacaccttctttaacagaaagtgtgtgggtcgtggctcccttcttctttatctttacatacgatcatttctaaaaatttgaaacttatcttccaaaatgcaatccactctgaacaatcatggctgaactagtttgtcaagtggtcatgtcaatttataattttgaatgggacaaacatcaggctaaaggagtcattttgccttgtactttggaattcattatagtgacgtccttgaatgttgtgggttctggatgaaaactaggaatgatggagattattattattattattattattattatgtcttactagttgtgtatcggttgattgataaattaccttagctgcaatgttaaatatgtaatctgtttacaatattttgcagcacatgcagcaggcaggcagggcttcagctctgaacatatatgctcaaaaacctggcatagggtatgcagaattttattctggctgaatctgtttggatttttttttccttcaattaattatcattaaattgttttgatatatttatctctctatatatatgttttaaaaacttggcagaacaattggtagagatgatgagcttggtaaatggcaacgaaaaccgtatcataatcagaatcagtttgaaacttctgcagcatacaaagtcagtaatggacgtgagcatcaaggaccaagggccttaattgatgcatatggaagtgatgacagaaaatcaactttaagtgataggcctttgcaggttgagcgtattgacgcaaatggtttggagcatagggcttctttaatgtcatggcagcataccgaagaggaagagttcgactgggaagatatgactccaaatttagcagcagaccgtggtagggctggagaattcttgccatctttgagaagttttaaagcaaggccaaattttttagcaccaagaactacccatgtggagtctgatactcggaatagttggtcaagtcaggcgcagctacctgcagcggatgattcctctattgctatggaagatgcagtccctccccttggtgtatgcttccttcatatgttctcaatattgtttatacgcatctaatgaaattaacgag

SEQ ID NO: 191440 - DNA, 4566 bp, Cannabis indica
catccatcttcataactctttggtcttctaacatatcaaggcttgtgcttacatatggattttgcaaatagtacaccagatgtagctcaaattattacccaaagaagcactcaagaatgagacccttggataatatctagctataaagatcttacactaagcgataggtttaagatcacccgtagacttgggattcttcttcctaggactcacggcaatattagtatcacacaagccctcattgaaagaaccatatgcaaaagaccttttaactgacacaacatcatggcctacaatgtgctagaatttttgaaagaaacatgaattcttacaattaagccctggcgacttgtattgattcatctagaatatagtatctttaatctcctgacctaattaaggattcaacaactcctcattttgttctgtagacataaatggttgaatattctccacattttctgctctttcagggttagatttcgaaaacaaatgcttgaaataatcaaccataacattttccagcccattctccctttcaacccattctccatcattctttttcaatctatgaattggattatttctttttctagcactagcttgagcatggaaacttactgatttggttgcctaacttcaaccaaaactgctttctgaccctttgcctccaaaagatctccttttgatccagagtttcagatagtttaccctgccctcattaaactgcctgtgtactcaaagtccccattaacacaaattaacacacttgctaaaaaaatcacactcagaataaatctcccaactatctccttcactatctgctggcatgttggttccctcaaccagcattttagaactttaatttcttatttacaactggagctaaaccatatcaatttactcatgataatcaatcttgaataagccactctggatacggggaacctcctcgcttatctcttggcttgtcacattattcatatccccgactatacatcatggcatggaactactttcagccaagcttctcatcaacttttaagtttgttgagaattaggttctctatataagtcagtaagtctccactttctcatgccatgcaccttcgtcatcacatccatgattcattgagaaattcaacagactgtctctcctttcaaacagtctaaatgacagaaaaaattcctctgttcagcattttactctattcatgatgcaaaactttcaattttatgcttttatttatattgcaatttggagactcaagattaattgtgctcatcagcttatttgttaattgaaaatttcatattagtactaaaatttcattgttgcgctaccaattatatcttttctatcccaattgtatttttttattatcagcatgaactcatgcaatgcaatgcaatgtttgactttaggtactctccggagcagttatataatgttgtcgccgctgttgatttgtatcacgactttctcccctggtgtcagcgttctgatatacttaaacaatatcctgatggatcttttgatgctgaactggagataggctttaaattttttgttgagagttatgtgtctcatgtagaattagtcaagccaaagaggataaaggtataaacttttattcgacattaatttggatgaagtttttcttttgcttttggctctaacttcatctgtatgctacaattgctactttttaactgattactatttttgcatgtttatattaatgtgtttgtgctgccactgagggcgatgtataccactacagggaatattaaaactaatttttgactatgaaagcagagtcctatttggtttttaatgttttattaggtttagaaatttcagtttaatggaacattattccagaggatcaatactcctgtcagtagcctgtttttgattgtgtttttatagtttcatctttagcaacatttaagggtgcgtttggaaagccacaatgtaattggatttgtgtgtaattggaggtaattacacaatttggcatgtttgtctgaccatgtaattatagtgtaactgtgtaattggaagtaattgaggggttccaattacactctccaattctcatggccccccatgagaattgaatgtaattacactgtgtaattactaaaaactttccatattaaacattagctattaaaaaaatattattttcctatataattactaactattttgccaaacaaaatattaggaattcatatgtaattaccacctcatatccaaacactccttgcattttaaaatatagtgtaattactaaactgtgtaattactaccctagtaattaccctacctagtaattacacagttacttccaaacacacaatgcaattcatgtaattgtacaatgacttatatcatgtgttctgttcatcaagtttggagcttacatatggctcataattatattattttgtaacactgtttatttagttttttagcaagttgcttatgatcatagcctctgtttctatttttgtttcagacaactgcttcagatactacactttttgaccacttgattaacatctgggaattcaaccctgggccagttccaggatcttgcagcgtttacttcctggtagattttaagtttcagtcaccactttatcgacaggtaagttctatttttgttcatttactttccggatataagtggcgtttatttatttttcaggtggtatgtaacgccccaatttcttattatgttaggtgcatgattttcgtgcaaatagtataagatcaaaacctatttaaacaaccattttcagccatatattaagaaattgaagtcattaaaataatcacaagcctgagatcccataattgaaaataaaataataatttaacaataaaagtttgtgaatcctaaaatagttcaatgagatttgatctctaaggacgttaaatcatatagcatgtacgccctctgcttaagtcctttctcattgatttactcgtgagctaacgctcagcaagaagctgtgaaggacacaaccctaaatccaatataatagaatcaaaacaagtcatgtcatcatttagtctcaaaaatttcataacaacacataagtataacaataacgcccttacgacaacccactacctttgtgataactttactgctagtctgctaccatgcacgcatcatagttcagtaaaatttaacaagctcaatgcgaatataaacaacggaaacacttctgtagagcttagagcatacaccctgtgacatgtattcactcttcttacttgaacttccagttccagcagtgacaagatcagctcctttccttgatctgctctaaaagcaacaacatttactcatgaattttttagcactaaaactcaattaatgctctatatgattaaacttattttctctaagacctaatcaacctcaaaatattttgatcacaatcctaaacatccaaactggaaatccccaaacatccccattaagctttcaagcaaaatgagaaaagtcatgtttctgggcaaacagtgtggtgttgcgctcgacgcaatcccagcagttgtgaattttccgtccttgaaacaaatcctaagcacttgaaggaaattgattatccattgttttttacgaagttctgagcaaccccaacatcacaacataaaacatatatttttcataaaaaatgaaattacacatttcatcgtacgatcatttaataacatacacacaatgtaaaactttcaaaatgcccttaaagactacaaaatcaccgaactactcttttcaagagagcggactatatttaaacttttcaattttattattatatcaaggacattttacatttttttttgggtaagtataatttcagctattagcggcacatttgttgaatatttgtcattttctgtagttttatagaaaaatatagtatatatcttcttttgctgccatgccacatcattcaccaatagcgggagattgtacgcatatactaaacatttgcttccttcgattttgagtctctctctctttgggtgttaccttttatcttatcctctcttgatcacatttgtttttgtttagacttggagttctagttttcaaaagtatcattaaacaaatggattgttggtcttttcattttctgtgcgcttaatattgaaaatagaatatgagataacccttggttggatccaatttgcagctgatattttcaggttatgagacttatttctgcagtagtgaatgtagttgcatttgtgtttttgatctgcagtagataaccagtccattttatttttttgctagtatgacataggtgatttgtttgtcaggtggcgtccatgttttttaaggatgtcgtttctagattggttggctcattcaatgagcgatgccgaataatatatggaccagctgctcgagttcttgaaaattcctacgagcatggcgtctgagagtttgcaaatatgaggttagcttttctttgcattcttcctggtaccctttgcagctatactgatgctgtttcacagatgaaaag

SEQ ID NO: 191441 - DNA, 1104 bp, Cannabis indica
ggagatgctgtagacagagatggagaagacgatggtgtaggtgtagccattattgataaccaaaaaataattaagaatgtaaagaagagaatggagtaaacaagtttaactgaaaaagttttaagtgaagaagagaatggagaaacgctaagtgaagaagagaatggagaaaactaaagagaaaattttttaaaaaaatttaactaaagaaaacgtatatataatatgatatttttagttttttttaaaaaaaaaagaaaaccgaagttcaaatttaaatatttagaaaataatactatcaatcatcaatcaattttaatcattattcaaaaaaaaatcaatcaattttaatattttattctatttttttcccaatttttttttctcttttattctattttttaataataaaaaattaaatatctaaattatgaatattaattaattaaaaaacttagttgcataaaaatctaaaacaacaaattcatacctttattttattcttttaatataaaatatacaataacccaaaaacctaaatctaactgaactgttatacggaaataacaaagtctcgatttctcttggacgaaatcaaaatagggcaatggagattggagactcgcttttgaagatcactctaatggagttggtgtgctctagtagattgcattccgcttctcgcaacaacctccgtcgataccggatgaactacagattgataaaaaatgaaagcgattcgaaattcgatgggtcagttgaagtgcgaatttcagctgcgtgcatatcaaacatctcctgagtgaggtgattcaatttctatttctatctaaaatctctaaaaaagttttgtataatgtgtgcgatttttttctttggcgtgcatttttgtttttactaacttaatcaggattgaagtcttggcttctcttgataatgatgtgtttgaatccataaagctggcaaaggtgcgtttagaagtaattttaatagagaatttcaatggttttgtaatctgttctagataaggtgtttgttgttttgtcttggaaattgggtcctcactactgatgtcggagatggaaagcgaaggtagttcaattt

SEQ ID NO: 191442 - DNA, 2164 bp, Cannabis indica
ttacatccaaccaagtttcctatttcctactttaaatgacacgagctgcttacctcaaatcaccaaataacattacattgttaaacacaactttttttgttccataaaagaaaaacaatcaaatttcgtattgaacatgcaaccgaaaccaaacacaacttgtttcattaaactcgatttcattggattcgggaaactaaggtcatgttctattaaagcaagttttgaggtaaggtggggtttccattatgtgcagttctcgggtctagctcaatatcccaatccaacatggattaatatgtaccaacggaataaacaaatcgtcacaacaactattgactttacctacaattgttatagtgatctaggaagtaaaaattccagagttcatggcactggaacacagtgaacttgtagacaaattaagagtcggtcactcatgacacctgagtattcactattcaaattctgaatgtgctaatgccacttattttcaagaacgcgagatcagtaagaaatttatactaatataaatgcactatacatgagcacagacagcattgctgagaaacttgagaaaatgttggagaagcagcataaggagctagttgagcgcaagaagaagcatgaattaacaaaaggatttagtaataaacaaggtgaagattcctgactttatattgcaaataccaaaaagttacagaattatgcttctgtttgaattagaagctaaaagtccctaatttttccagcttcagtgcataacaaagactatatatttgctcatcttgcaataaccttttggtaatgctaagagaaaaaaataaaaagtgttactacctcgaaaaagtatgagctgggagcttcttgactgattcagtcatgtttttttttaacaaggctaactcaaactcaagctttaaactgagcaatccactattgccttacctaaagattaaaggctaaatacagtgtgtgatgttgattgaaggcaagattcttgtgaaatggatcaagttaaagcttgataattcaagtgtgtaatgtattacactattgccttaccaaaagatcaaaggctaaacacagcgggacgcaaatcaaacaataataatgtgtgtgtgaatctgtagatacttcatactgaaattagttgataaacgagttttcggtttgcggaatttgatattatgaaacttcaggaccaaattgtgtatcttaacaatatgtaatttctttttatttttttcgaaagaattagcaagtaaaaagaataacaaattgtaagtcttatatgggccattttcaatggaaagtggttccttctgtatcaaaaaaaaaaaaaaatacttcatacttgtacaggtttctaattctccttgtctcaatttgaaataccattgccagtaactaatttgtactaactaagattattcaagtaacattgcaattattaaaataagttcaagtttttttctttccttttccttttttgttaaataagtttcaaggcaagggtaaacacagagctaaacacatatgcatggaattagaattttgagatatattcaaccaaaattgataattataaaaagagtacttcctactactctgtatatggatatggaaaacacttaaaacccattcccagtgaaactaaccaatcaaacctcatcctcgttgagaagcatattggggatccccttgatgaccgggaaccggcgaccagtctccgggcagaagagcgcgccttcttcgatgtgaagttggaggagcgcgtggtggaaacggcgaaggaattcatcggagtcgagcatggaaggatcaacctcgtcggggagctcagtgtagccgattgagcgagaggcgtcgactagggctttccagtcgatcttggagaacatggatttgagaaaatcggggttgagttcaacctctctctcgacgaccttctggacttggatccgtagagggaagccattggtgacacccttgatgttggaggatagcatattatgcgtgagaagtctcatattgtatattgtataactcactcttcactcttcactattccaaatttcagtttcagagactggtttggtgtgggaggagaaggaatagggcaaatttcacttttctcgttttatttatttatttgtttatt

SEQ ID NO: 191443 - DNA, 3221 bp, Cannabis indica
tttctagattcaaatcaagctgcgaaacatggagggtattatcagaactgactatgaataattgactagcttgattagattcttcaataaatttttatgacttctccacactaacctggccatctccatactcaacattgagatgaatcagagaagctgtgaactcggcataacgcctcattacatagtgaggatgaatatcatcttcccacaaagttctcacgtttgcattccttaggctattgagatgcatgtcaaacaccattttaaatcgaggccataagacaatgttgatctgctcaaagtaaatcatcagttgaagtcagaatacacaatttaccaatccgacaattttaacacatcccacttactcaacacttgatgaatctattttaggctataaggattattatgttcacacaaactattgaaggacacaaacacaggtgagtgacactgaaaaacaatcatctatgggtacttgcatgcagaaatatgaatatgaaacaaatattaccttgtctaaatatgaatccaagcatggtatccgtcgccttgacataataagctataaaaaaaatgtcattatcaaataaagaaatagatataagggcttactcagagcaatgcttgtattactgtggctgctatttttacacggtaatacttgcattactagtttaggtgtatgattgaaataatacctgatgctggtgtatgatgcgaatcataagcattaagcctatagcatcataacaattcggaagtattgaattgaaatgttcatcaatgacagcaaatgggcctgatatccgagaaattattttaattagttatttaacaccatctctgatatcataattagttattctaatatgacagcaaatgggcctgacatcataattaattattcaaaaaatccaatttgaagatgtgaaagtaatgccacagccatattgtatagctttagaaattaattttgctgccatataaagttcaaacatcacaaattactagaactaatgctgttttccattgcttttttcttaaaaaaatttaacatctaaggtggtagcactcctaaaagtagcgaagagtttatcactgacaaagtaaccatgcaggacacaatagaagttcagaaggaaccacacagatgacgctttcattttcaaagtacatttagtatttaccggcaaaaatatcatagaatatagattcctccccaaaaaaatcaccacagaaatgatacctgcagattttaaaccagaaaacttagtgaacatatcgatgtggactatatctttgtctctttttctgaatattatacgtaaagatattaaggatcagggaaaaatcttcagtactcagaagtagcagtatccataagcagcttgtgcaagctccggaagaggacttcgtaagggtacttgctagagctggcttcagctatatgtgggattaaagctggttcctcaacttcctgaaaaaagaaaaataatgaaaactgagaatactataaactgcaaataaaacttatttgtcttcagtgaaaaactcacaaattattttcacagttttaagtgaattaacaaagcataaaaatgagaggaaaagaataacatgtttgaataacctttaaaattttacttctctctccaagagcaaaaacagcagaccggttcttcagtggttctcttcctcttgagaatagactagtatttcttgtatctacaccaatcagatcactcgatgtagcaatgtccaactgtagtttctctagggcctgaatataagcccggaaatgggcacctaaaacctgtaatcattcatcacacttcaatatatgcaaggaatattttttattacattaaaactaaatcttctaagaaataattcataattacaaattgaagtacaaaaaggaccttgttcattgtgtcaatatatgctccacgaacctcaacatacacctccttgccattttccttgagaaaggtaacaatatacctacatttccatggatttacaatatgaacaaaaaataaatgtcttagcaagtttagagttgagagatgttggaataagtaaacactgtataatatgataataaaagcatgcgcttaaatgtaacaaaagcattagcaaccataaattaaagagaaacattaacaattcaggaaaagagaactacaggatgttaccagaattactcacttgtacttcaaaagaatgttctgttgaaggatctggatattagtttttggtttttctcaatgcgtaaagcttctgaacaatgaagtcatacacctgaaaaaagaataaatataataggctcactgagattttaagtactaatcaaaggtcctttagtaaccttctattttctgcttttcttatcaaagcttgttaaaagaaaacctccaccattttttttattgctcaaaactaaaaaatcaagtaaaaatgctataaagcaagtttcaaaacatgattaagttgatgaatttaacaaaaaaaaataaaaaacaaaagaaaaaacacacttatggggctggctatgaatcttagcatcataattttaattaagacggagtacttccaatccacagcaactacgcaaccaaaagttctataagaagacatgtacataggtaataaattatagcagccagtatacatatcacatgcataaagtttgccaggatacaagtacagcataaacgttttagtgaaataattcctaaaacaaacgtgaatataaaagtaaacaatctatatcaggttacgctggtaactttagacgtaaataaaacgttttagtgaaataattcctaaaacaaacgtgaatataaaactaaacaatctatatcactggtaactttaaaaactcacccttgaaactgctttctgtcgaagtttttcaagctctggttgaacatcttttagagcttttgacattttaaccatctgatccacttctacgaacttcaatttcttgctaagaatctcaagagttctcatatactcatcattgacctggtgtacaaatgaaatcgagtgcgttaaaagctgtagaatgtcagggtcagattaagttccacaataataaaacaccagaaaataaatgtacaattcatcgtctatggacatgttcaatgtaactgcatttaagaatttaatgacttctttataaaaaaaaacacaaaaaaaaaaaaaaa

SEQ ID NO: 191444 - DNA, 816 bp, Cannabis indica
tatttttgacattataaatttttcggaattttctaaaaaattacagacgattatcttatataagtataacgtatgtgatcataaaaaaaaaataaactaaaataattttctaaatatcaaaatagataaaaatctaccaaaacgaactcttaaagagatttactactgaaattttctaaattataattacaaacaaaattatcactatattataacctaaactattttattaatacataaaaaaaataataataaataaaaaaaagaatcttatatattgacagcatgcaagacctatgtatatggtaactaatttaaactttcctaaaacaaacaaaaaaacattaattaatattactataatagtataatatattatatacccaatttaattttcttatgtcactaattttagatatctcacttagatttgatcaaagagttcaaaaaccaatcacacactccaaaacttacacataatgacattactattattatttgatattacatcataatatataatcattttgaaatcccacatatatatatagatttgatattactataattattattagtttctcattttttttttgttttgtaagtaataaataaataataaatgcccacgtggcttccaaaaaccaacacgcccacatggcatgacccaaaccaaacccacttgttttaaccctaaacgagtccactcagtccatttcaaatcaaaatgtttcaacgcggctatttttaactcaccaaaaccccactatatatataaaccccttttattcacacaaatcagaaaccaaaaaaaaa

SEQ ID NO: 191445 - DNA, 1283 bp, Cannabis indica
actaagcttcctcctgactcgaatgtctacaaaatacatatcatcatatataatactgaacctatagatagtaggtgattaattaaaatgttatcaaaatccccaagtaaaatactatccttaccttactatcttacaaacgaaacagtcagaaacccatttcactggacaacaaagcattcttaattctcaaattcttccactaataatcccttaattaggttcagctcataaaatattttatacttatcatatagaaacacacaaaagaagaaaaaaattgaatcagataaaaacaacacaaagaaaaaattgaatcactaaattatagaaactacacagaaagacgaagatattgaattcacctgtgggagcttgaagcttgtcacccgtagccgtcgttgacgagattgagtcttaggtgggagtcgtcagtgggctgctgaaggaaagggagacatggagacagagtcacagacagagagagagatcgagagagggtgggaactgggacggagacgtccgcggggctggcactgagtgaaaggaaatgacgactgcggtctcgagtttttttaaaaaatagcaaaaaatatgtatttttttttttatttatttcataggaaaattgagaaaaaggtttaaaaatatgagaaaataaagataatcaggtactttgggtaaccaaataggtaactagttaccatactttttatttttattttttttttaattttccaatattaacactctctcgtgcgatgccataaaacttgggctttatatttggtaagagggtgctaaaaagtgaatcagactcagtggccattgttacccaacagcctcgtcatcatcataaactatactctgaaccgtgaacagcttttccatcttcatcttctccgtctttccggcagctggagccgtcggatcatccgaaaatggacgccctctttgactcaatcaacgttcgtgatctcctatccgcacacgacctcagtgacccccaccacaccgctctcagcacccgatctccgcctcctcatacagcgtctcgaatctcactccctccaaatcaaggccaaaaatccagtcttacatcatctctcaccacccaggactttctctaacctcttctccatttccaatgacgccgtttcccgctccgccgaactctccggccgatgtctccaacctcctcacgtccaactttccgaccgccccgactcgatgcccgagactttccgtataccgtcaaggaaaactgaaatgcgaagactgca

SEQ ID NO: 191446 - DNA, 1790 bp, Cannabis indica
cttcacctcacctttcttagttacttcctttcttaaatatgtaaataaattgtcaaaagaaaatgttattttaagagtaaaagtaaaaataaagtagagtatttaatggtgacacaatattattcaatatatattttttttttggctaattagaatttttgtccataaattttgacatgtaccaaataatacccatgaacttttcaagctgttaaaaattcctcttaaactattgaaattgttagatttaagaaattctgtccatttttattcaattttgctattgtggcaattgtccatgtactaaattatgcccctcaaaatttaatatctattaaagtataccttttgaaccttaatatgtatcaaagtgtactctaaattttcattcacgccaaactttaataaaattagacaaaagcccttaaattcaataatttcaataattcaaaaaaaaaaattgttaacgacttaaaaaattcaagaacataatttgagataaaaatccaaattaactttttttatgtttgactatgactacgaacaagcaggtttcactacatggcagtagcagacaagaggcaaagaagcatgcccttacctgatgaccggttaccccctagaggtcaagccttagcatatcctgaggctgttttgcttctcaatcctattgagtctgaattaaagggagaggtcaataattttattttaatttaattattatatttgttactttaaattagttacttaaatttgtgtaaataaatatgtttaggttgatgacaagtatcagtattcatgtgagaacaaggatatcaaggtccatggatggatctcaaaggagcctagtgtgggcttttggttaatcacacccagtcatgagtaccggtctggtgggccacttaaacaaaacctcacttctcatgtcggcccaactgctcttgcggtattataaggattatttacaccaaatttctaatttttttaattttttattttttattttttactgtgaggtagaattttttttaaaaacactgtataagttttatatcctgtattaagtttttactattattttaggattattttttagttgttctgttttgtgttcctgttattttataaaaatataatattcttgaaaaaatttgcgtttgataatatttttgtacaaataactcaaatttgaatatttttttttttaagttttcctattattataatttattcctgtcttcttttaattagcaatttgtgtacatcaattacatgattcagtataccacaacagatttatacattgtagacatatgtacttagaaaattgctaagagttacctatgcattttatgattactacattaaatatgctataagagaaaataggaaaaaacagtttagaatcagatagtgcttttgttaactcatccactttaaagtaataataaattatatgtaaaaatgtgaatgataaatttagacaattgatgtaatgaaagattggtccaattcgtacgcataaaatatatttagtttatgttaatattagtgaaatgaagattaattatgttaatattatgtgattaggtgtttctgagtgctcattataccggagatgatttagtgccaaaatatgatgaaggcgagcagtggaagaaggttttcggccctgtttttatctatgtcaactctttatttgatggaaacgaccgacttcaattatgggaggacgctaaaatacaggttcaatcattctcactactttacccctttcttaatagttacat

SEQ ID NO: 191447 - DNA, 2314 bp, Cannabis indica
tttttttttttttattcttagttcttatgctttttattcatttttaacttaatcaactgtactatcattccctctttcttgtctacagttctatacacatctatctttgtactgaatatcaaaagttgtaattttatttttatttatgtataatatatattttttgtctattactttattctttctaacatagagtgtatatgtttattaaaaaatcgggttagggatatcatggagatacatcaaagacatttctttgcggggatgtgagtgatcctattaaacgcctagtgcaggtaatttttttataccatagtttcagaaattattatgctattcccatatatgccagactcttatgttattaatatcagtcactaaatataattggtgcttttgtctatgtttaatgcgccataacttcatttggtcgcaggtaacagaagaatgcttggagaaagggatagccgtttgcaaggatggtgctacctacaagaaaattggaaaacgaattaggtatttaatctagatctagagattgcaatcaggagtaagctattttttatgagcacatatatgtgaatatttatgatatttttttttatcgaaccatcttacatatacatttttgagttacacaagctgggatttcgatctcaggactctccccacacacgcacccccactaaccccctatggctagcctcaagtggttgaatgtgtatgatatttagtttcaaagttcactgagaaagattattcactaatccatcggagtcaagagacaggtaaattagaatggtgtactgctgatgaatgataacctgtgctagggcgtgttcgtacttacattataacatattatagtataattgtgctgacttgttcttgccctgtctttctcattttctctccttgcctgtagaagtttttgacattatttttttccttgttagtgagcatgctgaaaaatatggttatggtgtggtagaacgttttgttgggcacggcgtaggaaccgtgtttcattccgaaccacttatattacataaccgtaagtatctcattttggttttgtgttcctgttaaacaaagtggtatttcttttagatacaatggcctccatatgggaaacacagcaggaaaatattttaatgaggatatcaaaccaaaatctcagaattttggaatgtcacctaatatatcatttgctaagatcagagagtttgcttaattaattccaaaacaaattgaaagaaatcagctattattttcttaaatgaccaaagtgccatatactagagtttagggaacaataaaggtaattatactaaaggcaatgctgaatttaaatgtgaagatatattaactcttgctttagcattttggtccctaaaaaaattatcgtaactggtgatctatttcataaatttttttaggttgataggtcatgtagtaataatttgaaattgaataggcaaaaaatgttaattataccaactgcagcattctggtgtcatgtcaaaaccaagaaaatattagctttgttaactcttaaggcttgctctcatgcatcgtttactgttgtatttagttaaatctgttaattgcaattggattattttaatatttgacaggaaatgagagcactggctgtatggttgaaggtgaaacatttaccattggtgagtgcatgaccgtaattgatactctaaaattgcctttaatgtcacttattagtaagaaaataaaagttaacatctagcataagcattgatgaaattgtattttattcacaaccaataaggctagtagattttttgttttacttccctgattaatgattatacaaattgtcatctcgtttattgcagaaccaatccttacaatgggaagtaccgattgtgttacgtggccggacaactggacaacagtgactgccgatggtagccttgctgcccagtttgagcacaccattttgataacacgaaccggcgctgaaattttaacaaaatgttgaaaaggtaaatatatctatgcttgtatatagaatgaggaaaatcattttctttaattgtagatttgaatttgaacatgtttcaaaagttcttagataggaatgtatttacaaaaacaaaaaatgatgtattacacttcattaaaatgaaaattcgttgaggagcacttttggcttatagtttagttctgtgtaagcattttcatttgttaaaacctatcaattcaatttaattagacctggattttgcttgaggtcgttttcagacatgtagaccagtattttttgtttcatttt

SEQ ID NO: 191448 - DNA, 5932 bp, Cannabis indica
tgaatgcatacaaacaaaaattaaactgcaaaatttattatcttaaatatgaaactttaggaaattgatcaagagttagacacatgagatcatagatgccaaagtaataagaaaaagagaggccaagaggagtactagagattacagaataaaagccactaggttctgctcttagtacctcaattaggcaccaattgtgccaagttcaaaaactaagactgactttaaagcatcaaacaagtttattaaggtgcacattagattgtatataagaatgttgtttagattgtcatctaatgtggagttaaaatacaaagatagtttccaacaataatgaggtaaaaatgcttgtatattgagtattaacatgggaaaatcagatgaaaaaagatagtaaatataatatttctgatcaacttgacagagagataaaacaatgattattcttcttacatttactctttctaccctacgcatttcatcttcgagcagtgatagctgagcagcagaagtccagtggatgcaatcaaccgggctgacacagaagaagatttcacaattaatagttcaaaatcaattaagcaaatctatccagaatttatagactgaaagattttagagacttccaactttctaaaatcagtacacataattaatagacatgaaaagcctaccattgtctacaaatttcacaatgatttaactgaccataaactataactgttggactgaaacttactaactgcatatattttagcactgcccctaaaagaagttattttctggatttggaatatctttctaccatttaaaatatcagataatgaccactattataagttaagtttctttctccgtatttgaggactaatgattggccatatctacaaaaagaaattgaattttctcacaatgagcaaataccaaaatgcttctggctactcaaacttcaatcaagtacctattagacaactacttttgaggttttgatggtacatcaagagtattaccagcaccaaagcttgaacattaactcattgttttataatgataaagatcaagaaatcgacatggaaaagatacaattatcatatcaaggtagagacgttattgaaccttaaatagaaagtaattcacatgcatttatcttttattgtgacagccacaaaaatggacctaccaactctcaatcgcttgctgaactaattctacgttcccacattggttgtatactctagctcttccaaaatcgtcttctatgtcaaatacatccggagcaacattagcacagtttttacaacctgcaaagcacaacatagagattaattccatttacagagatcttaactctgacttgtgcagattccacctacaaactagtactctgcttcattttcattcatgacatacaataatcataatcatcatacaacaaaacccatttgagaaccaaaaagtcataatattttcacatctatgaaatctacaaactactacactaactgccctgatgttagtctttgaaatccactggactaatttaacagatttaagccacttctagtattttgagcatattagaagcataacttatatcacaattttaccaaaaaaaaaagttctgaagcaatggaaacagataaaatgataccttaactaatcaacaaagtgataaaattctaacctatgcagctaaactcgtcaacaaaggcatgatcttttgtgcttgaatcatcaaaaaatgggttgatcgcagtcaatgcatagccatgaatttcatcatatatcatgcgttgaacggggtcactgagcacctgcactgaaaaaattccaattctagtgaaagcacaataatgaatttgaaacaacagacttgcttgaagcttaaatcctttcgcttaaaatggaaacccaccgcatagacttcgttaataaacatgcaaaaattattggtctcttgatcattgccactcaaatccggatgacaagctttcatgcagttataataagccttttttatctgtgctggtgtggcatctgggagctaaaaacatgaaacaaccaatcattagacatataaaattaaatattcagtcaaattaaataaaagaagaagaaaaaaaaaatcaatgggaaactgagtgcaattactaaactttccatttcaaatgctaattattaaacactattatttttctgtgtagttgctaactaccttgccaaatacaacaataagaatgcatatgaaactaacacctcacattcaagttaactcactttataattaaaatagagcaatgacacacttttgtggcaaattatttcatcaaggagacctattttaaatgaagaaaattagttgaattttttttgcgattgtcgagactttgcatgtgcacatataattattctttaaccttaattactattgcacttctacctagtaattacacttcgatataagtaattagaagtaattgaagtgttctactttttgctaatcactaatagtcattacaatattttaaaatattctatgttataaataataacttgtattttaaaagacatactcttaaatttggatgcctttttcattaataaaaatcaccatgttaataaagaagagatgtcttaaatcctatattgatgttttatattagtgtttagtaatgatacttctataaactactcgaattaaattctaaagattctttacgttcccacataatctcgagctcttactagttactatatatccatgttaatctaagacatgaaatactagacatacttaataaatttaccaaaggagttaacaatttacgcagctaaagaaacgttcaaacattcaaccaaaaacagaaaaagaaaactttagaaagccagatcaaatttaaatgatttaccaggcctaagacctcgtaataatcatcagctatagcgtccaccgaagcagattcatccgccgcgaccttcactcggccacagccttttctcctgccgccatgacctgtcatagtcagagcactgctgggccgagtcaacacccgacatggggctctggagcccgaattcaataatgggttttggaagctcagtgcttctgcgcatataggggaaagtaacgtagccattggagagcaccaatgattttattttttattttttaattattattttggattacttacttgtataaaacactgtgtaagagaggagctaaatataaaatatatatgtatatattattttctaaatgagccaaagaggagagtgagataattgaatttatttaaataaatttgcggcagaagaaattgtggcgtgaaaggtggcgatgctgacatggcagattgagagccaaatgtttagtttgctggagaaaaaatctaatgtggaagaggcttgtcggcacgtgtcagctcgtggatatttgctccctcacgcttcaagctactgtttttgtccacaatacacatgcttgctttgcttgtatagcttgggttgatgaaacaagcaaataattgcgtatatatggagaaaatgagttggcaaaaaaaaaaaaggactatggagaaaatgatgaaacaaaggtcagtgtgttttggtaagaattagaagtaacagggactagttcttcctacgatatacaagggtaagtttttttacatgacacaaaatcaatatagttcaagaggcacaaatctgaactagcacatgtaaattacacgtcatgatacaaaaaaatataaatataaacatgacttaatacgataagtttgatggcacaatatttaagcacaaataaattaattaaaaaatacgatataataataataataataataataataataataataataataataataataataataggatcctaaattgacaggttagtctgagtttattcatgcaatttgtccttcgaactatgacatttgtattattatgccctaattttcttagcctgctaaaatagtccttaaactattcgtagtgttgtaaattgattcttctggcaagttttgtcacacgtggcaaacaaaactttagaaaagttatgtctaaatgtgcagaatcaaatcaataatactttaaaaaatcaaacaattaacaatgacaagattatcaaacaaaaaataacaattggataaaacacaagggcaaacagagtaaataaaaactagaaacaataaatgcagaaaataaagaaatcaacaccaagatatatgctagtttaaatttgatagatcgatgtgatctatgactctactccagttttggaagaccaccataatctttctttattgattgaacaagaataggtacaatacagtcgagacgagattcttcgttgagtcctcacaaagtatttcaattctcatactttacacccaaaaatcttcttcatctacagaagattcttcttacaaaatccaaacccaatctctctattttctctgcacctctctctctctgtctctcaatcttttctctctcaaactctcaatctcatctctaaagttctgaatctcttgttgttcaaatgacaaagtcagcatgatctttataggcttaggatcaagatcctaaagtcgatggttggaagaaatgagattgttaagttaattagaaataactaacttaaccaactcctctttgagcaaaatctccacgtcaacttaagtgtcatggccttcggaaatataaacgagcttttggacttgaggaccacaaaccgttgctaaagacgcttccggatagtttataaaactattgtagtcgactatctaaatctaccattgtaagagagataactagccaactggaactcctttccaggaaaagctagctatcgtgagaatcagaccaagagtggacatgatactcatcatgaaactcccttctgaactcgactatcattccacacaattccttctggaatcgataacaacaattgaacaacttctcagaaatgacatttgcaaagacctttttatttggagggactataccacaaaaataataacatagttgcttagccagttgtcaagtcaagctatgtgtataatttaaacatgtatactttgttagttctccaaggatctgtccaagttaaacatgtattagccactgatcaactaactgatggtttaataaaaaccatctcaattcattactttcaaaaacaaacttacaattgacgcagcaattgcaagtttgagagggagtattgaaaaagatgacaattaatttttgttagaattagttagattctactaaaggttgttattagttgtttggttgtacttaactaattccttgtaactagctctctgagattccagtctctctatttttttcatgcacttatatatactacctttagtgtagtaaacataatgagattgctttttaatcttcattacctttctatgctcttttttctcttttactcttctctctgcattgttctataatatttcatcaatgtctaaaagatctaacacaaaccaaacccaaatagaaaaccttttttttttgttcttttttgataataataagcttaaccaatattttctcagaaacttaaatctaaatcgatattttcctttttgtttatttctctttcttcttatccaaatttcaataatggtaaatttaggtatttaatcattaatattcaaattttttgttttcgttatgactttaattttgtcagtaccttaaaaaactaatgaaaaaggagaggaattctgtaagatttgataaaggaaaggaaaaaaaagaattctttttcatatatatatatatattttttaaaattatatatttacttttaaattattttttatgaaatttaagtaattaaaattatgtgaaccattgaaatagatcacacgtatagttgtgtatataa

SEQ ID NO: 191449 - DNA, 1423 bp, Cannabis indica
taaatgagatttctgtcaatctatttaaaggcattggtctacaaaagacttaaaccacctaggattacaaccaaaataggaaacagaccaagtgtttattgtctaactaatttaataggttatttattccttctgtgataaacctgacaagccctaggcctatcagtttatttgatagaaagaagggtattatatgcagtacttaaaaaggctgcgatatccttgtatacttataactttgtctgatgaagttagttaaagacaaattttatattcacaaattggtgtctttaaataacaggggtagaaatgatcataaaatgactcttgtagagttttgtccctcaacttttttttatggagcctctgaaactatttacaaatctacccttgcaaaccgacttcattctgttcatttttctgaactatttgctgatgtagtactaatgtgatgctggtctagcgcaatttaagagtccgtacaaaaaatacatgcataaataacagtctaatatgtgagaatttgtatgtgtagtgttagagctaatattcgtatgattagtgccataaattggatttcggctaacttaagttagttaagtagacccacgtaccgccatgggccacctaaggaaattgttgggtcaattaagcaaattgtttaaaaacatgatgatttttttcattaaaagaaaaggtttaggaggcttactctacaatgatcgtagtttaaaaaatcctatttattattttatttttctttatccatattttttatgaaatgtaatgtatgaaacgttttcaggatcctgcattttctaagtttcttcaaagctatgataagaagcttgaatccttcagaaataaagatgctgtaagttgtttactttgaaaaacttattttctcaaccaagatatagttcttttttcctgtaatatgaaccatctatgtgtttaaagatttttatggtcaaactacataactatttatttgctgttgcgcattccttttttcgtacttcattttgctatcaagaaaagaatgaatttgatgatcctaatgttatcgatccgtacccaggtttattctcaagttaaatgacattatattatgtaacatatgatatacttgcaaatttttatgaagtttcaattgcacagagccaaacagtgttatatcatgtatgattttttttttggtgtcaagcttgtatatttcatatggaagaaaaacctaatttttacttctacatggatattttctgtttgatttgtcatttatacatgtcttgtaacagtatgcagatgaggatgagatgagtattgatgaaacagagtcgagtggatggagaaagtgtggataagaataagagtcctattttgtagtagcgtctgatgtgtactcttggtgtcaactagtcac

SEQ ID NO: 191450 - DNA, 6168 bp, Cannabis indica
ttttgaatctttaacatcagccacgtactcgggatatatcaaaaatagaattgaataaagtgacattataaagagtatatttcaaccaattacccaaaaactattgatgctcaccaaatactatattgatgtttgctaaataaaaatacactgagatgaaggatatacgtaagcaatgacaaaaagacaccaagaaaaggttgtacctcattcaaaagggagtctgaatcacatttactaatagagcatagctgatttgtatgtcttgattctgcactgaaaaagaaaagcaaaagaaaagaacctttcagcatgaaaataccactacggagagatagcgacatccctccatttcgtaatagtcatgatctttacatatattctaataaccatagttaataacagtctatgtggttatctgtaggaagtctatccatgccaaagttcatccaaagcctaccaaattaaattccagaaagaaaaaagaacgatgctgaagttatggtttcttggtactagatgtatattgatactttctacaaaggctgtcatcattgtttgattatattgcatgaatttcggatgcttaaaattatgactgtgtccatagtaaaagtactaatgagctgtattttggtagagctttgtcaactactaacagggtaaatattttctcattttttaaaaataacttgattcacaatttaatgaattggtgagataaagctatctgaagcattgtaaacgccaaaaaggtcaagacaaaaattgattacctgtagttataattcttcacaacaaaatacagaggaggtccaattctgagatattctgaaacattattgaaataaccctgcaagtaatagaataaggcattatgacattgaacaataagctgctaattgacataatggccctgagctagacctgaaggtaagaatcttggggaagaacaactgtttgttccaaaccaggttcaatccttgtgcataatgcctgtagttaaggaaaagaacaagttgagaagcagaacaaacacaaaaaatagcatccataaaagcaagaagatatgagcaaaaatacagaataactcactatgctagccagtgtaaacccaacaaaaatggaaatgacaactatcttgactccccaaagactcagaataggtgcatggatctcctgaaaaagcaaatgcagcacagcaagattgaaaatgaaattaacaaacgacagtaattgtggaactgttataaaaggcacgtaaattattatcttgtacattttaccatatgtaataatgtgtgatccataagtgaatagaagaaacatttaaaagtcaattttttttatgaaataaacttcattaaattcagaattcgaaatataaaatatccagcaaaatagctggagcgttagtcacacaaatgctacgatcagtaaagacctagaaagcctagcaacaacatgtgctaatcggtttgttgatcgtcaaataaaacgaatcttaacattgggtaaagaaagcaataaagatacagcataaatatattggaaattcaaccaactttatagtacttattagagtaagcaccttcatataacgagccagcaaacccgattttctctgaccaatacctaaattccagaaggcatttttgaatcagatatcatataaatctgagaagacaacagaaaggaaaagctaaaaaaggatatactgtcctaaagtgttagaaggaagaagaagaggaggaagcattttatgatacctttgtcagcattggcatatgatgccactttcatacatgggaagcaatcaactctcttatcctcagttcgcaaaaagtcgaaagctatcaaagcaacaaatgcagtaacttgcaaaagaaaatccagaagaactgctaatgctgcaaaaagaacaaccaaataatgtcagtttcgtcatgaagacaaataatgtcacttttatttgtttaaaagtgacagttcggacctgcaaacatggagaacacacggcatgctggcataggaatgaaacttccaacagcaaatgctaaaacctctgctacgctagccagtgttatggatggcccaacttccacaagtgcattgcttattctctcttctaaaggcaactccaaaggttgacgtttaaccgcatgtaccaatatacacatattatcgactccaacctgttacggagatcaagttcaaaatattacaggctagaatagaatagattacaaagaaaatgggtatttctgaacaggtgataaggtaaaaatgtttaaaatcactgaaagctcaaaaacaatcatatttagttcacaagctccataaacaaagacacaaataaagtaaattatacaacttctcatgacatagaggtacttgccctatggatttatttttgaaaaaatgatatttactttgtgaatcaagtaggatatgaatccagaagcaagaaaaaaacaaaagaaacacatatacacacagtacatcagaaaactattaaaagattcacaagaatctaatttgataccatgaaaacaacttacagctagaacaagaaatgggataacttccataatgatgagagtagattttactccaatagcactgaaaaatccaactgatccaagaacagaaagcatgacaagcacaactccagagagaccaagcaacacctgccataatctcgcaattttatagcaacaatttaccgtaaaattaaccaatagaatgagttgtttactaaaaggaaagatcaaagttgaactatggttttatgaatgtgactagcataccttggaggaaatgtaaaaagaagatagtcgaggagtgtcacccaaagtaagagaaatataagcgaacatcacaaggtagcttatctatagcaataaaaggcagcatcaaggaatagaaattacttgaaaagtacattccaataaaacaacatcatgttacaagacaataaatttagcataaaatgcagaaaaaacactcaccacaatagtgatggcatctgtggtgctctctcttttcagttcctcttcaattgaactttccgatgaaaaggacagcgttaaatttttagattgcaccatttgcagcaattcatcctatcatagacaagatagataataagtgaaatgaaaattctgaaaaggtgccaccttcttataaaagacaaatgactggtgccacaaatataggccatttcaggtgtagagcaatttataatagaagaccagactaagctaatttgcaattgtagaatttataaataatatatggatcgataaagaatgctacatattttgtatgaaattcaacattgtgaaaataattcaacaaatggaatgactgaaggaaataacaaacctttgccatctggatataagccttttcccatgctactgccttttcagataaattccctcttttatccacagcattgtttacagggtatgttaccataaatgctgaagcctgtcataaattaaaaatgaaaatgatcattcacgacttaaagcaagaaaaaattatataaaaaactagatgatttcataactcaatgtgccagtgttcttcttttccaagtacttggggatgtcttaccacttaaaagcttaaaaaatcttaaaaagtaaacaagcaggaaaaaaattacctcggaatagttgcttcctgaaaaacctcctaatgcagtgctaggatcgagtggtgctttaaatgcactcatacatttatcagcagaggagtagtgctgaaaaacattaaacaaataaaattagatatgccagtcaaggagcatcagcatactcttgctgggaaactagtaaagccttcaacaaatccgaaatgctttaaatagaattaaacttctgtatcaatgattattccagaattttgcaacttatttggaagaaagaaaaacattttgatgtatccaaaagttaaaacaaaaaatgtccatcatatctcaatacacgtcatgtacatggagatggtagaaagtagaaagtacctcaaagcagtatttgaggtgctcaactccaccaaaattgtcataattgtcaggatccattttgaaatactgtcaccaagaattataaggggaaatttattaattatgagagagaaaaagaacagcataaaaatgattttttctttttagaaataaatatagcatttctgacttttatctaacctagaattcaaaatcaaatttcaaataagccaagcaaaaattctacctgtagcacactttgagtagcacaatcttggtccagtggcttcatgcaaatatcagcaagagatactggtgatccagaaaaattagcacggagtccatctacctggcatacaactaatctataaaatttgccagctaaaaaccatgaaaaatagattacgtaagatatcatactaggtggataaacacataccttcttctgaatttcaaaaagtaagttgatgtttgcctcagtcacaatacttggcgacttgccatcagcatcaggaatagttgctaatataagctgagaaagaacataaagtgttaagatcatggaaaattacaatttcttgcttcttgaggatgtggcagtgtataatattaagcaaccaacttaatgaaacacataaaaagattgctttctagaacctgttcgattcggtaaaaaggagctagatggttatcaaaaaactgcttctcctcagctgctttactccctggccctacccacagctgaaacagaaaatacagcaatgttgaaaaggcatgaaaaaatacattaaccaatattatataaggtttagtacaacaagtacatgcacaaatttgtcaagttaaaatataatagcccatatacatgaggaataagattaagcaggagacctcagaagccttgtcaatataagcataagcaactatcgaaatgtgttactacataagtgattctcaaactccaataatgtcatttaagttaagtctctatctatcaagtgctacatgaatattatttgatattgaaaaagtgcatagaaaataaagctactggtactacaacaaaccttttcaggacgtgtctccaccttgaaacgaactagacccaaacagagaacaagaactattgccaaagatgagcacaaaactatgattggattttttgcaacccatgttccgtacaacctggaaatatggtgttagaagtcatccaaaatcattcttgtgaattcattcaaaagctgggcatatagaaatcattatgatttgaatgatgacagagacagtgacctgaaaaaattggacatgtaaccttgaacgagagaaagttgcactccatttctactttgagaagcatcttcaagcatctaattaaaaaaattccattggttagattatactatacagagagaaacaggacaaacaagtaataagtaagcgaaactctatctaaacaaagtacacaaaaaatggagaagaaatatcagtatgtgcacctgaatcgatggattctcttccttctgtcggtttacagaatggagttcaccaccttccatagtattccacagtggtttagttctagaggcaggtttcttttgtccattcaaataaaacaagcgccatcccagaaatgcagaaactagaattatatataagatagctacagcaatgtcaatacacttggcctgcaatcataggaaaaaattaaaaaaactgtatacagtggtgtgacaaactaacgtaactacaagagtttttcaaatatgaaggtagaggagatatattcactttgacagatccaagttgcactgaacaggagccttctttatgggaaggaggaggagctgaattagaacagactggagatgcaggacaatcaccacatgaacatcccagtgatatatcaccacacgaataagtagatacattcataggtttcattccagatgactcagaaatatttgactgaaatgctatggcatacggtgaacctggtacattagcaggtgctcgtctaccgataaaagcgaaccactctgaaaatatcataggttaagtattaaaaaaaaaaaggactcaaactcaatactgcaaagaccaaaggagaatagcttaaagctgtcacaaactaaaagaatcgtccatcaaaagat

SEQ ID NO: 191451 - DNA, 629 bp, Cannabis indica
atcccttctataatcacaaaagtataatcggtaatctaatgcagaaaccaatgctgtaacattccaaatacaacactaacgaaaaagaaatgaaacaggaaaaatattcccacttgggagatgctaatttaacaattcaaacaaatgtgtcttataaattttgttcaaaagttgtcacaatgttagtattgccaaaattaagtgaattgatatgagaaattttctatgactgacttatttatttaactaagaagtagaaagaatgatgtttgggccagaattttacttctaggatttccagggaaacaaacaaaggaattgaaaaaaaaaagaagttggagactcacatggtgactgtggatagaaatgagaggagttccttcggcgtcacgcaaaactcgcttggtcgatgatgatgatgatgatgatgatgagtcagtagaggaacgacgattgaccttgtaaacgattttatcatcggaattaaggaagtaggagtctccattttcatgggttttgtcatgtttcttggacacaaatagatcaatcgggattggtattggcattgatatgggtatgggatctgattttgaaaactccatgttagaataactcaaccaaaacaaaaa

SEQ ID NO: 191452 - DNA, 1455 bp, Cannabis indica
ccgatgcttatacaatatttctcttggctgagccagggtttatttttccatgcttttgtttgatgcactttgaaatgttggtcagatagaaccctaaacatcacttattgtcaatttagctgttcttaggcactaatatttatttattatgattacttttctgggtggggaattcattttcataaaaagtgacatagtgcactaaattgaactgatcagagtttggtaattactattacgcatgtgcatgtccctgaatcgtttattgattaatgtgaaggcgcacataaataaaatttttaccctttaatgatatgattttaagcttttttattttattttatttattattattactttaaattcagtataggggttaggggtatgttgggcagatttttatatattgtaaatggcattctttcatttttggaaatatctaccactgttgtactgctctgctcattatcagctagtcgtgtaacttattttcctatcttccattagctaatcatctgaactgtctactgtctgtatactagtagctttttcttcatcctttctaaatgaaccattcgattactgagtggatctttctatctttccagccgccatgctgtccacctgatgaatctccttgtggtttaggtggagtttgcaaagactgtactacagtaaggcgcccttattctggtttctttaaacttaattggttgtctgtagttgttgtaaggtgttatatgtaatattattgcattgacattagtaaatgtttaaagaaaaggcaaggcactgaagtttttaaattgttaacagtgctttcggcactcagatttggtcaatgatcgtccatctacagcccaatttatggagaagcttccatggttcctgaatgcactaccatctgctgattgtgccaagggcggccatggggcatataccaacagtgtggatctgaatggtctgtaagattagcagtcgttgattccaccataaactagcttcaaattaagatgtgtttatatgtatactctgtattagaaactgcatggtgttcctaatagatgagtttgtttctaaatttttgttcttacctgttttcaggttatgagagtggtattatacaagcctctgaattccgtacatatcacacaccagtgaacaaacaagtatagctgtctgtttgtaaatctatgaaatattattattttgattatttttgcacctaaactttcattgcgtttattgtatgtaactttcattttcatcaggctgattatgtcaactcaataaaagctgccagggaatttagctcacgagtttctgcatctttgaaggttttattccagtcaaccgcataactccaattatttgtgctccttttaggattgttacttttctttttatacatagaaattgaacctgcactctcctgccttttttttaaaaaaattt

SEQ ID NO: 191453 - DNA, 2036 bp, Cannabis indica
aagatacattttcacgataatatagtcaaaaatggttactttgaaaatgatttttctcgtttatcatatgatgaatatgtctctctctcaagcgcaactaaattacgaacaggaaaccgaagtgacatttgatcagttaaatacaaaatcaatccattctgctaacatatacaactaaatcaaaactagaatttagaatgaaatgtggtgggaagatttaaaagcttagagctgggtgtattgacccaatcaggataaatctccaactacgaaagatttgtctacttgtgcacattgcttactaacccaatcaattgaatccttctttgtttgattagaacttttgacagcattctgaagcagttaattgacaccaaaaattttcttcactatactaattgcgaagcttcccaagttgtaaaattctagcaaaggttcatctttctcataaaaccaaagcacaaacaaataaagaaataaacaacgaacaagttctcacactaccaaagccattaaaacaaaaactcatctgagtcctaacaaccagtacagcattaaccatttttcccatcacgattgaaagagctacaactaaaaattacacaaaacaacagtttaattaagcaaaagataactgacctggtccacctgattagtctttctgggttggtagtcaacttttttagtgggagtatcaagccctaaggttttgggtttgggtttgggtttaggactagatcgagcggtacgagttttcttcttgataggctgagaagcacgagcaccctgagaacaagagagaagcagacggtgatgtggttgttggaatctaaaagtggtggttgtgttaatgtgagaagaactgatcctgaaaccgcaaatggattccaatgaagacggccacagcgacggcgtcttcgccgtcgccgtcgccgctgcgatttccattcagtcagtactcctacagtaactgtttatatacaaacaaatatatatatatatatcttatttaatataagctcatcatcgccattaacatgaaaatcttctcagcttaaatatatataggtaccaaatatgttgggagggtttgaaagagagaatattttagttttaattaataaaaaaaaggaaccactaaaaaatgatgaataggagagagagagagagagaaaaagatctagtgaaagaaggttattggttgaaaatggttacgtggaggattttggtattggatatgagaaggccgacgtgtgctcttactgttctatcctttcttcacttttatttttcttcttctttctcttcttattggttaatatcttcttgctcgtgtcctttccttacccacacaccatttcttttttctttctttataataataatatgaataaagaaagaaatatcgggtgaacggaggtggaccctgttgttctgtcttgtctgttccttctcaagagatcgttataaacagttaattagggttttccttttctagctaccaagagtttttttccccaaacggcaacttagttaagctagtgtcatatataaaaattacactaataaacaattatgtttagttaagattgtctttttaaaataaaatagtgaaacatggttagacatacaggtagaatcttgaaaattactaaacaattccacagctcttttttaagaattttctcctatgtagtatcgtgcaatagagttttaatatagtggtattttgattgagttattttatcatggagactattggtaattttgtgactgattgtacatacatgggcagtgtcacaaatattttaaagagagcaatttagtttgcaattcaacttaaaaattttattcagtaatattgttccatttgagtttttgtgcttctacaagacaagacaatgaaatgagagagatatagaacataagaaaaaaaaaccatataaactcaaatttccctagcatattctaaaaggaaaatccaatagtttgagaatttttttatatattaatttataaaaagtatatatatatat

SEQ ID NO: 191454 - DNA, 2150 bp, Cannabis indica
ataattttgttttttaaatttagtttgttttttctcaacccaaggcactaacaatagtccctactaatactatagtgacttgaaagaggattcaacacacaacacaacacaagctatagtagcttcatcatatgtagaaacaaacctatgtatgtcttcattttgatcttcccaatagtctcctatactaaactttgaaaagtatatttacttttcaatttaactcggattctcatgttcttgtcacactaattatttaggagatttttaaaaaatgtccaaaattttgaaaaaaaaacccaaaagtacataattttgaatagattacaaaaatactaagccacatattaaatttatttctcttgtatcagaaaattaccaaaggatattataatacaatttttttggtaactaaaatatttacaaatttatcactatatattataaaattgttacatatataattatcacaaattattgcctgtatttttttaaagagattagaattacttataaatttacgatatatattcgtaaaccgtgcaagaatctcttcgaaccaagacatctcatcgtctaatctgaaggacatactttgttaaccatgctaaagtaagtaagcaatatgagataaaactgccacaaaatctaaacaataaaattatgataaaactgtattataaaattattacatatataattatcacgttattgttcgtatttttcaattaattatttttgttgtaattacgtgtaaaaaaatacttcaaattggtaaaaagatgtagttttttttttttaatatatttattttataaaagggatacatgttgaaattacataaaaatcatcaatgataaaatagatattgtttaataattagaaaaccctaatacatcaatttaagataaattaataaacagtcaccatgtaatttaaatttagctctcaaagagtacaatttttcccttttaaaacaatgaacacaaaatttgtttttaaagagaaaaaacaacattaatattcaaaggtgtgataaattgtagtaatgttttcacataaaacaaaacaaggaaatatacagtactaataaataatatatatatctacagaaaaaaacaaaggatcatcacataatacaattttgttaccagttttcttcgaaattgttatggtatgatacttcttttgagttaaattttgtgcagtaaccaacacttgtttttgtcttcttttaccatcgaacctgaaaaaaaatgtgttttcttctcatcttggaaacatatattatcagacttatatatataaatacatttatggtaataaccatgccaatattccattttttttgaatcatatattataaatatataaatatttttcatatggtcaaaatctaaatcaaaattgataccatgtatatatggttacacttacatgtcagaaactaatggtatctaccacattgtttaatgatctaaatttgtttttaaatacattaattcattgtaaattttcttgatttcaactacactcccgacctaaaattatgtacatatttatattatatatatgtgcatggaactctgtgtgtattattttgatccttgaaatagggatgtcattttttgcaatccataattataaaaaagaacataattaatgcaactcatttaggttaattgttcaatggagcatgtctgtctgtcagtttgatttgaaaaaaaaattaaaataaaataatataataagttatcgatattctgatgattttggcattgagaaactgacccatctaacttgtacataaaatttagttaataggataaaacagaagattcatttggtttatattagtgactaaaaaataaccaaactcttaactaagtttaaaatatcagataggtccaaaataacaaaaatattcaatttcaattaagctatcttttctcgaaaccaaatgaattagcatcatttcagaatataagattaaaataaacaactgcacaaacacaagctaaaatgagcttatttttattattcaatattatcatgtcatatataaatttctatatatatatagaggagtgctaagggaactctctatcccactctcttttgcactctccctttaatgtgatgacaaatgc

SEQ ID NO: 191455 - DNA, 2165 bp, Cannabis indica
ttttttttttgaaagatatagtatcctatatttgatttatcttcaaattaacttttgtttcagaattaagtttctcaatttttctttcggttatttctagcatttttacaacacaaatgtagagctgtcacattcagcaactttattctcttttgctatattttagactaaattccaaagcttgagaatacgactgaagaattacctcgatttaaacaattcattaaggctgttgtcttcttcagttgtagttttccttagtccctttattcattcctgcttttcatgtgataaaaaagattaaaaaaatcaagtattctccatgaccagagtccatgatcccgggaagagaagtgggccttcagttaaccaagagccatccaaccgtctcagttatgacctctgaataatacttcaaactttcaaagatacgtcattatgaaaggacacatgttctgtacacaatatcgagcagatataagataattaactcattttaactactgacatttatatatatttttttggaaatatgacattcgtatatattttgaaatctgacattcattttagtagatagacactgaacattatattttatgagaagcaaacagaataaattttgtttggttctagaatagtttcgtattctttcttgcatatatttgagttgtacatttaaaatatccttagcttcattaatctatcaaattatggtccattgagttgcctttcgaacttttatgtgccctttggcataatttgagccagtttatgtttgctattgtttcagggtagttgttttctgccataattttctgtttgactgattatggatcacttttcattttcctcaaaatttcttatcattcttggtttgtccttttgttacagggttcagctgaagtggtgtataccagaagaagtgatgcctttgcagcattgaagcgttacaataatgtactgctggatgggaagccaatgaagcttgagattgtgggtctcaattcagaagttcctttagctcgtgtgaatgttgctggattaaatggaaggaagaagaggactgtggttatgacgtatgtattcttatctctgttctgtacttatgtctatcattacttttctatgtggacaagcttggcttatggtggctcttgtgaatttcatattgttaagaaaattctaactatagggagtttctgaaggagtgtgttgtagagtttaggtacttttgctgatgaacaatacttatatttttctgacctttcatctagaaggcccatgtttctgtggaagttcaggtagtgtatggttattagtgttttataagcacattacttgtgatgtgatgcggaagagaagaccatatatatctttatattttagatggtattttttattgatttactttttgcagaatgataaaagattgtatcgtaatttatttcttcatcgtttttttctttgggaattttggtctagaatgttatctgagttaaattgttttgggtgagaaggtgaaggtgtgagcatttatgcatgcatgcttgcttctactgtaaggtaagtgatagaaaatatttgaaactaagtagttttggttttagttgggtcaaaatagaagtgttttggagaatgaagagggagaacttgatgacaatagggtttttctttttgcagttgcaatatgataaaacttgtactgtctttttttaagtttaatttcctaacattttatgtttccttctcttttttttatgattttttttatcaatatagtatactgtgtatatatagagttgtgtatttatacatttatttacgcgttgtcatgtaggaagattaaacacttttttggaagaacaaaaaatatcagatagaagttgagagaagatttaagaagctttcagtagcgagcttctaaagcttagagagcttatacatatgtttagagaataaaacagtctagatgattctaatttctcacaatagattcaaaataatgggctgtcgctgtgagttgcaaactgttgtaaaactagttaatacaactgtaaattataattctaaccaacttctttacggttagaatgagttggttttgctgagttgtcaccgtaacacattgatctttatcttgaaaattatatttttttgaaaat

SEQ ID NO: 191456 - DNA, 1531 bp, Cannabis indica
ataaccgagaacagtttagtcgtaccaaacatgtaacaattcaaactcatttcatattttgtagagatccaagatcaagaccgacattttccgagatcatggcagctctgaagccgttacaaaggccgataaacaacagtgcacaaattcctaaacccggtgcatcaatgggacgtgagagagttcatcaacccccacgagtttcggaagaacctaccgactaaaaagaacaatttttttttcttcttttctttttttccttatctgactgaacatgggttttgttccaaccaagtaatgctgagtcaatttgcaggttgtttgggacacaagtgagaaagaaaatgtttgaagatcatatgagataacaaatactcaaaatttgagattgtgattcttttttttgttcctttgtattcttactagggcatccattctcaagggtgtgcttttcaatagtaaaaaaattaaaaaaaaaaaggaaaaaaaaagttcaaatgaattgttgtaatccatgtttggaatttttggtgtctttttaaatatttcttagcaagtaatgggaataatgattgagaaagaaagagagtagtgattttaataagtttaatgttgttgaacttaaaataaataaataaattgtaaacaaattggacttagatgaaatttcttgacgttattcatagggaaatttacatgatatattaacttttgctatttttttataaaaatactgttaagcagtatttttacttttttactgtaatttttataagtttcatactgcagtatactgtgttaagtttttgctggtgttttcttgttgttctactgttgttttgagttgttctattttgtgttttactggtgttttaaaaaatacaatatttttgaaaaattttccgtgtgacagtatttttgtaaaaattaattcaaattccagtatttttgtaaatttctctattcatattatatacatatattatgatgttataatgtagacaaattaagatgtgtttttaatactaaccatttcatattttttagtggaattttttcaattttcattttacactttcatagcataacacaaaattcttttagaggaaaagaaaaatttatgagtttaaaatatagttttttttttttttttcaaaaaaaattgttttataagaaaaattgaaggaaaagttaaaaatatgggattttttttcttaatatttttgaatttcttttctaaaattttctaataattttttaaaaagaaatcatatttttgtaaacttataccttaaaaactataaaaataaaaattccttattcttttattatgcattctattcaaaattcttttctaataacaagttcatgtcaatgtgtgaaaagctttctcgatggaaattatatataaaccactattgacaaaattagaaataacaaataaaatcagatagccaaagtaatatgaattttttttttcaaattattatctacttaatggattagttggtaatgtaattttgaatttttt

SEQ ID NO: 191457 - DNA, 2512 bp, Cannabis indica
tggctggtatagctagaaaaataaatctcctgctgagtacaaatgaaagaatatatcgatggttacaaagtttacttataagacttgtttacctgtgattacattaatgtaaacaccccggcctaaatgtctttaagtatgtttgctagctagctagctatagaactatataataaataatatgtacgctagcttgtggaattaaacttaattgtttttttcccttaaaaaaataaataaattaacaattaattgtttttttgtcctctactttgcagtaacctgttctctttggcagttttctttcactgtttttttaatttttattagtaacaaattaattactaattctacaagcaatcatttgattcaatttatacataaatatattataagacagtattttgtaaaaaaaaatctatatataagacagagtaataatgtgttaaactctaacttttaataaatgaattagtcttatattaaatattagtggtgtccaaatatgttaagtcccatattaataataatgtatcgaaattcaatatcatacataaaatgcataatgaaatcctaacatttcaccatacacacctatactcatacttcttcatgcagtacaattttgcattctaataaaataatattttttaagttatgtttggaagttaaatttttgcaaagaaagaaaaaaaatagaaaataataagctcttaaatatagtatgaaaagaaaaattatatattaaaaaacactaaattaataaaaatttcatattaaacttaaaaattgattttttttttttttgtacatttatattttttcttataatttcattacatttttcttttttcaccaaaaatccaattcattagtgacctagatagaatatttttaagctagtctttttaggtgtggatatacttataccgctaatattactcttaatatttctctaaatcgatagcaatattgctcaagtacgtgtacataaagaattaaaattaaataaaaataagtaatcattaatgatactatggatctaaatttacggtgtgattatcaaatggtgggatccaggtgctattatggatgagtaatttcacatcggtgtatcccattatcatcatacaataacataaaacaaatataattaccaactggaaaatattgctcagcccattgaatattttctttttttgcattacaagcaataacgatctgcttaccaactaaacagagattaatttaaaattaattaataatattacaactgggccgctggacttcagcttatttcttatctacttttgtttcttccaatccattatttttttttatttgtgttgtgtatttatatgtgcgtcttctgatatctttggaccatgacagggcgtgattaactcacatatgagattaatgagaactttggtctctatgaggtactagaaaaggccaggtgtatttcatcttagtttgattcaatagttgtaaaaagatttgtgtttggagcgtttcagtaattagacacctcatacctgtatacaattataaaatgtgtttatagcgttacattgttaaatttcacgagtatattccggaattatgactagtaattagacacctcatacctgtatacaattataaaatgtgtttagagcgttattacattgttaaatttcacgagtatattccggaattatgactatgtttgtgttaagtatattggtcatatcacatttgaagagattaggagttacattaatgtttgtcagtgaatgattatgtccttatttaattataatcacagtatacatttatttaaattagtccaaagaaaatatatggtttttgtgatatactaaactgccgttatttacagcatacatttgaaaactgaatgtacatatatattaacaaaatgaatagtgagtagtagagtcctggagcaacaaattacaatttattcaaataatagccaaaatatacatttcttcaaaatttggtaaaccaggtagatggaaggatatgagtgtttgaatatggtggtgttgcatcatatgagattttaaaaatatatagtaatttactccctaaattttcaaataccagtaacctcttgattaaaataacaaatagccccctttggaaaagcttcatcggttaaatatagtaacaaattgaataatatacgcaaaaaaagtacaaaaggacaaaatgataatcaacttaattttaaggtctaaaaacagaaaaggcatgaactaagcttaaacaatcaactaattagactcataatgtagccatgaactaccataaatccggctcataaatgcgtagatgaactactatataaatcaggcaaggcatctcaggtttcaaacacacagttcatatcttttcttatatatagatagctctatagtacagtctaaacattccatatggaaaacaaaatgatgggttggtttctgcgtcttctatgtttaggtatgatggtgttcatggtggt

SEQ ID NO: 191458 - DNA, 2560 bp, Cannabis indica
cttaccagaaaacagagatcacggtgcactgcaaattgagttcacgacagcatgctttttatcgagctatcaagaacaaaatatctctttcagagttatttgacaacaatcgtggacaacttaatgataaaaaactccttaatttaatgaatatcgtcattcagctaaggaaggtaagctatgcttttacccctctttcccgaaattaatttgattgctctgcaatcaagctaaaacatttgcctttatatttaatgtggggagacaggtctgtaatcatccagagttatttgaaagaagtgagggaagcacatatatgtactttggtgagattcccatcgcccttttgcctgcccccttcggggagttggaggatgtacactacccaggaggtcgcaatcctattatattcaaggtttttgttacagctgctttcttttaatatgcataattatgcaaattgtattgttattattcttttcaaataagctctatacaccacatgtcttcacaatcacatccccttatcctctgtttttagtttaatgtaaattgaaaacgaaaatgaatatcgctgtagaacttgtttaccatatgtccatacatgaggaaagtaattctggaatctttttatcttattttgttcagattccaaaacttgtccataaagaatttattcagaagtataacacatctaattcagcagagtgcagtgtccgtagagaatttttggagaagtattttaatatatattcccaagaaaatgtttatcaatcaattttctcaaatgagaccagctcaatttcatctgttaagagcggaacctttggttttactcgtctgacggatctttgcccagctgaggttgggttctgggaacctgttcttttatggagcggtctcttgttttctcttacaagatgggaccgacaatttttggatggaatcgtagacttatttatggaaagcaatcatgatgattctgaactcggttaccttgagagtgggaaagtgagagctgttacacgaatgttgctgacaccatcaaaatctgtaactgtaacaaacctccttcagaaaaaatttgctactggacctggtgatgctccctttgaggctttagttgtctctcctgaggacaggcttttatcaaatatccgccttcttcattcaacatacacagtcatcccgaaaactagagctccacctgtatgtccactatgttcaattttgtaactttatttattttttgtggaaaattagattgcaagtttttatctaaagcttacctcttttttaggttgatgctcattgctctgatagaaatttcgcttacaaaatgatcgaggaacaacattcaccgtggatcaagaggttgtttgttggctttgcacggacttctgagtttaacgggcccagaaagccaaatgctcctcatcatttaatacgagaaattgattcggaattacctatttcacaacctgctcttcaattgacatacaatgtttttgggtcttctcctcccatgcaaagctttgaccccgcaaaattgctaacagtaagctgctctcttttattctcactttgtttaccatatttctcgttttaaattatacaggctcagattgagttatcctttttcttttgtaggattctggaaaacttcaaacgctagatatattgttgaaacgcttgagagcaaataatcaccgggttcttttattcgctcaaatgacaaagatgctaaatattctcgaggtaatttaagtctttaattttaattctaatatatggaaccatgtggcaccgaatgagctaagattacaatttacctctattgtcagtgctcatggaatattattttaagcgtttgatgaatgagactgtacttgcaggattacatgaactacagaaagtacaaatatctcagacttgatggatcatccactataatggatcgtagagacatggtcagggattttcagcatcggtaggggttggctgacatgccgtgatttgtaaatatatatattttgccgttaaagctggcataacccttgtatggctgatgttatatgtttgttgcaggaatgatatttttgtgttcttgctaagtacaagagctggtggacttggaataaatttgacagctgctgatactgtcatattttatgaaagcgattggaatcccacgttggatttacaggcaatggatagagctcacagattgggtcagacgaaagatgtgagttttttttcgcttaagtggcatttatcttccttacttactcaatatttatttatttaatactcaactcattattgcgtaggtcactgtctaccgactaatctgtaaagaaactgtcgaagagaagattctccagagagcaagtcaaaaaaaacaactgtccagcagcttgtcatgactggcggtcatgttcaggaagatctcttggcacccgaggatgttgtatcattacttctggatgatgcccagttggagcaaaaaacttaaaaacgaaattccactgcaggtgagacaaggcttaaaccatagtgt

SEQ ID NO: 191459 - DNA, 2427 bp, Cannabis indica
aatacttgtattacattcaaaatatcactcaatatatagttatctacgacaatatatttaccaaatatttctttgtgaaagatcgatcgatggtacattttttttttcaacttgaactcgagtaggatgactcataattaataattcgatcgacatatataatttattatcttgtttgtcaatgttaatgtcacatccactatctaatatgatttttttaatgccaatatatcataagaataattaacagctcatataggttaattaacacatataaatataggaaaaagtagttaaattcttttttgaaaatcataattctatttgcctgtgacttcagcttaggtgcataggttcttacttaattatcactaattatattttttttttataaataggagtactttgctcatgtgaatttcacgagctaaattagcaaatttcaagcaataaatttttcggctatgattattgttgaattggcttattagatttgaattagtaggaatgacggttattggaatcaaaagatgcaaactatagattcttgtgtatagacagttcaatacaatgtcaaaaatagaattacaaatgttagggtgaaaaaaattaaacaggtgaatatagaaattcgtttaatatcgtgagttgaaagaaaacaaagagaataaatgaaaaattaaatttgagagtaaaaatgagctcaactctttttcattgaattaagatcatttttatatacatgattacatgaccaagattcaaaccagaatctattagactagctaagcaacaaactttgaccccttgctaactgactcactactactaagacccccctctcaagtgacactcagggatctaagtgttaacttgtccctaaaggtttcaaattacgatatcgacaatggtttggtgaggatgtctgcaatttggtgtgtagtaagaacatgtcgaatatcaagtggctgggatagaacttggtcaagaacaaaatggagatctaacttaatatgttttgttcttgtgtgaaaaactaagtttgtggtgagtaaggcaacacctaagttatcacaccacagtgtgggtggttaagaaagatgaagaccaagtttcttaaagagatgttgtagccactttattttagtggtggcaagagcaagggatcgatactcaaattcagtgttggaactggcaacaataaatcttcttctttgaattccattaaattagtttttctccaaagaatacatagtagcttgaagtagacctttgaccatcaattgaacttgcccaatttacgtcagaataggcaaccaactgaggatgttgcgttagtttgaaatgaggcccaagagtagaggtaccaactagatatctgagtattcttttgcatgagttccaatgttcaacagatgaagcttgaagaaattgagatagcttgttgatagctaatgatatgtctgatctagtcatagttaggtagtgtaaagtacagattacacttatgtacagagatggatcaaccatggggtaatcactagtagaagaaaacttaccatttcgacacataagagtgggagtgggaatagcactgtacatatgtgttttaaccaataattctctgatatatatatatttagcttgatttatatagataccagaggtatcttgatggaccttaaagccaaagtactaaactgctcccatgttctttagagcaaattgagaatgatgatcagagattaccgtataaatgtgagttgtatcttctccggtaataagaatgtcatctacgtacacaagaaggaggatgagcttgcctgctttctttgtaaagaagagggaggtgtctgcttttgcattttgaagatcccactgaagtagcatagattgttgcagcttattaaaccataccattggggcttactctaagccatgtagggctttgtggagaaaacaaccatgattaggaaacttagagttataaaaaccctttggttgagtcatacatatagtttcagtgagttccccatttagaaatacattattgatgtcgatttttcgtataggctagtgataacaagcagccaaagtgaacacaactcgaatggttgaaggcttgacaactggaatacaagttttgaagtaatcaagactgggagtttgctaaaaaccttttgccactagccctgctttatacatgtccacttcaccatttgacttaagcttaactctaaagactcactagttagaaaccactttcatgtcagaggtaaaaggcataaatgtccacattttatttttgattaaagcattgctttctttactcatagcaacaaaccatagagggtccttgagagtgtctttgactatctttgatttcatacaaagtcttggaacaatagcaacaaataactttagttt

SEQ ID NO: 191460 - DNA, 1326 bp, Cannabis indica
ttttgaagaaatttgttgggcccataacgggcttcaataatttgagcccaatactaaagtgggtgaaaactgggtcaatcacggtccaattatccgaatgtttggtaagttgtgacattcacaataataaaatatatccaacgttgttgtagaatgtagagtagactgtatggacatggatttgaatattctatcagaccttaaattttccataaactaaaatatatttatttagaaaaaacaattgatcaataaaataaattttggtatagtttttaaatggagaatgtaaacatttttcttttaatggaataaagaataatagagttgaacattataattcatacttggaggggcaactgcctcagctacccaaccatgtgcatctctctctctcaataaatatatatataattaaatttggattctaaccccaatcaattatttgggattcaaactggtactcaccacatcatcaccagcatgtttgttgaaaaaatttaataaaaaaaataaggatgaaagtattttattttacgattttgttgcagtcgtacctttttttggttactaagtgtctactcagaaacacgtaacaacatattattagattttgtattaagtaagctaaagaaatatatcgctacgtatttttgaattgtcacataacgggcttaattgttacttaataactaaaaaaatacgactccaacaaaatcgtaaaataaaatacttttgctgttacttttttttttattagaatcaatgtgtaacaattacaaatattaaagagatttgactgcaaatatctcttataatattctcaagttatcatgccctttactgtctaaatttatatatatatattttttttctatagtgttatgcttgtattttttgagctcgtactgattttgtgtcgtatcataaaatgatctatttacactcctaaactcaccaatatatttgttgaaaaaccaaactaaactattgtaatattctcacattattgtcaagtttattattaatatgggaattttgttctacttgtttaatttttaactgagaaatagtcaaagcatctcattcatttagttttttatttttctaattggaaaatattttcatttcttcttctcccttttcaccaatataattattaggtggttaatatatattgtgaaataaataaattttaagaaaaaattaacattattactcattttgaaaattagtttttttaatcatcattagaagaaaagcctatggtgtgtgtctacatgcagggtaattttcgatataaaaaggaaataaaaaaaaatacaa

SEQ ID NO: 191461 - DNA, 2260 bp, Cannabis indica
ccgaatagttgttatctttcatacattcagttttttttttatcacggttgtatattgagcaatacaattggcacaacagatatgcatttgctctacataaaatgtattaaatgataataaaaaaaaaattataataatcatacagtatatgaaattgaaaaggcacaaatgtatttgcaacagagtttattttctggatatataaaagcattcaaaataagcaaatatcttagaaattatttgacactaacgtttcttctatataaatataaattttggttgatttagcgtgtgatataattttatatattttttattagtagaaaaaaggaatgaaatgagaaacagtcgatttttttatatatataaaaagaaaaaaaaaatgaaatgccaatatattattattaattattatacaaaattagcggatctgtcattttcttgaaccaaagcttggattgcttgagcaggtcattttcttagggaaaaaaattaaggtaacattttttactatgtgaagagacaatattatattaatttatttcctcactatatatatattttaaaaaaattaaaaaagaagagagaggccccacttaaattgctggctgttctttcttacaaatttgtgtcagttggacacaaagacaaaacatgcatgtttttcctctatggaggaagagagtaagcacatgaaaatgatgaaaccaatacccaaaaggcaagaacaaaaagaagaagaagaagaagaagaaaatgatgatgaccagaaaggagagaagaagatgatcaatatggctatatgggattgtgggagtccattgtatgactcctatgaattggtttcacttagtaatctcatcgaacggcacctaatgatcttgccatctggatcatcaaagcgattcatcatggccaccaaaagattatctcatcatcatcagcctatccacgtggaccgtccgatggtggccgatggtacttctaattctatgatgaccagattgagtgaattggtggaaagaaagatggcgtggaagagaaaagtgtttggatcagaaaggtctaaggcaaaaaacactaagaaagtgaaagccactactactagtactagttttagtaagaatatttctggattatataatagaattgcttcgtggagaagaagatgaaaaattcatgatcatggtccaccaacatccctgtactccacacaggtaataattaaaatttgagatttcattgaaatttattggatttgatatatatatatataatgttacaatatgcatgtactttatttttcccttatcatcatcacacattacttatattatcaatgtatctcaatatattttgtatggttcattccccttgtcattttgctttgattgtttgtgcacacagttattggtctgtggaattccacttttcccaatttctcttttataaatttatttatatatactgtttataaaagagaaaaaatccagatctttaatttttaattttatttttaatgagagatacgaccacaatcactttttcccccaagcaattatagtaagacaacttcatcacattaagtattatgtaatgtttttttctgaaaaaacaaaacaaaaactgaactaatctctatttatttgaagctaataattaaatgagttgaaaaaaaatacatgacgtgtttttactttctacaattcggcagaaaatgaaatatttattggtttgttattagtttttaatgacaagtgactcacagaaaaaaggaattcctctttctattttctatttttttagaggatttgtattttctaatttagtgtagttgtgattgttggtagatagatattattattctaattatttatttggaggctgcgtggtacgaagtactatttcattggcttcacttaaaaaggtcaacttgtaacgtcattgattttttttaaaattgtccattttgaaatctcagctcacataccatacgaagaataacatttacatatatagtttttttttaaaaaaaatgataatggaaatcggtttcaactttcaagtacacaagaatacgatcacaatgccaatggcattttaagtagttgaaccatgtgtatatgagtaagagagaagttcatacgtctcacttctacaaatattctatagaaaaaaatatatatttttgggttcttatttagacaaaaaaatatgacattttttaaaagggaaatttacataaatactgctttttaac

SEQ ID NO: 191462 - DNA, 1347 bp, Cannabis indica
ttttatatagaataaatattaatgcttatcatgaccgaacagaaaacccccaagagttcgatagagattaggatattgatgggatgaaattatttcctctgtacatgcaaacaaatgttcattatttataatagtaaatcttttcgtaaaaagaaaaagtacaaaatcacacggttctattagttaatttgtttaatagaaactagctagcttttcttttcagaggatgttcttagcagcaattaaagtgtcatagaagtataaaaaaacaagaaggtccctcttcacatggattcacgtgttatggttaaaaaagccttattaaacaatatttgatagcatagcaacttgcattactacattccatcactaaagacaacaccaatggacaactttggattcaataattaatagaaaaattatatatataataattatcttaattaatatataataatataatcttctaatcatctatgacaatcgcaaattattatattatatattctcacccttttatcatgtgctctttcaaaattctaggcatattcccacttcaaacatatatctggcctttgggacatgcaccaagttagataaatcccgtttatgaattaatcattactgttttttttttttcttcaaaaaataatataataacatttttaattttgaaagggaatccactaagtttacactaatgaatgtagtccgttcactatggaacttttgggttcaagtcagtgaaaattttaataggtttttcatggtggggactggggtatatattttatatagtagcaaataccatctaagaaaaatgaaaatcaagctagggaacatgtttggtttttaatgtggaaattcaataagcaatcgtgcctcaagtatatatatccttgtcgtgtagtacacgtcccatttttcttttttaattccaatttttcaatagtactatatatatatatctttatatattaaaagtgtctatctaacggtatttattggtttaacagaatatacttaaaaataaaaaaagaatattctgttaaatttaacgattaggtttgatctcccgttaataaataaactcaataattaaacccaaaaaattaaataaatcttttaaatattaataatctctttttaaattaaaaaaatcattttaaccatatatatctctctaacaaatctatcttgggagaatattaataattttttttatttattttttaaaaaaatctttaattttttccaatcctatgcataatgtgatgttattctttttaattgctttattaatttcttttctattctaatgtgaagaaatttttggctaatagagag

SEQ ID NO: 191463 - DNA, 2377 bp, Cannabis indica
cttacttgtggacaattcctaacaaagcacgaaaccacacctccaattgaatctcctctctctcgaacatattcaatggcagaaatcatcttctcagcatattcagaattgggacaccgagcaatattgctctctatctgcttatataatttacaattttatttattaacattaatttcataaggatatagtttaaaagagaagcatgtacaaaataattataataaaaatattaaaatcatactatttatgtgttcataatattttttgagagttacacatgaaaaaacatgttttacttaagagtttttatatgtaacatgttagtaacttttctaaaatatttattttttattttagataatcgtccataattaaattaataacgtaatatatatatatatatattttttttgcaaatatgcgaggatggagaccgaaataggaggattaaactaattacaacagaaggagcactcctcgcttattacccgtaccaataaatttatttttagagagtgaactaggcaatgttaatgtgttcttattaattgtcataatattactcaatagtactaacctgatcaagtgtcatagtctggtgatcaaccaattccattggaagcacaatgttgccaacttgtgaaacataaccaagaacctaataataaccatgccaattaaattaaacatgataattaatgatgagtttacttggtgaaaatattataatgtagcaatctttatcatcattttatgtttaattcaaaaatctattttatattttagaaatattgtttaagaaaaaaagaaataataattgtatttcatgaaattaacatatacctcaattcctgaaaattccttgagaattttcttggcaactgctccagcagcaactctccccacagtttctcttcctgaagctctgcctcccccttcaaattcaattatacatttgttgttaattaattggtaaattaatacataaaaagtatatataatatttatgttcaagttatttacaataaaaatgtttaaattgtgtttgcacttaagtatttaagtttatttttgataacaaaaatatctaagattatattttaattacactgttacttgcccttaactttattgttaggctctgacgtaacataatactttaaataaatattgtagcaaaaatatttattttgtgtcaaaagttatacttgagtagctaagtatggttcagggccggtcctagaataagacgggctaagctcgtgcttaggactcacccatcataagggctgaaaataaaaaaattaaaaaaaatcttttaaaaaattttaaaaattcttatgataagagcgagctgtttttattcctaaggcctatttaacttcaggagcagccctaacatggttatcaatcgagacgagctcaaatggtatggaaggggttgtatcatcatatcataagtataaagtacctaagagtacattaagatactaaaaaaagtatttaaatgcaatttttagcataatttaagtatctttgccacaaatgtattttgtatcgatttgtcacatcaatacctaactacaaagtttttttgatattggaagagaggggattcgaatttgggatcttctcattgtgaggagaagtgtgaaactactaggctatacctatcatcacatacctaaccacaaatgatgatgacaagtaattacaatgtaattaaaagttaatgttagatactttgtctctaaaaaattaacttagagtaacttttagtacaatttaagtattttctccattataacatatcttgatatttatttacctgaacagatctaattccatacttcatatcatatgttgcatctgcatgtgaaggcctataagctaccatcatctcagtgtaatcctgaataagaacacataattaattaagattaaaaaaaatttctaataaccaacatcataattaaatggattatccatttcaattcaattatcaatcctatatattaatccaaaaggttcaacaaacaatgaaaaaccaaccaacagaaatgagttttagataaataactaatctatggaaaactagttcttaacgtgtgaacaaataataaataacgttcgcaaatataaaagaacacaaagatttatactgattcagattgcttcattttacatgtccatttttgggttgttcaaaaaagaaaaacatgtccatttccgagcagcatgtgcaactttattcgatcaccaaaacaagaacattcaaacacttctacccctttgacaagaaccatgttttcaatatttagcttttcttttaaagaaagataattaaacgttataataaatgaattagacacat

SEQ ID NO: 191464 - DNA, 1391 bp, Cannabis indica
taagctgaaaatatattatttccttcattaacaaatctgttacatggggtgtggagcagcataagaattagccaaaatgcgttctctaaggccgttttgggaccttggaaataagaaaaagaagaaagttgataataaaaaaaaagtattcatctaaaaagggaagttttaggttatgagcttctcaaactattcctccttcttgctgctaactttgtcatcttcatcttcttgagaggcttttgactcgtcaaattccaacaactgcacaaaaccatgggggggtaaacaatatcaatgtctttcaactttgaaaacactattgaatcaaaatgataattttgtagcccttaaaggacatagaaacgtgctgcctgtggatcacctctcataaaggtggcaatttgtattatcgtgttatgcaagttgacgtatttaattaattaatgctaacgcaacccatacatagagaaatctcaaccctaaccaacctgtcatgctcacatgtcaacctatcgtattcacacgtcgactacactatcttacaccaagggagctccaactccgctaaagaatgttcgctaagaccctacacgacatatcacccccacctacgatggggtgcgtcacctgagccccatcgaaccaaactataaggagatcatgaggcacttaaaagttcacatttaagactcccataggagccaccctgattcaatcccgctagtaaaaccacccttgagtgccacttttgttgtgtaatattctgtattgcctatatttttatgcaaagcatacggacatgtttgataacataaagtctctgctaacatatagtttttataattatcaaagcatgggagaaaatacagcataaacagagataagtggacaaaccggtttgatttcgccattaaatataacatgtgcggccagaaaaccaatacagctgggacatatataacagcgcaggctgaaaacaaatatatagaattttatgtgagtgcatgcaggagatcaaatcataataaatgaagggcaatttctatttatataaaagtaaatatataatattacaaaaaatgtgtaaaaaacataattatataattgtatgcaattttatgaatatttatatatatttacaattttaaacttgttaattaaattttcaattaattttctaaaaaaaactaaatagagctaaatatgtaaatataaaaattaatatatttactaaatttaatatgaaataaaaaacgtatatacaaacacatttataaattttatttatattttataaacaatacatatatatttatgaaatatttaattagtattattaatgtttataatgctattattaatctaatatgtttattatgataataaat

SEQ ID NO: 191465 - DNA, 1484 bp, Cannabis indica
gggggaacatggttcctgagttcatgattatatccatggcttcattgaagatgattgtgaacttaaacttgattgcatataaatggaagcaacactcagaatcagaagtggtccacgtgtccacaaatcaaccaccatcatacacagagaaagcccactacaacacattgttcatcactaaatgcttcttttttttacacaaaagggtcttttttctttattttgtagtttcatcattctcacatggcaacccctccatggattcatggcttcttttctctttgtatgtgtcagtctttgattgttcttggtcttgctttttctactagcaatgtgagtaaagaagtcaactttatcactttttttggttctcaagtattactatatcaggtgtttgatcaaatgctttaatgggatttcaagtagtaatccattaattgctttaatgggttttctttaatgttcgaaaaaagaattgggtttgattgttctgacactgacaggttcatattgtgtccatgggggcaatacaacatggtggacctgagcttgtttctgaactccaccatgatattctttcagatttacttggaaggttaagtataattatacactgcaagaattaatttagtccttaaagcttgttatgttgaattagcttacattaacagcaaacaagctgcaaaggaatcaattctgtacagctacaagcatggattttcagggtttgctgcaatcctaactcaatctcaagctaagcttattgcaggtgttacaatgttggtgaactacaactctgttttcatggcaaacacactgctaacaattatctctatttgacatttttttcttttaactgttaaatatatattcatatgcagattttcctggagttgttaatgtgattccaaatagaattttttctcttcacacgactaggagttgggattttctgcaagtgaatcaatttgagatgttggtgttgagattttcatttgcaaacattcacatcatactaattggtgttgagatgttgattatgaatcttaacatcgaaaattctatgccacaagaaactttttacgcatcattttgaacttatgagttagttttctcatacaaggtcaggcccaaggaaggatcttggcaaattctatcctattgtgtatggagaagacattgcatctattggtgtagctaaaaacagtgctgggtataaacacctaacttttcttttcatttatcttacatccagaaaatactaatgcaaattattctttgtctgcactatttacagaagctgtgatttcgggactctaaatggtactttagcaagaggaaaggtggttctttgtttccaatctcgatcacagagattggattttgttgcagcaagaacagtgcttagtgttaaaggtgttggtgccatttttgctgagtcttccagcaaggatgtttcttcatcttggaatttacccatgttc

SEQ ID NO: 191466 - DNA, 1439 bp, Cannabis indica
ataaataagtctctacaaagtaaaaattatagatccgtcactgagtataacatttttttatgatacctaattatatatatcgaataagttattttaaaattgatatgatagtaattagttgctgctagcaattttttactttattaatgatataatgataattagttactaccgcataagtttttaaaataactaattcgacaatatcaataattattttgaaaaccattaaggtagtatcaactcctaaagaaaatatggagaaaatcccatctacctgcactagcagcccttctacctgcaaccacttttttcatactagcgccacatggcactctcatttgccatctcaagtcaataacaaacccagtctgcgtaatctcgctcatacgagaaatgctaaaggtaaagtgtatcttaaactgcacaatatcataaataaatattgtattgctattggtgtaatttaatatcatatatcatttattttaatttaataagtaataaaaaatcgctactcacacgacaaggcaccaactcttaatagtaatgctctactcttattcctacccaaatgtacaagaccaaaattcacaaacctaataacaaaaatagtattaataatgaaagatggttttaaataatcacattttattactattattattgttatgttttgtaattctctaaacttgttttaatcactatttacaagtacttttaatattttggaggcatgaatattactttgtataatgtaattacaaaatcttttttacaatttttacgaaattccgaataatcgaggacgttggaataaagtttcaaataactcatgacatgcgtacttgttttgacatttatacgcgcgtgcaacattctaaattatctaaaaaaagcttaaaaaatttatgaaagaaccaatttaactattttatacattgtttgagaaagaaaaaaaaagttgctgtttatttatgtgcaaataatatcaaaagtacatataataagtgaacaatcacttcctaagataatcatatcacaattttatttgccactttcaattacgccaaatgcaatataacaagtaatttcctttaaaagcaaatgaaaaatatatgtcaaatttaaaaaaaaaaaaaaaaaaaaaaaaaaaaaaaaaaattattattattatataatacgagccatcatgagatacaagggttgttgtttgttggaaacgaaagggtgcaatatgaagggaggtaaggtgggtggagtgtaggcaatatggacagcaatggtttgggaggaggcgtgtcagtgtgctatcacaaattcacaatctcaatgatgagtttaaatacaacacagacagaagtatcatctcatattaatttaagtatacccataattagaagaaatatacataaacaccactattacattttatctac

SEQ ID NO: 191467 - DNA, 2186 bp, Cannabis indica
aacaggaagctcaattaagttcaaaatcaactccgtggtagtcttgccaagaatcttgcttgaccgagtagtttggtgtctcattactactcccaaacatagatttattttattgcaagcaatccaatctcacctatttactagggatttcgttacttgtaggaatatggctgtagactctgtgttgtgttgtttgtaaagttcaaggaaagtcaatggtgattacccgagttgaacactggctaggttttaatgcatggccgagagaacttgggactatggtttgttgggctgaacaacaaagagcttgcagtgttacttcggagctgaaatatttatagcaggtgtggtttacaacatatggctgaataggaatttatgtatttttggaaagaaatgtttgtcaattgattgtatagataagctaattagagggagtgttaaagtgaggttatcacttgtaaacagggagaagaatacttagagaggaaaaactgccaagaatgtacataggacagctattgatccatactgtatagcttgtttttgatattgaaggcttaggtttggtaacttgtttttgatgaaggctttggtttgcttgtaaagtggtttgttgattaatgaagttcactctttgattaaaaaaaaaaccattactagtccaacaaagtcatcttgttgtatcccccaaagaaaattcaaaatactttatttaagaagaaacttttacagcaataattttgatgatgttgataaagtggtccaatttatgtatgcacccaatgagccagcaatgaagtgtgactgtgtaataaggccaggttgttgactctgttactatccattaacttccatgaaaatgatgttggatcatgaatttgtaatatttctgattttaagctcaatattaatatttataatttatacctcctaatatataatatctgtaaatatttcaaaagagctattttggaattattttaagaaaaagttattattaatttgaagctgaaaaaccagcagcctgaaaatccaaaagaaagtcagtgaacaatctctttccttgaacaagtttttccatattaacaaatggaaaattgctatatcagcaatctcttgtatcttgagattgaaggcatcgagtccactgcagttttgaggtccaaaccaatagccttatggtgcagttttaatgggcctgactgtagagtgtggcccaccatgccagcatgtgaattgtcctagtattagaaaaatcataatagctaggtatccatatatgtgttttctttttgtatatcatattaatgaatggtattcttttcttattgagccacactgtagacattataaatctatgtattctatgaattgaacttcagaatgattgtttacaaatttacttgtttttttttttattattatacgattagcagagaatgatagagttatgaactgcttcatagataaatataattatatgtacataaaaggtgaaatgtaatttgtgacgtaatactactaaaaatttgagttttagagccagtttgtaaggccttttagcatcggttttgataaaattcactactaatgttaatccaagcaacattgtagggtcaaacataaccaataccgtagtgtaaactatgacatcggttatttaataataactcacaccatatgtacactatgaacgtcggttattgtaagtatataaccgacaccataatttatactatgacatcggttataagtatatataacagacgccatatgttgtaataaccgacagtaaaggcttaaaaaccgacggcgtagtgttaaaaattaatttatttttctattttaaatcttattataaattctaaaatttaattaatttaaattagatatttattaatttaaaataaatataatttaaataaaataaaatatttatttttttaaaagctaaattaaatattatttaaattaattttatgattagcaaatatacttaaattaatttatggaagcaataattaaaaaattataattatattacataaatattttaaaattagtccaagtgttaacaagttaataaatctaattaaacatatgaaaattacgagtgaacctagaaaaataagttaggaaagaaaaattattatacatttcagcatcaatcgtccaagccgtaa

SEQ ID NO: 191468 - DNA, 1756 bp, Cannabis indica
gaatatatttcatgggactatttcctccatctttcttcaatgtggcttcttttggccaatatttttaaaggatgcccattcatttgtcaaagcctgtgatcgatgccaaagaatgggatatgttttaagaaggaatgaaatgctatttaatggaattctcgaggtaaagaatgggagaagctgatttttgctcccatagtcatactgcattgggacttgtcgtttgagttaatgtgtgatgcaagtgactatgcagttggggctgtattgagacaaagagttgacaaggtgttttacaccatctactatgctagtaggaccttgaataattttcaactgatttatgacacggccaagaaggagatgttggccatagtttttgcttgtgacaagattaggccatacttgattgggaataaggtgattgtgtacacagatcattctgccataaaatattttatgaccaagaaggatgctcagccaagactaatccgttgggtccttctcctccaagaattcaacttagagatcaaagataagaaggggactaaaaacctagtggtggtcacttgtcaagactagaattgcaaaagatttctaatatggaggaagtttagataaatgataatttttcgaatcagcatctatttttgttaaaagaaactgtgatgacttcatgattttctaattatgtaaagtttcttgttgctaatagcacacctctttacatatcaagacaaaaattgaagaaattcttttcagatgtgaagaactagtatcgagaatagcctatcctttataagtattgtgtcaatcatatatttagaagatatgtgtctactctatcctaaactattatcatagtcttgaatgtggaggacattttagtgggacaagaaccgtagcaaaggttcttcaatgtgacttcttttggccaagttttttaaggatgcccattcatttgtcaaagcttttgatcgatgcgaaagaatgggatatattttaagaaggaatgaaatgctatttaatggaattcttaaggtaaagtggtttgatgtatggggaatatatttcatgggactattttcttcatctttcaacaatctttacatcttgctagttgtggattatataacgaaatgggtggaagaaacgacaactccttctaacgatggcaaacaattcttaactttctccaaaagaatatctttactcaatttgggaatccacgagccattattagtgatgatggatgtcacttatgcaatagacagtttaaagctttgcttgcacggtacggtgctcttatcatccacaaagtaatgggcaaacagaaatttcaaagcaggaagtaaagttgatgctaaaaaagacagtttagcattcaaggaaggactggtccaaaaagttgtatgatgcattatgggcttataaaacatccttcaagactcctattggcatgttgccatataggttggttttcaaaaagacatgcgatttactagtggaattagagcatcgagcttattgggtaatgaggactttgaacttggagttagtggctgttggagagaaaggaccaagaagtggcacgataagaaccttgtcaggaggaaactcaactttgacaacaagtgctactctttaattcaaggttgaaactctctcgagcaagttaaaatcaaggtggtcaggtctttttacgtacaacaaaggtgtttcgtatggagcagtacatattaaaaggtgtgaaatt

SEQ ID NO: 191469 - DNA, 2610 bp, Cannabis indica
tttgaaaactaagccacttttgcctctacttctgtaatcttctactgtttcatttgcaaccaacaatgaatccaaaatttatgcttattaaaatgtattatttagttaaatctatatattattacaacattagtggtaaacacttttaacatgacacattttctgaactacatgataatatgcttattaaaatgcattttttttttgaaaaagagaaagaggccaaagtctaagcttgacccctcccccgacatatatagaaagcctcacttgtggcggaggaataccatgattacaatgttctatcacaaacatataaaacatttaaacaaatcatgtactgttataccacattacacaacagtctccagtcgctactcaaatctaagaacgaaaactgctcaaaacttttagttttataaacccaaacagctgtccaaaatctaactttttcccacaagtcttcaactgaggcttcaatcccttcaaaaattctgttatttctttcgagccaaataacccacataattgctagaacagctgtcctccataggtatgatctaccctttctaccccccaccttgctcaccatcattaatgaaaatgtattatttagttaaatctatatatttatacataatattatcccatattctagatctgcagggaggacaaaaaacttacaatctccttctcatgtgaatttaaatcttctaaatctaagttgcaaacgaagaattataatgcatcagtgtcagtgctggtggtacccgagctccctctcgctcttggagttccaataacatgggttcttcctccccattatactacaaaaagtctgctgctgtcatcatcagattcatatagtcaatgggacagtcaaagtcgcaaaggaactatattatattctttattgaggactttttatgaaaagggcgaagctgtgccaaaggatgctatttccattgatggagatagaataaggacagcagaaagtaacaatattgcttgcattcaggctaaagatcgtaccactggtagaactgaggttgctgcttgtgtcaaagttactgaggtatggatattttgtcttatgtccaagaccaataatttttcttagatggattcttcttagtatacattttaaaatgatttcctttcatttaatttatcataagtttgccaatggtaaatttgctacaactatatgagagtgttgatatgcttgttgagctgcagtcatttttagcattgaccaatgccaatatctcatttcatcctagggcctttaatcagtagagtttacttttgtaaaagagaaatccacttaggtcttctccgttcaaacatgttaccaagtttaaccttgtgttttatgtatataatttataggatttgattaaacaacttaaatattagataaagtgaaagcaaattgaaaagctatagcctatatttgccatttttttgtgcattaatatatttataatattttgtaaatagtttataaatctaactgataaacataaattaaaaaaataaaatccaaaactatttcttaaaaaaaaaatattatcaaaccattacataaaaaaagtgaaattaatatacttgaagttaggaatttatgattataaagaaaattgagggttcattttttaaactcgttggttaaattggtggacttcaatagaaggagcttaaggggtaatttgcctttgtaatatttgcgtaaatgtgtgttgtttgttatctattcaagatcattaattagttattatggattatctgagcaggtggctcaaattagagctgcaaatgaggactttccttttcatgtaatcaatcttgctgttggttctgaaatttctcttccagtaacctacagagactctctaggtatctatcatcagtagcattaactgccactactgttgacagtggatatgcattaactgccactactgttgacagtggatatgattcatattctgattagtctttacttttgtactaaaccaggaaaccctttttatgaggcacatgacgctgttctctttgaggttgtaactaactaccctgatgttgtgttcataaacaagacacatgatggcagtggaaatatttatattaaggtatggtggtcgtttgaaatttatgaatcttcaaaatttcattcgaaaaggattgaacttaagcagccatcaggttgatgaaatggattttatttgcttcaccataatgcgtaaagtaaaaaatgttttccatgttatttacatttctggtatgactgattctttcgatatctgtttgtaggctatacgacatggtagagctcttctgcgaatatcaattgataatattctacagaaatcggactacgtgctggtatcttgtttaactgcatttatgggtttagtgggccatgatgctgccttttgcttttagctatttaacttatttaagatattcatatatatatatatttatagacaaatagatatagatgtatatgtatgtccaagcatcttgttcttcttcttacctttgataattgttaataatttttatgcacaagaacaaattacataatgctttttcttttatgtt

SEQ ID NO: 191470 - DNA, 2187 bp, Cannabis indica
aataataactctctcgtgaatatctttttctctaaagtaaaaagttaatatgatggttaaagagatacaaatatacacatatacaggcggcaattgattgctttaagatttttaatggaaggaaagataagataatatcctgaatcaataatttagagattggtaaaataagcaaggagtttgctgtgaattgttgatttagagattggttaattaagcaatgagtttgattatgtgaaaacatcatccgtaacttcaataaaaaaaatgttctcttgtgatgcagatattgtcattaaaagagcaatgcaattctatagtgatcacaggtcattccttagggggtgcaatagcttctctttcaacattgtggcttcttagtcattgtcacctccaatcagtctcttattcaccctcagtcctctgcatcacctttggctcaccattgctgggaaacgagtccctctcacgagccatccttcgcgagagatggggtggaaacttttgccatgtagtgtccaagcatgacattatgccaaggctgctccttgctccttcagccacagtcactcctcaaatgcagctgttgcttcatcattggcatgtctcaatgggaactactactacggctcctcattttggcagtcatcaaaatgttgctgctgcccaacttggagacccagagaaagcagagttctttggactcattatggcttgcttgaataattcttcatcagaagaggctttgaaaaacttgttgttttggcccttcggaaactacctgttgtgctcccaggacggagccatttgcttggacaatgcagcatctgtcattaagatgatgcatctgatgttcatgacaggctctcccaatgagtgcattgaagatcatctcaagtatggagaatacgttggaagaggttcttcacagtacctgaaacgttttgtccaaatgcagccttctgaatcatgttacgaggcaggacttgccttggcattgcattcatcagggattccttcccaggtaatatcttgtttttgtcttttctaacacttggaagtattatatcaaggaaatttagttcacatagtccaaaagaatgtagggaaagtaacaatcattcacaattattcaatgatccctcattttcacctttatatatatatgataaggtatctcaatgttgagttaatttgcaggaaccagctgttagttcagccaaagactgcttaactaatgcaagacgagtggggcggcgcatgcctgaaatcacgtgtgctaatcttgctgtaaaattatccaaaattgtcccatttcgagctgaaatagagtggtataaagcatcttgtgatgagtccagtgatcaaatgggatactatgatgccttcaagagaagaggatcctcaaaaaagggtaaccaagttgatatgaataggcgcaaacttgctggcttctgggacaatgttattgacctatgggaaagcaatcagctgccttatgattttcataaaagagcaaaatgggtcaatgctttccattcctacaagctaattgttgagccacttgatattggagagtactacagaaaggacatgcacatacataacggacattacttgagaaatggaagaccaagaaggttccaaatttctgacaggtggtggaaagaaagaagaaaaaatgagaaggataatgatgcaagaaccacacttgcaagtgcgactcaagattcatgtttttgggcaaggctggaggaagcaatggaattgctagctaaccttcaaagtgagaatgaagaagtgaagaaggagacatgggtcaatatcaataaattcaatgaatatgctaggagattagttgaaaggaaagaggtgtccaaagatgttctggccaaaaactcaagctacactaagtggactaaagatctagaaaaactaagttcaccacttgtttttcctgttgactcctttccctgagttccctcagatgaagttctgaagtttccaaatttcaaggtgcctttggaaggtcatttgagaattagagttcgatgtaattacgggtaattaccaggataattacgtagtttgacgtgtttttataggcacgtaattacataataactagaagataattgggaggcctgaattactctctctaattctcatattcccataaaaattaaa

SEQ ID NO: 191471 - DNA, 5300 bp, Cannabis indica
aaaatttatttatatattttcttaaagttaattaagatttttgctcacatatacaaaatcatactccctaaactattgaaattgttagatttaaaatttttgtctaattttagtaaaaaaaaaataccatagaataaaagtttaagggcataattggttagatatcaaagtccgaggaacatttagttcataaacaatcactgagttagttaaattgaatgaaattggacaaaattctttaaaaccaacaatctcaatagttcagaaaaaaaaaaaatttaattgcatgattttatacatgttaaaattctaaattcctaattaaccttttcttaattatagtttatttgaattctttttaattaatatttggaccctgaactcaaatcttggctcccaatctagacctcgaataacagctcccagtcacaactcaaaccctaacccctaaccacgatctttggccctgacctagactagattcaaatgcaaatccaaaccctagaccctggcctagactcaaactcggtgccggagtccgacccactttctctaacctcactagtgctcaattaaataaaaaagaatcctttggtggagggcactgctcccacagatttatttgctgaggctttcatttcaaaaaaactaatgggaattacagaactaaaaaagaatgccatcctatcctaggacaaggcaaactccactgtcctttttcaaaaaaaaaaatattacacatgcaattaaccagtaaatattcagaggaaacaaaattaaataacgtgacaaacaatgtatacaacagatttaaacaatgacatcaatggatgggttaggttgattaaaaaataaaagcatgttataccaaatctactgactggaaattggaaagaagaaaatggaaggaaatctcataacaaggttggatatttggcgtcaaggaattctctaagcgtccgagcagctttttgaccacccattagttcagctaatctctctaccggaaggagtgcaagttccgacaagctcttgcaaccatccataatggccctgtagtttgaatcattcacacctggtagccgtctcaaaaactccaccgccgatgtgttgaaattttcagctctgtaatataataaccaaattgtaaaacattaaacttggcatctttatcttatctttaaatgtaaacgaataacaagaacaaatatcatgtcttaggttgaaggcttttgctatgcatctctacctagagttgtgtggatgtaaaacctagctcccaccagtaataatacacaaaacataatccatgtcagttacctcacgtcatcatcgataatgccctcttctgagggtaccccaactctcattgctttcgcctcatcaggttcgtcctgatttgccttgagtgcagcaaatatctctgcagtagcatgtagactgcgggaccagattatgcgcaggcgagggaagtgtagaactagcaatgacagcttagatataacgttggttggtgtgacatcatctccaatatcagttgcagactgcaaaattgattaaatgcattaaaattcaaaacaattgagttttcaactcctatccccattctatattttctcatctacttacctgaaatgaaaagcttttatcctgtgaaaactcaataaggaggacaggaatcttataataccgaaccatcatttcaacctggtggtacaggcggcctgatgtaaaactcatgaaaagatcctggatactctttctctccacacatatagatggtgaaagaatataatccccaacttccaatgtcactggaattattcgcatgcctttctgatgaagaacattcggaaggctgctcatgaattccctcatgtcaactatgacctgaaataaaacagattattatgcatatagtcttgtgtgacaagagaaacatattgcagagggtgcaatccttcacctgcatttctttctcaacttcctttcttccccctgcttttctcgttatggaattttgggaagatgtaccttgtgcctctacagaagaattcaatcccaggtaatttgcttcctgataaagaatccagttattgatccacaattaaagaaggctatatgaatgaaacttttcaccgagaaataaataaataaaaattggaagataaagcagacaccagggaaagttgaaaggagataacacgaagaccaaggctaaacttttagataattgtggttctaaaatccaagtgaacatgattgtattggcatgttatctcacaaaatgaataccaaaaagaaaatcctatgatggggtggaagaaaaaccaaacctgatcgactgggatcatcatcaatgatttctgtctaatcaatgattcaaacgctccattctccctacgtatgctagcctcaaatttttgcacctctgtagaatcttcatagaatagaaaataaactttcaacttcttagagggattttcagccttgtggacttcaatttccctaacaaaggtcatatctggatgataaacaatgataacagaaggcttcaaaatgtcaagtataggttgaccactttctagggcataaaagtatgctggaggtattggtttattagcacttccagaagctgtagcttcaggcacttgaacatgtctccgcagaaccactttgtctgtggatgcaacatgacaagtgccttctgcaaaagcacctgcagctgctggatcaacttcattatcattattttctgagctagatccatctaaggttgccttctcactactcttattatcattattactacgactcttacaattgtttggggtttcttttttgttcttcactttttgctttcctcttccacctccttggccactagcttcaggctgaggatcaactccaacattttcatttttaagtcgttttttaatttctgatgctgctgctactagtgcatcatgttcctgcttgtttatgctgctaggttctacattttttgcaggtgatacaggtacaactccatcaagaatcccaaaacctttgggctcctttggtttctttttaaagcgtgtttgcaagtcacgcagctgtactttgttcagcaagtagttctcccattcttgttgcatgaccttcacaaaaaaatgagcaaattacaatttattctttttaaatgataagcagttagcttgtcccgtaagagtatttgtgttcagttgcaaagagaagtagaaaaaatagatgaaaagagaatccaaaacccccctttacccaattaataatacaccctttctagcactaaaaaaaggtaatactttcaccaaaatgcttgaaattatgagtagccaatatacatgctctaatctcaactaatcaatttgacaccaaaataaagtgaatcaagatcaaagatttgaaagataaatagagttttaaatggaaaaaaaaaatggcatgaatagttgaatacttagcaaactatacagtttcacacacttcataataaaaaattaatcaagccttctaacaaacattgtgaaaatatcagtgcatatgaccagaagaatcatcagacatcatcatacaagattgctttccaatactttatgcaacaaagtgaccaaactgatgtacaaaattagaaaaaaagcaaacctttcttggaccatttgtgatgcattgttcaagctgtatgcatgagcgctcatctttgcatgccaccagaacaataccactatcatcctcttcatgtctatcaagttcttcacttgataaagcttgcttttgtctttcttcttctatctcttcaaggacctccttaataaattaagaatgttgatttagacaaatctatcccatgatatcagacaaataagaagtaaaatatatctaattacaaagctctaagcttttaatcaaattgatcagaacagtatagctacaaaatgattgaggaatccaacggaacacatagaaacaggaactcactcactcacacgtaacaccttccacttcggtgcttcctccaaaacttcatctaaaacaatcgaaacattcgggttcactgatgaagagccaccaacttctacacaggaatgtgaaaagaaatagctattcagaaaagcaacaatacaacaatgagggtgaaatgttcaacaatataaaaacactcatctcgtacttttattttcattatcatcagcagtcccctttagttttctctttttactggttgaactcttactgggactgattaattttgaaccatccgatgccacaaaacgatatactcttttctttgccaactcaaatatcttgtagcttgactctgcaaacatccaaaccgacctataactctctgaaactcgaagtgtatccaaatacttcaaataagtcactgcatcatacctaccccaataacaaatcaaaataaatcaccaaaacccattattatatcaaaatttacatggcaaagtaactattctaagctaacaaaaatctaatgggatataagtttcatatgtatgtgtctgtctgtatatataattcccttgcactaaaaagtcatgctcaatcagaaaatcccattattaactcaaaattggcactgaaaagaagcaaactttcatctaaaaaactactgcattagtttaaataatgaaaattcatatatgtatatatacctaacaagatagtccaagagttttctgagtgtcttcaagtcaaaaacgagctgcttggtcttcttccccaaagtatgccaaatgggatcgagttgcctcctcacaatctcatcaaaagacttaaacaatccattctcaaccgtcagatcctcaacatcaaccttattcgtcttcctcatctccttcaaacacccatccatgacctccaaaatcgccttctgaatcgccaccatgtgtttagccatcggaaccctaatatccaccacttcaggagcctccttctccaactcctgagacacataaacatggaaccgaggccaaaggtgcaacttcctaatacacaaacacttcatgatcctctcagctttagaaaaccctgaaaccatcgagtgaggcttatcagaaaaagccctgacgtaggcatctcggttcagggagcggaagattctgacgatgaaagcctcggtggaggtctcggagagagaatgagcggtgaggataaccagcccggcgatggcagaggtggggattttggagttgaggaggtcgacaatgagaattcgaggagttatgaagaagagggagccggaggagtagagagagaggcgt

SEQ ID NO: 191472 - DNA, 3214 bp, Cannabis indica
aagtaacagttttttgtagtgacatcttcgggtcaaaatatattattgaattgcaaaaatgtactataacacacagtacaaaggtatctagcatgaatagagaaaggggccaaaaaggaagagaggacagctatccaacatactagagaaaagcaacaaattaagaaaagtaaatactaaaacgatcattgataaatcgatcattgataaatcgatcattgataaatcactgtttaacatcctccctcaaactcaacgagtaagaaagcacggtgagtttagtgcatcactcttgaaactgagaggttggaagaggcttcgtaagatagtcgacaacttgatcagcaaagggcgtgaaagagagataaagagcgatggttcacttgttcacgaacaaaatggtaatcgagttcaacgcgtttagtgcgagcatgaagaacaggattagatgccaaatggagagtactgatgttatcacaatgcctaggggaagcgtgtaatgtgccaaattcaccaataagagattcaagccaagaaatttcagaagcatcgttggcaatagcacaatattcgtactagatcgagacataatcctttgcttagaggaggatcaggagatgagattcaagccaagaaaagatggtatacgcactcgtactacgacgatcatcgagacaagatgcctaatcgacattagtaaaacaatgtaaatgaagagaagaatcccgttgaatgaaaagacgaaggtttgccatactattgagatatcgaagagcgtacttagctgcctgaagattaatggaagcatgagcatgcataaattggtataatttgttgactagaaaagagatcaatttgagtaaaagtacaatattgaaattgggatgagtgtgagaggtgtattgactggtttagagtccaatagacatgtcttgataagtaaatcatgaatgtatttggtttgggaaagataaagaccaacagaggtgcgagtgacttgaatacctagaaaaaaaaatgaggaaagcccaaaccgcaaaatgagttcgaagatacttgagattagggatgggcaacatccaatctaatctaattgaaccgaaccgaactgatccaatccaatctaattataaaaaattagaaatccaattataattggattggattggatgttaaaagttggattctaattggattagatcaattattggatgccaatctcaaaaaatttaattaaaaactaatccaatctaattacatttatatatattaaaaaattatttatattgatttatataataaaaactaataaaaaataaaaatatatataataattattattttgagtgatttctttttgtgaaatttgtaacacttggttgttccatgtatttatttttatgatattttattatattttacttagaaatattattgttttagttatttcaaacgcttagttacattacgcttgtaaaaatgatatttttatggagtactaaacttaaaaattaatggtgatatttagtttttatctatttatcttcatattttttaagtcaatattaaaaattaggtgtgtaattggatatccaattaaaaaaccaatccaattagtaattggatcagattggattagattttgaggtccaattggattgaattggatgatgatttttcaaatcaattactaattggattagatcagatgagaaaaaaagattggattggatcggatgtccacccctacttgagaagattatccatagtgggagagcaacaccctgtaaggataatgtcatcaacataaaccaacaaaatgataatagtagaggtagattggtagatgaacattgaactatcagctttaaatgcgacaaaaccctaatcaagtaaagcagtggtgagcttaagaaaccaagcttgaggagattgcttaagacaatataaagtgacttagataacttacaaacatgatgaggtgctgatggatcaacgaatccttaaggctgcgacatataaaaattttcggttaagatgccatggaggaatatattttgtatatcaagttgtttgataggccaatgaaaggagacagtaaatgcgagaaccaaacgaatagtgttagacttgataatcgggttgaaagtttcatgaaaattaaggccagaagtttgatgacaccctttggaaacaagacgagctttataccgattcacggatccatctgcatggagcttgatatgatagacctacttgcacccaatgatcttggcaaaaggcgacagaggagcaaagatccaaattttttgagatttaagggtagtaggattagttatgctgctagaatgagaggaggagcgggtaacagcagtggagcactctgatgagtgagatatgcactaaaaggtctagttggtggggtggggttggtattggagatttagtcagcgatatcacacattggcagtatgagcaagacgaaatcaaatctgacattttggtttgaaagatgggcgagaggaggagggtgaggcagggattggtgagccatggtgctggtgaacaggaaattgtgggttagatggggtggacgagctggggaggttgaaaataagtctatgaaggtggagtgatgaatttaggtttgtttttaggtagctgtagattggaaaaattggtttgaagggagctaagtgaggcgatgttattttgacggtgaaggcgagcatcataattaagcaatagagagtgaatctcttcaatgaaatggaaggtttgataccacgagcttgaagaggagagataaaggcattgtactccagacccaatccatttgaacagataattaatcaaatggtcttgaagaaaaactggatcttcaatagaagcaagaacattacacattgatttgagtttttacaaatactgcatagctgacattccttcctttatgagattgttgagagaggttctatactttgatatttttgcaaaagatgtagttgtatatatttgttctaaaaaaacaaatctctaaagatgtgataacgatatatatgcaatgaaataaaaaatggatcaacttgaggtttgaggtggagaagatgatgaatagtgaggaagggaaaactatggttccatcaataaaccttcaagaccgttggctattatgaatattttgcatattcattccctgcaccaagtagttaga

SEQ ID NO: 191473 - DNA, 1178 bp, Cannabis indica
aaatataactgcatgtgctgcaaagcattatttaattaatctgaaaatttacttaaacattttaacactatcatgtacatatcaaacaataaggggaaaaaaacatagctaagtgtattataaaaataagaaaaatgagcataataaatgttacctcatcgtatgccatctcatgaagagagaatacacaataaaccattatggaagacattaaaggccaattccttaaaagacttttacttttaggtttattttcctcttgattttgttctttactttgatttgtattgatcataaaagatgcgttttccaaagagtcaaaggaatctgtaattgaagctctgtttttcccatcatgcttgtgtaacgtttcctgaaacaattaacaattattatttgtactaataatgaagaacaaacaaatcaaaatgtcaatgattatcttatattgataaataacaaaagaatcaatttgtagatcattgacaaagattggaaagaatgacataagatgtgtaccggaagccagaaactcataataagtaccacaactgcaataagtgatatacaaaagcatggcatgaagtatggaaacctgtatgtaacattaattgaagattaatttcattagtgagtatagttacaaaattaatgtatcatatatatttgaaaaatatgactgtaatttaccttccaaagaatgaatcttttgaaaaaatatgtggatacttctctgctggctgttgaaacaaaagtttttatagacacattgatcacataacaagtcacaaaaaatatatatatttacactttgattgggtattctaaaatctaacttagagaagaaggaaaggaagtacctgagcaaagaagcctcccagagcagggccaataactaatcctatgccccatgctgtactaacctgaaataaaacattactccaatattaaatttgtaggaatttttaagataggaatttactatcttgccccctacaccaacaaacaaacgaatcaaataccaaggtcaatttcgacctttctctgttcactttgacttttcaaagttaaccccaaaacgaccccgttttgtctttgaacaaaacctaggaatggatcgagaaccttctcatttgtttcctttctctctgaaatgctagaaaccctagcagagagtt

SEQ ID NO: 191474 - DNA, 3714 bp, Cannabis indica
aaatgcttaggaaggaaatattttgttagagaaaaaactaggtaaatcattgagggaaaaattatataaatatttttgttttcctgaatatatctataataatctcaattttttttgtttaaatccaaataggaggaaatgaaatccgttttttccaacaaagtgatgtaaaacacacagctttacttttgtcttgtaatctgaattagaacggaactgttcaactgttgatttcccaaagttggtgtttgaatggcttagttagaattgttctcatgcatagataagatgtgattcttagcaagcttattgtgaatattgtagatgacacgttatggactggaactccgggaaattatacgaaccccaaagctcccgaggcactagcagaggttagaaagcttgttgacaatggagaatatgttgaagctacaaaagaagcagtcaagctgtcagcagatccttctgatgtatgtacattttatcaattactcagcaaaaatgaaaaatggatggaattatgtctacctctgttattttgtactagttataactgattattgttaatataggaactaaatttgatgagttccatatgcaatgaaggttatctaacattatgaatacattgtgtaatgaaggtttatcaactactgggagacattaagctagaatttgatccttctcatattgattacgccaaggacacgtacagtagagagctggacttagacactgcaacagtaaaaataaaatattctgtcggtgatgtagaatttactagggaacattttgcttcaaatcctgatcaagtggttgtaacaaagatttcagccagtaaaccggggtctctttcatttacagtatttttagacagcaagatgcatcaccattctgaagtgaaagggacaactcaaattctaatggaagggagctgtcctggtagaaggatccgaccaaaggtgaatgacaatgacaatccaaagggagttcagttttctgcagttcttaatttgcagattagtggcagcaatggggtcattcgtgttttggatgataagaagttagaaattaagaattcggattccgctgtcttgcttctgttggcggcgtcttcatttgatgggccatttacaaagcctgttgattctaagaaagatccatcttctgacactctgaaagctttaaatgcaataaaagagttgtcatattctgacctcttagctcatcatttgagtgactatcagaatttgttccatcgtgtctcgttggagctttcaaaaagttccaagagcatctcaaaaaacaatgacatatctatctcaactgcagacagggttaaatctttcaaaactgatgaagatccttcgtttgtggagctattgttccagtatggtcgttatctgcttatatcttgttcacgaccaggaactcagccggcgaacctgcagggtatttggaacaaggacgtggagcctgcatgggagtatgtaactctttctctcagcatcttaattcttcaaacaaaaatagatatgtgcagagttaagctttacaggatgatatagatattataaatttaattcagagaggattaactagttggaatgattgccttcttgcctttgagttgctaactctataatgcaagttacattgcatcagcattttatgtggctttaagttccatttttgtgacacattcagagctctttaccatgcagtggtgctcctcatctgaatatcaaccttcaaatgaactattggccttccctttcttgcaacctaaaagaatgccaggagccattatttgattacatatcatctttatcagaaactgggagtaaaactgccaaagtaagattcagctctttctagttgcatttacagtttattttttcacatattgctgtggaagtaccctgattttgaggctaattcgatggataagagaaagagagagaatgcgcaaattgttttatttacttagaacaaactttcaggtgaactatgaggccagtggctgggttgctcatcaagtttctgacttatgggcaaaaacatcaccagatcggggtgaagctgtgtgggctttatggccaatgggaggagcttggctctgcacccatctatgggaacattttacttacacaatggacaaagtaagcttctgctgtatacctcttcctactcgaatccttacattcttgcataatcagtcaaatgggttgtgttcattgtaagcattttcatttcacccacagcagggagttttatataaaattaataatttttacaaactcagtaacctgtatgaatgctgaactgtcgaactctttcttagctatatccaatcatgtaacatcacagattcagtccaagaaaaacttccatgcaagtttatggatgatataggaaatcttagtgcttactcttattcaaatttctggtgggcaaatgtttctaatatacatatatgtataacttttttacataattaggattttctgaaaaataaggcatatcctttgttggaaggatgtacttcatttctgttggattggttgattgaaggccctggaggatatctagaaacaaacccatcaacttctccagagcatatgtttatgtctccagagggcaagcaagccagcgtgagctactcagcaaccatggacattgctattattaaagaagttttctctgcatttatctctgcttctgaggtcgagctcttgtttcaacagctgaagcattccttgtctgttaaatctgtgtgctttgataataaattttctctataaacagattttgggtagtcaggatgctcttcttacaaaagtccaagaggctcaatccaagcttccacctacaaaaattgctagagatggttccattatggaatgggtaagctttatcctttggttccatcttatacaaccttgtgcagatctcatatatgttgagaatctgctcataaaatgagagcttagatattttttctgctttatttatggcaggcacaagattttgaggatccagacccgcatcatcgacatgtatcgcatctttttggcctgtttccagggcatacaataactgttgacaaaactccagagctctgtaaagctgcagactatactctctttaaaagaggtatgtgtataatgactatgatgaagaaaagactaaaaagaggatatccatttggcctattaagattttatgaacgtgcatgaaatttgttttgttgttttgatgatatttatttttataccaaattacatattatctttttttgaaaaaaaattgaaacaggagaggaaggtcctggatggtcaacaacatggaaagcttcattgtgggctcgtcttcacaacagcgagcacgcctatcgtatgatcaaacatctaattgatttggtggatccagatcacgaagctgattacgagggaggactctatagcaacttgttcacggcacaccctcctttccaaatagatgccaactttgggtgagccacattctgtgttatgtctctgaacaactctgctcctgatggaatttgatcgaaactgaactgtatcacatcagcttttttttatattctcacattaaaaaatctaactcaatttgaaagccttgacatgagggacttggtgataagttataagattaacaatgcaaagccatttttcatgtttttgtgttttt

SEQ ID NO: 191475 - DNA, 2425 bp, Cannabis indica
taaggctgtgggtgagaaaagagattgaaaaaggaagttatagttacagactttcactttaaactcaacaaactaataattaacaatacaattaataaatttgagtaaatagtgtaaaggaaaaagtgtaattatattgttacttaattatagacaaaagataaagagcttttggcagttttggttttaaaaagttcttatttatttgatgggtaaaacgtacagttcaaacaatgtggctcccaattcatatgggacattgtaataacaatcatttttcatgtatatgcagtactattcacttatagatatcttaaatgttatatattattattcatatatgttttgaaggtattccctttgctgatggaacatatatctgaaaaggaacaagcttctctggtttggaagttcttatgcagtgttccaatagtactaatggaggatatgttgccatggaccctctcatttctttcaccccaagaaagggttgaagttgaaaattgtttaaaagatattgtaccagaagaaaagtcactacatgaggtagttatttaattaacagactagtaatccatagccctctaaaatcattaattattatctcaacttatttttaagtattattaacatcatgactggctcttacataagctaaatataatttactcaaaatatatattgtgaaggtagtactttcttggcttggtggtaatagccacccctcattggaagttcaaacatcttctggtggatctacagacatgagaatattaatcaagccctactcatgtacaagatatcttggagaaaattggagggcaacaacattattaaatagtaatgatattggacacaatccagttgatggtcttcatctttggcatggtgccataaggaaagatttgataaagcttcttgaagagctttatcaatcaagaaggtcaagtgactattctaatcttgacagtgtagttgtccaattaaaatttcttgctgatattataacattttacaagtaagttgtttcttccttccttttgtttttttggggtcattctttgtttattatgtaaatatattctctttagatatttatataattcttgactttgtagcactgcattagagaagctattttgccctgtgttgaaccaacttgtcaaaggctctttgtcctccactgaaggattccctattgagagtcacattgaaggtttacagatgttgttgtactacagttctccatatgataaatctttgagtaaatttgctgagaagctttgctgggaactcgaatcatttgtggtggaaatcagcaagcaatttgagtttcatgaagcagaggtggaaattctttacactgacttacactaacatggatatttagtcatttattttcatgagatatcactaagtaacaatcatcatttaaacatggtcagccatatgtttgtgatttgacatttatttttcataatatcctttcaggtatttcctatcattagcaaaaactgtagtcatgagatgcagcaacagcttctgtatgtgagtgttcatatgatgccattggggttgcttaagtgtgtgatcacttggttttcatctcacttatctgaggatgaatccaaatccattcttaaaaagatcaagcaaggagatacctgcatccatgactctttttcttcactactgcatgagtggtttcgcgctggttgttcgggaaaaatctctgttgaaaaatttggaatgaacctgcagcaaatgttcaagagcaaattctcattcttatctgatcaagtcaaggatgcatctttatcttcaccattgcaatccaaaaataagaaatctttcactgaatctgagcctagaataaagttaatgagctctggcacaaagggcaaaagctctttttcatcatcttttggctcccataatactagaaagtatgaaacatcatactctagtgttataaatctgcacatctattttccagacaaaataaagacatatcaacatatttctggtgaaaaccattctggttcagttcccaatgatccaaaaccaatggatttcatatatttgttccataaggctctcaagatagacttgcagaaccttctttacagttcagttcatttagctcaaaatccttggtttcttggagacttttacaagcgctttcaactaatacagtttttgtatcaaatccatagcgatgcagaagatgaggttgcctttccagccttggaggccatgggaaaattcacaaacattagccactcttacagcatggaccacaaattggaaattgatcacttcggacgagtctcctttattcttgacaagttaactgaactgaatgtttcaatttctgagctaaacacaaacatggatcaaattatgaggaagcattatcaactat

SEQ ID NO: 191476 - DNA, 1111 bp, Cannabis indica
aataaaagaaaaacaaataataaaatgcccatttgcatgttaataaaattttaagtagtttgaaatcttaggactctatctacgagataatacaaaaccgatagaattacacataacctgatagaaaaacatatgaaagataaaataaatagcaaataaaaacataacaacttgttctttagcagaaagatagtaagagttcaattaaaaaaaaaagaattagaacaccacaaaataacatgaagacgttcctatctattctgaacaaattgtcacacctactatgatgaccatgcaatatttctactacatactcatgacctcaaagggccaaatttctataaggttcctcagttaaatataattgattgtaccttacacaagcaatcaatattattattattattattattataaaaagacatcctatatgcaatatgttaaaatagaagctcataatacaattattattattattgtcaaacaaagactttcctatggttgcctcactaatatgggaatatacacaagtctttcaacactgctaaaggaaaataaaagaaaatatcaatgttatatataacaagagtaaaagaacaattgtcttttactcaaaaaaaaaaaaacaaaaacaaaaacaaaaacaattgtcttaattgagactaaaaagaaaaaaaaaattcagtgatttcattcattagttgtcacagttccaagcatcaatacccaactgaaaacaaaaggaaaaaaatcatctccacacaatcctacataaaatttactcaacatgattaaaaataaacataatatacacaccatgactctaagttcaaatacataaaacacactaaatcttttaaactaatcaataggaaagatccaactacaatagaaatatatgaaagtaagttcaaatatagcaggaaaatgattgaaataaaataacatcacataattcaaataataagtaagaatttttagccaaaatgataatatccttacactattttccatccggaaaatttcaccttcctataggtatttatactaacaaattatcaatacaaaagaaatgaggctaaacccactacaatactgtaagggctcgttt

SEQ ID NO: 191477 - DNA, 2941 bp, Cannabis indica
tacaattagtactacaaactacagtagtagataaatgtaaagatagaatatattatatataatagaagtaaaaagtaaaaaaaaccactagtcaggttgggcgggttattttagtttaattgggcaggttgaacctatttttaacctgcccacttaacagattggcgctttataattttgtcgaattttttcggtttgtatttttagtcgggtttttcgatttggtttggacggttttatgaaaatttatgcacaaccctagtctaaagtaagtaagaaaaattcgtgatacaaaaatatattaatgagttgatattattttgtatattgcaattaggtcattgttttttttttgttaccttgtagtttatctttttgttattttatagttatttttatgttgtttgttaaattattttacagttgtttttattttactgaaacataatatttttgtaattttgaaactttaacctagtatttttgcaaacttaatacagtaaaaatgtaaaacaaaaaatatgacagtaaaaatataaaataataataaaaaaattactattccacttgtaagatccccttctaatttccacttgggactattgtcacggcccgtgattgggccattttcgaacataacatggatcagattcaaacccataaaataggagaacgggcttgggcctcagcagtcccgagaggaacgacatcgtttcaaacgaaagaatagatcaaaatgtctctctcacccctgtataatgtattgatttgggaaaaagaagaaccgagaagtggaggaatcaaaaatggcaggaagattgagcaatgtggcctccaagatcatgggcgccaacggcgtcgtttcacgctccctcgcatcctctgttcgccaccgttccggcatgggtctccccgtcggcaggcacatcgtccccgacaagcccgtaagacttgttattaaaattatcagattctccgcaaaaccctaaactaattgaattattcgaattccaaaggctaatctttgaagttaatctctttttcttcagcttcatgtcaacgatgaattgacttgggacaacgggacaaatttaccggagccctgtatagatcgtattgccgataccgttggaaaggtatacaattttgggtttattggttgaaatcaagctttgattttgttttgttgagtttctgaattttatgtagtatgaagcactagcttggctttgtgggggtttaagctgttttgctgcgttgggattgatggctgtgtggaatgacaaagcctcaaagataccttttgtaagtccaaaaactcacgctttgaatctggtttatttgaaaaaaaaatcatgcttttataatagtattagtaattttgagtgtgcacaagatggtgttgtgttgatgtttgccattgattcaaatgactaggtgtaacatagacatgatgataatcaaatgtgtcttcttgaattgagttgcttgattatgaatcattattggtattggctttggaaaactggttacattgaatgcaactaagtgttttataattaagaaattgtgtgtttatatcttgatgctgagttaaaacatctttttgtttgagttctgatcttctttagtggatttcagttgtggtgctgcttccactgcccaacaaatgtttcaagtgttctgaataggtgtttcgtttttgtgcaatatggccttaactggctttgtaccgaatttagctaccataaaataggcttattttctgtgtcctgtggccatggtgggatctttcctttactggtttcctactttgtttttttctttacttttcttaaatgatttcctacctcgtttagttaccatatgaaaagactttcttctaatgctcatgtagtttccattataaatgcgagcatcattacttgtgttgaaagagatatgagcgcacactcctgcttcctttgaaatattttaccttgatggcagtgagaacttgactcttagataagtcttagaaaatgacaatgaaccaggaacctgcatgctcatcaaaaattgcaatgcaacttattaattacttctgttcctctcgattaatcatactttgatgtgcttaaaaccaatgtgtatgcaatactgtgaatctaccgaactgtacttgaggaggtgtttgcatcatttgagagtttataatcttgtacatattgagttttctctttagattatcttatgtttggctttgttttccatttgaccaggcaccaaaagtttatccctacgataatcttcgagtggagcttggtggagaaccatagatagatttggggttgtttggttattgttatttgaattcatctttcatcatttgtaagttttcagagtttgaaatggttcaaaataaaggatcatgttcaaattttccttaaataatgcatcatcttcatctttaactaaagttacatcctcaaacgtgaagctggatattggttttccttctcttcccttgaggaattatgttatttcgatcatttttcaatttccatggagtgcacaccatggttcgggttaccattatgtggtatttgattttgataacaaaaacatataatatagaaatatctatatagaactattctatgtgggaaatcctcatgtgggggtgggggcgcaagtgaggagaaactataatatctttatatatctattttttttttgtttgatttagcaaaatattttaagaatataagaatattctattaaatttaacggtttgtaggattagttttatgaatatagggtattttttaagtgagagtactattttttctcttataaatgcgggcaattttgtaacctttgatttttaatctaaagtaatgatattttttcttatgatggagtatcattaatgagttatttgaaaaaaaataaaaataaa

SEQ ID NO: 191478 - DNA, 3147 bp, Cannabis indica
cactaccggaggccacctcctttattttgagatagtttctgaagagatcccaataaaagatgcgagtatcataatgatattgggcacacaaccagtgaatgcaaaaatttaaaggatgaaattaagagcctaatatggttggaccacttgtacgagtgcataagaaatctcctaccacatatgaaagaaggataagtcagggttcaagcacctcctagaggagtggttcaggctttagatgctcaggtacctctgggagcacttccacccaatcaagggatacaatctagatagccaccctggccaaatgggagggtgaccatgatctctagagggtgccatatagagggttcaacccacaatgagatgaaatgctacgcaagagcccttgatcatgatgaggaagtcttggaagtaaaccaactaccagtgcaaaagcctcgcctcatggatcaacctagaacattcacagaaagaggatgcccagacagtgaacttcccacatcatgacccattagtgattgaaactccttttgccaacaagatagttgctcgaatcttagtagacaatgagagtttggtgaatattctatttaaagaggccttcctcgccatcgccctcacaaaccaaaatttgtctcagagcagttctcaactcactagattcaacaaaaattccctcatccccttgggaaagatatgactctcgatgactctatgcccgaacacccctaagaaattagaattttcctatgcaaagcatcgggtgctaattgcaccataaataaaaataaatggtacaagaggcgaagcaaaaaaaatggggccgagggaagggaaaatggcacggttggtaacccctaagcaagatgggcatggttgaaaaaaaaggattgtcaacaaactctcaaaacgacaatcaaccagtgtggatatcttatttgaaaaaaaaaatatcaccaccaaaatataatattatacatatgataaacgacttacaaatgggagaagcttgatcggttgtagatgttggtacccagcgatggtaaaactaagcttgacaccgttagagaaaaagcaagagaaaatctggaatgcctaaaatttttgctggtttggagttttaagaagcatggaaatgaaaatttgaaaaaggaagagatgaaagacatttatagacctacctgggtgatttgagtcgtcgctcatccaacggtctcacttcaaacttgcataaacccccatgatccaatggctagggtgagattgtcagaggtatgatggtagacaaatagttacactacttaagccccaatctgacaccctacaataagtgggagcatcaaaatcaagtaaaaggaaaattgaattggtttcaccaaaattgagaaaaatattgaatagcattaaaagactgtcgtgcgtgttgtctacaggagcgtgttgtcagcacttcgagagataagttgcaagccccatttcacaaaaatgcaaatttggacttagggagtaaatgttgcttagaatttttttttctaaatacgtggaacttctggaaggtgacatatggcaacaggatgtgttacatcaacccacatccggagcgtgaatatttggcaggagcttcgagagattagttatctctagatgggccctccagaaggatggcaatttgtctcttcctctttgcgagtgaaactcgacccagagaggggataaggagtatagcgtacggcccgaggctaaggtactgtgcatacatttaatacgatatgtggaagaacatcctacatattactctgaaaagatgtgctcgagggtttgaacacataattctctgatttcacaagaccccatacatcatttggtgactacattatgatttatcaagtcagcaataaaggaaaaatcttatctcacaaaatacctatgataaacatagacacaccctcaccatataagggatgatgccctatcccccagattctggaaatttgtgtaaagaataattcaaatagactacaacaatggaagctaattttccctccattatgagcctataaattactcaaatgatgtatgcgagaattttttttttgactctttgtaagaaaatactcactaataaaaatgacttgtgtactaaggttcattaatgccccaaccatataaaaattctcttctttaatttccactaattacttcaaacagttttaattaatagttaccgaaaattttagtcaacatataatatattttgtttatttataagtgtaaaaataaataaataatatgtaatattttattattttatgtattataaatatattatttaaatgatatagacaaaaataaaaaagttgatgtttggtgtaatgtaaatgtgtgagataaaatagaaaaaaataaaactttagtgaggtattttaatggatgaggagtgctaccgtcaattttctattacatattcttagtcaacttctgtgctagaaaatatatggcagtttattttttttttttttatgaaaatattcgttatatttacaacatcattttcctaaaattttgaaaaatttcaaacggtttacattgtacgaaaatatgtttaaattttcttgaataattataataaactgaaatatcaaagaactattttttcagtactataatttattttgaattgtaaaaaatttataataacaatataatttagctctaacgcataatgttatgaaaaaaaatattctaaaatatgattttgaatgtaaaattcaattaaaaagattgtagggtaaattgcggcataaatacctaatgtttccgattttacacacttaaatacctaatgtttatttttggtggcaaaaatatctaatgttacaattctctaacaccgttactaccacttccgttaactcataaatatggacacatgaagggttcagatgcattatttttattttattttaaaacttaatattcttaacataaaaaaactaaacgctacttatttaaaaaaaaatgtgttaccattaacaattttcacatgatattggcacttcaattcgattatcatgtttcatatactgcactagttcactcagctatggtaatttagtattgcatatctcttatttttttaaaaaa

SEQ ID NO: 191479 - DNA, 921 bp, Cannabis indica
ttaaaaaaaaaaaaggtaataaggaatatttctaccagtagggagtattttatatattaatagttgatatatattgtcacacattttacgatgatgaataataaattgaccacaactacttataaattttgaccaccacttgtactaacaagttgtcacaagtggcagcatgcatatcttatatataaatataatttagctgagtcgtgagaaagattaaaatatagtttcattagattaaaataatttggtagatatataataataattacaaatggtacgtgaagaaaagtaatttctatgcatacataattttctaaagctatatagtgctatctatacatatcatagaaatgaatgtgttaagtaaaggtgatgatgatgatcacttcatatatctattattccatatttatgataaccctagttcttgctgataaagcaaccaggcctgatgatgatgatgagtgcatagaagctagatgtggaaagaagcaataccctggctttgatctctcatgtactactaataacaattccatccgaaccattcttcacctcccaaatcttcacttgaaattacttgtaacagaaatagactatgaattatatcaatacttgagggcatataatcccaattgtatccccaaacaaaatttgaaattcctcaatctttcaacttctcctttctatttccatgatagttctatgctattaaaatgttcttccaatcatacaaataaaggaattaggtgaagtattaatttgtacatattacatatatatatatatatatatatatataattctagcattatctcttgcagcactagtttaataaataacaagtatatgtcgagatcactagttgcttaattttttaattggtcaatatatctacaggttcatttgttattgtat

SEQ ID NO: 191480 - DNA, 5226 bp, Cannabis indica
ctgaactaagggaaaaagaacgcaatattaatatgtctccccctcatgatagggtctcaagcatggaaaataggttgtgccaaaagtttttagaaattgataatccggctttcaagagtagaatatttcaaagggtgattttccttttgacactggtgttgggagtatttatgagatagatagtagattgaaaagcatccacccaatattttaggggcatgcttgcttaagctaaaagtgttagacccatttcaataatgtgtctgtgctttctttcagcacgaccattttgtactgaggtgtgaggacaggaaagttgtaaaggaattccatgctctcaaaggaatgatgtgaatgaatggtatgcacccctgaatcagtttgcagcctcttcatttttcattcaaattggtttttcaaccaagattttcaactgaacaaatgcactaagagcatctgacttgactttcaaaggaaaaatccaagtgtatctagtgtgatcatcaatgaaatgtatatagtattttaaatttgcgttagacataatgggggctggaccccaaatgttagtgtgaattaaatcacaaacatttggctctaaaaattgacagtttaaaaggtaaggaatgagatttgccaaattggcatgcttcacaaaagtgttgttgttcattcattgaaatttttacattagcactagataacacttgatttagggctctagtggaaggatgacccaatctactatgccacaaatcccttaggaaaacacaagacagatctgaatttaaactagactcagtaatagcagtaaagggagcaccgcaaaaactgattctattttgactggtttgtggtagatgattaaaggttgaatgagtgttggggatgtcgatctgatacaagccatttctaagtcttccctccagtaccaccttccttgttgttatgtccttaacatagcaaacatcacaataaaattcaataaacacattgttatcagctcatgtgagtttagaaacactaatctagttttttataatatgaggtatatgaagcatttcttttagtagtacgggagaactagtgtgagagtttaggaaaccagaaccaatatgagtaatggagagttgattaccattttccactgtcaatttttctttaactccatagttggatctgtatgttaagtcatctccgtttgaggtaatgtatttgttgctccactatcagcataccattctcatggtccactgtttctggtgttgcaacataagcagaggggtttttcttctcctggtttggaccagattggcttgtatttggtgggtttcccatgaagctctcatcatatcgattgtaacaatatgctgcagagtggccatatctaccatagacctgacatgttggcttggagtttctttctcctcttctgccaccattgccccgaccacagctattgcccactcaagtgttggaccctctattaattgccaaagttctgtgggtagtgaggccttttttttggggtttgtgagttatcgttttgcttgtttgcaaggtcagcaaaaggggaagctccattgggattaatctgcttgttggtggtggtctgaacttggagtcgaccagtttactatcgaaactgaggagaacttcttgaagttcctgctaggatattgattcacgaccttcgatctgcactgtaatgggaaaatattctacatctagaccacgtaaaatgttagcaatgagatgggttttagggtatatataggtcccctgctaaagcaagcatattagcccaagttcttttttatctaaggtaatctgccatagcagtgcgtgcctccttttcgagtcaattgaatgttgtcacggagctcatccattctaactttagaatgtgctccaaataaattttcaagagctacccatggagttcgagctgagatacatcccattacctcagttgctatggattctatcatagatccatagagccaatccttgagcaactggtcacacacaatccattgctcatattctaggtttggacgcacaccaaagctaggaagtccatcaccaaaggcaactcctactagtatgaactctggttgagaatgtttcagtccactaatgtacccatccaacctatgccctctgataatggttgagaccattgttttccagagggtatagttgtttcaatcctgttgtgaagctacttggtgttgctccattaaggcagaaggggaggtggttttagcaagaatagttcctttgcttcgacaaccgtctgtgtggcctaagcatcgtggtctgtttggcttgttccagatgacatgatgcgtgagaaaaaatactctgataccaagataagaaaggcaggtaaaatgctctgtagatggaaaactcagctcaaggtacaatggctgagacatgaaacatttatagcagaattcaatcattacagcagggtgatccacccctaggatataaacaggtgtacaagcaaaaaaaatgacctcataacagagtgagacacaaactcacacgcacaactgaaaagaaaatacaagactctctctctctcacaccagctgacaataagtacaatagcaggagtaattaagtttataatcaaatttctaattatgtcttaacaaataattcattcaaaatattataaataaaatcaaattaaacatttatactccctttatatatgacttatataagttttagttacccacatgaataataaatgaatcaaattaaatttattatttacttataatacttaaatctctggagactataaatacacaatacaaatacgatctatcagaacaaattatcatccctaccaaatatatattttaaaaattaaacacattaataattatcaattctataaattaaataagataagatcctcttgaatgcatgcattattatttaattaataattatttttatgatgacgtcatgatcaattaatatatttttatcatccattttctcctataaataggaatgcaaattaagaacttgaagaggccaaggctacaaaccaattaaaaatacaaccaatatatatatatatatatatatatatttcttattgatcaagatctagctagaaaataatgaagaagtttgtggccatattaataatgtttgttatgatggcagtgcaaggtagctatggcgatcgttgttacatagccggggaatactgtcactggggagaagggaagatttgttgtgatggattgagatgtgaaggtccaataataggtgcgagtcgaaaatgtgtgcctattgctgggtgtaggcctggtggtgctacatgcaatatcgcaaacccttgttgttatccctatcaatgcaatgctaccggctctggatattgtattccagcaaataataatgagattgacgaagctgcacaacaaaccaatgatcatcgtcctctctcatcaattctagatcactagtacattacgtactgcatgcatgcgtgattacgtaacaaccatgcatgcattaaataagaaagtactatatgagtatggtttaccaagacttgtgcatgcatctagtatacgtactttatatatatatatgataaataatgaatagagtacaataaatacagtactcttgctttgtttcttacattattccgatatcatcgattggtatttgtattttcttgctttctagctcttttaatgatgaagtggtacgtgcttatcttttattttaataaatgatacataaatttttgagatacgatatctttgacaaaacttatccatcttttgtagagaaacaatagtaaattgaaatagcaaagtagatgtgtataaatgatacaatttaattacaatcaatcgttaaatattagatatcttaatgtgaccgaatcagattgaatattgcatgaggtatccaaaaatcaaatacatacaatatccaatcgaactaattaatatcttaatttaattttaatgagtaattagattttatattgttatacttaaaaatatagatgtttatatatatatatataaaattaagattaaaattttactttatttttttaaaattgcatcagttcaataaatactggatttaaaatattggatgaattcgactcgatctaaaaactactagtctaaaattttaataaagccgaatcaatacaatatatatgtgaaatacattctatagatataaacgatccaaatcaatattcaacggatattgttggattgattagatgactggaattaatatagttagatcgaatggtaaaatctaacctctaatatataattagatcggaaccgaataaatctaaacatattaaatatggtccaataaacacccttgaaacataacagatcgacaacatcccatcccatcacaattgtgtctcactttcaataattaataatgatcaattaaaaaggaaatattaaaagttgttagtaagaagagacaacattattataacaaaaaaaagtaattacatatattagcatgtaataatcaggtcaccattattactactattatgtattaatggtgtctagcaatactacttgttaatggttattgatatttaatattaaatttgtgtgatttattatttaagagaattgttaaaaaatattattggtacctcgcatcttctctttggtgtcatattgttattagtataattaagtattggttccatataacttcaaaaagataaatttaaaaaaatatcgctaaccaatcataaaacgtcacctataaaaaagtattaaacaccactaatacccaatagcaaaattcaatacttattagttagaaaattagtgatatataacatgtacatatttggtggtgctaaatactactagaactaatatttgtacatttgagtatttctcttaggtaatatagaaccatgctggactttgacactagaccgagaccactatcattaattgtataaatttctaatcaattataagtatggtacgtatagagtgttattattaggaacattcctatgagatggtggtgctttattacactacaagaaatgtcacttttaccagcacagttcgctactgcgctggtaaaagtaacttttaccagcacagttcgcaaactgcgctggcaaagaggtcaaagttttactagcgtatatttgtagtagct

SEQ ID NO: 191481 - DNA, 934 bp, Cannabis indica
atttttgagtaatatagaagaggggaaatagtcaagtaagagacttgtttagtattaatggcctttctaactaatttgatggtaaatgatctacttaaagttgtttatatgtgtcatggtcaaggtttcataccaaaccaagattgatttgtaattaatataatttattgaagattattctattttaatcatataactagaatctcttacaataacaaaagattttagaaaatttctagacatctatatagcattctacatattactttataaaaaaattctaaaaagtaataaaatgggtaacaatttttaataagagtacatgtcatttgtaaagagaaaacgtaaaagaaaatacttggaacttataaatgagaactcattaaagtgtatttgggcgacaaattgtgatcttcattgttcatagttaagagaattttgggttgaatctatataattcttagtttcttgttgtgcaaggttgtgttttactagctaactagtttattatcttaagtgtaaatgaagttgatgagggaggtcaattcctaacaatatatatgtatttcatcatgtaatattttaggaaaaaaatgcatgtaaatgtataaatatattttatatgaatacatatacatgcctcaaacatacatatttatatatattgtatgattattttttctatattttgatttttatttttcttattaacattatttgttggtattaggtttattaagcagcgaggggaaggggaacgctaggtgtattggtgcaatctaatagttgggatacataattttcttatttaacaatatgagtttaatttgaatgaatacacttacatgtgatagaaatatgactatacatatacgtatgtatacatgcatagacatgtagagcaccactataatggtgtatacttttatacaca

SEQ ID NO: 191482 - DNA, 3180 bp, Cannabis indica
gcataactacattgaactaaacacttgcaaacaaaagagaacaatatttgttgaaaaaaaaatgaagcttggttaaaagaagaatcggatagcattctataccagttctttgcaggtggacttgttgtgcccaagacccttgcaccggctgcactgcagttgacgtttagatacatctagtgataattgtttctttgttgtaggtcggccaggcggacgacgggtaggaggaggggttacagttattgcagtttgggaagaatcttgcaatagaggaatatcaacatttggaataggatggatcgactctgagtacgttaatctgtagctctcggttgtgtaataccgtgaacaatagtcatacatactctgggctaaacaactgatgactgcaattgcatgacagcaaggcaaaccagaaagctgccatcctctgcaactacattcccagtgatcaatgttgacagtttcaatggagtctccacgaacctcaaatgtgctaccagttgacaatagcacttgaagaccacgggctttatgggcttctttttctagtttttcctccatggttggtgtgagtcttgtcaaccaatgattggaatctgtccgtcgagtatagattaattccataatcttaccccttatcacatcaaccatttgagttattggtaattcatttgcttcagaggcccaactatagaacagctccccaaaatttgaagtcaagtgattatatctggtgccctgaaaaaaggcattagcccagttatgtggttcactttgtgcaatccaattgtaagcctctatcgaaatacttttgatattctcaagagaactttggaaggtttcagccttcaatgagtaagcagctgtgaaaaaatcctcaaccatcagccgcttcacctcatgagaaaactgtcctttcaagtctctaagaagctcctcagtaaggtaccgtaggcaatatccatggtaagaacccttgaatacctctggaattgattctcttaatcccttttgtctgtctgccacaaatgtcaggggacaagatgttgataacgctgattttagttgtaataaaaaccaattccagttgtcattggtttctgcatccaccacagcaaaagcaagaggaaaaactgcatcattcccatctgcagctgatgcagctaataaattgccttggtatttcgacttcaagggtacaccgtctagaaaaatgagaggcctgcaaccttgctgaaaaccatacaatgaggcatggaaagcaacaaaaagacgatgaaaactcgagtcttccttggtggtaaaatttgctaaactacctggattggtctccattatcttctcgcataaataaggtaattgattatatgcctctttgtatgaaccctgaagttgctcctttgcaatttcctttcctcgccaggcttggaagtagtttaactgtattccgtattcctgcttgatgtcatttacaatgtccttgggcttataatttggaaagactttcaacttctccttaataatgctcgcaacccaactcctagttgcttgatgtccagttgttgcaacagccccttcacaagtatgtgtgggattcatcttcttaatgcatatcagttgagtagttgacagccgtgatgcatgaattctccaagggcaaccttctgctttacacttgacagtaacacggtgactatcattcttcttatacttaaatgcaaactgatgtgcaatagcatatttacgcaaggactcacgaaattcatgaacaccgctgaacctttgaccgacaccagtgatagtgttctgccactgctgtgcacctttagcattcttctcatcaaaggaagcaacaagaggaaacattggtgaaatatcagcagttaaatcaatttgagcattggtgtcatccacaacatcaattgccatatcgggttgagcagtatcaccaacaacatccagagtagtatcaactggaagcacagtttcagacaatgttgttctgctagacctacaaaaacccagataatcccaaatcataaatccctcaaaatagcagagctaactagcaataaaccccaaaaacaataaagtacatatagataacaggaaggattaaattaagaaaactacctactggcgggcatgttagagatatcctgagcggcaatctcttccacaattacatagacatcagccgtggaagaatccccatggaacttaatcatgcgcttaagatctttctcattagaaatcgtgataagggtcttcttgttcccaggaagaaaatacttaattgacattgaattcatgttacaattgaacatctcagccacctcaagcctaaaatcatcaaacttaacctcatcatcaatgtctatagcgtgagcatctcctcctttgtagaacaatgtaccatctttattggtgacaaactcacccccagattgacatatagctatcattttcttcccagccttagaaaaacaaatacaacccccaattcaaacagtattactcatcaaattaaaacaagtctaggttttgaattttcccctaaaacaatgcctagccctagaataacaaattaacaattttctataattacaacaaaaaaattcgggaaaaaaaaatatgattagagaaagtaatttggattagcaaaaaccctaatgagaaattaaaaaacctccaaatcaaagggaattattacctttggaaaaaggattataagaaagagggggttggtgggattggtaaaatctggatttggagttgttagtgagaaacttggaacttaatcatgtcatgtctgtctaataatgttcatgcttccaaagaaaactcgtccgtacagacaaggaaagagagagaaagaaagagaagagttgttggtgccttgggcgtgcgtatattactttccatatatacgtttcatatttcagtttcaacttatttcattttttacttatcaaaaaaaaaaacttatttcatttttcctctttttaattaattaggttaattttaattttttttatttgaattttaatgtggattaaattaagtttattgaacttttaagacaattaaaaattttctttaaattatcaagattgttgaatgtaaaattttttcttcaattttattaacgaaattctaacatagataaaagtt

SEQ ID NO: 191483 - DNA, 3885 bp, Cannabis indica
atatatatatatatgttggatgagcggaggagagaagcttttatttaaaatcaaccataaaacatgcacagtgacaatactactatccttgtctaagttgattagaaatattttatcccctgtacgttaataatcttattagcaacccatgcattaagaaacatcatcacaatgtaaacgttgcatgcatatgcagatacaaccaattcataacattgagcattatcataatataatgatgctcctcttttattacaagcctaccacccaacaacatcaaagaggaaaattattgttcactctactattctaataccaatatatcatgtgcttaattgttgttcactctattttcctctattatcctactgtttataccaaaatgttaggaaattcctatcaaatggtatcaaagcacgatcttgtggcctctgtcatggcgccaatgctaccgctattcaatgaagaggacccatatggctgagttcttcacatagaagagtatttccaggttcatcaaacaccaaaaagaaaaatggtagtggttgctcaagaaggttatgggtgttgcttggcaatggttttaagtcgtggagtaacaagatccaatcgaaaattggttggaattccacatcacgttgttcaattgttgcaacaaattcaataatgatccattcgacgaattgatggctctctgatatgagaattgagtgctggggttctggactcagttcattccggttgcagcaatattgttggatgttcccaaaaccttcctttgttattatatgtttgttgcaatcttccgacgaaggtgtagaggaaggtgcatgaatataagcctaggaaacttaccgatgtcatcaccaaagcgttcttagttgaaggacaactgaggtcacatcatcaaattggcaagggggataaagaagagatatagaatgacagtgaacgacctgttgatcttcttgagtctccaacggaaatggtggaagttatagcgccgaaacacagttcctaatccgagatgctctctgaaaaaacaacagagaataaatcaggaagtcgacgacccattctagcaataaagctttgcatcgacagagaagaaagagtcacaggagatggcgccaaaaaaggaccagcagatgaaggtgatgtcagagaagaaggagacgtaagaagggcttctttcacatgcttcggctagggtttttcttgctgtgtgggattcaagtctggacacttttgatacttcacttactccaatttgggcctgaggtatacttggtgcacctccattaaataaagaaaatagccaattatccttaagtgtaattgggcaattatttgggatccagggtaaatagtggaagcccaacgttctatatgtttgaattttgacaaaccacctctccatctcagaagcttcatacacaatggacgatcggcaacagaactgcaacttctagatcttcctaagaagcggcgcaaaggaaggcaagggatggtcaacgccgttgagagggtaagagggaacagcgaaaagtactctgtcttctccaccaatcagaattttctttgagagagaaatatgaggcaataatttctctacaatggaaattggtagagtccaagcacacaaggaacaaaacaaatttactgaagcttgatcagcagtcagaaaggttgaagggaggtatgctttgtagttattagcttgagagtctgaattttattgttaacagttggcaaaggggaacaaatgttcttttcatgttggggttaaaacagaataatcaacaaatccatgggccactatttcttcttgttgtaccatacttcatattgtcaaactgggcaaaagaatttagaaaatggctgcctaagatgaatattatgaacaaaagagttgacatcatcaaacatttaaaaaaattattgacgatatatgaaaatatgaaagattaagttgtcgatgaaccgcatagtttcaaaaacgatggaacacaactgtctgcaacccttttggaatttatcactaagaataaattattggtaatgggtaccctatcactgaacagtgtggacaagtcgtgggtccaactttattttcttgatcaagataaattcaaaagtttagtctcacgaaagctaagtactctatcacgtaattggtttgtagacaaaggacgagtgtggcagctcatcagctctatttttgacattggaatgatcctattgtatgtagttggtactcaaccttctcattgttcaagtttggtaatgcagctcagagtcaccccttggttgcgcgcacaccggcataccaatttgaagccttctgtccttggctccttgctgccatatttcaacagtcacatgttcatcctaccaaaggagggaatatgactttgctcaacggtttttagagcgagttgtatggtggcgtttctctcacagcttaaacaacttgcatttgttggcttggttctttgacaaaggacgagcaaagtttggggctacaattgaagttgatcttcttcaccttgaggacaaggtgaatttcgggcggctggtattgataggccttagaataaataaaagaggtacatgggtcattgtaatggggtatcgagttagtatatatataagagagtattagaaaggatttggggtagagaattacttggttaaagtaagcattagcttaggggagtgttgggtctcccgaatacccaacaaccttgtttactctattattttaatctcaatatatcaattgcttaattgttgttcactctattctcctctattattatactactgctagaatgtacatatttcttaaaatgtaccaagcctaattggacgtgtgctttgaagctgagggtttttgacataaaaggtcttataaaaagggtgcttgcttttcatgatatatcggagaacttccaaacctaggcataatgcaataaagtgatacatgtattccgagataggccttatttcaaaatatatatttcaggaaagaaatgagcattttcatttgaatgttaccatcaatgtctaaaagattgatataagtcctttggctaacaaatcaataaaccaaagttagtcgttttttctttccacaaactagaaaacgcaagtgtcaactagagaaatttgaccaagaaaagaatacatggcaagtgggaactaaaaacatgagcaataagttgaagaaacagacctgctaaactaacttcagctctgtacgtcttcttttccttttaccggtgtccttgatgaggtaataatcagatctaacgaggatacaactgcgcctctaatttaggcccagttcggccaatctagtttctgcagaatcaatgaactcatcaaatgcctaaaactactacaaatcaggatgaacaaaagggtccttcaaagagaattataaattcaaaatcagcaagcaaacagttgatcaatcattagaactactacaactaggataaaaaaaatatatattttattgcaagtgcatagaaagaacctacgcttaaaattagagcatcattgtatagaaattaatctttcaaagtattaacaccatgtaaacagacccaatggttaaaaacatataattaatacgtggattgaaaattagcaatatttatattatatttatatttataaagatactcattaacttgaatttgaaaaaacccagttagtgaaacttaaactacttccaaatgaagaatgtctaggaaataacttcatttccttcttagtcttaagagtttctatcatgatctaaaatgaagatggtcatcctaaatgtgagtagattatttcaacttcaagagagttatgtgacaagtttgtaagact

SEQ ID NO: 191484 - DNA, 756 bp, Cannabis indica
aaatatatttgtgttagtaacatactattcttgtctatgctcagatataagggattctcaaatttttatgaggccaacaaatcatgactatccttgtccattgttattatctattttttattagaagatctagactgaaagtcattaatatgtgtgatttgtcacatattcatttaaattggatatctagcattatgtatggtttatctatcttattaattttctcttttaagtgatatatcatgaactattattgattttcatgtcaatagaaatttctatttttccctaaaaaaattaatagaatctcctacactttatataattttttgcttttgtctactaatgagacaacttggccacaaatcctatgaatgaacaagtggatatatatataatgaatattatattaattggtaatcaattagttttatatgtaagtagcttgtaagtataaaattattaatattaattagttattgtattgactaatttggaaacaacgttaaaatatgaagcacatacaattatagtagagatatatttaatattatatatttggaataaagtagtacatatagtattcgtttgtgagaaagaattttcaatcattttcttcactactagacacacactacacatagagtagcctcttgtacaaaaatgctacatttagctataaaaaaaatccaatatataaaaatttcattacttaaggttgttttatttattctatgctaaagaaccaaataattt

SEQ ID NO: 191485 - DNA, 1496 bp, Cannabis indica
tgggtataattttactgaacccaaccatccaccatttagtccaatagcttgggtttattttctaaagttggactcggacgtaacaattataatgtgacttagaaactagttattagttgctagtgacaagattaagcttatatatatcgttagttctccaaatatgtacatctaagttttagttatatttatgtttattttatgtgactacgtgacaagcattttcttattaagtttagtagctcacccttatcaaacttaccatgtacaaattaaggttgtaaaagttagaaagtcggtggcgagtgagacattagaggcttgtgtgtgtaattgttgagggccatataattgagggtggtctagggcacgctctatttattttattaagtgttattaaattataaattgtattaattttatttattaatcattatattttttagttcaaaccgagcttaaatataaaatattttatgtttataaacaaaagcaacattttagtttttctacattttaaggcttgtaaataatttagtaattttatgaaatgtacggccttacagatggaaaaactaagccattttgtgctagtttgtaaccatcggattcgataacttgcgccctatagaactgacgcaaacagtgttaaactaacatttttacacaaaaactgacacaaagtggaagaaaaaactagaaaaaataattcaaatctaagatatatctcatatctatattccgatccataacaaaaccatatttaagatttaaaataaatatataaacacatattaaaaaccctatcataaaaaaaaaaccattaattctgatctcaagtacagatctagaacgcaaccattttcgctatctaaaacgcaatcaatatgattcttgatcacaagccccaaatcaaaaagaaaattaataaatatataagatattaactaactaaagaaaatgaaaaaaaaaaaatacctttacgcataaagaagagatctacaatttttaagctgggagctacgactggcgacaagataactttgtcttgcccatggttggtaatattgctgggctaaattgagagagagatgagacggagagggagagattgatgttgttgtcactgcagggatcaccgttgtgacttgtgagacagagaagacgggagagaggaggaggtaggatcgtgagagagagaaagagagagagaatcgtgggtggttgtgtagtagcgactaatgtgaattttagggttagggtttatgtaatgggctttgcccatcttcagtttttttttttaataaataaaataaataaacaagtcatttgcatcttttcaaaaccaacgcaaacaaaccaatgcaaatgaagcgaatgtcataatttgacgcaaaaattctaacaccacttaatagcgtgatcagttttgaggttgatcaatgggccgaagtagaatttttgaagtacgatttgtcttactcaacctttttctt

SEQ ID NO: 191486 - DNA, 1288 bp, Cannabis indica
catagtaaaatctaattaaagagtattattaattatgtacgtaataaaataaatatctttttgttggtctaatatgggctagtttgactgaatttatagcactgttttagtgtgagaataaatgaaatattcttttaaaaaaatgatatgtagtttgaatttgttgctaagtatattactatgtcctttttaataataatagtaacaaaaaattaaccaaagttgaagctaataaagacaagaacaagggatttcaaatatatataattagaaatttataatacatattttcaaacttaaaacctttgacttaaaaaataaaataaaataaaaacaatgacatacatagtttataataagatatgaaaacataaatacacaaaatatattagaaagtgtagcactttgattttgtaagttattggtgtataagttaatattgaatttcacatagttcaatttaaattaaaatacataaaatccgatatcaaattatacaaatagcaaatatgatctgtttactgaaaaatagacaactttatataatctgatctcacaagtgatacaataataataagaatgaaaaaaaaagtacaaaagatactacaatttatagcaattccctttttatatcgcaataataatagagctacgtctacttccaatttttattattcacgatatcacaaactgcgtatgagaaatttagctaaggagaattacactcaaaagatctaaagatataaataagtgagttttagagataaaaaccttccgtaaagaaatttaatgaagagagtaaattaaaattgaaagatgctttgcaatgataaaaataaataaaattaattaaagagaacaagtgatttggtatagttaatcagcccaaacaataattaatatataaataaataaataatgaaaaggaaaaatgatctcatgcatggtaaaaataatgcatctcaagtagtgttcttggattggcctagacatatgtatgtgtgtgtttagagcacacttagtctagaagtccaaaaaaggcttcattgatattcaaaagttgactacaaatatatacaaaatcagtgagaggtatgaggatggagtttgtggaagtgagattaatgaatccatttcctcattatgttttgtttgaatgaagtgtaacccaatcatgcttactaacttcattcattcaaattcaattctatacataataataataataataataataataatagtaacaccacattacatactccatcgattgattaattcatcaatg

SEQ ID NO: 191487 - DNA, 2128 bp, Cannabis indica
gtgagaagaaccagaaaaatagtgacaaaaaattgttaaaaatatcatgccattgcctcagccacaactgaactgatctggcttcagtctctgttcaaagaagttggattcccttgctccacatgccctgtcttatggtgtgacaatcttggcgctacatccttagccacgaatcttgtcttccacgaaagaactaagcacattgaagttgatctccacttcatcagagacagaattctatccaatcagctcgacatcagacatggcagttcagaacaccagatagttgatatacttacaaaagactccttcaacatctcagtttgagtacttaaggtccaagttaacacttagaaatcctagtgtaacttgaggggggtggttagaactattccttcgctaaaaagagttagttagaatttagtttattagctgttaattaattctgttctttgtacaagttgattgaacagaatcttgtttagttgcactaactacttcttgactctactaaactctgtaatctgtactcatcctatataaagaggttctcagctcataatttattgagcttgatttttcaaacacttctctctaacttcaacactaattcactataacatgggatttcatggtgtctcgtagagaatgaattttgtttctctgcataaacattggaatgagaaagaactattctacataacaaagaaagtttgataacaaattaagctctagttctagagcataatagaaagtcttgaaataattctacctttctctttagatctcctatacctatgtttgtcaagaagaattttccaagagaagaaggatcgtaatctttcacagtttgtactctcaagaaaaattttcttcttatttctttcatcagattttcaaccttggacttaaaggaggcagattgtcacatatttaacaagagttttccagtcgatattatgttcctggataatttgtgccaaaaataaataaccagcgactcactgtttttccaagtagtgtttcaccagctggctctccaagctttctctgctttatggaattttgcatatcgttcttacaaaaaaagaaaaaaaaaatatatcacaaaacagaacaactgagcatataagacattaatataagcatatgcaagagattgattattgtaactctagcataatcaaatatttagcatgagtaattcattagctcacggttgatttattgcaaggctcaatggataatagtatgaaagtacacttacttgcttacgaagaaggcctagcgtcagatatatagccatttcagcacatccagctgcattaccagttgcatcacttgggatcctagccactttgatcccatgcttcgttgcagaatcaacttcaacaccttcatgaaagattaaataaaggaaaagaagcaaaaaaatcacataaaaatgaccttaaaccacaatgatttggaaaatccaatgataatgaccttctaaaccaacaccaaattgcattatcagcttcatttgtttcgcaagagagataatttgtgaatctagcttcatgttcttcactacacaaatgtggtagtttgctataacattgggtacaacatcaagaggaacatcatcaacctacaatattagtaaaataattattattgaaacacaatttagggaagctataaccatttgtactggatttcattttaaaactaatttgtataagtggatggtgtttctcatacatttttcatgtgggattttttaagactaaagcaaattagtagaaaaattaaagcatagcacatcgaatcttttatttgcaaaatcagttagcatcctcatttttaggaaagctcctggattgaatctgagtcctgacaaaagcatcaagcaacaaactttttttttcttaggttgaatcgagcaaaaagaaaagagattggtacctgtatagaagagtagttttgcaaatattgtcgtgtataagtgtgggaagccggaaagtaaggtccacagaagaggactctggttatgtgccctttactactgtcagcttccatggcaggtaactcagccggatgcattggagaaattttttttttttttttttttttattttttacg

SEQ ID NO: 191488 - DNA, 928 bp, Cannabis indica
ttttttttttttttgtcattaaaatgtgacttatatacaagtatgagctcaattgagcagaattgaattcagtttgaattcggttaaaacaatagagtagaatttgacaatcataactaaaactagctattaaccaacaagctaatttctctaccagtccccccttaaactggcgattcaagcatccttcatttgcaagtttgtgtctaaaaatgggaatttcagaactagaaatggttttggttagaccatcagtagtttgatctaatgtgaacacatgttttacttgtatctccttttgtaacacattttctcgaacaaagtataaatctagctccatgtgcttagttctagaccatcagcagtatgatccaatgaataacataagtaccatcgacaaaaaaatagtgaaatgaaaccatgaaggacgatcataaaacatgtcgatcaaaactagtgaaactagggccaagagtgacgattgtcgaccaaggccaatgaaaccagggccaagagtggtgatcgtaagaacctttaagcaaagactaatgaaccaactaaactggagatcaatcgtcattccaaagccacactgcaccgtcgacaaaaaataagtgaactagggtcaaagaaacacgaaaactagaaccaaatataccaatggtaaatattaatcaagaaatgaaataggattttcctagcggacgaccataccaaaaggcaaacttattagctattagtaatttaattaataggctatagactttcacttaaaagtgtactttaggtatttgcctagtggtaactgctgctggacagtacatctatctatttgattaatctcttaaaaatataatacagtaaaagctctatctaagaatacacttgaaatcaagcaacttatgttctaattaagaagttataacta

SEQ ID NO: 191489 - DNA, 3649 bp, Cannabis indica
aaatatttataaaaaatttataaccaatagtattttacccattatacaaatgtaaggaacctaaaaaaaaaatctacaaatgtaatgagaaagacataaatttaaaaatataaaataaaaatatttgacaaaactaatcaaatgggggacctaaaaatatttgaaaaaaattgaaaattttgagtgatatgcttagttgtaaagtgggaccaaaagggaacaaaaccaatagtcaaaaaaagaattttgtttatttattttggaactttctaattatcttacctttcacccattgctatcaatattcaatgataaaataataatacataaaatacccactatttatcttagtgttgtagtggattgcaccaacacaagatctaccatccatattattatatcaattattctaaaattaattcgatatatttgttttttttttaatacagttcaattgttctaaaatttttaactagctagggagcttagggtttagaggcttatttgaagtacaagagcttgaaaaatcatatttataatgttaattttatttttcgtatttttaatttgataaaaatattttataatttcaatattaacttcaactgagttgttatttgatttctatatttttgtgttgattgaattatataggaaataaattatatatagcttttctatttatggaaagtaagtcacactcatccttttttttatctatcgagttgtgtatatttgattatttgtgagttttttaatgtgtttgattagatttcttgtgaagaaaactgaaacaagactttcattttttataaaaggaaagtcacacttgatgctcacaattccgtaggtacaaaaataaaaattacctaggactgatttgattataaatacatcttatagtaactaggtcatgtatctcttttatatactttaaatgtattcatatcttaagaaaaaagagtctttgttttgtaaagaagagtgtgttcatctcttacccggtttatatgtattttatattatcttgagtttgtactcaagtctgcaaaagaagaagaacaacaatgctaccttcgggagaatgttcaataagcttttgggatattacttttcaagtcttgcctcgagaagaaacaagcactcttcaaggagatcgaagggagttcgagcatttgaagtttcaacaaaattcgattaaaaggtggaatacattaagcttgcggcatacaataagatacagtcaatttatgcataattcaattactttatattttttaaatctatctaataaatattatctcccgtgaagtagtaacaatctacaaggattgttgatatcacgtacaaaaaccttattcatttttatttttctgcactgtttgttttctaattttattctgtagttacagagttgtgttgtgtagtaatagaataaactgtttcagtaccatatttattatttagcatttaattaattgattaattaaataataaattaatagtattaaaatacaaaatttcaattggtatcaaagctcgtcactatactcttagtgagatcctaagattattctattatgtataatttgttttgtgtgagatgttattttttgcagaaggaagttccattactcgaccactcttgttaaatgactcgaattgtctatattggaaggtcagaatgagaacattcattaagtcacaagatgagaaaatatggaggctatacttgcatgtcatcttggttaccagagggtggtggtggaatttaacagtctttctgttatcaatgattatttatagcaaggctgattagtcttatttaggtttgttaaagattttcttatttattgtaaccattttattgatatttctttcttgtaatgtcctagaagtattaatagtgtggctcacactttagctaaattagctattttctcgaataattatcatgtttggtggtctaactatctagattattttgcagatagactcttataattagtaatattgtatgacactcttttttctattgagatttttttcattgagtttacttttgaagttttaatgaggttgttttcccaatatatatatacataagattatatattttttttttttgaaaaataaagcatttgataaatatgaaaattagacctctcggtcattacaaaggatagtatcaggtatcgaggagggttccacaaaacctgagaagttctgggcaaacgcccaattagccacattatggacagcaaaattacaacgacgagaaataaacgtaaaattacaagataaaaagtttgtagagagttgattacaaaaataaacataattatcaatattctaaatagattgaagacctttcagtgctttgataacgaattcagaatcactctccaccaaaatatagttgtggttcttgagtctagccgagtccaaagcgaggtgacacgccgctgcctcaccaattaagggatctctaaactgtgatgctgaggttggtggagattccatgtgcatttgtgttggtgcaatttcatatttaatgttatatgggtggagaatggcctaatgaactgtgtcgtattaaatacatcatttgtaacatgcaaaaaaaaaattacatatataaataacttcttatttattttaactacttgtgtttatttattcatataaatagcaataatagaaaaccctattaccatagagagctttctaagttgatatcccaatttatgatttccttggattgataatggcatgcatagggtggagtttatgagtggtgagaccaacagtagccacatcttctttttccccatctttgagtctccactcaaactcttgaaccaatctaccaattacattacaaactatcaacatagcttgaagcgaaccggcacacaccctctttccggcaccaaatgtcattgttttatacaaatccattggatcgaatttctcatcaagaaatctctcgggattccactcttcaggattttcccactttttctcatccatgttacacccgtatatgttaattgcaatctgcgttacaacaacatgataacattaagcgaacattataaaactcattgcattgtcaccaatgcagacaatgcaatgagagtatgtatagtgttggacaccatatttaatacaagtgtgaagcccacataagaatttagaattctaataaattgttttaaatgtaaccttgtgaaagcaaaccacatgtttgatcatttgagctacctctcttgtgtaatttgaatccatgtataatatcaaaattaaatgcaaaatacacttttgacattgtcttatagcaatgcttgagaatccgtttatcgtattgcccggtgcttaacaatactgatgccttataacatattctacattcgttcattagttacacaaaaacacagtatttagttagtaatactaacctcacgtatcagcaggaatatagtggcctcctaacttgagtatcttcatgagcataaacgcaaaggaatgatcggaactggagaatgttctcaaagtttcatggaaaacagccatcaagtatggtaagcttggcaaaactatcctctgtagtttttccgattccacaaagctctcaaatttctctgta

SEQ ID NO: 191490 - DNA, 996 bp, Cannabis indica
ttataaaatttacctcttgactttttccaagtgatgtcactgcaggatcagtttctactaaagctggctcacatgccttgatggctttatgcaagtccctcaaatgtgcccattttggccttattaatcctaccaaaaaagaagaggcaaccttgtaagcattttttaagataatctaaactaggaaaaacaagtagttgacttttctttctcttatctccaggatgttaggcaaccttatggagcaaacataaaggttttctagaacttcatctgtgttataagcctattcacttaccatactcatcaagaggagcatcataatcatagctagttgcaatgaagggaccaccagccgtgcggccaaaatttgttcctccatgatactggaacaaaattacataaatatagattttaataaataaatacaaagggtgaaaataattacaacctaggtcaataaataattactaaccatatagtaattaatgaaggcaccaccattttgaataaaccttgcaacaccgaaagccatgtcttcggctggtctatgaggaactgccccaccaaactctgtgtacctgtataaaccagttacatggtcaaggaggctgtcttatgcaaaaatgtctttaatcataatgggacaaaacattaatgttacacattatgagaagcatttcaaagaagtgaaaatgagaaatttaaggtgtacatcaggcaatgggtgtgactcaccagccagtccatgcttctgtccatagtttgggtttatagactttgtttggcttgtaattttcacagtagtaaccattgcaggcatcgatctgtcacaccataaatgatacagcttttttgagaatttattttgaaaccatgttacttgttattaaacttcataactaagttcacattttctctctggtttttaccctcttggctgctgctgatacctcatttttcagaataaaaagaggcttaaaagtaattatatca

SEQ ID NO: 191491 - DNA, 3250 bp, Cannabis indica
tttttttaaaaaaaaataataaggttaaggttcttagtatttttcttaccttatatatttggttggaagtaatgaaatgaaatataaaggatatatttttatttcatttttttgtttggttgtatttttaagtattagaatgttatttcaatggaatgattttctattattttggtggaacgattattctattttgaaatggaaaaaaaatcattccaatgcaagatgagaaaaaacttaataattattttatcaattttttttttttaaacattttaaatttgattctattccatttgtattcctattctcattctcattcatatttctatgtttttattcctccaaccaagccctatgtttaatgtaggagaaggaaagaaaaatttgaattgacaagtggatagacgttaaaaaaatgttgggttggagagaattttgagtgggagaaaaaatgggtggaaaataaaatagtgggactcacctatttgttaataacttatatagtaacagatttttgggaaagaatcaaattctggactgtcacttggatcttcagaacgaaacattttgaagatctctcctttttagacttaagcagagattggagtgtgctgttgtaataaccttgggtttctgtgactgctgtcacaaacttttctacagctttttggttttcttcaaacaaaaattatttgaatcatacttaaactcatgtaaccacggttttcctccgccacaagtgagggtcttcattatttatcggctaggggccagtctaagacattggcctgtctccttttcaaaaaaaaatatagtaacagaattatatatttacccttattttgaaattcatacaaaattattgattgtaattgtaattgtatttttcattttattttatttcattccatcgcaccaaatgacataagaaaaataccttagggttagtgtagaaattgctaactcaatcttcccatacattgtagtggaatctttgagagatctccattcaatcctttgttctctcatctgactgtaataaaggtttttaaatggataacaggctttaccagcagctctgtactggttgaacttacaggttgcagaagttttttgaacatttggcgggtcctaagtttgtgcttgaactatccatgttcattttgattcttttcttcctgagcaaaaatgtcggatgaaggcaattctaatggagacttctggggccaatggtcaatgataggaggattgcttcttgttcctactttggaattgcactgacacaaggtatcattgttttatctttcttgctttaaattcatcagcaatttgttgtctgcttataagcgctctttcttttggtttctgatatagtcctctctagacacatcaagttctggttacttaaatgtttcaagtgacagttgattcagtattttttaccctttctcttttagtcttaacctaacatagaagtgtaaattatatttattccatactttatgatgaagtttatgattggtttagacatgcttctcggactctttcatgcgcacatccgcttattctctcagtgtcatgttattggtagtagatcatatggtgttgtggctttatttagcaccaagttaagacagttttgcatacattgataactttgttgtatggttttgcagggtccatttatcagaagtattgtctctgtctgagagagggaaaggatgcttgaggaatttttagtcgaatcattatttttgccgaaagcatattgattttcagatagataggtgacagattgagatctagtaaataataataggtgataaatacaggtttggagtgtgatatttgatgaagagatctcaggtctcgtttaatgttttggaaggagaccatttgttattcaatttttgtagtggccaattcagtttcacaggaaaccattttgggagctcaagaaatccatgtcgtccatttccaaacagtgtccacttttgtccaaggtgctgccaaatttgaatcaccatataaaagccgctcgtacacttcttgggaaccgcagcacagcaacttgatattatagtttctttatctgtcgctgcgttttatctcgacatctttcattaacattttggtttctctgtttagcatgtttgtatttgaaattgttgtgatctgcaagctcagcagtcaagtcttaattggcaaagtaattttgttataaacttttacacttttcttacttcgatttttttgtcatatattagcatgtttaccccttcaaagtgattgtaacagtaaagtttattgctacttttgcgaactcagtgacattgctaaacccattaatatttggtgccacacctttcggatgtcaaatgtctagacctggctgattggagatgcttgtacttcaaactttcccaagtggaaattaacaaaaagaaaattatttcatgaagtatctaaaatgccatgaatttctgattcttggggggccggcatcttcttatttttattggtgtgttttatctcaccataaaaataggagacaaagccccagagagagagtgcaagtgagactcctttttcggctttgaaattttcatggtaaaaaataacagccaaaacctcagtcaccggcaggagagatgcaattacaatcgcagataccaaagatgaggcgcagaagatgattccgattgctcccaagaaaaatgcttgccaaactattgcactccataccagcaccacatagtattccgtttcacccataccgaactttttggcttctcttggaataacctatcattaattaaataaatgtatcatatatatatatatatataacttttctagttgattgaatctgatagagaagaaaaaaagaaagaaagaaaaaagaatatgatagttatagccacttgaatgggcagcgtccaaactaaaaagcagcttccactcccagccgtcttttattactttttttcatgatggaatttgatatctttatttagttggcaaaatttgtacgattcagtgataagaacttggaaaacaacgtaaagccaaaagccatagacttttcaaactcagctatacctttcagaattttggatttatcataaccaatgtacaattattttttgacatgcaatatacaattttttgaataggaaaaaagaaaaaatataaaatctcaaaatctaattgcatatattaaggcaaggaattttttttttttttt

SEQ ID NO: 191492 - DNA, 2230 bp, Cannabis indica
agccatatcgaatctcacttgtttcactttaataaaatattataaaaatcactaactaaattataaagcaacactttattgtggtgctaggagcagggccgacccaagtattgggcagcttgggccattgcacaaggcccccatttttctaaggcccaatttttttttatttttttttttaaaaaaaggcctattttttttttttcatttttttcctattatttatacacaataaaaaaattaattaaaaaatttatgaaacaatttaaaaaaaaaaacgactattgtaattttaatatatatggtttttctttttaaaaaggactcaattttaaaattttagcactggctaggagcatggtgtctcatagcaatagcaaatagcaatgttctttatttatttatccaaataggcctttgtacaataaataaagtatatagcatttagggttccattccatcaagtgcataaatcaacttgggtccaaactttctctctttcatttcaagatcctacagaatatcctttccttttccttgtcttgatttttattttcttcagtaaactgtgggcttcaaccaagaaagaaagagaagcatgtaaacgaattaggaaggacagcttagactactactactagtctatatatcatatctttagactcaactgaggcctgaaaaaaaagcatattcttcccaagccttctgggtcttttactgcattattatataaaaggccaaattatatccaattttattttttccatttgtaggaatttaattattttagtcattattaacaaagatgcttaaatcagcaaaaacaaatacaaattggctctaaattgaaccgcgtgcatgaaatgatagatgaaaactgagctgataaataataatcaaaaggacataaagagaatctcctaaatcgtttatccctattttgggttgggcctgaaaagttgaaaagcccaattccctttcaatcacttttccttttctttcttgataatcatttcttcgtttaacgttaagctttaaacaacttatttcattccaaattacatatggagacttgatcacagttgtagaaacttacagaaaatcagtaataaagctggtgaagggaaagtaagaaaaaaaaaagggttaatgtcacgtgcctcacacaaaccattacattacaaggcacgtgactgaaaacatcctcaaaacggcagcgcatcaaaaacaaatgcatgctgtaaaagagtacaaaatgattaaataaaaagaaagaccagccaaatagaagaagaagaagaaacagaaagtagaagttgataagtggtacttgagaaaaaggtgggtagcccaaaagtgaaaaaagaaaaaaaaaaaaagaaaagaacaaaacccaaaacaaaaactaagagggtctcaggaaattgtacgattgccgtatgaaatgcgtcatattctcttggcttttggcatttaactcgaatgatatttttaatatataagaaaatgattacaattctttaattatttttaataattaattgtgttgtgtgtagtatagctagttacatatgtgtctgttttttctggctctggcgctaggtctggcaatgggacagagcctggggctggctgaggctagaaaactcgtcgtggacaatttacccaagaggtttctttcaagcaaagccttgtttttaaagccctctcataaatgaaatgataaaacacattatttatactctcttatttcacttttacctataaaaaactctctctgtctctctctctctatatatatatctctctcgtcagattgtgtatttttcctttttttttttgaaaagggttatagagatagaaggtgaaaaaagcatctaattctctatgccctaataaacctaagctcaagttacctatagtaggaagagaggcctagagagaggacaaaccagggatagaggagggtgtctttgctttggtcttggggagtgggacaggggacttgttagtagatactcactctcttcatcaaatgcgtgtgagtgagagtttcccaattattcttttatttattataaaaaattaccactaactaaaaaaaaatagtcaaatatatatttaatgcaactagaatatatataatgtttaactcttcagtccctttcttcttgttctttcttcataatgcctaaaatgtgaaaacattaaatttaattcttagtatgtt

SEQ ID NO: 191493 - DNA, 1716 bp, Cannabis indica
aaaaagaaagaaaaggattaccttcacaaagagccagcttaactctcctccccttgcaatgtttgaaagcaaaaagttcatatatatcaatctctgctaggagaatatcaattgcttgatgatctttctgcaattagtcaaggacattaaattaagccaagaaatgctcattttgacagtaacctccctaaaggctaaagcactatccaaaccaaaaaaagcaaaaataatgagtaatcattggtttcataaatgattgctaaccccataaaaaaaatatatttctttaaatagcaagactcggttttcctttactccttttcaaatgtaacagagaaaggagaaaaagtgttctataattgacaataatatataaaagcacatacatccccaaaaacagcaaacttttcctgaatagcttcttgcaagcgatcttcagcttcatcttctgaaagctctgcacaataacaataaagatcacaatcataagaaaaatgtaaaagaaacttacaaaaccctacacacaaaaaaattaactttaatgaaacaagtgcaagagcatgcaagtgcagcggcatcatctcgttaactagaatcttcagcaattttaatttttccaatatgtaattcactctaaacatgtatgtatctgagacaatatcatccaattatattctaaaaaaaattaacggtaaatgaaagtcactgcatcataactgaggagaagacagcaagagtacctgaaactgagccaattgttttctctacatttggtaaactcagttctgtccgcacaccttctccaccaactgctgggccccatgagaaaggacccgcactcaaatcaataaaggcccatctgaaaacagaacatataagcatcaaatcaatggtgctacagtatctgtgatatcacttttgtgcataaaagaaagagctcttacctgtcttttccaatccatgtatctgtaagacattctgcttgagcactaaaatctccagatcttaattccttttcaaaaacaagcttcatatcttcattcttccctttcaatacttagattttggaaaaaaaaaaaacaagagaggaaaattaattatgtttgttgaaaacattaatgtgataaagctgaatctagtaaacaagatatatatacctgcaacactttgttctgaatggtgtaggcagtatccttcccataagataacttgtcaatgttattcagggcttccaggcacatattgtaccactctacctagaaacgatgattgaacataacctttttagttagattactaactaataaaactgatactcttatacttccaattaagtagatttacggactagcaaatgtcagatgtttagtagaaacaattaaatatactataatactagcacacacaatttttacagtcaaataagagattataaaagatggtcatcttctttgttgatttttttgaaaacaaagctgtcaaaaatctttatagctcccatcataaaaaaggggctttatgaatgtatctctcttccaagttccaaaatagcagacaaccttgtctcgtctcatccaaaaagacattaggtgcgtgttaaattatttcctttgcaaatatttctttcactatatttgaacatcaaggtatgttcgattctgtgtcagcgtaaacatattaagacagttgttttaaacaaggctcatcatcgactat

SEQ ID NO: 191494 - DNA, 2036 bp, Cannabis indica
gcagagtcgagctcggaaccagcagaacgaagaaccggaaagtcaaccttgtcccggggaagaaacaagaactcgccaccttcaattttttcaaatccacacagctcaagaaactctatgcctccctttacagctccaactctttcctgtaaatcccaacaatttcaacatcacaaaacagaacaaatgaaacccccgggaaaccagaagcaaatagctcttaatacccgaaatttggaaatgataggccttaatagtaattgacactctttttcagtagtgtttttggtgcaaattcagtatagtaacgctactgaaaaccgcttgtgaataatctttactgataagagcaaattcagtgttcggtcacaatagctcttcatacctgaaatttggatttgacgggccttcttatagtctttaacactgcttttaagtagtgttttttggtacaaaattcaaaggtttgattagaataatcttcaaactggtaagcataacctattcacctacgctggactgttcggtcaggatagctatgctcttaatgcccgaaatttggatatgacaggacttatagtccttaacactctttttaagtagtgtttttggtaaaaattctaaggaatatttaaaaaatcttaatagatataagcacaatttattcacctatgcctatttaagtgggctcttcagtcgctcggtcagaattccaagcatctctcgaaaggattgtgtttcgggagaattttgtaaaaaagatgatataacaaagcaactcaactaatgaattgaagctatagtgtgatgcttaagactgaaaataatggttatttcatcgagcaatgtgaaataagaaccgtccattacctgaaacgattggttgctgagtctaatttttctgaatttttcctcgtcgggacttttgacaacattccctagataagttagaagtgtctggaaagctctcttcactttggcatcatcctcctaatttgttccataagaaaacacatcatgtcattccaaatgaaaatcttataaaacgatactcaaaaatcaacatcaacgatcttcatactttgttggaacaaacatatgatgatgtttcctttcgagttacaacattttacactactttctgaccaacacttaactcgagcactcatacagttgggaaattttcattttttaaaaactatagaataagattgcaatagctatcatttcgttttgcacattattgatgtttgtgaattataatttttaccttgtgattctgtttgagagaacgtaaacattccctcattcgttccactttggtgacaggcttaataggcaacatgggctgaaatttggacacaaagagaagatttttaaacgcatgaaacgcaaatgacattcaattggacagataattcattcattcgataccatacctttttctcttctacaactggcggaggaggttttgcagttgaaggatcttccggtggcaatccaagttttcgccttctttcagcctatcaagataaatagatgaattgagaatatatagaaaacttaccgcaaactagtgactaaatattgcatgtccagcgtgcgcataaattggcgaggccatttccatcattagaattcatagaaaacgaaaaatggacggttatcactattcgatttttgtggtattaaatagcttcccggttcattcacacactaaaactacaataatttcattgcagtgtagctttttatcggcataatagagttgactaatgaaacatactttacaaaaaccgaacaatatttggacgacaaaaaggtgctaatatctctataccttgtcttcttccaatttttgacgaattttttcccgagctcttttctcttcctccttctcagctttgcgtaaggccattattctgtcagataaaaatagataataataataataaagggttttttgatgtccaacaagaataaaaggggagcagaagacataaaataggtgagaatgggaatataccgctttcttt

SEQ ID NO: 191495 - DNA, 4524 bp, Cannabis indica
tgtaattaatttgatggccttggtccctgggggtagaggagacatactatatattatatataacttattaattatatgtaagagcctcacaggctgacagatattgtcacacgcacacatatatgtataaatatatataaaaaaatcaactaagctaggggttatataaatgctattgatctatatattatatatggtggcactcgtactgtaagcacaaccaagaagattagatttatcaattaaaatttaaaagtaaccttccaataatctggcaacaataatgggcgcggtctcacccactttccctcaccttgatgatggtccactagttgtgctcatgttctgtctctttaatcttcataagaaattttatttatcttatcaacttataataaaataataataataataaaaaaagtgtcctatgtgtgttagagcttaagatatattagctatataggttctatatcaaaaaggattaatgagttaaatgatttataattaatgtacatttattatattatttgttgtaaataatataatatgtatagattaaatatattgtgataaaattaaatgtgattttggaaattaaatacgtaatataaactctaaaccctgaatatcaacttcattaatttagcattatgaatacaaaatagtttagagatcagtaagaatagaagttcctagaatgctacgactaaataaggattgagcgtgcctagcaacaaagtgggcagttcgatttgctgatcgtctaacaaaatataaatgaacattaaagagaataataaatttttgcaatcattaacaacgtctaaaccaaacacagaaaacatggttgagtagaatgaatggcttgatctatcgtaacatctttccaatattttaagtaaaatgtaatattttatttgaagctaaaatgcatgtgattcaataactgttagtgtaagtagttaattttgttatcacagttagttagtctaattgttttacaacagaatgtgcttatgtgtgttgtatcaaattttattttaccactttattatctttctagtgtatgtaagcataattgaatcaataaacaaattcagtttttgggttttatgttttctctctcagaattctctctttattttctctgtcttactttgttcttgaatttcataccgtcgactaatttcatccatgaattccacttccatcgatccgaatctagctcccactgtcataccgccgacagctgctgtaccaccacaccagctgaactctaactggaacccattcactagctctctcacctgttttgattgtcaaattagatcgcactaatttgttgtcttagaaatctcaagtaattctagtgattggatacgatcttgatcagatctttcttattggcattcctccgccgtccacgttgatcactggagaacccaaccctgagcatagtcaatggaagcacaaggatcaattgattttgtcctggttgagatcgtcgatgacagaaggtgttcttgcctctatcgtgagcttttactcctcatttagtatggtatgcgcttgaacaaaaagttctctaattagtcaaaagctagattacttcaactcaagaatcaattctatacaattcacaaatatggacaaactgtctctgactacgtcgacaagatttagtcgataaattgctggctctcctattcctaatcaagatctcatcctacagttgttaaacggtcttggaccaaaatacaatccagtggtatcagggatcaccgcatgaagtgatgttcacacatttgaagaggctcaagcactgttactatctcacgagagtcgtcttgaacatcacaactccatgatagagcttacgatgaagatccaagctaatgtagctttcacaagctcaagaaacactccctatcgtcctccacatggtttcaagaatggtggtagaggaggctttcgtggtcaactgaatcgtcccttgtgctaattatgccttcgatatttccatacaacacctatttgtcactacaggtttgacaaaaattgggtcacacccaaacctggttcagctggtcaatcaacaatcgcaactaatccctctcctcgagcttacatcatagaacatgagtttgattacgatccacaagctttttccacatcgttcatacctgattttggtgatgattcagggtggtttgtgaacaccagtgctaccaatcatgtgactcatggccttgaaaatttggactcatcagtattacctaggtccttaaggtcttacagttggagatggtaagaaacttgtcatctgatcatttctaatattggcttacccacattacctcccattaattcatctcctcgtaaactaaaatttatacttcatgttccttctatattaaagaatttggttagtgtatctcaactcactaatgatagctttgtgtttcttaaattttacaaagcatgttgctttgtcaaggacaaacaaacaaggaaggtgatgctcaaaggaactcttaaaaatggcttatgtatgctagaggaatgctcaagactatcaagacagaaacactcaaataaatgtgtgtccaatggttgtagtcttattgctatgagttgtaccagccattttcaattttccaatgtaataaaatacactgctttttaagaaaaattctacctcttattccccacactagcaccacacaacaactagaattttgtcatgcttgccaactaggcaaaagccacaaaaaaccattccccaggactgattcaagagccactcaaccccttgagcttatacacacaaaattgtggggtccttcccacattaattccaaagatggttacttctactatgtccactttcttgacgactacagacgttacaccttgatttacccacttgttcaaaagtcacaagcctttgaaatgttcataaagttcaaaggaatggtggaaaataatttacctacccatcaagaaagtttaggcagattggagaggggagtatcgaacattttccaaattcctgagtgatcaagggatacattttaagcatccttgtcccaagaccagtgaatattcacatgcatattatagaaatgggactcactatactagctcaattgggtttagacttcacacatattggtgacatgcatttcacactactgtttttctcaccaataggctgccaacaccagttctaaaccacatgtcccccattgaatgcctccttggacaggtgcctaattactcaattctaaagccctttggttgtgcgtgttatcctcatgtaaggccatataacagagataacatggagttcaaaactcagcaatgcatctttatagggtactcctcatctcacaaaggctaattgtgtgaaaactctgaaggaaggttgtttatagcaaggaatgtggtcttcaatgaacaattatttcatgcatcagcaacatctttaaaagaataggtaaattcatctcatttacttagttttgcttcaattttgctttccacatgcatcttaagttaccacaggccatactaatcaatgtcttgttattcatgatctccccaatttcaatgtcaatgagacacaattacctgtgactcccactcaccctactgcccaactcacaactgacacaaatgtccaaactaaagctccttcagacatacatcaaccaaataccatcatcacttcacctcaggcacaaaacactaatatccaaacatcaatacctgttgtagaaaccactttccaggcaccaaatactactgtcaatacaaccatacctcctatagcaactacctcttttgttgtgaaacctaatggcaaaaagatacatccaagaagctggaatttactttgacaaaacatttagtcctgttgtgaagccaacaacagttcgaactgttctttgttggttgtttctaacaagtggaatgtctcaaaactcaatgtgaccaatgtgtttctaaatgggcctctggatgaaattgtttacatgtgccaaccccttggttttaaagatacaactcacccaacttatgtcttcaagctacaaaaagccatttatggcctcaagcaagcaccacagacttggaatgacaagttaagacaaactttatatagtctcttgggggtttcacggttctcatgcagatagctctttgttcatacatggaactggtacaaatctagtcattctcttagtgtatgtcgatgacatacttataacaggaccaaattctactttaatttcaaagttaatttctaatcttaacaagtccttttttcttaaaggacttgggacaagttcattgctttgtaggagtggagatctacatagacaatactggaatgtacttattttaaacgaaatatatcattattttgcttgtaaaactggatatggaaggtgcaaaattatgtcccaatccaacaagtaccagtgttaagttgtcattaaatgaaggtgaatcatttcatga

SEQ ID NO: 191496 - DNA, 928 bp, Cannabis indica
taattaatcaaatttctctttttaattagggttttcttacaattgaggcggttggattttccttatagttttatagggtttcattaggagttttattatgggtcgaatcccatttataagtttggaaacccataggcttcagttatgtgaaaataaccgaagtcatagggtaacatgtggtaccctatggtttcagttatttctaaaagaaccgaccgaagtgtaaagggttgcacaataattttttttcttttagcttttagttttcttaatatatatttgaagtatatgtgagcaattaaatagcatgggtactaaaaggatatggcttcacttttttcatttttttttcctttttttttttgtaatgattgaaaaattcgagaggaaattacattgtatatctattttactttaattgttttaattttcttacatttaagttactgtaaattatgtgctagactaagtggaaggtgaaagtatattgagtaactcacttataaaagtgaatacattttaatgaaatataatatgtagtattttttattaatggatataaaaagatgtgttcctattccaaaactctagtgtatattgatagctaataagttaaggctagaaatcaaaattgagaggaagttggagaagacaattaattaggaagacaaaataaagtttattattataaggctattaattattggctaaaagagtagaagtgggagtagaagagggtactttaaggtgcttaaaatcatacaaatataaattacaggtatgtcatttaacatttctcaaatctatattatataccaacttaggaatatgtggacttttttattggtaaatatttgaagatacatatattaattataataataattattataagcatcgtaattaattcgagagagagagagagaga

SEQ ID NO: 191497 - DNA, 2824 bp, Cannabis indica
aagcacagcacgccacttagcaaatcgagcaccggcttcatagtacttctggcatctttgagcaaggccgtcaagaccctgagtggtggtttcaccatttgttccagcaagctcaactgtacccttgtcaaccttaattcctggcaggactccaccctccttcaacacatcaacaaaaggtttacctgcatattataaaacaaacaaaaagggcttcaaattagttgagtagactaataatgaaaacacaattacaccacacataacaatggtgtccttcacatattttttcatttaaatattttagagatagttcaatcacggtaccagcagcagtgctttggtagagagtttcctcaaaaagaatgacaccactgaggcattcaaggcctccaggagtggtgaaaaggagctcacgaagagcacgcctgttggactcaacattctctacattgatgctagaaagacgcttgccaatggtaccagttgactcatcagcggcaagaataccctttccaggggtaccgatgtaagcagcgttggcaatgagctcatctgcaaagtaagcaagatttagatcaaatgaaacataagttcacctataaaagctaataagagacaattcaaacacttagatacataaatttcaaatttctacatacacaatgctcctaatcaaaatatacaaaccaacaaattcaattgcttggatgcataaaattccatccttatacatacttatgctcctcctaatcaacacacaaaaccaaaccagaaacaacataaaccacacatgagttctgcatcagggcaccaaacttttagtgcttttgaaaatttaattttgtacataatttaaaaatataaactttgacaaaaattcaacttaaaaacgtaaaccagatgtatttgcgattgattgtgcataaaaccaaattgaaaggggaaaaaaattacaaattgaagatctacgagctcttttatttttctattttgctctctgttttggataaaaatatattactttcaggttgatcaccaaaactttaatatgaaattcaggatctgcatcctttcaaataataaatctaccaaaagatcatactatcaacaaaaccccaaacaaggtttgagaaactgaaattcaataataaaaacctcttatcatcaaatattcaaaatccttgggaaaaatagagatcaaacgacggtcgtttagaaatgaacgaaagttaaaatccaaatcaaaacagatctacgtaagtaacagataaacgacatcaaaacacagaaggaaaaaaaatcaaaaattggaaatataggcacagatcgagagttgattaccttcgtatttgctcttgaagcaagacattttcgattgcaagatttgagagagagaaaatactagaagagagaaaaggttaagaagtgagtagaaaggttggccaaatgaggtttttatatctgaaaaatatttataaataatattaattaaattaggttacaccaataaagtgatgggtttaggcatggattttgttgcgcctatttagccttttggcttttttcttttttttagttaaataattaaaaattaatatttttatttttatttcattttttaataaaagaggaaaaaataaaaacagttggctttttccccaagtatgtcactgttcaccgacgttggagacacgagtggttttatactcgtgattttactattttgccccttatcaagtatttactttgaaaaaatattaattaaattttatcatcactacaaaaattataaaaacttctttaattgtatttttttttcttctcattatttaaggaaattttagaataaatatatgtatttttttaatgaaataaaaatgattgaaattaggaaaaagaaaatgtaaaaatgatttaaagaaagttttttttattaatgggtgcgtatataaattctagggtgcaattataagttattattcatgtggttaattactttctcactatattgcccaggttgtaatcgaagaaggaaaattgaactgaaaaagtgaaaagggtaaagttgggattagaaaaagaagaaacaaaaacaactgcgaacacagtcaatagtttgggtaggaaaagtaaagtgtgttgaatgaataaaaaggtaacttaaaaaccatgttaactaatgctgtggggttagatagattacgacccaaggtttggttagcatagcagacaatatgtaaaactagttgccataccttaccaaccccttttctttttacatatttatttatttgtttaagtttatgttttcaataacattagattaggcacgcatataatttcattaatttcatataaattatttttcttcactaaaacttttaattaaagtaaatcatcacaaaaaaaacacatggataacaataattaaaaaaaaaaaaaagctattacagctaataaaaaaaaaaagctattacagctaataaaaaaaagttatgttttccctttttcaactatttttttatcagctttcagccaaaaaaaaaaaaaaaaaactattttttactatctagaattgcttgatttgacccaaatctcaaattgttaagcctataaaaactatgtcttctagaaaaaaaaaaataatcccaaattgataatacttttttttttagaataagaaataaaaagtatgtcttctagaaaaaaaaaaaaaacatagataatgggatttgggattgagtaaataggaattttgtttattaattatgatatttttagagttttgtcgtaaaaacttttttgttgagaaaattttccc

SEQ ID NO: 191498 - DNA, 668 bp, Cannabis indica
cattacacccagattttctggaaagtaaaagagaatcaaattgataatccaagcctacaataaaaattctcacgaaagtgaggtattttattttcttattctaaataaaaattggcatgggctgctggtaggtcaaagactccagcttttctttgtgcacattccttttaggcaagtaagtatcatgattctattttatctcgtttttctcattgaaaataatagggaaagaagatacatgtctattttaggcaaattttaaagtttctatttttttttttcagtgtaacatagtattacaatctattaataaataattaggaatcttgagttctagccatgctcatccccttttcccatccctctcttaattttaaagttactgaaaccagtagatatatatgcttttgccaaaaattaaaaaaatatagaagataatggttaacatgaaggatcgaaaggtcactgtcaccctcgataaaaagatgtgggaaaagcaattacgtgattgttgctaactggtatctcttagattcgataattctaaaatagtgtagtgggatgtgtttgattatgttacttttggataattttgatattatcaacaatcttgtttttagcaatatcaaaactatgtgtaaagacgtgcataattgataatatatata

SEQ ID NO: 191499 - DNA, 1189 bp, Cannabis indica
caattaattaatcagtcgatattctttattaatattaccacatcaccgttggtcctatcacccacttttgtcctaatataacaatccgacttataggtaatgtctatgcttaattagttaagatgaaaaataagccaaatcatgaatattgttttggcttatttttcatgccatataacatttatacaaatatagcccaaactatagtcttatttgctgaacttattatagaagagaaaataatattataatttaaattaaaatcagcaaaatgtgtatatatataattaactcaatggaaataactaagctatcattgtggtcatgagctatgattatctttattctaggcatctccgtctcaaaaaatctttatatacagattctctctcaaaactcattactattattattatgaaattcagccatttgtatatataggcgaatctatctaaaatttcttattaataattctagctatagctagctaatgatcatgggagcttctctctgtggtttcaggagtttatcaaatagaccaatatccaataaccaagatgatcatgatcatcatggcaaatcttcagcaatcttggacttgatcaaacggccaggagggtgcttaaaatcatcagatgagaaggctgctaataaaaagaggacattgcactcatcaccatcatctctacaaattactcatgatgatgataataataatcagatgcagaagaatataagtagtactactactaataataataagttgattatgggaaagaacaagttgactactctagaggattggattttagcttctcctggcttaataaagacagaccaaaacagtagtactaataatattaataatggtggatcatcaggaggtagtggtgatcaacttcacgtattcaaaaagtcaagaaagatacatccttcttcaataactaataattcaacctcatcattatcatcttcatctcatgatcataaatattattcttccagaacaattactactactactactactacatgctcttataaagcaaaggattcttccatgatgatgagccgaagtagaagtgggaagttgacaaagaaggtgagctttagggaagagcctgatatcatcatattttcctccccgccagaatcacaacttattcatatctaataatatatatatata

SEQ ID NO: 191500 - DNA, 1363 bp, Cannabis indica
cttagtgtagcttgtagtagaattgcatttgtgcaaatccaacgaagaatatatgttctattcttcctttgtttgtaatctttgtaccatttaattggtttcattttcttgttaccatattcaaatttggagctaaataagttaatcctcacaacttaatttgatgccttgctcatcagagattatttgaacgagtaacaaaccactcttgtaaaaactaaaataaacaatttagtaaattaccacatttcaacaacatgtaatcttcataaaagagcaacaaaatcgtaaattgtgaataaccaaataagtaaaaacaatatagaagagcaagtattttaaagccaataccattttaacttgttcctttcaaagaaaagaattcctcagatcttgctagcaaaggtaagaccttccttcttaagctggtctaggctctcaacagggggttggagtttggccaccttagcgatagcgctattctcctcgggattaccaccttcaaggaatgcaccaatgaccttgccatccttaatccagtatgtaccgaacttggcctttggtgtttcaggattgttgtctccgaaaagtacagtttcaccaacattgtcgccatagaactgccacgccagatcaaaagaacgagagtagaagtatggaaggtagtcatactcctcaacggattttccctcctcactagccttgatggcctgccaaaacaaagaatttagaagtgcattagtttgatgatagtagttagtaccaaataggaacaacataaatatttgaatttaatgagtacaagataaagcaatttcgtatagtctagaaaaaaatcacttgacaaaggattataaatgtaggtgaatctgcataccttgacggcttgttcagctgatttgcgagaatggtcaacatgctcgactcttctattctcattgtacaatttaagagggaaagtagctacatctccgacagcatacacatcaggaacacttgacttgaaaaaagcatcggtctgaagccatacaacagtagaaagaactcagtatcattggcacattcaaattcaaacatgatcatcagcaacagcaaatattttattttttcaattttatgaagatcaaagttatgattaagaaatgaaggtcatacaatcaaagatttcaattttattttttccactaaccttaatgccacctttctcctcttcaacttgtcccttgaataatgttgtaaggggtcttcctccgacaccaacaacaacaatgtcagcttcgagaactctaccatctttgagtttcacttccgttacctgcacaagaagcaaaaggttcagtgtaagtaaattcagcctcattat

SEQ ID NO: 191501 - DNA, 958 bp, Cannabis indica
atataactgaccttggaatgtcacaatggtgaggttgccatctccaattctgaaagctcaaatcttttctaccaaatttctcacaagccaattgatcagacataaaagaacactttttctcattgtaaagagggtaagactcattgtccctaacccacttaccagagaacaaatcacaactcgaattcgactcggttgactcggttgatgactcggttgatccaagggatgacaacaacaatgagggtttaattgtatgtaatttggagttatttttgttactagttttggcacattcttccaagacttggtcaccattttgggtaaggtaaacaattgaaataactaagattgttattagaatagcaaggagagaatgaaagctatttcttattatgcctaatgttggagaaagagatttagaaggtgatgacactatttggctttggtttttaataataatattcttagtattagtacccattaatgatcatataataatatgaatatctctctctatatatttgggttttctagttttagactagtactttggctaggtttgtgtaaacccaataagtttatatatggatgggtttttgtgttattattaattttttttttgtttggaaaaagaaaaagtaataatgataaggaaaaggaaaagaaaaaggggttgtttgtttgtccatgtttgaagctttgtgattggttggatgagtgtctttttctatggttggtttggctggattatttagaagttattgattttgatatttatattgatggagtagtggtttactgaaagcaacaaatataagattgtgacatggctttggaggttggactctatgtacactgcagtggttgtaataagagatcatttgggcaaggtgaattggatttatatttctagattagagtttgctgattcattatgtggagaagcggcggcttg

SEQ ID NO: 191502 - DNA, 2586 bp, Cannabis indica
ggtgagctgtcagttgtatcatactaactctcactatctctcttgcatataaacactaagctcacgagcttagctacaataatgaattcattttcttgttgtatttatctttcttgttttcctttctttctctttattctttgttcttcactgctttttcaatcatgtccagaaggaatttcaacatgatatcagagcactttctgccattaatggcaaatgttattaccagcaattctagcaatcaacatacagtcggtcctagatcaaccaatgtaaaaggaaaggaatcgaatgaatcatccactgtgtttttcaatcacagtctctctgtgaagcttaataactagaacttcctattgtggaagcaacaggttatggctgctataagaggaaatagattgatgcacttcatccaaggagctgcacctccacctaagttcttatctgatgatgatcaagcttcaaacactttaaatccaacctacgttgagtgggatgtttaagaccaattacttctgtcctggcttctctcatcaatgtcagaaagcttactgactcgcatggtggaatgcgaatccactggttagatctagcacacgttagaaaaatacttcacactttaggtctcaaccaagatattggagtttagaactaagcttcaaaacctcaggaaaggtaatcttggcctgaattaatacctactttgaatcaagcaacacgtggatctattagcatttgttggagaagttctatcagcacgcaatcacattggagtcatttttaaaggactacctagcaagtatgatacgtttgtgatgtctgctaacactagaattgaaggctactctttgttccttgtctcaaaatctcgaatcgagaaaattgacactgacctggatctcagtgcttatgttatgataaatgaacctgatgttcatcctaaggccaactacaccaacaacaggagcttcgtacaatattagcagggaaatcacaattacttttgtactccaagaggaaatttcaatggacattttaacataagcacttttgctcaaggtaacagtcctaacctctcctcaaataattctttttatcctaatgatcgtgcgtttggaggtgtgttaagaggtggtggatctggtttttcaagaggagcaaggttttctccatcgaacaataaaccttaacgtcaaatctgttttagatttggtcatattgcacaagattgctactacaggtttgacaagaccttctctcactccaatgcatcaagttcaacatcagcacccccacctgctcaagccaatcttgctactgttgaccaaaattcagacaataattggtaccctaattcaagagctaccaatcattacacactagaagctcataatatcatgaacaactatgattacactagccccgaatgcatgtatattggtgatggtacagttctgcccaataaacacattggttttactttcatttcccaaaaatcttgtcagtttcaacctttacttcttaaaaatctcttgcatgttcctactatcacaaagaatttagttagtgtgtctaaattttctgaagataatggtgtttattttcaatttcattctagctactgtcttgtgaaagatcaagtgacacatgctactctactcatagggaaacacaagaatggcctgtattcatttgaatctgaagatcttcatcttcaatcatctcctcaagttcaatctcctcagtctagcttcgtctctcagtctcctgtcaacttcttagtggtgtcctctcaacctagctcaagtgaatctatctctgtcaataatcgtacaagttgtagtcataaccttaataatttcacaatttttgatgtttggtataataaattaggccatccatctaagaaaattgtaaacaaagtcctacaatcttgtaacatttctataaataaagaatctaattctatttgtgaagcttgctgtttagggaaaattcacaagttttcttttccaaaggcatcacacactgtttaaacataacccttacagcttgttgtgtctgatttgggggggtccctcacacatagattcattcaatggatacaaatactatgttcactctatatactctagattcacttggatttatccgctaaagaacaaatatgaagcattaaaggtgttcttaaactttaaaactgaagctgagttgcaactaggtttcaaactaaaatgtcttcaaatagattgaggaggggagtataggtcattcactagtcatttacaagaaatgggaatagctcacatacatccatgtcccagtactcatgagcaaaatgacattgctgaaaaaaagcatagacacattattgaaaatggtctagctttacttgctcaagcacacttgccattcaaattttgggatgatgcttttagaacatctatctaccttcataacagacttcctacaccaacactaggcaataaatcccccatagaagttttgtttaacataaaaccaggctttaacttgtttagaacttttggttgtacttgttatcccaacataagaccgtataac

SEQ ID NO: 191503 - DNA, 784 bp, Cannabis indica
cttgaacaatagcaagacaaagacaagaagagctttacatatgcatgcatggagctttcatagaggtatttcatctatatattgacaattaatttgatttttaactcatagtacacttattcatattatcactatatcatgttgttaacctcattataacacatttacacattaaaactcaattgtccattccatgatctaaaatttatacatttgaacctctgcctcagtctctaacttcatcatctaaaagttcttacttttactcagtcatcatggtatacacttggtaactaattaagagggataagttgaatctttttttcttttttcaagtgatgttttggattaattacaataatattaattgatgataaaatatttgttgttgttgagtagaaccaaattaatcccaactgatcttcctctttcggaggctaatgaagtgtcatttagggttttgtttcaaaaatgtaggaagccatagagcagattgtttgggatatcgtgtaagattatgagtgtaatcaacaaagtataatccatatctatttgtatatccacttccccattcaaagttgtctaatagtgaccaataaaagtaacctttcacattaacaccattcctgaaccaaacaaaaaataaaatcacattattagtcaattatatcattagttcagtatatatattagagaaatatttgtacaaaaacatttaaaggggaattctcattttatgcttttttgggaaaaagttagccaaaatgtgtgtgcgtgtgtgtgt

SEQ ID NO: 191504 - DNA, 2828 bp, Cannabis indica
tatatatatatatatattacaccatgaaatgaaagtaacacaccaactacacactatgcatgtctcaatatgtttatgtacatgttaattgtttagcttttcctttaatgtatttaatagaacatataaatattgcaggttcatggaaaaaacttatataaaaaaaaactataactatagtttccgacacttattagtctccaaattattttgtttaatgcctataataaacatagaatataatattagtataatcttatatcaagttctacatgtaataaataatataaaaaatatgttgatcactactcacaacacgccatatcagtgtgttattggaggcaccttaaaagtgcccaatagcaatattcataaacatatatagcaaaattattcatactgatttttccctaattattaagcaaaggtataccaaataaacttttattaaaaacaaatatactatatttatactaaaaaatataataaataataaatattatatacttataaaatgccacgactatagtcaagaactcttagtattgatgccataatttaatggaatattttattataatatatttatatatagtttgctgaatcgaacatttgattaaccaaaacaaaaaacaaaaaacaaagaccattataataatttatactttccaattaaatttgttgtagtgatagtccaccaacaacttaattgagtaataaagtaaatacaaactgagaatttatttattactcaatttgtttttagaaacgttccctagcatgcatgaagagtaacagtgccaagctaaatagggaataaagaaagataataactagaagggaaaattagatcacatagttattatgtaccttaaaatatcatgccaccctataatttttttaataaattaaatcacattaattaattaaagtacgtaagatttatctaattatcaaattcttatagcaccccataactgattagtggttacttatattaaatcaaaaagagtaggattcactatactaaattatactaataataatatgatataacgattaaggtatattttatcattttctgaaaaaagaaaaaactgttgaaattaaatttatagaaataaaaaaataatgtaccagtttccatggaaaatgtagaaaagtagcaaaagctagagtaacagcaggattcatgtgtgcaccagagatatgacccacagaatatatcatgacagtgacaattaagccacccacaatcgatgctcccagctgagacactcttttgttatcacttgcactaatagcagccgccccacacgtcataaacaccagcaaaaatgtcgatacaatctccgccatcatctattaccagtgacgaactcagaatttttattgtacaagagatcgattgtaattgttataaaaaattcttaaaagaacaagagaatggaggcctcttgaatggtcccgatcgagtactgcatatatataagcaattaattaatttagttaagtaggtaggtaggtaggtacctttctaagaagaccagaactgtaatgagtcttagagagtttccacagaaaggaagggctaagataaacactatgacgttttgttgggttctgaacggacaccaagtcgtttaggttctcatcatgaccattcaattcatgatttctttcccctgattgctctattctgtcgtccattatatatataatattataaactctctcgagacttggatatagatagtagatatatatatgaggttatatatttttgttataattgtgagaggagtatagctaattagtagtactacatagttggttaggcttagctatagaactggatacaaaaaaagaaattaactaagaacaccagacctaggcaaaagtgatctattaattgatcgatatggtgcttggaaacaatgactacttgaatatatatagagagatatacaaacaaaccatattgtaagcttaagctgttttaattattaattatatatcaacattattaattattgtcaacatgtatagatcaattaaatgacaaggtcaacagtatacaataatagtgtactacctacctaccagctgctagctatagcaagtcatgccttcatctaaaataatatatagtaattaagtcttctctttcccaattatttgctaaatttattataaatgtgcctagactatgtaaactttgagattattaatttactgcaatttgtccctaattcatattatcacatgataaattatagaatgttgtggagtgatcttatccttggaggttatttttgtaaatgcctaacgaaaaaaataaattcacttcaataaatttgacaggtgatggcagttaatgcaaactataccgttttattaaatgaaagaaaaaatataaggacgagcgagagtgtaagaacgcgatctagaaggaaaggagctagctcatatgagagatgagaaaagtaacaaagaaaatttgaagtgaagagaatactttctgaattgcttattgatgattgagtcgttatcacaaaacaactaacagaagagtatttatatactttgttcaatattccaacataacagaaactaaagaaagaaaaacaacttaacaactacaaactaactaacttctctaactaattgtaacttagcaaactcttcaacggcctcaagctcgaagcttgtgacataggtgttgttacagattcacttatttacccttaagttgaataataccactcacagggtttgacaaatatacccttacataagatacaccaaagatcaagactaaagaacat

SEQ ID NO: 191505 - DNA, 2575 bp, Cannabis indica
aagataggtatctggatgattgactagaaaaaaatgctccacattctcgctaacagattcatcaacatcaggcggaatatttctaacaagcacctgtgaagaaacaagacccattatacaagtttggtaaagagatttatcacataacaagttgccaagtcttgttgtagaacattagaaagtgtattattggtatgcctagatgaaacctgaagaaattcttaaattagcatcaaatgtgctatgttactttttgtttttgttgttttccaatttaggtaagggttcatctttgcttgagccctgtgagtatattatgcttcttgctttgatattattaaaaacaggcggttccatactttaaaataaaaatgttcttatttcattgtaatcaaattcagatgcatttcatgtttacatatcagacaatttaaagttgtatatttactaagagaaatagtaaatctcacagtgaactgatctggacgacgtttttctgttgcaagaaactgcaaccgcatggaggcaactacctcatactcccttagcaacacatagcatgtccaaaaggtgaatacataagccatcactatatgagtccataatctgcaaattcaagacacgcacaattgaaactttaatgctttcaaattcaaataatagaggaaagcctgagcgggggtgggtacagaaattagaggagtgcagttttaaatttaagataaatcctttgcgcaagagcattggctactggtggtcctttttcaaccaaccttctaactggtgtcaagataaacttcacacctctatcaattatataatgtccacaagaaagaacaacttcgttgtaatgtacagttgttaacaaggaagcagatttcataccttttggatcccgtctcaatatttgaaattgaaagcttatcaatgtcactggaagttgcattttttgtcagatcgagtatctgcaaagcatcatttgtccaattaactggtaccaagatagtccatgcaagaaatgctatagggacaaagatcttaagtctgcattagtaacaagagaaaaagaaaataagaacaaggaaagagtatgctgtctgcagacactatctttccaggaaactcaactgtaataacatccttccagcaattaaacaaaaactaacaagtacttaaagtgtggaaataaaaactaaactgtatatttaaggttataaaatcaataatctaatctacggcctaacaggtgaaaattcccaacaagataatcaatgtgtcaagaaaccagacttttcactaaacactaaaaccagaccttttcttaaaccagactcttctaagtctacaaaacctatgatcgagcctatgatttgatcaataagatttgggtatggttagaagtaagatcctgcctagcaatatcctaaaattttcgcacaataaaatacgatacaaagtagaataagataattaaaaaacaaaacagaagaggtagaaagtgttacccaatcaaataaatccttaagtaaacagcggaatccagtcctgcgtgatcaataagctcaggttcgggcatcttcaatgcatcaggcatccaattcaaaaatctaagatatgatctaaagtccaaattcacaaccctcccaaccagagtaccagaacgcgatgggctacttctcaaccctttaagataccatttcggaaagtagactctgtcattgaaaggttgaagcctcaatatagcaaaagcaagtaggaatatgaaagccgccaacagattgaaacctgccgctactcctatatctccgagtgtagccatttatatttccaataaactaaaaaaaaaaaaaattacactaaactcgatcagaatcagctgaatgttcactttaaaatcataattcaaaaccaagaaaagtaagaatttcggaacaaacctcgattaaaaagctaaaaattactactctggagttgtgttaaactaaaaacccttgtagccaaacaaccccataacccggctccaagaagaagaagaatcagagaaaaaccagaaactatagatcgggtaaccgaaaggcaagtgtttggattgcttgaaaatccaaataaagcaagaactatactttttttgcccaactagtctttcttttcttttggttcctaactttcttctctggaaaattaggaaacacgtcacactaaacacacacccaaacaaagacttcttcccttaataaccacaaatccaaacactaacaaaaaaatcagtccattaatcgaaagagacgattctggaaaaggaaagaatgaaagaaagagagagagagagagaggtgagaggtgagaggtgttttgatcaaagtagggacgatcaggtcaggttaagaattcgatgctcacatttggcacttaaacagtcagattttatttaattatttaattattaatttattaaaataaataataaaagagatttatagcgaagtaaactcgagttgcccacggtgtcggcaaggtggcaactggcaagtctaatatctccaacggctacttttttttttttttgtttctgtgc

SEQ ID NO: 191506 - DNA, 1827 bp, Cannabis indica
  modified_base (1725)..(1725): a, c, t, g, unknown or other
tttttaatttttttcaaaccaaatcaataatactagtttttaaaaattcaaaactgaattagattaattaatctcaaactaaatcatccacttattgcatgtttttttttttttttaatttaagcgttttatatattacatcatgttttacctggggactcgaacccaggacctcccacttattgcatgtttacttaaaggaaatggaaatgaataatatagtattgattcacatacaattatttattaaattttgaaaaagaagaaattagtggacccacacaaattaaggagaaaacaagggaaaagatacatgttctaataatgacaattttgtcaaattaaattacctttcctagttatgtaaacaaaataatatgattgtagttttcttttcggatagtttagtaaacttcataataaaatattgttttccgattattttctattttaaattaatacatttctcccattgattattttgattttaattacagtttaataaacgcgccattaaaaaaagaattgatttgtttcgaagttttagtttgtatattactaaatgttatattttttttttactgaattcttttactttttaaagtttataagatgtaattaataaataacaatgaaaatagttatttttaaaataatattaaattattattaatattatgctaagattgtttttaaatattaatttttaataaaaaaaaattatattaagtttatagaaaagattaaggaatttggtttggtttgaactttgaaccacatgcgagaatttcaaaaccaccgaaccatagaattataaatggcacagagtcagattgactaaattattgacaccgaattcatttggtctcattttaaatggtttagtccaaattagttaaggtatagtattacatattacaaattatatgatcaacctaatttaattgattggttggtattttaatatatttatatattagcacatttcctcaagtattgtagttagtcacagcattactccaatcaatttggaacacaaacataaatatctatatctatttgaaaagagtagaaaattaaaggtaattgattgtgtatcaaatcaaatctgatcatatatctatatacatatatacatatatacatatatacatatatttatagagtatatatatttatagaatatatacgtatatgacaatatatatttatagaatatatattagtaccttatatataaacatatatttggaggtcttttttttctttcaaataatccaaggatttcctctcacttttttttgcttattctattttgattcacacaaatggttgttctacacaagttatattggttagtcatgtctattaacattcatattttatttttatattagtttaattctttctttctcttttctattaaaacttcaattagttggattgtgctcttttatgtttttgttttttcttgtgaacgagggatctgaatttttgttatgtatattgctagttttgtaaaaataataagaacgttatcattgacttctttctttcttggttctaattttattttagtaattaaatgatttaggtgtttttaatattttgagtcgataataggatgatgattgataatgaagggttactttgtttttatttctgtagattgttttgtctatgaactaagaagctattttttttttttttaaaaaaattaaaatnttttaaagttaaagaatatcacctactatagtgtttggttagtaataagtagaagaaagtaagtttttttttacttttttttcgttttgttatattctattc

SEQ ID NO: 191507 - DNA, 880 bp, Cannabis indica
tatagcgtgcgtgcatgctaatgtgtttagactaaaatgctctttcttccttgtactactactccatacttgttttgttaattatattttaagatacttaccccaagagcatagtaggatccgttgtaccacactcggttttctttccttccttcaagaaatttcaaaacaatctggttgacacagaaaattggaaggcattaattagcattgagaagattgttccaataccaacatgtgtgaattttacaacaaaagacacaaatatacaaattctgtttacctgccccatcctatcccaatatccacgacaagttgctatgaatatttgacttgtaaacacttcatgcaaattggatatagactcaacaagctgtgaattcagcaacagcattctttcacgaacctcagcctccccatcttcttcctttgtttcctctaaaatccttttaagtcgtgtgtttcgattctcttgcatctgaaacaatcatgtttgtttacttctttgaaagataaccaaccacctatgatatttagttgttacgatgttaaaacaagcaacataaacgggaaagcaaagcttacattgtttataagcttccctactgttgcctgcaagtaatttttatattttgttctaagtagaactgtaactgcattcatttgctctccgaaattagactttttatctcccatgcttggcagaacagatgcccatgcctttaagatgtcctcaactttgcaatgaagaacatcaagaattctcttcacagtgttcaaaaatgttcccagctgataaaaatagtatactggttagttagtgaattgcatatctttatatgaatactattcttcagtgttcaactttatatgaatactg

SEQ ID NO: 191508 - DNA, 1853 bp, Cannabis indica
aaggaaattaacaaaaaaaataaaaaaaaaaaagaaaaattaatgtatggtataatataaatgtgtggggtaaaatataaaaagcagaattttaattagttattttaaatgagtgctcatttttattgattatttttaatatgtaactgcaacatatataatatttttgattagcttctgatttaattatattgcgactaataagaaggttgtattttaatgaatttttttttgggtagtgtgcatatatattatctaatataaaagttcatttatagctcgagaatgtttgtctctctgaaatatatatactctccacatacacatgaatcattcaatatgttttatagtaagaaaacagtaagtaatactaaaagcatattgtgtggagagatgggtagggttagaaattgcaaatatatatgggatctctatgtatatatatctttggtttgtatataatatattgccaaaagtcaattaatgccatgtgcaggcaagggacaaattaattttgcacccaaagtctctccaccgccgttccttatatatatatctatatcgatcatatcatatttacattttatattatttattatttgaatatattatcactgattcttcatgcaatgatcattacattctatacatgcaatattttgtatggcttcccatacgtagggctaattcagacaaaagtaaagattaacctaattgaattttatataggtacaaaatcatcactctctaattaagcattctgcaaattgtagtataatatatatcaaaagtttgcgtttcagtctcaaattaattagtatatgaagtatatatattggactctcgtaatattaagttatattttaggaatattaattaataatgcaacatataacatattaagacactacactaaaaacacaatttggactaatatatcaatcagttaattaacgttgttgactggcaattgactagaattagacggctagtattataggtggtaagtatgatcgattgtactaaattgtgttattagcgtcagttctataattccaacgcaaagtgacgtgttgtagtgtaatgttagaaattttttttttttattaaaaattacaattgttaatttcatattttttgacaacgtgatgattagatatttggttaaagttaggtaattttttttttttggtaaggtattttattctttttatattttattttatacgtatgatttccaaatcgtatggccctttctttaagagataactcataaggcttctctatcgttacattttgtattgagttcccaagtggacattttaggtccacacggtttaatttattttgttctctacgtactgaactactccattaattaactttttatatataattatatacgttatgtatgtaatatgagtgaatatatatactaagtagatatgatcacatgatatatttatataaaacatttatattttagaataaactatgatttgaatatttaattatttaatctgacattacaatttttaacatatagtatactgcttgtggatcaaaatagaaaccgtgaacatttgaacttttttacagattagaactgtctacttgaaattccttacaaaaaaaaaaaaaaaaaagaaatagtgtacttgaattggtgttttggaggtatagccttaactcgagtaagaattgccgtggtttatttattggctcatagtactatctcccagctggatattcataatatgaccaacaaaattaatttgcaaaatgaaataaaattcaaaatttcaaatttaaaactatttaacaaatacaaacaaattggggcaccaaagata

SEQ ID NO: 191509 - DNA, 1989 bp, Cannabis indica
caactaatagcagtcgttcttattaagttagtacgaacggaagaagatatatcagaagtactaccgttacgttcaatctaatagttcgttttttgtttttttttttgtttttttttttttaaataaattaagaatttatggaaatagatgagcattattcatggatccacactcagaaaatacatacagaaaagaaaaagctgcttttagaactttcctcaaagctataaccctcttccatttccatcgatcaatttctttaccctagacttaatcgctttctctcatgtcgttcttcttcaagccctctagacccaaaacccctcaggatgtggccaaggctatcaaggacagcctcgtcgccctcgacaccaaaaccgttgtcgaagttaaggccctcgaaaaggttacatttgtttttcttcttttgtttgtttgtttgattgggttagttcgattcttttggaatactcttttatggattttaatgctggaagaaagttgtcttttgggtcttcttgattccagataaactcatgtttattagtttgcattttccagcattgattattttacattttatattctattgctcaatccctgatttttccaaattctggttcaatttcaggctttagaagaagtcgagaagaattttttaataatgaaatgtatgcttttgggagatggggaggttgaaccaaatgcagagcaagtttcccaactggctgaggaaatttgtaaggaggatgttatttctttgctaattcataagctttctttactgggatgggaagtaagtaatggaacattttccttttgttaaagaataaaaatctttaagcatatttgtaatggaatgattgaaatgaagaaaataatgttgtaatttcattggtattaggcaagaaaggatttagctcactgctggtcgatattgttgaggcaaaaagttggctccacttactgttgtgtgcagtatattgaggagcattttgagttgctagattttcttgtcgtgtggtatgttaaatttaattatgcaatcgatttcttatacttcttgtcattctgtttaccttaggctctagaacattggttgtaactagttaattctcttaacatacgaaatgttatgagattctttgtgaatggcatttatggaccgggacagtgttatgaaaactagcagttgataggtgcaccttgatattgttatattgagtttctgtcaatatattttatcaagaacttttggcttatttttttttttaaaaaaaattaaaaaaacttttggtcttgtaaattgagccaattaattcaaatctgcctgctgatatgacatgttcgaggctgtaatctattttatgaattcttaatttagttaaattttccccaagcagctatgataacaaggaaattgccatgaactgcggaaacatgttgagggaatgcattaaatttccaacacttgcaaagtaagatattcattagatggtctcaatatagtatgtctttataagaagcttttctgttactctttcattagtggtgatttatgatttatcttttgttttgtctgttcgcaaaatgtacccctttttctttgcaggattttttttttttttttttttttaattctacacacttgatttttattagtgatttttctagatacattttggtagtctgcaagctttgagttgttctataagtttgtggagttgccgaactttgatgttgcttcagatgcattctccaccttcaaggtctgaccgctcctttattaagtgttatgtttttccaataacttcaatatttaaatgctgacttatgttctctcgtttccttttaataaattttttacaggatctgcttactaaacatgtgaatttggtctctggatttttgacagcccgtcacgatgaggtttgctgttcgccagctccttgttttcttatatgtagtgtggtcaaattaggctgtggc

SEQ ID NO: 191510 - DNA, 4134 bp, Cannabis indica
ctctacaaattaattaatatatatagtttaattatacaattataatattcagatttaaagattattataattttaatttatttataattgacaaatacatatttcttattattataattaatttataaaaaattataatgtgttatgtcgtattttttgagtagtctatttgtgcttacgtatcatgcctttcgagcttgtcgtaacgtattgtgcttaaacacatttttttgtgtcgtgccaatttataatatcgtattgtgtcgtattcaaatccatatttttttgtgccttgttgtactcgtgcctcctgcgctcgtaacagttttgtgccgtgtcgaaaaactcaatttgtatttatagcactatgcatttgtacaattgtacctctcaaattacaaaaccataaatttttccaaaaaataattatctgaaaaaatgttttaacacatgataaagatgacatcatagtataacgagaccacaattttagtgcttaagctaataataaaataatcatctagccaaaaaataaaaataaagttttaatattaatataaaataaattaaattgtatgtaatatatactccaagcccaacaaatgaaaagttgttgcaacattgtgcttagtagcttttacatgtatcagtagtacatacataccattagacaaactattactcattggtatgaacttatataacacataataataaacaaaacgagagaacgatttaggatcagaaataacttatcatcagtcaccaaccaccactaattttaaaaagataagttattttcttcctttttcaattgtgtgttccaaatgactaggccacaaaaataggaaaaccatgaggaaaaaaatcaaaacaaagaatattttgatcatcagccacctattagatgatatgctattcaaatacttgagtagtgccccttgtgctccctctacgttggccaatgagtcatccatgttctcatcgatcctgaaaagaaaaaaatatgcccaaacctcaaattttttcaaaatataccccaaacacaaccatataaaaaaaaaaaatgaaacaaaatatttcagtatttgttatgcttatttggataattaatctacttgtgcagatgtctcgatccttgataacattctagagatatagcaatatcaaaccaagaaaaagataagcaaatcagtagcatgaaagaattatcttacaataagttataagtctaaatcatatattcacactatttggaaaggccaaaagaaactaagcttttgatatctatgagtatatatacacacatatatttttgaaactaggatccccgcatagcccaattatatttggggaccaagaaactataacaattttgctatgtaggtacccatgagggactcgaacctcagactttgtgggagcaatccacatgcctaaccatttgagctacccctctagggtatgagtttgtagatatattatacacacatgggatgaatcacaatatgaactacagcatttcaccgtggttcaaacttcaaagataatgtcaaacaagatttacaaaactaaaacaatatctctgcccagttttgataacccaaagatgcagtaagaacaatcacgcaggaaataaaataataaaaggataattatagactcgtgttttgtgtcagtttcatcctaagatttagtccatatatatagtttgagagagaaacctgatggctatctctccttgctgggaaaccagagttgccagttgattgaagatattgctgagctcgtgaatggtggactctacattttgtagtgcttcagctctgctctgcatgtaagtgtcttgcaaaggaacaagttgctgttgttgctgttgatggttctgttgctgctgcagcaatggctgaccttctccctctgcttgtttcctgaatgtttggaaaccacaaataaagataaatacaatgtcattcattaaaccaaattattgagtgacattaattgtacaggaaagttgattcaatgattagacacaagcattctgtaacgtgcaggccaaaatgtaaaagctcagaaaaatacagaagaataattaaacactggaatacattttgataaaaaaaaataaataaagaaagagcatgagagtgagcagtaagcaagaatgtggcctccatattagttagtgttgtatgcaagctgtcccatggcactacctaataattacaaacaagttcaacaagaacgaatataatggtaggcaaaagacttatagaaatcacagtttcaaatgcggattatatgtaagaaatggacctatatcacataattccacctcccatattgtcaatttggtaataactaaagctatctagtgtcttcaactgtatcggctaaaattaactaaatagcaaactcataaaattggtgccactcaaataaaccaaattccacgtgagctcttacccagggagcaactgtgaagaagatgatgatccgttagcccatggaggaggaggggcattggaagtactagcagctgacctggaagctagaggacgttggcgaacaaaaggatttgcagaatcctttgatgttgtagaggaaaacaattgtcttcgattttcatgaaccttcaaattcttcaagaacgcaaaaaagtatcatgagtccagtataaaaatcggatccaaatatgtgaaagcaaagataataaaacactctcaaacaagataaccagcctaattattggacgagaaaagaaacataacattcagccttacctctgttctcatagtgagaacttctttaaactcttttgtggcgctcatcaaacgattcttcagatcatctactactgtggtggaatgactggtagtgtcgctagacatattaccagtctcatttctagaattgctgaggagctgaaggtctacaactgcagaattcagagcagtaatatcctgcttgattacagctgtcagttcctgaatttccattgtgggatcatcaaatactgaagtcctcttcgccactacaattacgaaaaaaacagaaaataaattactaatatatcagaaagaaaataaaaaaccaaatacgactacaattatcaaagtgacattgggataacacagtgttcataagtgttaaagcttaacggtaatgtcagcatcagtgaggatatgttttgagcatacaatcttgtaaatgtgtaacatcctttagcaatgaatcgcaaaaagaaactctacaaaaaactctttcatgccccttttcacacttgctcgctagaaccaacttataatttactgatggctcaatctattgataataatctggatcgttatacattaactaagttgttcagtaggatataaaacaccaaagatataaatatatatattggttcgatgtcttacacttggccagctttgcaagtttctgcgaagtctgatgtatcccatatccgatcttggaagctctccgattaaactcagactgaattgcaatcgcagatcgctgttcttcagatttcgaacggctgcttggcccactcgcactgggagccgacaaagaagacgatattgatttctttaacctatccgctacgctctgaaattcatgcgtccgatcccgaaacgacgattgagaagctttcatatgcattttgcagaaccctgaacttcaaaattctacaatatcataacaacctgaaatcgaaaaaaagaaaaaaaaatcctcaaaaatcctactacagtctacgaattcaaaatccgtgaccaatgcaagccaatcaaagatttgagcaaaaaaaacgagacttgaagaacagaagatccaaattaccaggcaggaagaaaacgagatctgaaaccctagaagtgggaattgaacttggtgttggaatcagcagcgaaattgcagaggtgtgaaagggaatccccaaaggtaatcgtgaaaacaatgtaattgtagctacgaagaacgataacaaaatggtgtctcacgcggaatattgaagagtgggatttgctatgcaacaaagtttcattaagacttagtttactttttctttttattttacaactacactctcttaacgttttataattattacagaaatataat

SEQ ID NO: 191511 - DNA, 1648 bp, Cannabis indica
tgtaatgaactgccaataattcaaaaacaaaacaaaacccatcatcagaacactaatactccaattgaatttggtaaataaggattgatatgtatgtaagcatgcacctggtggatgagcattaaaatgacaccggcatcgcgccacgcagtccggggaaggagtgaaaaagcatttgaatgagtcaggagttggtcaccaaaggcccaatatacagcagtagcagatggaattgtcaaggtgaatacataaagtgtagctagcaaataaatgtatttaaacttctgaggcttccacatagcatgcataatttccctgaaaataaataaatatatatatatatatataaccatcaaccgttattagtaaagttaatatttgataaatacttttatctaatcaaatgtgtttttaggtagtgaggaagaatatgtatcattgaaaaaggtagtcaatttctccaattatattaaaataaatcaccactaaggtctaacataattagaacccaacttatagtggaagagataccaaacttgataagaaaagatgaatattaataatagaaaaggtgtgagtaacatgagtagcaatcagcaagggataaagtattgactaaattagagaagcttatatgtgcaacagtaggatgagtcgaagtaatctttacgcatttccctaccaatttcatgcctgttaggttcccataaagtcatgtcaagaataagatagagacccatcactatatagattccaattattagataaactggcaaagaaggcacgaaatcatcaaactttttttttttttaggggagtgattgtttgggaagagtggattggctgtcccacttttataactggagatgcattagttcatataaaactatgcaaatctttttattagtaggaagtcacatctttaattttggtcttttaggatgggtatggtttagataaacatttttctttttcaaaaaaataaaaataaaaagaatgagaaaaaggaacaagaatatcacgctggcaaattattcattcttatttggagagcattgagttgagcatgtatgatatcccaaaagttaattaattatgcttttctcttttttattaaacttttcatcaaagaaaaaagaattttagaaacgacaaaccccaaaaccaaactttattatttatcaccatgcaaataaacaaattggactcgaatagtttttacacagttgatgtgatttagtaccagtatttataaatttgtattttaatctaacagttttttggtctgttctttctcgtatatatgttctaagataatccgtacaatatatcaagtccataaaaaagcttctgacgtgtgaatatcatattctaacattaaattatattttttctttactttgacttgtcgcagacaataagaaagctaaatagaaacaaacatacacttaaaaatattattcacatctacaaaacaattaagagcaaaaaactaaacaaaattttccaaaccagtcaaacatctatataaagcaatacattaggataagcatcatacacaacacatacagatcatccagtcatttcaataaatatttttaatgattttcttttttttggtaaggtttttcaaaaatgtaatatagat

SEQ ID NO: 191512 - DNA, 1339 bp, Cannabis indica
cccatggaccagcaccagaccagaccagtccgacccttccttcctcttcaccaagccatactccacgaataaacagatcctcatcctcactccctccttcctctctatcagtggatccctcactccctctctctaggataacttacctttttcttctttgctaaaaaataaaagaagaatcaagcaaggttcctctccatctctctctcactctcagttctcacctcaggcagccactaggaagggttcaatctcaggtccaatctttttcttttctttttatgctgcttttatggctatggttttaatgatttgatgaattagaataatgcttggtgattttacaatgttagactttctactgttatatggattttgtgcatttgatgagtgatatagtgattttacaatgttaaagctttcctgatttctttttgtttgtctcaacttctgatagcaatgacatatatgtttctttttttttggggtaaggattgcttattggtactgtttttattgtaggtaataaacaaagatcaaagcacaacggcgaaagattaaaattgtatgttttttgatagtttataatcactgttagtaatgtatattattattgacaacttcaatagttttgagacttatttggacctgtccttgcctaatgtttgaactgtttatcttttggttatttaatagttttaattggattttctattgtttttggtcataatctaaagccttaattatgaaaatgtaagggttgtaaccaactcaactgaaaaaaaattgtgtatggattaaaattttgtaggctgatataattgggttggctcatcgaataccctcaacccagccaacccaacttatgtgtgcaatcctggttttaaacattgttttattcagggttgagtcagaaatcgacgtctaagagtagtagatatactctacacctctacagagggaaagggagtcgctgcaaatggctggaacaactccgactacgatactctccatcactgaagacccacaaaaagggttccaaaaaccacgacgtcgattgggttcgacctgatggccgtgattttcaccaatgcaggcttgcctgtaagctattctattctttgtaaaatatgctgttctaagctttggtttttctgggtgcgttgatttttttttttttttgtttggaaagtgagtttagcatctcattatttgcttttgttggtttgtattttagtttattgtcaaatgtcatgtatttcataaaatgaaggctatattttggcagtttttcaagactggggctgtaaatgctgctgcaggatctgcttatgcagag

SEQ ID NO: 191513 - DNA, 3285 bp, Cannabis indica
tctcaaatagcgctctcccttgagcaaatgcctttctaggaaggccacatcgcccttgatgacaagtcagcattagagtgtgcagcttgaactcatagatgagttttcgaagacaagtcaacgtactcatcccttatggcctgctggccataagggctacactcagcttctccttagacccatcaaggtcagcctcaacctagagatggtagcagctgtcgtggtgtttttactggttcctagtaccaagcatggtctccaaactagaaatcatactccagttctatagactgagagcctccatctcaaagatagtctagtccttcaccttgagggcagcctccaaggtcttcacctactctcaaagagcgcacaaagaccctcaggatttgtcatgcgaaatgctcagctttatcaaagcctagcagcaaaacaaagtcaaagttagtgtcaaaatacaacacttgttgaccatcctttccacaaggttgctatggcctgccagatccctcaacgacacactcttggccggccaaccccatgcaatagcaccatggtcggccaacctacaaaaattccaattaaatgagcaactcaccacagaaaatctcgaaggccagcagagtggagcatgtttggctcactgtcaccgagcccctgaagctcatcatcatccataaaaagaatagctatctctaggagcctgcgagctgcctctaggcctctctgcctcgcgaccgagcttgctccccaactgggcttcagggcacccctgcctgaaggtcgttccctcctagccaaaggatcatcaatcatgggctgcccagctgcggcaggctctagaggaggaggaagagatgatccagcatcctctccaccatgagcggtttgggccaccatggccctcagatgacccaaagggttatcagaaagtaccttagcgatacctctcaacttggaagacatactgcaaaaagaaagtagcaaagtcagaaagtcagtcacaaatattcaatgcaggataagaatgtaaaagatggtgctatcaactaaccaataccatcatccttagaagaggaatcttcaaaatccttaacaactgccttgcccttacctctagatgtaggcaaggagtgagtaagtccctcaggcctgatttgaagagaagcatcactaattgagcccccacggaccaagcgttggcagagggccctttctctcctttacagattctaagctatctgagatagaggcatctcatcatccaagccagggacttatccatcactaggacaagcccctctgcagctagggctccatctacactaattaatgggccttgggctcctaaaactacagaagcaggagggtacaagctgtacttctgaaagttggtcacactggccaatttaattatgtttcttttcttcataggaagagacaagatgtggttttccatgtctcgcatctacagtgtggggatggagcgcttgaaaaatggcacaagctggaactggtagtgtccgatcttctagatgccctaaccaacgaagtagttctgggagtacacacctactttggacatgggtgtgttgttggtgtcacctaaccactgctggctaacctggctaaagtagaagtacctagtcctattctactttggagcagatttcaaatcaaaatagtatccaatctcataaggagtgggctgaggccaacctagctccttatataaaacaaacatcgccaaaaggtacttgatactttttaaggtaatttgtgttagacacatctcaaaataagcagtgatgtctttgaagtaagggtggagcggcaacactgcccccactctatatgatgctccgaccatgccatcccaccaagggcaagttggtgcaccctctgatctctagtgggtatcccccaatggacacccctcactagcccactagcaagtatcctgctaaaagtattagcagagaagacagaggtgggagagacccacctaaatctgtgatttggcatccaaaatcataggctcaaaagactgaatcaagatgtgatccaagcccaaggctgattgagcctattcaaaggctccccattgtcatcataactacctcaggggcagttggagaggacaatacaagttctgtatctccttctcctgactggtgcggcctcctcaacttcagactcagtatcgagactctcagccctctagtcaaccttaggcacctctgcctgatcaaccttcggacctacatcaacatggggttgggtaacctcgtctaaaattctaactctaccccttgttgccaccctagcaacacgaggatcacatggtggtgctctacgacatgtctattatgttctagtcatgatcacacaggataaccaagggacttatgcggttatcacctccctaattcaatactcagaatcacctgcatagatgagaaaaggaaaggcgagcaacctaacaaagctacaaacacattatagtcaacaatactcaagggtaccttccaggtaaatcacaatgtacaaggtcaattatcgaccaagtatcatcttaagtacttttacttagacatatagtgaatcctatgttatgcactcgactaaaatggactcactacaaagtctcatacagagttcccaaggggaaccacacataagactgccgttgtatatgcctccaaggccgtcatgagaccctagctgaggtcaatagaggacaaaaaactagctgcctgcttggaaccttggcctttgccagccaaggttcccaagccttagaggctggccaagtcccatgacccagtctagggctggccaagaaccctatttccaggcataggccagcaagcccatggggtatacccgcttggccgaccagaccacatggtggaaacccttggctggccaagtctcaaacaagagctccttggccgaccaggttgtgtacatatttgagcatgtgttttttccagaactcaaacacgttcttcgtgttcttcgtgactcaaagagccatgactcacaatgaaggttagattcagatcttttttgtctagaaatcacacattacgtatcctaagactatcgtgcaaatcaaaataccaaaaggacaattgttgacctcgcttctagccaatgacaatgagtcaaaaataaagagattaagattattaaaagaaagcaaaaaataataaaacaaagtgaataccagattgtaaagaggttcggccccgtaaggatggtaatggcctactccccttg

SEQ ID NO: 191514 - DNA, 4161 bp, Cannabis indica
gaaactgaatcaccttgcttttgttgatgatgtgctattattttgtcatggggatttcatgagtatcttataaatgttgcaggctctaaaaaccttctcacttacatctggattatatccaaatgtcagcaaaactgccttatactgtagtaacatgcagcctaatgaagtcaatcacattatgcacatttcaggtttcatcagacaggaaatgccattcacttatctggtcataccaatctgtgggaaaaagatttcagggaaagaatgtgatatattagctgagagaatgactgctagaattagaagttggagctctaggaatctctcttttgctgggagaatcactctaatcaactctgttctcattgctatacaagcctactggagtcaaataatgattcttccaaagaaggtattgagatctatcgaagccatctgtagagcctttctttggaaaggtcaagctatattccaaggtgcagggtctgttgcttggaattacatttgtcaacctaaggcaggtggaggtctagggatcaggaacttggaagcatggaacaaggctgcaataagtaagtacatatgggctatttcaaataaacaagagagcttatggctcaaatgggtccatagtgtctatattaagaatcagacatgggagaactactctccttccatacattccagttggtattggaagaagatggttgccttgaaagatcaaatccgagaactggtagactttgatgcttttcagcagtagaaatatagtgttgcagctggatacaaactgttttccccaccaataactcgactggtttggagaaaagaaacttggtcaaggcttaacactccaaaacatagtgtcatagcttggttggcaatgctaaataggttgaagacacaagatagactgatgcgatttggcatacatgttcaagagacctgctgcttatgtgagctgcaactagagacctgccagcacttattttttgagtgcactgttgctgagaaatgtttacaggacctgaagaatgggtgaattggcatgcccaaaccaatagcctacaacagcttctcaagtggattgggaagtccaaattgtcaaagtttaagaagggagtcctctcggctgctgttgtagggctggtgtataacatttggagagcccaaaatgaagttgtttggcaaaaagctagagttaacccgactcgtattgttgaagaaacaaaatggaacataaaggttcagattgatagggtgatgcctaaaaacgtcaagaataatgatagagcttcgtttattgctttgtaaatcataacacatatattgactctagattgatacaattgtgtacatagacttcggcccttttcatgggtgcgtatagattgtaaaaagcttgttttgtgcaatacgactcattgatttatcaaaaaaataatgttataaaatcaataaagaatattttgttaaataatagtatattttgttaaagttaacataaaaaataaaaaaatatcgttaaactaaaaattttgttacataattacattttatatagaatgtatatttatatatttatgtgtaggtataacatgaaagatctattatgttttttttttaaatgttttgctccattatttgattggtttctatttttttaatttaagtttttgaattgtcaataaatataaattaggattcaaatgagaataatttatgtggactaatataattaaatgttgcttactttgtgtcagtattaaaatataatgataattatataatcgataatgtatggtattaccataggaccataataagatggacataacgtactaatacactcggggctcatggacacgctctaaaacgtcttggtcattctattgggccaagacaataaattctctctattagggctataggcccaataggcccattaatccttataaaagggtcatgcccttatagtttactaagggtgtgtatgagatgtgtgtgaataaagatagagagtgaattatagtgttgttcataaaatcccatgaattcttacatggacatgctctaaaacatctttggtaattctattgggccaagataataaattctcattatttgggctataggctcaataggcccattaatccttataaaagggtcatgtccttattggttactaagggtgtatatgagatgtgtgtgaataaagatagagagtgaaatagagtattgttcataaaaccgcatgaatttttattttctttattgtgtagataaatgaagttcaatcaacatgatcattttagaacaaatttaaaattggaagtatgtttattcttatgtcaatgtctaagattaaatgattgatcttgtatatttatgagtattaattgtattgattattattaaattctcattgtgtattaatttcaataattggtatcatgagctaaataatttcaattttagggctattaaggtaaaaaatcactatgaatgtcttcctttttatgattggaacatgtaaagaaattgagcgaatgatggcaagcttttggtagaaattgaacaattccaatggtaatgggagtggtactatttggatgaattcagatagaatgacaaagcacaaatttgacggtggcatggtatttcgtagttttagggactttaatctagctatgcttggtaaacaaggatggaggcttttgtttaggcttgattccatggttagtaaagtttttaaagttagatattactcgcaaggtgattatctctccgctgaacttgggtcgaacccgagctttatttggagtagtatttttgctgcaaaggatactgtcaaattggatttgaggaaaataattggattgagtacgactgttcaaataacttcagatccatggctaccagttattaatcgacctacacctgttcctgctgttcatggccttgaaaacttcactgtcagcagcctctttcaagtcaacaaccgtagttgggatgttgatattgtgagagatcttttctcacacgaagatgctgcaatcattcttggcatacctataaatccctctggtggaaacgattccttgtattgggttgctgagaaaaatggtttttactcggtccaaagtgcgtataaattgcttcaagattagaagcattcctcagacaacttagaaatcaatgtgttttggaagaatttgtggtctctcaaagtgcctcctaaagccaaatgtttggagggcggcctctaactatcttgaaactaaaggaaatttgtgcatcaaaaaggtcttggttgataatgcttgtcttatgtgtggtgtgtttgctgagatggaatggcatattctgttgtcatgccattttctttgtcatgttgggagtatgctggtctggctgctgcaggaagagatgtttcttctcttctgtcgtggctgaacgatacttcaaggctagtagatggtgagtctatgggcagagtggtaatgttgtgttgggccatttggtcagcaagaaatgatcttctatggaagcaacgagttcgaagtgtgagagatgtggttgtttttgccaatttgagtcttgatcaatggttgaaagctcaaggaaagggtcccttgatgtctccactcaaagaaggagatggttcgaagtagtgggttaagctgactttaggtatcaagctcaacattgatgcagccattttcgatcctctcttcaaacatggctccgggtgtgtagttagaaacacgaatggaaatctggttgctgcttttgctgggttcaaacatggcaaagtctctcctgaattggcagaaatcatgggcattagggaggctttaagttggcttaaaaatcacactcacacacaggctattcttgagatagacagcctggtctgtgttaaagctattcagagtgtagaaatctttgcttcaacattcggtttggtggtggaagattgtaagaacattcttaaaaatttgttaaatgtttcggtattttttgttaatcattttgcgaatcgtgttgcgcactttgttgcccggcattctatttctttagctgaacgtatgttctctattaatagtgttcctttggagttgatgtctattcttacgagtgtttgctcgagtcaat

SEQ ID NO: 191515 - DNA, 1304 bp, Cannabis indica
tgtactttttgttgagtaaagtatatgtttttgtaattttaaaacttaccagtatatttttataaataaaaactttacccgctaaaattgtatataatacataaaaaaaaaggatatttttgaattttttattcttttgcatttaatttgaatagaaaaaaaaattggggacatgtcactcccctcctagatccatgtcaatgggcaacttaaagtgtcctaacaccaaatgtactatctatagcttaccgctattaatagtcctaatacaattgtactaattatattaatggatggggtgatttgcaggtggctccagctgaactagaagccattcttctgactcatccttcagttgaagacgcagcagtgttcccgtaagttgtggtcgtttttttttatgatgaaagagatactttaatatacatatttaggttaattaatattattaatgaatattatttcagaatggttgatgaggaggcaggggagatcccagctgcgtgtgtagtgttggccccagaagccaaagaaagcgaagaagaaataatgaaatacgtggcttccaatgtggcccactataagaaagttagagtcgtacattttgtggattctataccaaaatcaccttctggcaaaatcatgagaaggcttctcaaacaagccatggccaaaattcacccttaatatctatatctatatctataaatagaattatatttaccacatatccaaaaataatgtatgagtaacttaatctacaagattatatgtgtaaaatctcatataatatattcaataaacttaattattacttggcgacctgtattttatttttaactctttcataggatcaaggcaatattttgtaggatataatttccccaaaaaataaaataatattttatgggatagctataattgcaaacttttatattcatttagaaatacaaaacaaaataattttgatacaagaatattatatatatttatattcttgtggtgatcattatatagctttttgaagaattatggttatttttcaatagtcatgctagacgtgagtttcaataaataaataaaagtaagtacagttatagttggaatacaaggaaaatttcattaattatgcttacattagacaaaaattaattctctaaatttatatgtatcattattaaaaaaaaatgggtatacaaatatttaagtactcaaaatactaatttataccgccattttctcttcactctctttttctcaacctcattttcactcattctatctaacaattcaaactaaaattt

SEQ ID NO: 191516 - DNA, 3033 bp, Cannabis indica
gcatgccgaactcacaaaaatgtcaaaataggggaaatggctgcagataatttagctaggttagaaccatctcatggagcaagtagagttctcttgtctaacttgtatgcagatgcagggagatgggatgaagcattttcagtaagaaaagatatacaggttctaagaatgacaagatctccaggttatagcggtgttgtatgaattatgatacacaagtgaaatgcttgaatagttttgttcagtaggaagagtgaatatcaaaataaactttccctattggcctgttctacctttgttgggttgagacttattttcagtttcccacattgatcataatggagattaaagtcaaatgaattttgcaaacaaaaggagaaaacaaatgttaatactaaaacattattgtctgaaataatcaaagctgctttgtgacaaaatctgctgaatgcttttcattgaactaagttatgtccttcaagagaaagggttataatttacaactaaaatctacctacatgtatggccggcacctacaattttcaaaaataaaagtgtaaaaagaatttacatctcaatttcaactattagttcagcagctgcacccactgtacctacccccaacaatgccagtgcaagttctacttcatcccaatgtttcagcccaacactcattctttttagcacatctacattcacctcgagcacccatttgggtgtgcagcccaccattaggctcacaaaaccagatacataagcgcgccatgtggcaccatcacaaccgagtgatatcttcccatcaagagcacttgcgagaaattccatgtgggtccccaggacttttggacgccgctttgatgctgctgatgatgagtcaacaccccaggcaaatgctccgcacaacactgcaaaataagccagtgcatatcccccaagcatggccaccattccttctgatgatccttcttcatgttcagacctatgcttagatataaaccaagaaggtaaagtttctttgaacagtgactgaaccagaactaagcctccagtcaaccatactaaagacgcaccgagcgaagctgctagtttcacttgagtcattgctgcagcaagtgaaacctggccatatctcactccatttgtcttggttgtctttaactttcccaatttttctctgggaccactacaggctatctctctcacagattgcatcaaaatggcaacaatttcttctgttgtaaacacaatatctctcattgatcggaatacacgtagataaagaataccaggcgccacaggggacataccgccacagaaatgagatccaaatccatgaccaagaagagttccaacgccaccattgtttgacataggagtggcattcagaccaagtgtagcagtgaagcaactcttaagaagttgaactaccgcatcactgttgtggaggaagacagttcgagatgcagaaaacactagaaagtctgtccatctcttggccttttgggtccatagggacgccacaatcggcatgcaaggccatgggcaacctgctgccagagactccaaggcagggccagccaaatttaggaagcgctctgaggctttgtcaatcttataggttatagtcaggctcacaaatgcagccaggggcaaaggaagtatagctggtgagtttccccctgttacagtgacaattcagacatagtcaaattactggaaagaggaataggaaatattcctgggcagtactttaataagttccacatccaagtttttcaatgttagcaatagtaatggttggtgaacaagcaaatttgctgagatgcccacatgcagcaggcaacatcagtcgtgcatatgcaaaaaaatataagccttcaaatctaacataaataaaggaaataacctgcagcaaggctggggacatcaacaccagttgcagccaggatttcttttatctgctcctcaacattggacaaagttgcggcaggacttggccaatctgttccattcataaaagctggcttccaaattccacgagttacttcagcagaaaagtaacccacaatgcccgccaaagatgcaggtagaaagtcagctaaatctttaagccctgtaataccaaaatcaatattttaaatgcagaaacaagtatagtttagggagcagcacacctaataacccaaaactaattttcttctctttacaagctctttatacaatgcaaataagaaaagtgacagtgtgtgaaactaaccagtagccagctcacgaggagaaagcgttccatgagcacaagctgtaagagcagcatcaacaacaaagggaacagcttccagtatatcccaggcaggcaatttaggtcttagggagttatcttcaattccaggtcctgaagaactactactcccagtagcagaagtcaaagactgacttcctctattaatctttctgaacatcatgttaagaagtccatcaaaaatctgatgaacaggggttccatgaacaagaccagaaagagttgatgctatacatgcttggtgctgccgataccaggcttttaattttggaaatgaatctacaaacacgggttgaggagatgatgaacttgcaacagaagagagtctcctcttgttttggtccttgaaggaatttccagaagatattagatgtgagttgcgtacagcgagaaggtattcaggagttagctgggatccaaccgtgggtacatctcccactccgtgttcaagaggagggtgattaaacctccatagcttcaacagaagaataaatgcattggaaaacacagcatgggcagaaaattcttctcctgatttgagagtccaagacaaattgggcacacatgaaccgaacacttcacatattggcattagtgaacaagcaagttgtggaacctggcaacaaaatttgaaaacaaaatgactagttaagctagtaagaaatccacaacatctccctataccctttacctaattgattctaatattaaatcattgcataagataattcgat

SEQ ID NO: 191517 - DNA, 1488 bp, Cannabis indica
ttagaaaaattaaaaagtagaaacaattttatataatttttttaaaaaatacttttacttttaataaaaactgatatattaccaagcgtacctaaataataataatataaataaggttatcctagataataatacatgataccggtatataattatagaactaatttaatagaagtgtgatcctctcaacgtacattttgttttatttatttatttttttttttttttgagagagataaaagatctttaacaaagaagaagcagtgaaggaccagtactatagaactaatttaatagaagtgtgatcctctcaacgtacatttatataaggagtaacctccaaagtttattttcagacaatctctctctccttaattttcctcttcaaaatacctacatgttatatagattgtactattatatatataagtagttcaacgtaataataatgtggaaaatcaaatttggaagtggtggtgaagatccttatttgtacagtactaacaattttctgggaagacaaatatttgagtttgacgaaaaggcagggactcatgaagagaaagctcaagttgaagaggctcgccacaatttctacaaaaatcgttacaacgtctctccctgtagtgatctcatctcccgatttcaggtataaatgtatattttttacaatttttacatcattcagaaaaatctatttttaagttttaataatatccaaaagaatattatttttctcgttcgtgtttttttctctttcatcttctatgtgtttttccttacatttacatgagaaaagaattatatgataataaaaaatatgtactttggtattttgaaagcagataattttcaaacagagattattactcattcttttatattacatttattaaatacattttaaaaaaagtaatccgttttttattttgagaaatttcaatgttattataaatgataatcgtttacaacaacagagaaaatagaatttgagacagacaatttcattcaactcaagagcatatttagctaaaccgtgcgcttcttagttagtaattctcctaacatgagaaacagtgactcctaaaaaaaaagataaaagacaactaacatccaaaattaaatcattagaactagataaattcctagatggagagttaagagctgtagagactctcaaagcctctgtgtcaatatgagtaagtggtaattgtaattgtaacgcccaattgagactatgaaaaagtgctttagctccatttcgtcagaacgaaaacatccatgtactggcttggacaaagcagctatcacatggccttgatgatctcttacaattgcacctactcccaagatctttaactcagaattaactgcagcatctatgttcattttaagcccaaatgtgtctggcttgtccatgaaatttcattgaacttttgtcttgttggtgttggtactaagtctgttggggattattttattaggatc

SEQ ID NO: 191518 - DNA, 2090 bp, Cannabis indica
cataacatctatcttaagactgatgatatgaacagaatttacttggtgttgttttcagggaatacttcctgaaattcttgaagaattattaactgctcgtaaaagagcgaaggccgatttgaaggtatttttttttttgccaatgactagaacattcctttcattttgattcctacagttttataattatgtcttggtttccttgttctgctctgtgttggttgacctttggtcctcaatcttcttgcaccccctctgcctctttaataatttttcatgtttccttacaagataaaaaataagagcagactatgcatgtttttgctgtttctactttttgttttgtacaataatatctagctttactgataggccttattttgtgtatctttatacctaggaagcaaaggatcctcttgagaaagcggtgctggatggtcggcagttagcattaaaagtaagctttgaaatgccaaagtctttgtttgcttttgtaaatgtgctccttattcttcttgtttgctttaaacttgataacattctcatcctttcagataagtgcaaactctgtttatggatttactggagctactgttggtcagttaccttgtttagagatatcttcaagtgtcacaagctatggtactgattatttttcaaaacattagcctactcttgtttgtcttgaaacatagatattgaggatttctgctttgtctcatggattttatcccttgtgaaggtcgacaaatgattgagcatacaaaaaaacatgtagaagataaatttactacacttgggggatatgaacacaatgctgaggtgagtggttacaatttttcttatagaaatgtctaatagagtagtcaatgatgaccaattttgatgcatattggactttctgattccctttgcttgcacatttttaatttgtagaactggattgtattaagatccaaattgatcaagtatgggattggttagtagtatataactagtagctacttaggcaccctcctctcttaggctagcttttgggagtgtgttctacccaagtggttgtatcaagtggtatcagattgcattctacactgttaaatttcctttgctcatgttgctactggttgcttatatgtataaaaataattgtaagtaacaatatactattgttgacattgttacgatatcaggtcatatacggagacacagattcagttatggtccagtttggtgtggcctctgtggaagaagcaatgaacttagggagagaagctgctgattttattagtggaactttcattaaagtaagagttattactttggtcatgaaatgatttgtagtttcatacttgtatttattaactttgtagggcttaatgttctgttatatttgacattattgttgtaactagttcctttctattttgtctttgttttctcttgttatcgctcgttaatgaagcctatcaagttagagtttgagaaggtttattatccatatcttctgatcagcaagaagagatatgctggtctgttttggacaaacccagacaagtttgacaaaatggataccaaaggtagaaattagagtttcttgaatttgtcaatatccttacttttaattggacttggtgtgaatatatttgttatcatttacaggtattgaaactgttcgaagagacaattgtttattggtaaagaacttggtaaatgagtgcttgcacaaaatactaattgacagggacgttcctggagcagtccaatatgtcaagaacaccatttcagatcttcttatgaaccgtatggatttgtcacttctggttataactaaggtgaaaaataatttattttaaattcaattgtcaatatagcgtctcaataaattttgaggaaaagtctgttttcaccaaaatttattgttgacaatgactttgtaagttctcttgatttgggccaacaaatttgattgaatagggtttaacaaagactggagatgattatgaagtaaagactgctcatgttgaacttgctgaacgcatgcgtaaggttggtttgtgcattattgatttttcattcctgttaatggactt

SEQ ID NO: 191519 - DNA, 2857 bp, Cannabis indica
tttttttctttgtcacaaacatatttattatattaaatagtctataagctttagtaccaataattaaaatttaaatagttgatatgtaacattcatataaaattattaacttaggtgttgatttagtttatatccacaatttgataagcaacattaaatgacatcataattaattaaatatagttaaaggaatcatttatcaaatgaaattaatttgtagaataaaatggaaaatatagcaccatttattacagccttcactaaaaaaaattggacattttattttattttatttgcataaaaaaataaaaaattaaaataatagctgcactaagctccatccaacctaccctcattttttattccaattttacccttgtccaatttaaaaattagcaagttggtcctcacaagttttgattggaaatattcaggtcagccaagccaacttgtattttggtgtctaggaaattgtttttattttatgtatttcctaaaataccctcaagtccatggaaaattgtttttattttatttttatttatttattaaatattttagccctcaattttattttatcataatttcctcctatatatttctttcttatttgagaaaaaaaaagtcacacaaccctaaaaggtttggttgttatttaggaacccttttgaaatttatttaattaattaatgaaaataaggtcattataattattaaggtttgaaagggtttggttaggtttggttcacatttaatattttgtgaaggacaatttgaatatgataatgagagtagctgttatgactataactacacatcaaatttagatgaaaacaacataacacataaagttaatgtgtacatgtaaaactatctagtaatcatagccttattctcatgccatttacacctctcaatttcatgaaaacaacacccatccctttattttattttttggttcaattttgtgttgcaaatagcttggcacttgtaaattatttatgggggttttagccctaaaaaaaataaaattatatgtatttttatagatattaaatatgtaaaaagaaatttctatttaattagtttaatttactatcattttcacaatttgccctcactctagactttttccttctgtctttgttttgaactacaaattttcatattgattaaccaatttttttagtctctatgtgaagatgctatttagttattcaaatagaatatgcgcaccctcttgtaaaggtagatgcaacctatccgagtagggttatgacaaacaatttttgaggttggagttgttttggtaactctcagagaggggagcaacactcgtagctccctctcctttatggcataaaaaataagttataattttgttttcttttaaaggtgggggcgataatcgatttgttatattattattttttgagtaatttacggtataaatacttaagtttagctctcaattgcaaataaatatctaagtttgatttttggcggcaataataattaagttatacttctagaattctgtaggtacctgtttgttaaatattaaatgaaatgtcatgtggcaattcctagttggtccaagtcatgaatttttatttttttttaaaaaaaataatttatgtgtaccaataagaaaatgacacatggataatgacttgatatttaacgttgaggtacttacaaagtttcaaaaatataagttgggtattattaccgctaaaaattaaattttgatatttatttgcaactacaagttaaacttaagtatttatgttgcaaattactcttatttttcttttataaacttaatcaccccatgcatataaaacatgtgtaaatataaataatcgtactcactaatctaaatctcatttatcaaagtgtctttcaaatatcgtgcactaattataaatttataaatattattgtgtttcagttattgtaaccgagtggtctaaaatttgtatgctttatcttaataattaatattaagaatgaaaatataatagttttaagatattttcattggaaagtaatcattttacacaatctcattctcaacacaaacaaaagcaccataatgtattttaatatatgtaactctactttgtgataatgtttaattttttaaaaaatataactaaaagtcaaagtagttttgatttggacacaaaacttagacatatgtggaaaaattccaattcaagaagccaaaaacataagaaaagtaccaatttttagttcttatgacaatgaactttacttgttatgttggttaaaaaatttcaacacacatacaaagtttcaacaagcaaaacccataaaatcatgttaagtaagtaagtatgagtgagaagataagtcaaatcaaatgtttaataataagaaactaaatagtaattttgtacaaaactttctacttttagtaatatgttatctcttgcaaaattccacaaatgaaactcctctaattggaatgtcttaatcaatgagtcaaaaagaaaaaaaaaaaaaaaagaattattaataataaaaatataaataccatttgtaaagtctacacctttcccataaaaagtaaagctcaactttttcttaaggctaatacatcaaaacggtaatatcctctacaaaaatttaaagaatgtaaataaatttattttttaaaataattcgacctcattaactcttcttgttacaaataattgaagctcacatgttatcccaaaaagatagtaaaataatatcacttcactgaaaaagaaaataaaaaataataaaaaaaattaattttaataaagtgtgtgaaaatagacaatttgaatatttttgtttggag

SEQ ID NO: 191520 - DNA, 3013 bp, Cannabis indica
aaaaaaagaacaaaagagtgggggtaaataaaaccttgtccaagtataattcagttgcccaagttgaaatcattgttatctggcacttgtcaccttttgcaagattatcaattttccgtagtaaaaaagttctcaaagcatcctgcaagtaggcaaagtacttacaaaatgaaagtctgcatctataattcaaatggaacaaatttgaccaagaacgttatttggcagttacctgttcgctcacagtaataaacttcagagtaatctcctcaaatgacaatatgtagttaatctgcaatacactttaatcagttacaaagttatcattttctattgaataattaaattatatctattgaaagaaaactctattcagacggtccatgtatttcatgcctggttcacctgaacatgttcccacctttggaaccagtccatcataactaatgcaatataaataggaataaattatttactttatcaagaaagtaggtaatatactttggcataaaaagatgctgctctaagataatccttggaagcaaatgcagcttcagcctgcaaccaatgtaactcctaatgtattagcaataaattcaggaaactttctggcaataattggtagggcgcatatttgttttaaaaatgaacagaaaatgaggtctatattcagaacagtaactgacctgcaaaacataaacttggtccctctgaagtgggtcgcggcaatttgctaaagctgcagcatactccttcatgtcaagatagaccttccacatatctcgaccttcatcattgactgacacctacttatgctctcaagaaaccaatatgtaaatattcactaatagcataaaatggaatgaaaagtaaaaccacccccacccccacccccacccccacccccaccacccatttccaaagggataaagaaaatttgttaagagataaacctgaaaaatagagttttggtcatatgcgtagaacaatccagcagtggcatcgctgcacagcccaatgacaccccttgaaactgattctgatgtttgatcaaactgaagttcctctatgatttgctcactaattctgtttacaacctacaaaattaataagataataaaacaaatacagatttttagcaatacaagggtaagacgcattcaaatatacaaaagaggcccgatagtacgtaatatttatcactagtagtcccaactttaggtctcaataagtaatacaatcacaaaaaatccccgaagacaactgcagatagtaagtggtagtttacaaacccaccttaaccttgtttcccacaagaagcaagaaatgaaattcagacagagccatagaactgggtttcactgcttcagcaccatcagataattttgaatttattaaaagagccttattttcgacaaagttttcatctccatttgaagaactgcaaaagaaattccaaataaggaagttgggatgggaaaggtttttctgagcatagcttcacataaaagaaaaatcaaaacaataatatgaaagtactacaaccatgttcaaaagcaaatcaaaaaaactagtgacagtggtgataaggaataagagaatctacgcaaatggcttatgttatcactgaggtaagaagagaaaattccattatctacctgtgttgagctccaaagttaagatccccatgataaataccaacaccagaaagccatgcaaaatgtacagctcttctttgcttaatatagtagtgcagctcactgaagaaaagcaaaacttagcttctggtcagagtatgtcaaagagagtggatgattatcagtgaaaccactgataacagcacatacctgtttggaatttcaccaggaagtgtcatgaaatgcacagctctatccaaataacccgcgaaaacagtctagaaataagcaaaaccaatattcaaaagtaagaacactgataagaaatctatagttccaatgcataaaatcatgcgtgtaaagaatttccattttttttcctatttctgttatctcactctttattttcttgcaggaatacagattgttcaactcgctggaagaagttttaaataagaaaaacatttgcaaattacatgccagaatcatatcaccaaggaaaatgcatgcaacttctaaagaaaaggtgtgaagtttaatttacctccaatgatccaaaaccagtaaaagaataaagtcttgtgggagtgacagccatgatatagtacctagtcccactcggtacgctagtagtttccatctgtatttaagtaaacaacaagaagaggtacaaatttaagttgcaaagtaaacaactgaacagactgtggaagaaatttacacaataacctatttgtccacttgtgtgaaacaaagtggagacatacaatgtaaagagaattaaaactagagttacttctccaaagaaaaagaaagagaacctgcagacccgtgaaagcttcaggaatttctaccatttcaaacaaaaactttacatacttctcctttttatccttctcatccactgcaatctcataaagttgtccattgtctgtaccaagaattacttcctttgtagaagctggatttttgatatgattaaattaggtagctaaaatagatacaaagataggaagaaactgcattttaagagattatactggatagctaaagcaaaccgatatgcacaacatttcaggccacgaactgtcaagaaaccaataaattaccttctgtgatctgctgtctgttccaggctacagcattcacaacaataccctttagtttgcttaagagacggggcttactccatttcgcatgagtataaaaggtatctgcacccccactaccaacaactgtggcaatacaatggctcccaccaggatcaacaaaaactctatggatagactgatcgccaggacgacccgcagaaagatcaatatctatatctcaaacaattatataaccattaatagagatatatttatatatatata

SEQ ID NO: 191521 - DNA, 2361 bp, Cannabis indica
ttttttttttaaaaattttgttctaatgggtttatcattttaggtatttcatgtgtataaggcaggaaaagaaggtccagttgttctttgtctacatggaggtggttatactgggtatgtttgataataattgttgtcactctcactattaatgtttgctgttattagtgttataaatatgtaggaaaattctacagttaggggtgcactatcgatgcacttatatctatttggatatttttggagaattttgtagttcaattcttttttagtccattgtaattatttaagacatcctataaaattttgaaggcgaaaacatagttcaaaaaatttattgtatgcgtgatttcttttttgtttgaatatttctttttatattgtaaattatttcgaatttcttgaaattgtacaggatgtcttaaattactataacttacaaaccaaaaattagactactatttttttttctttttctaaatgctgaatagataggggtatattgtatatatatttatgtattgcaaaatattgttttcatctgatcatgaagacgacaaaaaaaaaaattgcctcactaaaatacgtttatattgcttgttttttctattcccttaactaattttgtgtaactgttatgtatgttggatgtcataatgtttcaagtgctcttttgactgtgttgaattacatataaaaaaatattttgccaggctttccttttcattgtcagcaagtcttatgaaagagaaagctcgggtagtggcaatggacctgcgaggacatggaaaatcaattgcagaaaatgaactcgacctttccatcgaggtaaaactttgttcctaagttgctttccaatttttaccccattagctatttgatctccaaaatgtgtcattagttcaattcataaaaagcattgattggaagttgtgtcttgcagacaatgtgcaatgatgttgtggctgttgtaaaagcaatgtatggcgattcccctccagccatcgtgcttgtcggccacaggttattataattagctctccaaccaacccatctcacaaacaaaacagctctcatatttcttataattcttctagatgtctcagctattattgtttagattttggatgacatacatgcacaaaattatgaagcaatattcaacatctattagcttgctttttcctttttcttccaaacactaatttccctcaattatcacaccttattgttttgagtttatgtttctggcacacagcatgggaggctcagttgctgtacatgtagccgcaagtaaagctatctctaccttggctggattgattgttattgatgttgtagaggtttaattacataactttttcttgtatttcattctggtcactgttttcttattatgtaatcaacaactgagtctgatagtaacaatgacttcagggaacagctttggcatcattgattcatatgcagaaaatcctatctagccgggtgcaacatttttcaagcattgaaaaagcggtctgtactgtctcttaccatctcaaatgatatttatatatgtcacttttggtttttctaaattgacctgaagcgctagtttgtattataagtgaaactggaaatgagatcagccatgataaaattaacaagaaagaaactcaataatttagatgcgtttctcttaggaaatcatggtggttggttgattcatatggtttttactgaattagttcgtcgtatatggaatcttataaagaaaacaaaacaacgtttctgctcttggacatattttacactttaatgcctattgtggaacacatttgctggccctggattctattaaataggtgaactagtaaatgagttggttaatcctgcaacatctgaatgtccttatttgcaggacgtaatgattctgctatatgcctataagcctttaaaccttttctcgaacatcttttagcctttgacacattaaaaataatatttaagataaattttcatttaatgttgatcttatatgatctttcttgttttgcacatcggcaagattgatttgcttcctttaatatctttatcaaaattctgaatgatgtcgtactttagttttgatctaatatacttcttcaattcttttcattgtttgtgatgcgtgatctatgtagtacttttcctttattacgataaatcttcgctcttcaaagattaaaatcatgcctaccaaataaggatagaaatgctagtctcaagttgattttgcagttcttgagtatcattttgtttatttatttattattcaatttataattttttgcctgctggcagtgaaatgcctttttttttaatcctcaagaacatcac

SEQ ID NO: 191522 - DNA, 3324 bp, Cannabis indica
gattttaggcattgttgttggaacaagaacacatctttctttgccacaaaatatagttgtgctttacttactactaaaggaaattgatgaaagactataatgaaacaatttcaagttacaaaaaaagtcttctcacaaaatctatataagaagaagaagaagaagaaaaagagagtgaaaatggaaggggtggaaaaaatatcctcacatacaacattggaacatttagaaagaaaaaatataataaaaataagaaacctagagaatgatacaaccctcttcattttttaaaccctattctggaaatcagaaggaaattaaaaaagaaaaaaataaaaaagacaaacacatttagatgccaaataaaaatcagtagtataccttgccttcatagctgagagcaatttaggcctatttcgggttgttgttgctgttgctgctacccttcttctttagtaggcttccaaattttttgagcagaggctttttcttcttctgttgttgttgttttgatggagagacacttccttcttcaatggtttcggtggaagacacaccgttgatcttatcaaagccggcctcactgctatccacctttgactccacttcttcttctaatgattcatgttctggtgtttctctttctggtaaaaattccttcttttcgatcttgcaactctcccacatcttgaattctacctctactgtctcatcatctttgtctttgctctcattattattattatcttccttggattttccattcaaagcttcgaatttgaatgaatcgaaatgcacaacttcctctttcaattccttgttctcttgctcgaaattttcaatcttaggttgttgttgttgttgttcttcactcacatgtccattctcttcggaaaactcaactaccttaggaagcaagtcataatctttttcgatatctgtcacctcaccattttcctcagcttgcttcttgaccaaagcttcttcaagtaacttggacaattcgtcgactctctttaaagcttcttcttcctttgctcgaagctcctcattctcttgaatagcacaatgcaactcattatctttgtacaacacactcttcaaagcagcatcttccttagctcgaagctcctcgttctcttgaataacactctgcaattcattctctttgtccaatacactctcctttagtttcaagctctcggcttttgctttcgaaagagattcctgcaagtatatcacctcggattcaacttcctttaggccatccttcaactgggcttcttcctccttcattgcatcagcttcttcttcggcttgtttgagcaaattcacaagcctatttacctctttttccatggaagaattttcctgttccgatttttttaaacaagtcaccatatgatgctctctttcttcccattcaaccttggaattttcaagttcatttttggagtgttctaaggtactggtgagatgatctatttcgtgtttagcctcatcgagcaaagtttcgtacttttcattagttcctttcaacaccaatcttagatcttctatctgagactcataactatcatgctcagcttgattggccaacaacttctctttgttttctcttgcttctgcagagacttcatgtaaagccgaggctaaactttccatagcctttttgctcttctcttcttcgtttctcgagttctccaaatcatttatgagtttgtttttctcttctaacaagttttgaacactagaagctgcaagtttctcattactcaatgcctgaattttctcctccttcacagattccagctcacacttaagtgactcaacagttttcgccatttcagtattttcttccttggcaacaccgagacaacgttctgattcttcgatatcccctttctgtcttccaattgtaatctccaaaagacccatcttttctttaagagcagagatttcagtctcggcctcgtgtaacatatcattgcttccctcgagttgtttcatgaccgaatccaaagactccgatgcagatctttccatcttatgcgctttctcaacctccatctctaactcctcaaccttgattttccactcctctaccaaactcctcgcatacgattcagccattctcgcagcttcaagctccacattaagctgttcaatcgaagcctctttctcaatcagcatttccttgtatcccatcgccttctcgagctcttgtctcaagctatccatctcagcattgagcttcgaaaccatctgactttcgctagtctcagcctcaagcttcgaatcgagcaaagtcttcaacctagccaattcagcagacaaaacctcagccttctcggcttgaatctcagcgatcttagtagcatcatcagcgtgactcaaagcctgattcttcgcatcacaagtcatcgccaactcatgcttcaacctctgaagctcctcagtagtagacaacaatgcagccacatcaacagcatgttggctcctcacagactcaatctccttaacccactcatcttccttcttctgattcgcctcaattcccgcttgttccaactcaacagctctaaacttttcaatctccgaattctcctcagctcgcttctgcgcaaccaaagcctctctaagcttctcattagcctcctcagccaatttctgagcttctttcaattcatcaatagccttaatcttctctttctcaaccaaaacaatctgttctttagctttcttaagatcttcctgagcagcattcaaattattctgcaattctaatgatcccttggcaagtctagtgggttgtttctataaacataaaacaaaacaccaaagtaaccatttttaacatcattacacaaaaaaagggcaattgagtttggtttcaaagatcaaatctttaacaataaaaaaggtactaactttagtacttacttcaggtggggttgtgagctttggtgaacggcgatcaacggcgggtttggcggccaccgcggggcgcggtgaccggtccaaagaaaggcgtgaattttgcagtggtgaaggtgaatcagattctgatttagctattcctcttggtctcccaactcttggggttgctggtgagacttttgtagaaggaggagtctctgatctgttacaaagtcaaaaaattcaaaaaaaaaaacagtaacagacaatagggtaaataaacctatacatacaaaaaagtgagatggatctatctatagacaaaatagcaaattgttataagtcaaagtcagaattttagcaaaaacccaagtctagaatggaatcttaaaaactgattaagat

SEQ ID NO: 191523 - DNA, 3938 bp, Cannabis indica
gaagctttgtatattttaatcaacaatagtgcagtatctttttttttattatatgtcgaaatagagattaggaaaatattcccagacaaaagaatttgatccaattgtgtagcctagcctagctacctgattcagcccaactcctttcaattttgtcattcacatccccaaattgcatgcttacaagtaatgggggaaaccaatttttttgtgtcctatttttcacttctttccttctatactagccaccattcaataaccccactccaccactcatttcccactaacttcaacatttgacaagcagcgagaaatctacatcgtcagaaataggaaaatcgtgtaactgtccttatttctttcattttctttccctcctctccatggatggattagaagcccaaaccgaaaacaacaattcccagaagttctaattatcttctaacaattcctcatcaggtaagactacagtcagtaaagaatacttgactcgtagcgaaatcctgcccttttcaacgacgagtctagccccagaaacaacccagtaccctggattgtcctgtggtcctcttgtcatttctgtggtgtccacaaattttagaagcttaggtgcttggacaggaacaggaggacctcccgggtagacagcagagttaatgtttacatctgctggccttggaggtggcttatgaactgttgtaaagtgatggctgataagtgtcgatattaatccagacttggctccaagccctggtgatccatcccactcgggatgctttacaactgttgctcctgaaactctagagaagcgaagtctcaagaataggatattcttgataccataattctcaacctgtaacatggctcctgtaactatagagagatcctcatcagattctacaggagcagtgcaaacatgagagaagttcttccattgaactttttcatagtatttacgatcataggattcacgacagaagtttccatctggatcatcttgaagttgaaagactttgggtagagaagagaggtgctgtaaatgtatggctaagcggttgcttctcttgccttctagatatagccgaagaccagtcactggcttcttacccacgtcaacctgcaataaagaatgcacagtaaatcaagaaattttcagaaaccaaataaccaagaatctggaatctggaatctggaaagtatcaaagatactttgaactttttgcaagttacaaaataggcaactaggaaagcaagccaagctttttacagaaatatacatttacataaacaaggaattctccactacactacatacaagtgataaggaaacccgtcaacaaacactttcttataaatagcacttctaaaaaacaaaaaggattaataaactctaacgcaaaacatttaatattaacaatagttcaaggtcatcaaatgaagtccacagaggtcaacatttatgaggagatgctataccgatatggtgttcacataaagcttgggacccatgaaactaaactgtagagatacattgctctgttgctttctctggggaccaaggggtagttcactgaacactggtgcccactgtcttggaagctgaaactccaaaaattgatggagctctccaattggtggtttatctgaaacaacagacatcatgagttcaggatttcagttttttgaactgtatcacattaaatagattttgtcaaatataaacattaatttttaataactggatacgtgaatatagtctttcagtaattcaaactaaatcaataaatatgcaagcaaataaacacttgcttacaacgtaaataaagatttatggcgtggctcaggaatccactccctgggactccatttaacagagaggtaatggggataaatgacattgatatcacatcaggttccatctgaacagtttgtagccattcgttatgggataaggatctaccatcagttccacctctcctcttgcaaatggtcacaatatcctgaaactaaattacattagtaacaatattagaatcatacataatttggcgagccaaaaaatgttatgaatcattttcataagacttgacaatactatcaaaaataacattacatctgaagcttacctccttgtgtgaataagagcttgatggattagcctctgcaaattgcaggcgctgttccctggttccaaactgttaaaaaagttatcagataaagatactagaatacatactatagagcactttcctccaaaaataggtcatgaagcaatgctatacagacgtaaatcaatacacgaggtttgaaatttgcatgcatatggtactaaagacaatctaatatgaatagaaagagagtaaaaaaaaacatacaaaccttgtcattcttgtatacttgttgagaagaagtaccataatggctactggcatctaaaaatctcttatcagcaatatctttcaattttttctgtacatcagcaggctgaagagttgatgagtgctgttgcttcatgtatataacatccttcctcccatcttaactccaacgataatgtgagtgccaaatgtttcaataaacctgtaatagcgaagtaaaaaaagataaattttagagaggggtgtcagagagaaactctataaacagaacattactttgcttaaactctgtccgtaccttgctaatgcagcaggttcccatgagggtgggacagctttcctaacgtgatcacgtagtaccatctgagacttctccaatgcaacagtgtagagtgtaataaacactccatcaaaagctaaggtcttagtgttagctgcatctttctgccagcatcctgagaaatcatacatggcattgaagaggcctgaaggaattttcccagttaaagaaatttcctggttgaactgttccgacatctgtgagagaaaatacagaggttactcatcaccagtaatttctgtagaagaaacctagttttgtattagcacttagaacttgaaaagttgtacagagaaaagaacgagaaagaacaaatacattccattaatttgaaaaaaaaaattataagcatgatttaagcatctccatcgactactctactctacattatgctaatggtcacataaagagagtatgatattagagaatatattggaaaaactaatccgactaccaaattaatccacctagaatgtgataatttagtcccactaaagaaatattttgagagaaaagtttacagctttaaatctcaatttctcatgaatttttcactcattcttgttaaaattagttttattatccaactcaatgttatcatatcccacccaccaaacgagaccgaaaagaattgagctatccccttttgtacttttcactttgtaaatattcttttttcaggtttttacaatgacatgattacttggtatagttacaacttacaagtatactcgatggtgacacgaaacggttaaaaaaaatgacaaaaaatctgatcgatccaaagactaaattttggttaatgagtaatatatacttgtttctgcttttggcaaattaggtcggttggtcaagtacaccacacatgcaggtgaaagtttgacctatcataacccgtatgagcaaaatgagcactaagttaggcaaatgacgtaaagaattttacctgctgaaaagatagaacatcggacctaaatcgggttcgctctcccttgtcacattttatagatttagatacatttgggatggtaatcccaccgggtaaaacgatctgacgcccttcatcttgatcaatctcaattaaacaagatttagctgagtcccctttacagtatttgagccttagatcaattgagatgtcgtatcctcgccctattgaaccaattgcaatctctgcagcttttggagctggaactttcagcgccataactcaccaacgc

SEQ ID NO: 191524 - DNA, 2802 bp, Cannabis indica
tctcctcttctcttcttcattttatattctcacttttcaccattctttctcttcaattcttttctctctcctttctctcttctcaattttctctctaaaacattattatcatcatgggtttggctactaacttagaattggatcactttcatgtgttggctgtggatgatagcatcatagatagaaaattgattgaaactctcctcaagacttcttcctatcaaggtatatatatacacattaatctccaaaaagaattgatgtattttgtttaatgatgcattgttgttatttatgaaattttgtagttactgcagtagattctggaactaaagcactagaatttcttggtctaaatactattcaagaagaagaagaaaatgaagaagtaacaaatttcccatctttttcttcaacaactcatcatgatgatgatcatgatcatgatattatggaagttaatttgatcattacagattactttatgcctggaatgactggctatgatctcctcaagaaagttaaggtaacataatttatataatattatcagggtcagtcctgatctgagacgaaggaggcggtggcctcaagcctcaagcctcgcaccgcttaaatataattagtaataaaataaataataatactcttaatattataatttaattagtttaacaattcactattcaaatttcaattaatttagatattgttttttttatatggtattgcaggaatcaaaatctcttaaagatataccagttgttatcatgtcatctgagaatgaaccatccagaatcaacaggtaattttatctttaatacaaattaattaattacatataatctgaaattttgtttgaatatataaattataatatatataatgattactttataaaggtgtttggaagatggagctgaggaattcttcttgaaaccagttcagttatcagatgtgaagaaactaagatctcatttggtaaagggaataagatctgatcatcatataattgaaaatcaacccaacattatggaaaaaacccaatctgctgttgaattggaatttcaatctctatgaaaataatcatatgaatttcatatatacatatgttgttttaattatttcataggtatttattagatcagatttagtggagagaaataacattattgatctatgctagtattattatattattcaaatatcaacaacattttttacaatttttttttttttagtcattaaatttttgcctctattgatcatattaattgaacagggcaataagatttgaattgttttttgaagtcaaagatcttatgaaagagaaatgcatgatttcatttcaatcaagttgattggaaatattgaataataaataaaaattaaaaaaaaaatagtgattggagaataataataattgaaattgttagctttgccacctcattcatagctggttccaactttattagtgtggtttttgtaaaatagggaaaagtagaaaaggtacaattttttatttattttataatactaataataataggaaaatttatgtcaaaaagttctaaaaaaaaaattagtttgatacaaataaattcaaaacttaaaaaagtaataatatttttttttgtaggtaatcacttttttaattaagttgtttacttattaaaaataccacctattattaatctaaattttaattttgatttaatttatttaaaataaaaaaaaaaactaataagtaaaccattcaattaaaaaaaggattaatgaacttacggaaaatatcactttaaaaattattatcgttattttttaagattaaaaatttatttgtaataaaacaaattttttgaaaacttttatcgtaaatttaaaagtaaaataagtttatggtaatatatctattagtctacttttctcatttgacacttattctttcaattgagtttatgtatcttttacatattccattcttgaataattacaattaggatctttttagttaaaataaaaaatattggaaatcatatatgttatatttttataaattgtatgcttccttacaaagaaaaaagaaacaataataaattgtatgaaaaaatacggttttatattgaaattcttaattatggcctatttgtttttttttaattaaaaataattagtttaagtcaagagtattcataaataatccatggtataaaaaaatttaagtttaaaattttttgttggcacaattatagtttgtgtttattttttaaaattgtaaggtttaaaatttaaataagaacaatgatatgtacatatgttaatcataaacaaattagtggtcatatatattgaagacaatttttacatgtcctatggaaagataataatttttttacaaaaatattaatttatatatatttgtttttgctcaaaataatatttatatttattaaagtatatatatgtgcaaaagtctaacaacttaatttaattttatgcaccaacatcgacttgctagattgacaagataaaatatgagttaactaattaataagaaagacacataataccatacaaatcacaggttaaaaccttgtgatttttagctacggctctctcaatattacaattgtgagaatgcatgttatagatggaaaatatgagaataacttagaagaacagagagacttagagaggcttaagctcttaggtgcgtgtgagaggacttgtggagaccctttagtgtgtgtagaatgacttaagccttgagagagtgatctaatgccttttatattgtgtagg

SEQ ID NO: 191525 - DNA, 1441 bp, Cannabis indica
ttattttaggacatggaagctgcggaagtcagatataaagaaaatgaaggaattgatcgcaatgaaatgtttgcaactcttgattcattgaaggtaacaagacaaagttactttttcttagtttgtgtcttgtttccgttttccttttccccgagtgtgcacatatgccaggtctaggcaatctgcaattcccccttttatttttatggcaatgatgttaattgtttaattttatcagctataaaatatttagatgttattagcaaggaagactaccatttggattctaaaataagtctcagacctcaattgtgctcagttaatatagtttcaatgcacatggtttgaagtggtcatcttgcataaatttgctgaaccttctcattttttttttcggtagtctggagacccattatatttgcgtgaagtggaactcaagcagcatcatacccagcctcctttgcggtactctgaggggtcattggtaggaatttgtgatttttcattttactatattatagatgttggctatatatttgggaaataggaagctacaccaaataattaacagagcagaaacatccttccttttactgtgcaattcatcgcaacttcttttgctgtcctttccaggttaagaaaatggaggagcttgggataggaaggccttcaacctatgcatctacattgaaagttttacaggtaatgatgagcttcaaacaattgaaacttttaggctctctcatgttaatataagtttcatgtgttgttctgcatttattttggaatcatggatggagcttggtttaacagtgagcccttgtttaattttgtcttattgaggagtccaagctcaatcctataatgaaggtttttcttgaacgagcatagcttttggcaccttggtgcccaacaccacttaatgaagtaaactatgtcttcatggacagggcttgtgaattgttctgacacacacacacacatatctaggggccccatttggcctatcactacaactaatcttagctttgattaacttgttgtaaataatcctattcttttcatgaggcggaattttgacttcttatttaatgatgataccaggataggaattatgtgacagtgaaaagccgtgttctacacccagaatttcgtggtcgcatggtatgttttgcatcatcatcatcatcatcatcattattattatctactgggaatctactcttctatcaatcatcttctgagtgaaatcaagaactatgatatgcttttggacaatattttcttagtgatatgatacacaaggtgtcgatttatttgagaaaccaagtaatctcatagcattgttattttcaatatataacaaaaagtggttgggttttttatttgtcttttctgctttcactttgatatgttgcctcattgtttttttttttttttt

SEQ ID NO: 191526 - DNA, 1682 bp, Cannabis indica
gcagcaggggactgaaatttagcaactttccaattgttaaggacttgcttcgccgactgaactacttgtaaagcagagaaagggaatcttattagaactgagaaaataaaaattataaaaatgttttgcttggataatgtaattattatgattagaaaaaaaaaaaaaaataagtgttggcagcgtttgtggaggttgcagggtgcgtgactccacgcgcacagcaacaacgcgtggtttttgtcttacctacttttgggtgattcctcctactgtaataggcctgatgacgtgtcatcattattagcttccacgtggattgttgaaagagggagagagagaagtaacagtgacagacagacaggtacaatctcattaaaattgaggaaaaacattcaaaaaaaattaataaataatgttatttaaaatttgaagagttgagaaattaagagaggccattttcctttgattaaattgaaattaataattagatttgaaagtctttgccattaaaagtagagagaaagaaagaatggatgtggattatgacaccacattcccattcgcttaaaaagcgagctccaaaccctaacctctgaactttcttcttattcttctctcctgctatgtcagttagctacctacctatgtgatcttttactctctcgagctgtgattcgttgtttactctttgctttcggtggaaaagtttgagatcgacaacgaggaaagtttccgccggatttctctttctcttagtaagttttgtgatatatttacatgtatatatgcgcatattggttcacatttgatcatttgtgtttctccgctgtcgttgttgtgattttctgtcgtttcattagtttaaacttcaattttttttctattagcaggtgaaggtcatcagtgataatagtggccgaaagaattttgatttttttttgacattctgatgtttcatttgcaataattgtatcaatctgcggtgaattttcatctaggcctccatttctgtactcaatttccgataccattcttccttccaatgttaatttcatatgttgctttaattgcctaagatttcgtctcaaaatttgacactcaattctaatctcaccggttccgattcgtgtttgaaacactgtagtagcaaaactggctctgtctaaatttcggttctgaaagagtgataattttcttttaaccttcaataatggccctacggtataggccggttttgatagaggaattgccatcacatttgattttggaaattttgatctgtgggaggctcagcgccgttgatcttgcatgcttagagttgacttctaggacctttggaggaagtcacggattgtaccctcataagtttcggtcattggtggattttgctgcatttcagctatgtatctccaattctacatattctcgtctgggactgaatcttcagagggaactctgcaatcgttgcagtgggaattggaaacgggttttaaggttcttgcaatctgtggagcaatcttctgacatagtggagacctcagcaggcaatgtactagttctttaaactttgcaattcctttccaatatagaaattatatgcgtattctggtgatggggtggcttatatgctgttttctttcttgagttccctatacgtattgactacattgccagcaaat

SEQ ID NO: 191527 - DNA, 1406 bp, Cannabis indica
acgatataatcttttgagatcttctgacaagatgagatccttcatgtgtatttaaatttaagaaaacaaataaacacattaatttatgttatatcaactcatataagaacttgaaataaagacacacaataaaacaagagaagtaatgtaatagagaagactaagtaaacaaacataccttatctgagtgcacatgcagcgtcacagtattccaagagcaattgagatttagaagaaaaatcatcatactattaaaccaatttgagtcatagttctcgtgtggatcaaaaatcacaaattttccattcaataaattagatgactccgttgctatgctaaagttgatattaccttcgtaataaaatgattccaattttggagctgattcaataataatactcattccatgattgtatgactcatatttagaaccctcattcttcaaattgaaactcttcaattgttgattagagatttttatgagcaagcggtgcttcaatttcagtctatagcaatcattcaaagtcaaattctcaagaaccggaaggttggaaataatataatttaatgaggatgtgtcttcaatgcaatcatcatcataaaaagttagtgtgaggttcctaattgccttgcatacagaagaatatgagttttgaatgttaaaaaatcctcttatatccaaagactcaagatttgtggcttcaacttgaacaggtacaatatcaaaagatgcattaaagaaattttcaatttttaggaacttgagggttgaactttctaaacgaagcttatcaatagacttgatactaacacaagtaagtatctgcaatttctcaagcgaaggacagccaatcaaaatctttgataacccatcaccatgaaagaaacaaaatttcaatgacaaagttttcaacgcaggaaggctaattgaataggcagcattcaaatctaacctttccaactccaaaacagtcaaatatttggcattgaaaactgtttcagttaaccagtaattgttttcaccctcagaataagagttcaagcaaacatgtatctccttgactttattcttaactgcaaagtctaaccatttatctaggaacacagacttggttgtttgatagcaatatttcatgtcaagcttaaaacttgttatgactgaagggatgttataatacatacctctctttctgtgtttcaaataatcattcacgaatttgtagaggttctgtggtgatacataatcaatatcagagaaagagagtgtgggtactgaatgccatatgagtttccaacgatttgaaataaggcacgtccgaacagcatcgtctgtgggaagaaacgataggatgtgagtgatgagtgcatcgggtagcatcgaaattctgtcctcaccaattgatgat

SEQ ID NO: 191528 - DNA, 3123 bp, Cannabis indica
tttttttctttttgtttctttctctttttcttcctttcttcttcacttcgcctattaccatgcctaaaactaggggcctcgattctccttttccctctctcaacctcccttttgcggcaacaactccctatttctcgccatcgacctagaagatcaactctcattttctcgccctcgacccaaaggatcgactccctattctcaccctcgaatccctctttctcaacctcaatttgctctatcttctccctctgtcttgtcgtcgaccccaaagcctcacatctgatccaatctaccttctttttctccctcagagtgtctcttctctttaggatctatcttcaaaatcttccatgtgccctagccgatccactctaccaccgttcgctatcaaccttaaaccaaatcacatcactagaccagcgcgagaatgaatccttctgcgtcttgggttttcttttatgctctatttttgtgtttgtgtatgtctagggtatgtatttgctttgagaatgaagaattttcaactcatgttttggtttcctaaaaaaaacgaggtatttgatttcgcaagaatttgataatgagaattaaagaaaatgctaaggattttttctttatttatgtaaattataatctaagtttttttgccatatatatttatctacatctgctaaaggtgattttttggtgtgaaggtgataatagtggtggttatggtgtgatggtggtagaggtgtggtggtagtgataatattggtgggtggtgttgttggagaagaacatagaataagaagaagaaggaaaaaaagaagtaatttatttgtttattttaaattttaattttatttaattttttaagatgactttgtaattttaaaattatttttataatattttgataattaatattacgtgcatcactaaaaatttactacacgtgtatatttgtgtacatgtgagcagtctactatgacacttaactgaggttctttgacgaaagtgtaaagagcaaaatgaaatgaggttttagtaggttttaccattaaaattttagtttatgtggttaagtattaaaaaaaattaatttaagtagttttgccgctaatatttttctttctatttaattaacttctaaaaataaattgtcaatttaactattactaactcaaaaaggaagagaaagaaaaaagagttgaaaatatgaagctttaacaataaatttcatggaaaaaaaattatataataatataagaagatgaaccaagttgtcaaaactaaataaaaaaaaagaattttgtaatacaaatacaaactgacgagttaatattattttgcatattgtaaatttgtaatgaggtcaatgtcttgttatttttctgttgttttgtaactgtcttctttgttattttataattattttcatgttattgttaaagtgaatcaattatttttcagctgttttaattattttttttttactaaaacacaatattttttataattttaaaactttaagatattatttttgaatatttagtaatgttaaaatataaaaatatttattttttttctgtaagaactcgtttttaatatattcttttactatttaccggttaaaaaggtttccaacaagagaaatgaggggcatgatgactggtggagctagcttcgacttggatatgaagccaagccaagccaagccaaagccaagccagggtaggtggtctaattttctgatttgacaattcaatggtgacaccaaaaacaatattacccattatagaaacacggtgaatcgtagattttgtcaacctttattttccatgtacacaataataataataataataattatacgagtataaagatactatataagcattaataataatccttgtagtcaccgggagacacgtattggaaaatgcaaactagtgacaaactttctacactctaatgttcccccttcaaaaaatatataataatattacgttattaaaatagtaagaaattctgtgtcgtgtttctgactcccaaaccaatgttagcaacaacaacatgtatattattattattatgtgttactactacttcttcttcaagttgaacaacaccaactcacccaattcaaccctttaagataaggaaaaaaagaaagagcagttgagtttgaggtcgaggtttcaagttttcaatttcaactcattatgtcaaactgttgactgactcaatattccatatttattaacaaacaaaaacacacacaagaaaagaaaataaagaaagaacagaggagtttcctaaaaaacacaccaaggcttagcaagcttggctaattaataatatggctttgggtcattaatactactacgaaggtgtttactggagaggaaataatggcttcttcaccagaactcgccttccaaaactactactcccaaataataatgccttctcctaattcttcttctttctatgtctttaactgtagtagtgatgccactgacactaccgtaaatacttctcctactatttccttttcagatctaggagagcgtcgtctcacgcgacagaggaaactccgttacgttacagatcaagagttgggtattacaaacttaaatattcaccgttcttctcgttcttccccaacttctcctgactctgatgaccggaaaatcggttccccacgtgcccgttctgaacgacactggtctttctcctgcgtcccacaacccttgccactccctggttctccattggttcggcgacctgagtcttcctctgaaggtttcgcttcaccgtttggaaggtcacttaattcttacaaagtttaaagctttttatttatcggtgttatgggttttcacttttcagttaatccaaacttaattttgtactaaaattttgttactctgattttttatcaggaaaactccaaggagattctctactgattcaaatcatgttgttccgattaaggggagtgcgatttcagctccaaatacttgtccacttagtcccaaaagatcaaatgttaaagaaaccattttttcatcatcatcatgtcatgttcacattagccccaacaaaagatcatcaaacggcggaggcatttcc

SEQ ID NO: 191529 - DNA, 1967 bp, Cannabis indica
tccgtcaacttcaacgctcaattcctcgacgaagaagacgataccaacaccatcgtttttgtatccgagagaacaggttcccctcgaatctacctcactcgtccgggacttcctcaccccagaccattgcctttcgtctccgatagcctcttccatgaccgacctattatcaagaaagataggctttacttcatatctgctcatgaaaagcctgaatccgtttttaaaagctggtccgctttatactctgcttctctggttcaagataagggtgaaattaccagattgaccccgtacggatgtgtggattacagccctgctgtttccagctctggtaaattcgtcgccgttgcttcgtatggatcccgcacttggggcggcgagtttaatgagctcaacactgatattgttgtattcgattcatccgatcataaaaacagagtagtcgtttctgaacgaggtggttggccttcttggtccggtgattccgccatttactttcatcgtaaagccgatgatggttggtggagcattttcagagttgattttccagaaaatctctcttcgactacggagtttccaatcgctccgattcgagtcacgccatccggtctccactgctttactccagcagctatgcacgacagcggaaaagttgccgtagctacacgacggcgcagcactaaattccgccacattgagatcttcgatgtggagtcaaagacttttactccgattaccgagacactcaacccgaatatccaccattacaaccctttcgtctcgccggactctcaatctctcggataccaccggtttcgaggtcagtcgtgtgcaaacggcgtttcaaagattccgcgcttggatcaggtgacgtccgcggtgaaagaactccgaatgttgagagttaacggttcgtttccctccgtctcacctgacggtgatctcgtcgcaatcaaccacgagtttaacgataacggcggtggcctttcgatcgttaaaatggacggttcaaaacgttggacattactcaaagggcgtacagtattctacaattcgtggagtccagctgagaagaatgtcatatacacttctattggaccagtctttcagtcagcgaaagtaacggtccagattgcacgaatcacatttgatctttcagatctttacggtgattatcgtgaacacacaatcatcccctgcgatttgaaagtcctcaccgaagaacacacagggaacaacgctttcccttcttgctcccctgacggaaaatccgtcgtctttcgttccggccgttctggccataagaatctctacatcgtagacgcggttaacggtgagtttgaaggtggtatacgacagttaacagacggtccatggattgacaccatgcctagctggtcccctaaaggcgacctcattgctttctcatctaatagacacaatcccagtgacgtatctacattcagcatatacgtcatcaaaccagacgggtccgagctgaggaggatccacgtggcagggcctgaaggatctagtgaggtggacaaaggagaggataaaccacgtgtgctttagcgagagcggcgaatggctgtgttcgcggctaacttgagcggcgtgacggcggagccggtgtcgtggcctaatcaatttcagccgtacggagacttgttcgtgatgaggttggatggtagtgggttgaagaggctgacgtgtagtggctatgaaaatgggacgcctacgtggatttctggtgttgacgtggcaacgagaggtcttaacgttggagttaatgatgaggaccaagttggggatgagcttaggggtgaatttgacgagcctctttggataacttgtgagatataaagatggataagatggcatataaccacttaggtggcattacaaaataaaaggagaactcccataaatgcaaagggacatatgttttgctttctttagtc

SEQ ID NO: 191530 - DNA, 2293 bp, Cannabis indica
tagagggtgtattgaaacactcattttgaggtgtactatagatttttcctataattattacctcatttccatttcatctggttgatggtaaagagtgttataattgccatggttgctatgattgccatgattgttatgatgtgatctctcaggagctgcatcagtatcaaccaagcaatgagaaaaagagaaaaaaaatgaaatgagaaaagaaagaagacaccttaaacaatgctcgattttcgagaaacatacttctgggatgttgaggtacattgtgaggaacatgatgaggtatatggttaatgttgttacgagaattcgatcttgaaggtgctggcgccatagcagagcgaacagaggagatctttcctttggcaataacataaacagtgcagaattctggtgcaacttttgaaacactgcttggaacatctgtaggtttgaatcttctgttgaaagtagaaaaaaaataggaattaattagcatttttcttttgggtatctgatacaaccacttgggtagaactcactcccgaaaactagcttaagacaggagggtgtccaagtagttattatgtagttaatgtgagatcctaacaatacactctttgtcagtcctactcgagggtgcatgactctgatactgggaactcaccccaaaagctagcctaagacagaagggtgcacaaataattatatactattaaccaattccatacttaatcaatgtgagatcctaacaatacatccctctttgtaaccgacattcacgatggcccacttagggctaatccacaggccgctccttacgtgatgtcggtcacacttgagggtgcatggttttgataccacttaatacaatcacttagcataaatgatgttattattattacttgacagaaaaaagaaagaaagagattattattattattacttgacaatgctgtttcttgaagctgcaccaagtactaaagtctcaatagaatgagttgcaacatagttgagtattgcctttgatatgtctgattcttccaatattacttcattgcatttgatctgtttttgtcatgacaataatgattacaataagtttatttagattttcatagaaaagaaaagaagaacaagagttgaacatagtacatacatcttttctagtgcaaaagcaacgaaatggaaggaacaaatccttggcttgattctccaattgttgtttgtaatttcttgctacatcttcagaaacctcatgaactgagatgaagtgcccaacttcacataccaaacaacatagacaaggttactacaacttatacatttagatatatttcggtgaaagcatcagttttgctcttatcataagcacatttcttattattagtatttttttgatatgatgatgtaacttataactataccctaggacaattgaattttccaaattttttaaataatttacagtattcgtgcctatttgattttacacgagtatattgacactgttaagtattcagaatttctcgaaaacaaatagaatacctattgtaactacaatatataacgtcacataagaaatgtcccatttaagaagctatacctatatatacataaatatgtataaatataaggttatattatattatgtatgtatatatatatatgtataattacatggatttggaacagaagaagctttgtgtttaacatgaagcaaagtaatggtttggcctttggtgatgagatgatccacagtccatttaagagcatattggctacttttatccttatcaatagccactgcaacaatttcttctttcttctctataacaccccttgtcataatcaatttcccaaatcacacaaaattattttatctatatatttatatgaacaagaaaaaaatttataaaaacccaaaatataaataaaatattggtcaagaacagcaataaatatgaattatggtgtgttagagggaaaaagagattgaaacaatctcatttttttccctctaagagagaaagtttgttaatgatttttgttattattgttttggtaaaaattattaaaaaaagaataagagaaaaattattaagagataaaaacaaactaaaactaattaatctcttcctaatcatctgctctgcctttgagttttttaatcccacattattagtggcagccagttattatttgtcctaattataattataataataattattattatgaatataaaataaacaaacataactatatcattctattctttctatatcatttttgtaattaa

SEQ ID NO: 191531 - DNA, 1480 bp, Cannabis indica
gacgagactgatagtttgcttgtacaattttagatagtgtcgcgaacgtcttaaatagagcgatataatctgcgacttaacacaaattttaaaattcattgtgttctttatgttttattgcacatgttttctgatttaaacattactgcatagctctgcatttgttatagttggttttcattgatcttatttgttctacatttgttcttgctgaggtgttgttttcacaacaagatattattgccaaaaattaaacttaaatattttatttacaactaaaaattaaacataagtatttattctgcaaattatgtttctttgaaattaaaaaatgagattgattcattgattgaagattcgtattggccacatcttgggatgaagagaggacaaaaggaatccctatacatattaagaccattcaattaaaataaaggtagtaataataataataataataataataataataataataataataataataataaaaaggtaattaacttcagcagcattaattttttttttcttctttaaagtattttctgtcacttagcttattccctcagtgaggatacagtcaaaaggtggaaaatccataaccattaaaccatataatatagactaattaattaatgcgataaggtcttgataaaataaatggtccactatgagtagctatagatatacttttgtaatggtcaaaggagccaaagaagcaacacctactttctatattggattttgcccttgtacttaattaccataaatctttaaatatgtaatttaaactcatttttccaaattccaaatggccgtgtaactagtttataatcttttagaactaccttgcatgagctcttattattactgctcaaaaaatggagttttggagcttctctttccttctactttgtatgtttcggttagtgttttcacaatcaacaactgaccccaatgaaggttattaataattatctcttaatctccaatattaccaattcaatttaaatttgttgtcttattagttagtttcactttcagttgaaagaatctaattattttcatgatcttaaaaatctcagtggctgcacttaaaaagatgatagattactggaaattaggaaggtatttgaatctttcaactgacccttgcaacccaaattcgaaatgggcacctgagactgcaaaccctcgtgtagcttgtgattgcttgagtagcacctgtcatataacccacctgtcagtttatcaattaattaatataacatttttcttctaataaatggaaattctaatggttttgagcttaacccttttggtttgtacaggaagatatatgctttagatatttatggtgaaataccaaaagagctttttcagcttaagaaactaatggacttgtaagaatcaaattcttggatttgcttaccttgttttcattgatatacttgtaaatatttatgtaaaaatgttt

SEQ ID NO: 191532 - DNA, 2149 bp, Cannabis indica
gtggaaactcgacaaattggttgaaaatgtcataacgataaatgttgagttatattggaattatactggactagtttagaattttaagctgtcagtttggttggaatagttagaaataaccaaatacccctaggctttattttagacttaagtgtttatggagggacaaaatagtctttaattagtatatcatagtatttatgtctttagtgtattttctaagctgaaatagggtttagtgtttgttattattattaatttaaatgttatttagttaattgatgataaaagtcaaaaataaggaaaagaaatcacaccaaaacgtatctttctctctctcccttttgaaaacctaaggacccagctagaaccagaagctttcttcataaattcagccagttctcagctgaatcaatcaaagctaggagttattcatgctttgaggtaagctctccagttaattcctttgatttatgaggtttgggttgaattttgtttagggttttgcttgattttggggctgtgagtgttgttggagttcagagtatgtttttagggttaagttaggtttgtttaagtgtgaattggatgatttcttggctgttaagattagaattaggagaattgagtttaagaactcaatattcattcaattatggtaaatctgtgattttggggaattattgagttttgattgtttaattatgttgttttaatattatagaaccgcttcggaaggtttgaagaggttttggattagttttgatgtgtaaaaccagagttttaccatttctgcaggaaccggtcgaccgattcaataggtcactagtgaatcggtcaacctgttggccagtagggggaaatccaaattttcttcgaagttggtttttccttggggtgttgtccagttgtgaaattaggatttgtttcggagtttagttaagttgtacaccaagttttattatcgtgacataagactcgggatcgtcgagcactgttccactcaggtcggcgcgcacaccgaattattggattgaggtaagaaaaggcaattgcactacttagcatgtcaaatgagaaacgattattattgttagcgactcgattatgaacgaggtaaagatacggtaattaccgttgttgagaatgagtaattactcactttaatactgcggataagtttcttacttatcgatcggttcatcgggcaccaagagtgacatatggagctcgttggtaatgagcaggatgctttatgaagcatcaaagtcagtttgtcttatgagataaataattgtttatgtaatgtttgattaagtaccgaataagtatttaaattagatgatgaaattgttggttatgcgttgtatggtttctcgtgttatgcgatatttgtattttacttgcttttttgccgagtctttgagactcacgtgtgtttcgtgacgcaagtaaagggaagggaaaagtggaccaaccatgagtcagaggtctcccaacgatgtacatatcaaccggtgtgcctcgacttccagtggacaggatccaccttttgatcatgttttaaaaatgtaactccattttgtaatatttttttggaacatgttgtaaaagtttataaacaaaaggatctccaaatctagcagtattttgaataaaaagctcttaatttcatcaaaagttttaattaaaccgtacattttttaaattgttaacttataattataaattaatttataaaagcacacataatatttttgtggaacagaactctacgcttagacaaaaaagattgatgaggttaaatttaataagtaaacttaattataccacactatgtttctttttaaatataatttttttgtaataattatttaaacataataggtgaaagtatatatataattggatgattaatgaatctctttgttgcctctttttcccacttcaggtgcttcacgttgtattattttagtaaaaagagttatatatctacccccactcatcactttattatagcctccatttaattatacttctttttacggtgtcctactctaacctcaaggctttaattaaattttgtcaataattaattattacgaataatttctttatcacttttgttttaatatatatgtctaaatat

SEQ ID NO: 191533 - DNA, 1419 bp, Cannabis indica
attacgtatgtgagcgtaattttttcataaataaatataccttaagattatgatcatatcaatgtagcaagtaatggccctccttttgcacatgcacaccgttaaggagaatgtttttggcatgagaaattttgggccactcattctcatccctcactcgacaatgcttctcaagttttgttgcattgcttatgtgtataaacttcaaagacttcacattacaaagaaagccaggcaatactccaaggcttgagcaagaccaaaagtatagtgattccaaaaccggcatgatcttgatcataagcggttctgttttccactcgcaccaattttccgcgcttgtgaatttcagcactttaagtttcgggtaaagaactcgcacttcatcatcatcagtatcaccaagtactaaacccaaaagctcaggcccaataaacttggcgcgcaagccccaaaattcgagtgcctctagagatggtagtttggctacagctgatggtaatgtgattaaacaagaacaaccacagaatacaagcttacgcaaagacaataaggacttaatccattttggagaaaaggtttggattctaccaaattgtcctactcttaaaactttcaactttggatgaggttggatactattaaactgatccaataggccaattactaattcctcttctctgcttattgggtatatttctagttcataaatgtttcctaaagttgttagatctatgaaagtcttgttgtgactttccaaatgaagagtcaaatgataaattttaagattgttgcaattcatcattgtagtagtcaactctctaatactcaagtacttgttgttgtcttgggtattatgtggaaaccaatctagaattcttaatgaatgtaaggtcgtaataccttttggcaatccctcaaacctagaattttcacccctaatatacaaagacctcaaattcactaactttccaatcccttctggtaattctataggcactagaaaatgagactccattcttaaagtttgcaagttgcataagttacaaaatgagtttggtaatttctctaaagggttgtctccaacttcaagatatctcaaatgtattaagtcccctatattctctggcaatttcatgagcccacaacttgacaaattcaaactcctaagatgttttaaacataacaacatggagatatcaaaaggagcattattgatattgatatcaccttgccttaaaataataaaggtgtgcaagaactttttgttgtcattactcaattccaatttaggaaactcagcttcagattccattgttatggtcaaatgtctaatcctctgccttaactttctcttactcctcttctgatcagcaaccaaatcaacaatattaaaagcttctatgatctcacattctc

SEQ ID NO: 191534 - DNA, 1423 bp, Cannabis indica
caaactcaaatttccaagccactctaatctctctttttttcaggtatatccacagtgtttgagagacagagagtgaggaagcaaaataaaatgaacgaaaaaaccatcaccaaactaaccttctaaataaattttaatcataattggtaagaaatcaaggcaatctttccaaagaaccatgaaagagctctcaacttttagagctctttttttttttttgggttttctttcacttgactagctccgagacccacccaacatcaggagtgccaacagaggaattcggattcgggtcgacccgtttgagagaattctctttgctgagtttctcaaacattttcgcacgaatgtcccttccggactctaccctctccatagctggttcctcttccaggtcacagaaatcaagatagctgggacgggttggagctcgggtaggggttgtgggtaggctacaaaaaccgggtcggagtattgaccctctgggtgacccgaacccgggagaacccttttgattgttggtccaagaagagggcaaagacttaaccttaccaagtcgaaggtccctgagcgaggccaccatttcattgatggagctcgaaccaagagagcgactcaatacatgagccataggcgacataggcggagaatcagcctgaggcgtagccggcggcgaaatggaagccggaggagacagaaacggcagcgttttcacgcatgaagcctcaatcgcctgcctgagaggagaaccgtcgtaagactcagcagcgtttgaacctttggggctctgctgtggcaagactctgagttggtccggtgtgtgagcaaagaaacagactctcctcctgcaattggtaccgtccttgcatggctgagtcctgtaccgaccggggtgaagccaacactcgaaaactccatgagcaaactcacacgaatcacctttcttacaatgaccctttctaaaatcaggacaagccgtacctgaataatgatacttccttggatccctccggcgagccttctcgccaggatgagcgtacggacactcagtccagtcgtgtgacctccccctcgcgcaacgtcgaaccttgaattcaaacatcctgaactgatcacaagagtacgcgtcaacgggagcatccgattcccgacccgaaacgtccgaatcagagtcggcgtcaaggtcgttcaccgaaggcaagtcggactcagcgctgataaagcttcgtgaagatagtacggagagtaatcaccgccattacagtcggagttaatagagacgccactcaagggaaatggtgagtacatctcagccgtcggatcatctacggttagatcccatggaaggacatggatcgtcggatttgggcggtgggtttcgccaagcatcattttgccaaagcggtggatttttttttttttt

SEQ ID NO: 191535 - DNA, 1543 bp, Cannabis indica
tgcaatattaaaattagagttcagatattcatataaaatgaaaatgtgtacttgtgaagtgtgactattacagatcatctaacatgtgtgagttgatattttgttgaacatttgcttctgttataatgtaaatcgctctttgtttttggcaaaataggaaagcattggctaatgcattgtctgtagctccatccatgtggacacttggtaatgcaggcatgggagcattacaggtgattatgatggtagtaggcaacagctatctgttcttgctctcatgttatgtttcccaaatcaaattatatttgtttgtttcgatttacagagacttgctgaggatagtaacccgacaatagctgctgcagcatcgaaggctatctatgagctgaagaagcagtgggaaatagaggaaggtgacagctggaggtttatggtgaaccagaacaatatgaaacaaggaagtgaagaagctgacaatgatacagatataatttgagaaagtcttcagaattttctgctgtaaatatccaagtgaaggtttaattaatcatagaggaagcccactaatcaaaagaaaataaatagtgctgatataggaagaaagtgccgtcatgtgtttcaaaagtgctttcttttgttaaatttattccctaaactttacacgactgtgcaacgtgtattttttttctttccttggttacttaccaagaaacttgggcttcatatgtaaactataaagtgcaccttatttatataatagaaatgattatttatttattttgtaattttgctttataattaatgaaatttagttctaatctgaaatgtcttgcggaaacatatacttatggcatgataaccaagtcatcttactctttattgtattaaatacgagacgatgatatcaaaatcagaatctataattctatatatatcctagagaacgagaatttttttatcgagacaatagtttggcataaaataaattagaatggaataattatttgtacataaatgaacttataaatttcattctgaagaaagaaaatatattcagaaaagaaaaaaaaaaagaagttacagaaataaatgaattgtttcaatggaaaatttttcactctaggatacatataaattctgatattgattctgagatagaatttattcattccattaattcaaagaacttaaagaacttaaaattaatgattatgatgtgttgggtcctagctaaagctaatgatgatcttcaagaatgaagaatcatttgatttacaagagaggtgtgtcgagcatgttgtaaggctgagtttagggaccttttttcagttgggtgtctagagaatggggtttaatttcctcagcttttggttcctgtggggactcatcatattgtcttctagtggtagtacccaactctttaggggcaaatatgtgtgtgttggaccgacccggttcatattttgaaaagcctgttataatgtagattgtgttgtgttggtcataaagatatatggatcgtgttgtgtcttgctaatttttt

SEQ ID NO: 191536 - DNA, 2964 bp, Cannabis indica
tggagaattctaagaaaggatagctactgttcaaacatggaatttctcaatggaaggatcaacgtccaaaggctccataagagatggagcacacaggaacgtatccttctccatcagcagttgggatcttaaggtatgcaatgctgtatacaagacctaaaaatgttatgtagtaggaattgtttgtcattatcaatcaaatttaaattttgaatagtgggtagcttgaagcacattctcaagtatctttgaagaacgagagatctcatgcttatgtatactagaggagagttgagtcctattatacatactgattatgatttttaatctagcaaagatagtcaaaaatcaacatttaggtcagtattcattcttgatggtggagttgtagtctagagaagcattaagtaaaccagtattgcagattcaaccatggaagttgaatatatagcagcttgtgaggaatgattcagaaagagtaatcttccattccttttctcctgaggaatatcacatagcatggtgtttgctctttgtctcatattaggaaaaaaggtagcctcatgaatgactcccatttctaaaaagagatgtgcctcaattggatggatgacgtgaagaaatactcatgggtatacctcttgccatttcattctttttcttgtcaaagaatgtacaaattgtgataagtagtaaaagccaatgtttcttctagttgtactacacctcttgagatcaaacaggatattgacttcatagggtggggaacaagccagccccttaagcgttaaaataagagcaaagtggacaaaattcagttactgttttgatacggacaaactccaaaaaagttagcaatggagataaaccatgaatgaagtagaagactagcactcgtattcatgtgcatgcaagaccaagggctgcaataggtgttcccagtagcacaagcgcctctagccttggttttttagctagttcatcaggaaggtcataatcaattctgatggattatagctatttgtcgctaagtgtgctcttgcaagtggtttgagttcaaaatgtttgtcaagaacattctcattctcaatggcttaagttacaattttaaaaggccatcttattcccacctctcaaagtttctaaggtcgtagtcttaggaaccgtatacttttccttgaagtactgagcaatgtaagggtcacaactagctgggaatcttcagatttgtttcatatggtccatttcttagctttgggtggtccaaatcgattcaatatacttcacccttgctcagttagctcactttagctcagttcaactcatatgaacatattttttatgctagaaatggaaataaagcttcaacagaaaatagattttttaaaaaaaaattgaatttcaaggggaaccacttatcaatttaaaattctaatgattcccctagaatcgttgagtcgtattcttcaagattcataaaaaaaaaaaattgattacctgatgaagcagaaatctcaaaaacaagataaaacaagccctagaagatttttgtaactgctataggtttgtgaggtagagggagtgactgaatgatgaaattatctatttataggtgaaaatatcatttattcctaatgcaattaggatatcactaaaacattatcttttatcagaaatatttgaaacttccaaaatcaaagagattctaagcggaagcccaataatgttggtcacgtgccaaaaagtgataccagactagtggctttgaatgaaataggcatagtccgcattggaaattcatcatgacacttgtgtctctctaacttgggggaaaaatatttgcccacaaatttgatcgatgatgtggacaccgcttttgacacatggaaataaccctaggaccctattgactcagaatttggttaactgatagtggagccttattaattgttgattctcaccatgagtaattaaaaacaataaatggtaaaggtgacacaaagacttatagaggttaggcccccttatttagtaggtaatgacctacttcccttttagttgtattcactcttgagataataccatgaagagtataggtaaaaaccttataatctttagctatgactctctttagtattataattgtgacaacaatgtgttacagataaagaaatggtgagatcttatgaagaacttatgtagagaacatgacttggtgtctaggaggcataaatagaatgtcaagattgagatatagagaagctttgaacgtgtgggagactgaattaagcatgagagaggacttgtagataccctttattgcttgtggagtgacttagccttgagagagtgatctaattccctttatatagtgtagggcttacaaaagatcccaattcaaataggtaaagatatccctttcaaagaggaatattaatatcttaattgaattacaaaaaaaaaaaaaaagataaactaaatccctagaaaataggactaatgtctcgagaaaatattcctattttcatgggttgttggatctatcccgcaatttatttagctgtttagagttgtgcacacaaaatggtcgaccaaccctatttttaggacctagccagccaggtattttcatacaagccttggtatgggcctgccagccttggtatgctctttctagccttggtatgtgtcggccatccttgtccacatagccttgttgtccaactttccttgtaagggccaggcgcccgtgcttgaacaaccctttcaagtctgacaaggacatttggctgaccaacttattctcaagacaagaccgacctacaaccttcaattgggaagttagacatgcttcttttgactggaaagacatggtttgctagggtcttgatgacctacttaactcctttcgcttattgcttgatagttttgcttgattattttataactttctggtaatttcga

SEQ ID NO: 191537 - DNA, 2788 bp, Cannabis indica
tattagcatgaggtatgttgttatgcttttgctttatcactatgagattgctaccgttaatttcttatttcaatttctttatcaactttcacgtccgaaaacatatgttagatttttttttcatggtggtgttcattattattataatgtcaaatctgaaaacttttagaaaattctaagagtttatattattgtacatgttcacgtttgtaaacatacgataaaatgttatttattgtttgcaaatttttaaatcggttaaagatactgtaaattattcgatttttttaaaattttacagagataatgttgtaactataacaaatatcgttaataaaaaaaaaacaactctagcatatgtttctgaagtaaagattgtactaagagattgtaattagcactcatctaaaaagtatcactttgtttcgatacatatttggatttggtttgaaactttaaagttcatgttgttaacattattctattataataaccagagcaattcaagaatcaaattgctaccacaaagaagggcatgatgctccatgtacatatggagatacttattacatgttactatttggagttgttcaaataacattatcccaactacctgattttcatggcatacaatggctctcagttgttgctgcaatcatgtctttcacctatgcccttatcggattgggattaggcgtcgcaaaagtcatcggtgtgtatgaatgaatgtgatagaattgaactcttttttcacctcatttcatgtctaaaagtttgtcattctatgaataaaggtcaaggctttattgaaggcagcataacaggaatttcaacaactaatccagttgataaaatatggttggtatctcaagcccttggagatgttgcatttgcttatccattctccataattctcttcgaaattcaggtaaaaaaactaatattttaaacacataagagaaacaacattcaatgttattaaccctttggctttgaacaacaagagaggctgaaacaacatttttttgctgaattttgaaggacactttggagtcaccaccacccgaaaaccagacaatgaagaaggcgtccgctatatcaataatcgttacaacattcttttacctcttctgtggaggagctggatatgctgcatttggtaactacacaccggggaacctaatgaccgggtttggattctacgagccatatttgctcgttgatttagctaacatctgtgttgttcttcatctagttggcggttatcaggtattttgcaaaagttactaatcagatcactttctgcttaattgttatcaattttatttttaatatgacaaatagatacaaaaaatgtaaccaacctgatcgaaaaattcctttttttttactaattttctttctttacttaatatgaatttttcggtttttattggcagatatacagtcaaccattatttgctaatgtagagcaatggttagctgaaaagctcccagaaaatggagttatgaacaaggattacagactcaaaattccactaatctcaacttttagaataaaccctcttaggctgagtttccgaacagcctatgtcctatcaacaaccgtgatcgcgatgatcttcccttacttcaaccagattcttggggtgttaggaggcataaacttctggccattgaccatatattttccagttgagatgtacttaaaacaggcaaatgttgaagcttggacaacaaaatggatacttcttcgggtttttagcaccgttttcttggttataacggttttcgccttgattggatccatccaaggaataattagtgcaaagctaagttgagagaacattaaggtttttatttccatttgcatagtttttctgttgatttaggtggattgttgttagttggttgctaagtttttttgaaaatgcatccataattaagcattttgcatacatgtaagacattttatgtaataagttaataatatttttcatgagtttaatgattgattataatatttgtacggatacaagttacaagcaaacaaccttaaacatttgcaactcaaacaaaggagagctaaactaaactcatcacactacttaatatgcccgagcagcattactagtttctcgattggctatcatcgaaataaccaatcaaaatatgccacgtgacttgagatgttcaacattttcggggtgattacggttgtttttgtgtgagaaaaagaggaaagtcacccaacaatggaaatgacatgtatgccatgtatgagaactaaactcatcacttgtcaccacccaagcagctcaattgactatcaacgaaacaagccaattaaaaggcgccacatgagcctgctcggggatgttaagcatttttggggtgattaaggttgtttttgtgagaaaaagaggaaagtcacccaacaatggaaatgccatatatgccaatacatgagaactaaactatcacttgtccccgggcaagcagctcgattggctattgaagcaaccaatcaaaagacgccacgtgagcttgctcggggatgtttagcattttcggggtgattaaggttgtttttgtgtgagaaaaaaggggaaagccacccaaccatggaaatgccatatatgataggtcaaaaagaagagagaaagagagttgaccaagcatcttgtgggtgagctaccagcttatctatcacacgctctatagcgttgaattctttaataaaatcatgcacctttgatgctttcactttgtaattttaacccttttt

SEQ ID NO: 191538 - DNA, 1545 bp, Cannabis indica
tctctctctcaatctctgagctgaatttcagaaccagaacaagtgaagagaccgtcctcatatctcaacttttgttctgcgtttgattatggagtctcaccacgcacgcgcttcttgatttgttttagtttcttctttgttttctcagaatcaaccatggccgttgcctttgatggcttctcaattcggtaaacctcgaaactctctctctctctctctctttctgtctttagatcttttgtgttttggtactgttatagctttattatttctttctttctatctctatttcgtattttttgaatttgaaaattatgatattaagagagtacacggctaagatgaggagcgttgacgtggccaaatgctggcccttctcggagaaagcggttgcgacgaaaacttcggaacaggttgaggcgttgcttcctcctatcaccgtcgccaagttcaagtggtggtcccacgagctaaggcgtcttcgatccacgcgccgccttgaggatgagaaatcctcagacgagaaattggagatggtttgtcccgtttgccgagtttttacttcagccacggtcaacgctgtgaacgctcatatcgatgagtgtctttccggtaattattctttccagccgccgccgccgtcgacgacaacgacgaaggaggcgcgtcgtcagatcgtgaggaataacaactgtaaggcgttgaaacccaaatctaagccgcccaaaaagagatcgattaccgagattttcgctgttgcgcctcagattgagacgattgagagtagtgagatgagcgataaggaaggtgacgaggttgaagatgaagatttagaaagagaagaagtagttgctgatgatgattcccaagttatttcaagtgtgagtaaaagtagtagtagtataattagttgtagcagtactggtccattaatgaaggccaagaacaagaagaagaagaagaataacgctatgaagaagatcagcaaagagaataataataataataataagaagaagaagaagaaaagagtattattaattgaaaaggagagcggtatggcaagctcgcttgttttgaagaaactcaaggaaaagaagaaattcaagaaagtgttgaagaaaatgaagaatgttgatttgtctaattcatttgcaactaataataaggtatgtgattattttcacctcataaaatattgggttctttactcttcaactgtttatgttattaattagtttgaaattggaacgtttattacttgttgtgaagtgttttaaatttaattaggtactatatgaggggtaacagctaagagagaattatatgggtatttttttttttttttcatttctgggattgaggagaggattatggagaggggtttgtttgtgggggtggtgctccagctgtactgtacgggttaggcagaaagggcttttataacgtggtagagtttttttgtccttggtttaggaaatgcatcccaagctaatgatgctgtctttctctactgtttgagttatatatatatatgtgtatata

SEQ ID NO: 191539 - DNA, 2162 bp, Cannabis indica
ctgtaaccaggctagcaactctactcctcattttcttacttgattgggtttatctttagatgctcctcaagtatgatggttgggtatccacatatacttccctgcttatttattgtagtggggttttctttgtaatgatctttggatctctttgatttaggcctattttaatggaaatgttccttctttttctttttaaagaaaaaacaacaacaatttcttactaagcaacaaagtatattacttccatagttttcttaaataggtagctaacaaattacataaaccaatcatccttaaacttaatattttatttgttgtaaggatcccctaagcttaatttggatgtttcaatttttacaatttcatttacaatcaataaaatattaagtttaaggatgattgtaaaagaaaagagaggtatgcacttgcactgctcataatttatagtctaaaaccaacaaaagtaactggagtgaggttgagcatcttcatgacatgtttattaaaaggaatgagaatcatttgtatggtattgattcttattcatttgattactaaattttataatggaagaagttaatagaacctacttaaattaagccggaaagaaagagaaagaatttcctccctttttatagggcttgtcttttttttttcctaacttactttatttttaattttattttattaattacaaagttaaaagacaaatatgtccttccaaaaactataaataaaaaacaagtatttttaaccataacaatttaataaaaatattatctcggattatattatatgaaatgtgcttctactccttacattaaaagtttctttgatcacacttgttacgcaaccatgattacattagtaccaaggatagaggaaaaaaaatctctattatttgtttgtcaacgatgtactatcttttttaaggtaagtatttattctaaaaacaattaggaatacgagtgcaaagccagttttgaaggtgggcgacaaaattccatgttgagtgtcaacaatttgtaagtaaacattccatttccatggttactaaacgagaagacaagcaaagaaaatggaccaaaaagggtaatataattcattattagccaaaagtggtatatatacaaaatcaaccgaagtgatacatactcaaaatacaagatatggcattttggcttcaatgagaaatgaaacagaacacatttagaaggaagtagcttcattttcattatttatgtacggatgggagagggagatggtaaaggagaaaatggagctgctttgccaactttaaccgcaatgggactcttgggatgtttgtgagcattgggtgatgacctgccattgagatttctgtgatgttggtttcgagattgtgaactgcgctccatgctatccgactccacaagatgttctaatgcttttactacctctttcatggttggcctgtactttggctcattggatatgcattggattgcaatgtttactgcttttagagcttcacttactgagtactgaccttcaatgcgagagtcgaaaatttggagaacttttcgtttgctggtcagataaggttttgcccattccactagattgtgttctccagatggtctgttttggtctactgctcttttgcccgacaacatttctagcataaccaccccaaaactgtacacgtcacttttggccgttaagtgacctttaaagaagaaatgaaccaaatgtcagaagagagtgagcattgtttgttatatccagcagcaaaggaagttacatatgataaaaaaccttttttcttttcgaaactagactccatgggcatgactatccctacaatatttggagaccaggaaatatagcaattgctatttagtacttggaaaccagaccatttgagctactttttgggtgcatctttaaaaaaagcttttcaaaggtagaactggtaaacattttagcagaaacttcagataatgattaataaacacctattttactccatagaatccttctaatgtgcaagtaatgaagattgaagatacctgtggccatatattctggagctgcatatccaaatgttcccatgaccctagttgagacatggcttctatcattagctggaccatccttggccaatccaaaatcagaca

SEQ ID NO: 191540 - DNA, 543 bp, Cannabis indica
atttccatcaacatcaacctcatttatcatgtcttgaagctcttcctcagttgggttttgatccagtgacctgataaccgttgctaattcttcaactgtaatgcaacctatacaaattcaaccattaatttaataaatttatattcaaaataatgtaactaaaattaaaagatcatattataaaatgatgaagaactttattaatataatttgctgcacaagtttttctcttatcgttcatcatatgttggtataatataaaactcttccaaatctgagaactattctaactttctgctatatagtcttattaaaatgtgatttttttttaagaaataaaaaaggacaaaaataaagacagccattaatactaaccaataattgaggagatagcagaaaactcaccatctccatccttgtcaaaaagacagaaagcttctttaaactcaacaatctgttcctcactcaatacatctgccatgttatttcccatgaaaacttaatccagaagaacactcaaccttttagagagagagagagaga

SEQ ID NO: 191541 - DNA, 1828 bp, Cannabis indica
gttcatttagattggaaatctattattctttgtgcttctttgatgcttcaacgctgatagtttattagtattttaattgaaagtgttattagaatttccatttatatttttgtaaatggcatagtttgtctatcttgttaatttcactctttaatctttaagtgatatatcatcacgtaatagattattatctgatgatttgcctaatgaaaatcattctttcaacaaatattaatatcaaaagtattagttaaaaaattataatttcgattatattgatattaagataaagctatatttgcctgtaagtctaaatgttgcatgaatattgttgatgctctctcctcactgtttctccatagactatactatactgaatactgacaatatctttcatatcattgccaaagacaaataacaaataattcataccatatatcgatacatcaaatagaaatttcatgaaatctctatagaaatattcagaaattttgatttttataacacaattatacccataaaaattatcagtgacaacaagacaaaaaaagatagaccatgaaagaaatattggacaccattttctttgttgatgagtgactgaaatctttgagttgttgcttttcattttgtgaaactacaatttcacacccacaaacaaagcaacctaaagtgatgtgactatgataattatatgaggggtgagaagatcttatttagtcccccacgccctttaaaacagtgaataattgctcattattagagttgtagattgtaactagtgacctttaaaaggcatatttcttcacagccatccacctctttccatgatgcttatcttcagcttttacttactctggccccttaaataagtaaggcatgcttaatcagtgggtctttgctttgccttattaattagattatattaagaagaaaatgactccaccacttgatatatctttctttgctttgttaatcatgaactaagtaatttaaggaaatgactccctcattttcttctacatattttgatatatagtataagattttaagttattttttaagaaaaaaaatatataattttatatgaaacatttattgaaaaaaagtttcattgacaatatcttaccacaaaacattgacaccggattagggatgctaatttcttcaatgggagtgggtctcacggggacctgcctctaatggaactggggcgggaatttcccatctaaatggggaacgagacggggacggaaattactttttgtccccgaatattaaatggggctggggcggggctgggccggggctgggacggggatcatactccctgttctgatggagacccatttagtattttattttatatttatagtaatatgttatattttataatttatggttgcatttttagtatttttagtatattagtattattttttatgaattttaagttgtattttggataataattaatttattaaataataatattttaatttttatgtagtttaatatttttatatattttaatttttagtataatttttatttttttattaatgaggagatttcccgtttcgttctcgctcccattaggagatttcttgccacatccctaatggaaaataagcgggaataatgattaaattttttaatagagatagagatgaaagaacactctccgctaatttttcgtcacgtgtgcatcccttcaccgaattctttaaccctaattatgagaatttaataatgtatgattgaccctttatttttctttctttagtttatatatgtaatgatttgttcagcctgaagaaaactactc

SEQ ID NO: 191542 - DNA, 2865 bp, Cannabis indica
atatatatatatatattcatgtagcaagggcaagacccataatggtgtgacaatagagaataatatgataattaagagagtgggagtgaaggcaaaaacatctagttttatcaacatattaactttcactcaaatccttttcagtttgaaaaatgataaaagaaagaaaaagattgcaagttttcaccaactggaaaaagaattggcataaactacaacccaccttttggttggtctataaaatttggaatgaaaggtaaataagaaagtagagccaatttgagtagtgtttgttctgttattttgatagtgacaatcagtgaccaattggccaaaatatatgaccatattttgcttatttgagactagactagtgatggaatatattacttatctgtaatggtccatacaagtaactttaaacttatttttgatcctactttttcttgttaaccaaacagaaaatcgagttcatcagtacaataagaatggaggaatagtcaaacctaaacagagaaacttgggcaaggtttgctggccaccacatctcaagtggctcgaccaggtacctcctaagcattccagcccatccataccccaatatctgcaaattaagattgaccaatggattaacgccaataattcactgaattaagataaaataccatataatttatttatttgaattgttttttgctttttgtcactacttttcattcttctctgaaaaaaaaaaaaaaccttcaataaataaataaattaaactaattccccctctaacgaatatattaattagtataataatagatttcattgcaaattccaaaaccccctctaaactcaattattcattaataaataaattaagatatatcatttaagaaaaaaagaaaagaagaaagagtgagcaaaacctgagtggtcaagacgatgagaagcgcacaaagaaaattgacgttttgcttataataggctttcatgacagtaatggctccgatggaataagcgtcgccgccaccaaaagaaactccacagttggcaaaaatagtgatgatgacgtgttccttcatgttaaagggacctggattcaagctgaaccgccatcccaacaagctgtactcctttctgggaagagtagccgccatgaacttcccgatgggcaaaacggatatttgcatgagaatggcggaaatggtgaggggttgagtacggtaggtgaagaaggtgttgaggaagatgagtagaacacacgagcccagacccaaaacccatgcccggaaagtcaagacaggcatagttgggtcgtcggtttccggcaccactaaagccacttcctccactgaacatctctcctccgtggattcgccgttcggcttctccgtgtctgtatcgtttggaatttgggtcttggtcgccattgaagattcttttcctctgtttctctgtttcctgtcacataaaagagaagaaaaaagataacagagactgagactgagactgtatctttcttacaagttcgttgcttgtttgaaaaatgtgaagaccgtagctctgtctatctatatatacattctatataaaatacataaaatatgtacacataacagagagagcactgagaagggtaaaactaaagttttgtttatgacgaaaatgtccttcatttcattggtcgctgctgcttttaccaaaggggactctactctacactgtggactgaagtcacacactatagtctccccaaattcccacgtctactcttgcaacgttcattaggtttacttactaaaataccctttttaggaaaacaaatattagctgtaaaaatcttctaattgtcatattaggatttagtattattctatttgttttttattttgaaaaaaaccaaaaatttcattaaaaagcacaaaaatgtctcaacaaataagagagttcatgaaattaacaaactaaatttacagagagccagttacccgatatatttatctaaagttagagctaggtttgagtaatactatttttacaattaggcaagattatattgtcaaagaatttgttatggtggtgcaattagtggtaggttgtaattgtaaataattttactttttgtaaagattttttttttggtttgctttgtaaagagatattctaatttaaacaaaaaatgtgatcctacttttataagttttttaaaagaagtattgcagtttttaaaaaattaaaattaaattagaccaattaaatatacaaatcaaattgaactaaactgttccactcgaaatcatagtttttacctcgtaattttttttaattaattaactgttccatttttttttccatgccatttctcattagaaccagggtattatgttattgtaatttcgattaccttgtgattatggaagtaaatgataatggttaataggtttacgtgataagttaaccaaatatctatcaaatttatcaatatctcgttccaaaactaatctagctaataacagcttctttaattttcatcataatcattaattggagtgatgcagctgtaaataccttcccaagttttattttatgttaagaataaatttttgtttcaacgaacagtgatagaatcttaaattccaactggtttttgtgcagaataatgtcagttgatggctggctatattttggtataatatttgctgtgaagttatagctcttggtaatatggaataatagagcacgcatttgggctcaaatcctcatccagaatgtttatatgtctttttaactatattgtcggactttataatgatatctcagtttctctgcttttagctagtatgattactttatatgttctttgatcatataataaaa

SEQ ID NO: 191543 - DNA, 740 bp, Cannabis indica
ttaaagtaaaaaaaaacgtaaaaaattaagttagaaaattaactaatagtttgttaagttttacttattgattctaattacttgttttttttttttttttttttttttttgtgaattatatgaaaaaaaaaatacttagaatctctcatataaatttgataagagtgtaacgtccacagaaaaagttatttttcacatgtgtcacaatgcacactaattaaatatttgttttaaattcaagacaatcatattaagattacacaatacaagaaacccataaaattaacaaatatttgaatgatttgaatgatcgaatactaatctaaagaacttgcaacaatgtaaaagcactcaaacaaaaatatgagatatgctcctttatataaattagatttgttaatttaggttttttttgagtttatgattcatagagtcaagaaaccgataaaattaataaatatttgaaagatttgaatgatcaacactaatttaaagaacttaacaccaaaggaatatcagttttatttatacattatataggcaacacatatggtatttttataaaatgtgggattttttttattaagatagtaaaaacttaaagcccaagaaaaaaaatgtaaaagcactaaaacaaaaatatgagatatgctcctttatatatattagatttgttaatttatgttcttctttttccttatgtttatgattcatagagtccaccttatgaaaaaaaagaa

SEQ ID NO: 191544 - DNA, 4714 bp, Cannabis indica
aaaaaaaaaaagaaaaaactatcaaagagcatttatggtgttggatgtgtatatattatagtgtagcatacagaagatgggccgatatatctatatatatatagctatatatataggtacttgatcaacttcaatatatgtattatttgggtttttcatagctatagctaacttacgtctaccttattagttataattatataattaccttatgcaagctaccttccaaatgcttctgcaataataaataactacatatttagatgaaaatgatcatatatatttaaaatactttatatatattatgtgtgttgtataggacacaaaatacgaaaccctaattaaaaatgtattgctatataaattacctaaaaggtgtagttggatgttgttgttatcagtattcacgtggctgtgtagtacatacatatatgtgtgtgtatgaagtcataacttaattattactccacacaataactaatattgcagtgaacacagtattaatattaaataataaatactagatctctctagattacttacaactactactgaatactgatcagatatacatatatttatatatatatatatatatatatatatataaataactatatagtagttctcactaatatatgatttgctcttccttgaaaaaaatatgatttgctcaaaatatttaaaactccatcaaattattaataagatcgagtcatatgatcttcgctaattttccgaatacagcttattttcttttataatatactcatgtaacatatataatgtgaagagtttttatttttttttatacatatattattacgaaaagtattattataatataagtcacactaaaattttgtgaaaaatggactaattcagattttggaattaaaaatcaaaataattataacgggttggaagaccaatattgtatcttgtgtgtagtgtaatttgccttaggaatcccacattttgcactggcctcaaataattcacgcctaaaagtaatattagaggcgacaaaatagtcgcctgaaaataagggcgacgaatttctatttttttacttttaggggcgatattgtcacccctaatacccataaagttacccctaaaatgtgttgttagaattgttgcatttgacttttaggagcgacaatatcacccctaaaagttattaaattaaataaatatattttttatattacttgaaatattaatttttaatttattaaaaataattataataacaaataaaattaaaaataataattaatatgaaatacaaatttattcattaatatagtagcacaataacataataaaattaaatagttcttacaaaaattagtaactaaaataacttaaagaaaacaaaaaatgattataattagttcttacaaaaaaatagtagtcttttggttctataactgtgataaaaagtcatttgatctctcgttcttattgaactttggatgactcggtagctggtgctgtgatgtctgaggtggttgtagcggctgtgatgtctgaagtgattgtagcggttgtgatgtatgggatagctgtagcagctaagatgtatgtggtagttgtagcgactgtgatatcggtgcccccatcatctattgatatgggtgggctggttgagcctgctgtgatggcgtaggttgctgtgatgatccacccatatcagtcgaacccggaaagaaagcagaaggatgctactatgaaattcctccgtagatgtatggatgtgtgtacggtggtccatacatgtaagggtaagacggtggagggtgtgatggttgtggaaaaggttgtggtggatgctgagactgtgatgtcgaagatgtatgcatgtcaggttgtgccactgaatgttgagaatgtgcatgggaaccttgacacatgtgagtctgagacggttgaggcactggagtggagtacttactcttaagcatattaaacattgctaactttgcagggtccatattttatgggtcaagatgtacccttcaatttgcggccaattccacgaacgtgaccccgccactaaccatacgtctcttcgaagaagctgacgtaatcagatgatgaccaagaatcaaaatctgtctgagaacaagttgctcgagcttcttctaaccgctcctatattaaatcaataaattataacaatatgacactaacattgggaaaatataaagattaagttacaaaaatttacataatcttgttttgcatattcctataatttatgaagtaattaaacattagagattatacaatttaatataacttaactataattatatttgaacttactaattcatggtgcctctgagccaaggatattgttccttgggttgaaacatatgtcatatgttctcggtttttcttattttgttcagatcgagtaagaaaagctaggctagtaaaaaattcaccctgcctttgccattgttccagagtcatatcaattggatgatattttagtgtttcctcgtaatcctcaggttttgaataaaaacgtttgaaatgcttgtgtcgactaattttttttttgttctgtatctattagcacactcggtgtcgaaacatctcaaaaaaatttcaacatacggattctcgtcaatttgatagtaaaattacataaaaaaaaatattaagtatattaacaaattatttacctgaattcttccaagcacttgatccttgtactgttgggacactgcattccaatctttgtaatgggtaggacacatagcagcaatgtaatcgctcaaaacgcatgctctactcccgttatcttctgtgaaattggacagtagactaatggcaatggctcttttgcctctctccttcttttcttcgattcttcacgaattgatggaccacgaccctttcttcgagtatcttatattttgaataagaaaaaaaaaactataacgaacatataattttttttattttttaaaatattagtataaatataaatgagtcgtcctcgcatgcacactacaacaaaaattataattaggggcgaacctattatcagcggggacggtccgcccctaataatgggattattaccggcgcaatcctagaaggatcagggggatcttctccgttactatctccaccatgctaaaaagctacatctgttgacatattgatactaaatacaaaaaatttattaaaactatttatgaatattgtatttttaaaaatattatagatgttatacttctaaaaatatttattacatagtcgaataaataatttattacaaaactacatctaaacagaataatcattatcatatttggtaattaaatttttattacacgggacacatcatcaatatcattatcaacactaagatcaacaagcaagtcttcttcctctgctacttcttcaatatcttctatcgtatcatcttaagtagttattgggagtataggctcattgtgtacaataaatggtggatgatcagattgttgcacaagtaatggtccaagatccacaaatagttcaaaattaaataagtttgtgttatgtacatcaacatcattaatcacattaagagcatccatgtacattaccaattggttgtgtgtatgaatttcttaaggtatttatattctatcctaatacaatcgccaaatcctatatatcataggattttataatgtgaattaattcgggttttgaaattaacaataataaaaaaatcacattaaaatttataaatgatcttttacccttttcatagtgaaaattcgcctaactttttactatatttccaagagtgtactctactagtattctttgtcttttaatcagtttattttttggtacaaggattgaaactattttaagacttcgggtctttttttcgagtgaagcaaaatccaccttgtattgtagtggaatgtgaaagtgaagtgcatcgcttaattgatgcttttgggttttaaagaagttcattaccattttgatatttgaggattccaatatgtgtaaaaaaaatatatgctcaagaataactcttattaattcggtgtttatttttatacatacatattggagtcaaatcttttttatactaaaaaaaatcccagaggaaattaatactatatttcgagtattcttgtggcatgaaaaagcatagctttactcctaattgctagggatcaaatttgaaagtctaagaaggctggagtactcaaattcaaaaatactttggcctggaataaagcagcaatagaaaaatatgtttgagaaatttcaacaaaaaatatgatattttggtatagtaaatcgattgtgtctatataaaagagcagaattggatgaaagtggttgcagtgaaggatgagattaaaaaataagttaatgagcaacaattcataataataaagtatatgattcactaggggtatgctctcatttggccagattctgacaaattataatagagcaaggaggtttggggtagattcaatcttcccaaatattgctttatattttggttggttgttcaaaattgcttaaaaactaggaacaggttgaagcgcataaatttggtgcaagattgctcttgactgttgtgtgaacgagatcggaatcggctgttcactaattctttgattgtgttgttagtaggaaggttctaatggaaattaaggtgacgtttggttgg

SEQ ID NO: 191545 - DNA, 1163 bp, Cannabis indica
aaacaaaaaaaaaaaagaaaacttcctgttctttaattttggtaagaaacaggtttctgtcttataatttcttctgtgatttatacttatctttttattattggagccatggcagcagctatagatttttacagtagtagcagcagcagcagcagccaagcaccagttttctcagatccttttagagaagagctcatgatagcacttgtgccttttatgaaaagtgcttcaccagcagcttctccctctacttcttatacttcttcttcttctcctccttcatcttctttttcttcttacccttcttgctcttattctccactctcctcaacccaatcaaactatttccctgaaacccaagacttctccaaccaggtgtgctttcagccacagaccggatcattaggccttaaccagctcactcaatctcagattctccaaatccaagcccaaatttatttccaacaacaacaacaacaaaaacaacaaatggcagccatggctaaggcctcaatcaatagccagtggcagagccaaaacccccaaacccttagctatctcagcccaaaagccatccccatgaaacacgttggtactcccccaaaagctaacaagctctacaggggagttagacagaggcattgggggaaatgggttgccgagataagactccctaagaaccgaactcgcctctggcttggtacctttgacacagccgaggaagctgctttggcttatgataaagcagcttataagctcaggggagagtttgctcgtctcaatttccctcatctccgccatgaaggagcccatgttaccggcgcttttggcgagtacaagcctctgcattcttccgttgatgcgaagcttcaagccatttgccaaagcttggctaataataataataacaattcgcagaaacaagtgagttctggcgagtcctgttcggaggcagaggagaaaccgacaataatagtaccagtagctccaatggagtcgaatttggtctctgataattcatcgacaggtgaaccgaaagccgagttagaaggctcttcgtcatcgttgtcttcgcctttgtatgatgagtcttcagcagggtcatcttcaccggagtctgatataacattcttggattttacctccgattctcaatgggatga

SEQ ID NO: 191546 - DNA, 2027 bp, Cannabis indica
ttatatagctataattaagtaaatattattgtgtatatataaaatgtgtaattaaaaaaatatatatattaaaaattaattgtgtaaaatgtaaaaaaattctcagctcttgtttatctttatatcaactcaaagggaaagagttctacttaatttgggttctaatcacaaactaattttacttttcaaaagcaatcacttcatgcataacacaaatatcaagtaagaaaataccaatatagctcattaaactaaaaaaacaatgtgcaatttggggtttttttttttccttcataaaaaaaaaaaaaaaaaaagaaagagtaattgaaagtaaactactagctttttatttatagaaactttatatgaagctcaataggctttcaaataactatgagcatgagtcattttttcaccccttctttgtttcttctctccacttccatcaatacagctacttctaccactactagaaactaaccacagacaactcaaccgaatcgaatcgctcattcagttgccttccctttgcgcctgctactgctgcttgtttccagcaagtaacaaaccatagaatcaacatcgtccccgaaaatactgtaagcctcaatcgcctgcaggtagctgaatcccattgctaacagcattcgcatgccgctgctaaggacattgtcttgtccggtctccacttttattgtctcgctgcctgatgaccctgttttttcactggctcccgaagatgatggctcggctgtggaagtagaagacgactccctatggccaatttgttgcttgtaagtatccactgcaagatactcggctcttgatgcttccatcaccatgcgttcaatctccttctcggtaagctcaagatctgaataaaatcgtccctctgctagaagtgcctgaaagaaagtaaaagaaatgtcttcgaatatgataaatcaattcacattcaagtaaacaatagtacaacacagtcaaaggcatcaagcacttgcattatcgatctgttgatcttgttgagctttaatggcagccttaacttgatctttgtcagcatttgtctgcatggtaaaggtgaatctcaatcagataataattattgcaaatgaaaccggttcaaaatctcacatccacatctttttaatcagaacataccccgcgaaggcagctgaacccgagcccagcaccgatcgctaatcgacgtggatcaacaagagagttgtaatgatttccatgatgataacttagccgtatgggtggtgaatcagtattatagcttccatggaagatgttgatgggttctaaatgacagaatggagttagccagagtggtagaacgttataaaacagcaattatataaaagtaggatggaaccgatatagaccaatattaaaggcatcacctgtgctatatgaataaatatggattggccgattatacatttcggataaggcttggatctctacattatttccataaacctgccacagaagaaaacagaaagatcagcacatgcatactgaataagaaatgaacattaacctgaaactttcacaaaacggaacgaatcaagataatagaatatcatcttttggatatagaaatagttgcaaggaaatttcgcatctagactgtttgtagcttattaaggaatgaccaactgacttttaaaatgtgttcatacatatcaatagtgttaagaaaatgaaaacgaactggttttgatccctcaatacagtttcccttacagtttgatagttttattaataacatactcaacgcacatattcattattttttgagagtatcacgaatttacgaatcctaattctaattattttttgactaaagtattaaaccaaaaatgtcctattattgaaagtgtgagtttttctctattgccatgacgaatctatgaattatcaatataggatgttcgcaggcactttgccaataaaagtaacattttctctcttagtggttcgactcacttaaatgttactttcagtaagaaaaaaaa

SEQ ID NO: 191547 - DNA, 2655 bp, Cannabis indica
agatcatattatggctgaagatcaaaattctaaagacaaacctgttcatcatcaaatcataatagacataagacactgggaatcagagtgttcagatcgtataatttacaaaattcccagaaaaattcgcaaggtaaacgaatcagcttacactcctcaacttgtttcaattggtccttatcactatgccaatgaagatttgagtgaaatggagactgttaaatcaaattattactatcccattttccttgaacgatttggtgatcaaaaagcaatcgagtctgatcttaaaaatgtcataaaagattgttctgataagcttagaagtagttatgaaggaataccatcaaatttgttgttagagaataatgactccaatctgtttgatgaaattattcttagagattgttgctttattcttgagcttttcttgaggaatgttgataaggagcaagagggtaagagggattgtatcttgagaactccatggttgaggaaagctgttaagcttgatttgattttgcttgagaatcagcttcctttttttgttcttagaaaagtttatgaagctgttgaaaaacatcttcttagtcctgtcaaaattcccaactctgtttgtttgaactcttcttcttcttcttcttctgatcctcatcatcacaatcatcataaggggtctttgattgattgttaccaagctgaagaaaaatcaagccataagaaatcagctgatgaggatgatgatgatcatgatcatgatcaagaagatgatacccttttgaaactcaccctttatttctttgaagaacattatttgactgaaacttgcaaaagggttaagcctaaagacatcaaggaaatcaaacactttactgatttgcttagagagttttggcttccaagaaagttcataagtcaaagttcatcagaaagcacaatagataggaagtttataagtagaaaaaagatgaaatcagagagcataacagaaaggaagtatctttactctgccactaagcttgataaagccggtgtgactttcgagcctgctcggaaaaaaatatgcctaactgatgtgaagatctctaagaagaaggttgttctgaaattcataccagctataaagggtatgaggttaaagcttcctgagttgaagattgagaatgatacagagtctctgcttagaaatgttatggctttggagcaatgtctttaccctgataaagattacatttgtgggtatgttgctctaatggatcagctcataaacacaggtgaagatgttgattttcttgttgataagaagattttgacaaacttgcttgggagtaacaaggaagcagctaagttgatcaacagtctttataatcagattccaagggagaagtcttactatgcttgtttttataatgatctgaatactttttatgagaatagatggaatgttacaagggcaacactgaaaaaggtttactttaaggatctttggactggtagttccactgttgttggactctttgttctgctttttactgtctctgcaacacttaagaatgtctactttagacatctttaattaatactactttaggcatatatatatatatgtttggtttgagatatgatatgatcactttttcagtgctcatgaaactcaaaataaaggtgtgatttctactttattttgtataatatttataagtttatatatttcttcgcaataaatgtttgtataacttcttaagatattcaaaatcttcactagtttaatatgttgattgatatgagcactatatgtatatgtaaagagagggaactaagtcattgtatgtgttcttcttatggttaggagagactatatgtaaacatgatcatgaaacaagaattagggtaactattaaaatatatgtgacttataattttccataatgttgaaagagaatagagataaaagtaatattttgacatgagatttttcttatatttctttagcaaatgataatctagtgacatcattattttaagttgtagatctcatctaaacccgatatgtataattatctaaagaatactatttgagtaatatttgtgcacatattattactcatttagcaaaatatcaatgtttttcatttgtggtgttgtctaatgttaatttagatcatctccatttagcatttgtacaatatgattaaagtggcggatccaagattgaattttaaggtgggtttagttatatatttaatataatttaaaacaataaataactatctaaatttaagtgggacgatggtttagcaacattctcatattatagtggtcataaatttgaatttaatttgaaccttgtacttcatttgttgtttctaataaataaaaagtagatacacataaaaaaaatgagtaatagattcaaaacatggtctctcatgtaaatttaaaatattttaattaattattttatttaactactatatatacgaaaataaaaattatatattaatatatttttaaattttaagatagactgtagccctctctcaatatctctaagtatgcctatgtgattaatcatcaaattaatttgatttttggctaagataatatataggaaaatgtaccaaggaaatatataatgaggggtttgtctcatgc

SEQ ID NO: 191548 - DNA, 2609 bp, Cannabis indica
ataaataatagtatataaaaataatagcttgttatatttcatgacaatttatagttttaaaatatttttagatcacttaaatgtattttaaattctgagctacataatagtaacttaaaaaaactaataaattgttaagatgtatacaaataaatttggaggtaaccaaaatgtatttcaaattatatgatatataaatgaaagtttctatgtaaaagtattaattggtttcttatcaacactataagtaaccaatatttttttttaaaaaaaaaatgcaggaagataaaaaaaaaaaggaaaacatcatataagttagatttagccgatatggcacgcgagtaatagtagtaacatcatttttataagtcagattcaaacaatatatattattgtaagcttccctaataataatagtaaaactgtaatacggtagaactcgacagcatatgaagaatttttatttttatggtttttaaagtatagatttgtaaaaatatggcatttttaaaaaaggttatataatagaaaaatctttaaaaaaaagttaaaaaatattaaaaaaacagcataaggtaccttattacactttatggtaactggttacccctttaaataccataaatgtacctagttattcttaccaaattttctcatattttttaactttttcttctattttctccaaaaaaaaaaaaaaattgaaaaaaaagccattgtttttataccaaaagtataaaatccataaaatttataatttcctctatttatagttgtaaatttgtaatggttatggcccccattttctagcttttgatattataggctgatgtgcacgctgagattataaactaaaatcatataatgctaatcaaacacccatagaaccaaccaaaggctttattaaggcatgcacacaagaatcacaaattaacatgctgatcaaaacaaaagattcaccatatgacatgattagtgtttaaaatttcatattattaggtacatttgtattttcataattttaattgcaaaaacatatattggttaagaaatatttcatttaatcgaatttgtgttatattgcagagtttgtgcatagcccaatttgatgaagtggcagatatgataaggcccaatttgtcgctttagtagatggcctatgctcttaactgtggtccaatgtttcacacggtccaagcccaaggcagtaaaaacatgggatgggattatttcaagaaacatacaaaaatagcaaaaaaattacaaaaataccaagttatgcggaattttaaatatttttacaatttttacgattttatttacataaatacaattttttttatgtattgttatgttgtattcttgtaattttattattacatttttattatttatatattattttgacgtgattttcttgttgtttttgtaaataccgtaaaaatatatattaaaaatatttaaacaaagtgtaagaatttaataatttatgtaaatttccaaatagactcaggaagtgatccaaaggacataatgcttgcattggaattatgtgaattcacactttgctccatgaccaaagccagaatggagaatttttagtctctaaggtggcgtttgattggaggtaatgaaatgaaatagaatagaaaataaataatttttattccatttatttaatgtagggttattttaggaggatatggcgaaaacaaaacccaaacaaagttagttttctcacacatggagtttttctagttagattccattcggtggaagacaaagatagcatttataaaggggctatcaattttttatcacgaaatcactaataatgaaagcataggatccagatacaagatttactagagaagaagtttggaaagtgccaatatggatgcaattaggaacctagacttaatattgggggaagggggaaagagctatggggaaatttattaagctagatcaggctactttaaatagagacaagctcccattcacctaaggtcttgtggaggtcaatattactcaagaattgccaaactcaatttgatttgaagatgagattgattgaagggtgtacatagaagtggcttatgaatgaaaacctgaaaaatgtggcacttttagtggtattgggcataacaaagatgcttgtaaaaagattaaaatattgaaagtttaaattaggggtgttcatcaaatcacaaactgcccgcactacaccacatcgcacaaaaaatatggtttgaaaatttttgcggtgcggttgcaatttgtgttttcgccaaactgcacaatgcagtgcgattttgaatttaataatcgcggtttagactgcatcgcattatatattacaaaatactaattttgttcgctatgatttctcatttttatttatgaacaacttatatgtttacaaaacccaagacatacaattaaatttaagtaacatctatataaattattctctttttttttattttttgtttaacttcttattgctaacatattattattgatatgtatataatatgtaatatataagtatattatataattatttagagacaattcaataaaataacttgattaatatatatgtt

SEQ ID NO: 191549 - DNA, 908 bp, Cannabis indica
catatagatgatattttttagtggagtactgattatctatatataattatacttgtcttacttttctttgttatcttaaaacagttgcacgcttggaaaaaaaacattactttatgtaagcgagattattagtgtagaagatcaccattttgttgttttattatatgtacacatatatcgcatatataatgtatatcaatataacttggaataatcaaatatcttatcttaatttattccttgcttgttgccctcaacatcactaataattcctacttttccaaaagcatatatatcttatcatcagacacagaaattaaaataacttgttactagttactttatacaatgaattattggagtatatattacaccacaccactcatttccacttttccaaaagcgtacgtgattcaaaagcacaaattaattaatcagcacaagttatcactatcaacttcttatgctataaatgtgcatcaatatatagtttctacttttccaaaagcatcaacactgatattgttcattccctattttatcttaattaatagcatcaccactcatttaagcttttccatacacgtacgtaaaactgtgtagtgagtgatatagagaaactaatcttaatatgggtggcaaaaggactatttcaacctcagatgagaactttgtgtagtgagtgagtgattggttggtgagaaagtgagtgttgttgttgtcaataatatatgtattaaacatctttggttttttttttgttgttgtcttgtgccttaatttgaagcttaattatttgtcttcacatgtattacagaatttcttaagtttattctaaaaatcaaaatgagctagaagactttgatttttccaacaatccccaaatggcactacaagaaatgtcactt

SEQ ID NO: 191550 - DNA, 3206 bp, Cannabis indica
tgtttttgctagagtaattcattgaacttttttctgatctataggaacaaaaacaactttcacagattttttgtttatttttacgatctttctgatttgaaatcatggtaagcaataagcatagtccagtggtccatttgtaaacaaattaggaaacacattattaacaagccgcccattattccaaatattggtgactcaaaacggctcatgtttctcaattacacacaataatcataaatcttaccaactcaaattctttttttaatttatcaaaatacacatcatgcttttcttttttaaaaataatattacatgtttttattttcctaaggggtatgtttctattttcaaaagtgaaatatggtctaaaaacggatgaattaaacaagaagcgaaaattgattgtgaatatacttattatcaacgttaataagcaagaaaaagtactatactacagcataatagcattgcgttttagacacttttgtgaatcaatttcatttgtcatttatttatgacaaacccaatttagaagccattttcccttgtgtggcctttttcaattgggtatggaatgttggaccataaaagattccatttagagagaaagaatatacacgtgtaggtatccaatacgtcactaccaacaaaatatccaactgtggatcaaagaaaaaatatccaactaatgttttcattcatagtggcgatgccatgccattctcctcttattggttcaagcaataacgacaatgttttgagatgatgcgatgtaaattaacgttttgtgatcgcataattaacatgtgaatatatgagattgagacacataatttgaaataatgataacataaatgttgtttagacaaaaccattatacacaaaacactgttaatatatatttaaaataatatatagaaggagtattcatacaaactcaaggtaccccatatcatgcttcatttcatattccgcaataactaaaaagagagatatatatggaaataataaatcattaaaaaaaatacaaaaaatacagtgggggaaggtgacccattttactattggacaccattttctcaccagtgggagagccatccacgaatgatgagatgatgacacccccaacggaaaaggtataacttattttttccgtatgaattaaaaaagtgacacttttagatacaatttgagttggtacgtacgtacaatgttcattttcctgggagtccaactcgttgcctctccctctgtcgaattagatttggatcctttggagatgaggtcttgcctcccaccccacctgcctgacgcatcatttctgtaaaaaaaaaaaagaaaaaatatgcactctcaatattcatagctattaatttatgatcttattaaatatcttgactcctcttaagtaaaaattacactaacaccaaaatttatgtggaaaccaatgtgacacttgaaatatatcaaaggtgtttcccaaaatttaggttatagtcaaaatgtacaaattgtagcgtactgctataattttgacataaatcgagaagtaacattttaatctttcctaattaagaggagtatttgctaggccagcatatttaatttcgtttatgtaacacaattattgtccatttcaagaagaactatggaatatgtgagagcctaatgatacttttaatggaataccaaaaatcatgcgcttccaatactaagaaatgagaacactgtttataaggaagtaggaaacaaaggttattaggagtgcaattggaaagcactcctataattggaagtgtttgtttaaccaggtaaaatacagtaaccagaaattactgatatattttaattaaattctttaattattgtagcttttataagaattgggtgtaattacaaattaaataattgattaataaactatgcgctaactcaaatttatatctaattacaatttgacattcaaacacactttttaaatagccctagtaatgacacaatgacttccaaatacactgtaaaagttgtaaaccaagaaaacaaggaacttacctcgcgtcctctcaagctcttcaactagttcctctttccactttctttgcctctcagagaagtttgtgctgccagtaaaaacaaaaaattaattaagaagatgaagtatacattaaatttgagaaacataagctaatgtgaatcaccaaaacttgatcacaaacctttggcttaaagatccttcctgagtaccaataagacccttccattcaccaagctgtggtggctgaatttcctgaagcggtcgaccatgcacaatactaatactagcgtttgacacgttttttgtttgacttctggaccaaggactggcagtcttggcagcatcaaccatggcagagaatcttctacttggtagccgactaggtgacttgcttttaggcggtaaattcagaaaacttggaacgttttcactatccctaacaccaactgtacatggatgaccagcgggattaattgtgctgttatagaactcttcatatagaggcgtctgcaacttcttcagatctaaagcctgacagaataacatataatagtggattttcaatgacacagctataatattagaaacaagagaaatttaccaagatgttcaaatcattaggcaccttttcatccaaaaaggctctaattttcgactctgtgacttcttcatcgtcttcagctgtagatgatggcccacaactaaatttaaactcaccttcctgaacagatgctccaagactgttatcagccatttgagctgtctgacctggtaatgagtccattccacttctatccaactccaaacttttatcaaacttagatggccaatcatcagttggttcagacatgggattaaaactctattgatagtcaaaagaacaaaaacattcatcaatgtttaaattagtggtgagcatctaagatactggacaaggaaagagaatgtccattaccttggtcaagtcgtttgactctaagacagatccaaactttactaatgaactacacataaggtcatcatctttatcatcaatctgacacatctcatcatcagaattggtgtgcccccagtgtgatcccattcccgagaaattctcgggatatatagttgaacatctcaaactacccatttcaaatatatctttcaagcccgagcaagcggatct

SEQ ID NO: 191551 - DNA, 1491 bp, Cannabis indica
tttttttttttttttggttcggtcacttcggtggtgataagagatagcttttttattaataaaaaattaaaaataattaataattaaaaggggtctaggtcgatcaatcaactcgtatttgtttcggtatttgaaagaattttttagtgagatttaattcatagttgtctaagttaatttatttaagaaatcttaacaaaatttaaaaaaatttaacaacgcttaaaataaaatttaaatcaatcagtgtttgaaccttatttttcgatttgttaaatttttcaaatttttatagaatatcttaaataagagcaatattgacaactataaaaaaaaaatagactaaaaattctctcttttattaggttaaatagtattatttttctccaaattttaatatatgtatcaaattgtacccttgaactttttatctgatagaatttcttgtaacaattgagattattactggtggattttcgtcattccaagcaaaagtattgaatttgttgataggattgaattgggctagttctattgggttgcatgttaatgttttatcgcggttaaggcttttgcgtaattctaatgtatttaataatgagctaggagttattttttctgacattaaagtgttgttgtctaaactttcaagggcatatctttcttatgttggtcgtaattttaatattgcagctcatagattggcttataactcatttccaaaacatgtttaataaaaaattcgtattcttgacaaaaataataaaaaaaattattgagattgttaaatttaagaacttgcaaattttgtttaatcttactaaaggactcgtaacgtagttatctatgtactaaattttactctcaaactttaacctgtatcaaattacgtattctgaaattttgtccatgtcaggcgacaatgttaataaataaaagttattgaatttaacaatttcattaatttgagtggattttttaacggtctgaaaattttaaaatatataatttattacatatcaaagttcggacaaagaaaaatcttagttagttttattattacataattaataattaactttttttagaaataaataatttactttatgtacaatattattgaaaatgacaattaatatattactcttttactttggcgtaggttactatgataatgtctttaaattaaactaaactacatgtcctttttttcaattacttttcttttttgctttattgaaaaaaacaaaatttataaatattaacaaaaccatggactatttaattaaataaattaattatatgcatggtcattatccaagctttgagttggtatatgaataagcaaaaaaaaaaaagattacattttattatagtgagtatatattctattatttttaaaataggtgatgaaagtataatatcttttgaattttttagtgtttaatagtttattaaaaaaatttacaataatttttttttgaaaaaaaa

SEQ ID NO: 191552 - DNA, 1413 bp, Cannabis indica
aaaaaaaaaaacactaacgtcaaatatagacatatatttgtaaagttcaattcttaattattagtttaattatattaaagttgaataatatatattgattaattccttggtaatgaaatgtctttgtccttgatgtctagcttgaagaatccgcaatatcattttctaagctttattaaacttcttccttctcatcatcatagtaaaaaagaaaatcacacatccaaattaccaattattctatatagagacacatatcactattacacatcgttcaactaactttttttgggataaaaaaaatgaaaactatcaatttgatcaattaataaaaaggacttgaaagaacaatcaaacctcattttctttgggcattttcttaaaaacaaattagaaaataaagatgttaaataagtgaatggttgtgctatctcaatattacttttctttttgataaatgtctcaataatactttttgcttttggagtttattgggcatgagaatatgggtcccatggtcccaccaatcaaatgttgtcgaccccatcacattattattcttcataacctttttccactgtctgaacggtgtgtttttgtctctttaactaaccaatagtctaacctacaatcagactcccaaagcaacagcgcgtgaagctcatgcacgatgttcattcgctgcaagttgcaaacagaagaatctcttatccttctgggctggaggtgtgactcacgcgctataaataggtatggtaaatatttgaacaaagtgttagaattatgaaaagggttgaaatttgagaacatcaagaaggaggtgaagttaaaaaaggagtgagtgagagaagaagtctaaattagaaggatgcaagttcgaagaagatcttgtagggacttgtggaagtgcacacagatggggtaaagaaatcagcataagtgtcagtgcaactgcaagggtaaatcttctatataactaactaatttataaagtgtgtgtatatataggccggctgctctattagtacaaaatccattaagccaactaccacatccacttcaatatttgggatattctcttgcttggccttttattctctttagagacctaattatctatgaaagtactttttttttggggtgtgttttcccataattaatcacatatatattaagcttgaaggacgtgtcacagggagtaacaacgtccatcaaaatttgtaaattataattatatattttacttttattaattatatttaaataattattaaaaaaatatatttaaacaaatacataatgtggtataataaagttcgtcgattgaagttaaaattattaatcatcctatttaaatagattttagaatattaccattccaaataatttcattattaaatattatatataata

SEQ ID NO: 191553 - DNA, 2393 bp, Cannabis indica
gtgatgagtaagtcgggcaaatttgctggtatgggcgatccgaatttggctaaagcaaatagtataaaggaaatgctaagttggattaaaactcaactatagcagaaaattgagctggagtcagattaattggtagcagtccaaactattcgaaattcattacttatattttttttcttttggaattattatagaaaattgttgtaaacttcttatatctttaaataatattttttttattttttattaaacgatatgttaacacgattgctcgtaatcttacaagattcttttccaaattgagtattaaataaaagtgatattcctattgagttttttgtcaaattaatagaatttgtatatttttttttttaaaaaaaaaaagaaaaagacactagtagtgcttttatcatttcttagaattaattagaatgggagttaggtgaacatgtgaatgaatgactatacgtatcttctattatgttgtctttatccacgtgtcatcttcctatttgttgtcttttatatatatatatatatgcttaagtcttttgttagcaagatcattaacttaaatcattgaaataaacaaaggaaaccagaaacaagaacaacaacaaaggtgaaaaaggagcatcttttgaaggagaacgagatgagagaagaacaagtagccatagccagaactgacttccctcccaacttcgtctttgggtagtccacttctgcttatcaggtatatctcattctcaagattctcattctcagcatgatctgttgttattcattcatatggttaatggatctggaaactaatatatatatatatatatatatatatatacaaataggttgaaggtgccagcaatgaaggtggtagaggtccaagtatctgggatgcattttcacacactccaggtatttttgattactaattaatttcattactcaaattaagtcaatttcttctttttgattattgttgttgtgtattgtataaatttgattaggtaaaattcttgatggaagtaatggggacattgcagttgaccaatatcataagtacaaggtcactccattcaccacactctcaattactcatccatgattttcttcactcactcacttgtatgattgattgtatatatacaggaagatgttgagctgatttcccagctgggatttcaagcttatcgattttcaatttcgtggtctcgaattttcccagatggtttggggactaaggtcaatgaagagggaattgcttattacaacaatctcattaatgctcttcttgacaaaggtatgattctctcttcataacttggattgtattctgttccattctttatagttgttaatacatttttgtttgttggttataataaatataggaatccagccttatgtaactttgtatcattgggatcttcccttgcatcttcaagagacaatgtctgggtggctcaacaaggatatagcgttagtactaactaactaactaactaatctatcattattcttgtctgccaagtgcttgattaatttagctatgttattcttttccaatgtttgggcttggaaacactgcagaaaatactttgccatatatgcagagacttgctttaaaaattttggtgatagagtcaagaattggtttacactcaatgaaccccttcaaactgctgtaaacggtcattgtctcggaatatttgctccaggaagatctgaaaatgcaaccacagaaccttacttggcttcacatcatcaactcttggcccatgctgctgcttattctgtataccaaagcaagttcaaagtatgctcaacaagccacttttagtctcttgagttgactcccttggcaatattagcttagctttgttgaatattcgaatatgaatgctatagcagaccagcagggaatggaaacttgaaaagtagatatttttaatagctgtttaatcttgttttcaggagaaacaaggagggaaagtgggtttggtggtagattgtgaatggtcagaacctaattcagataagattgaagatcaaacagctgcagcaaggcgccttgatttccagattggatggtactttcccaaaatcacaacattatttgtttagccaattattgttaattcattgctttataatctacaaagaaatcctaacatagagattttaatatccttagcatgtgtgcaattgagtcaattagcataaacataaacagttaagtctttgtaaggtcaatattaacaataatagataacttaaagaagtgttatgtataacacaatctcatttggttacctttttatatcaatatgtatatacttgagaatctaatgcctgcactgcacaggtacctgcacccaatctattatgga

SEQ ID NO: 191554 - DNA, 3532 bp, Cannabis indica
tcatcaatggtggttggtgatgaagttgacatgatttcaaatcttcccgatgcattgataattcaaattcgtgtcgtttctcccaactgaagatgtgtttcgaacatgcattctttcgaaacgttggaaactcatctggtattcagtccccacactctttttctcctctgatgatacaatttatgatgttgagaaattctatagttttgtggagaattattttgaacacagggagaaaggtattgatagtaatattgttgatttaggtataactagttttgagctttacatatacaattattattgtagaagtaagggtgagattctagataaattgttaagttttgcagttaagaataaggttaaggaaatgtatgtatttataggcaaagagattgttgaagaaggtggtgactactcagatcactactactgcttgcctaagatactagacaatgcaagatttttgactattttggagttgtatggagtaaagttggatactagttcttgttcatttagttttccatctttaaaaactttatcattggaacaagtttatcatttagaggatgcaaaagaggatggggtagttaaatttttgttgggttgtccttctcttgagaaattggggttatatgattattgtttctatggaatgaatgttcagttacaaagtttaagccttaagttcatggagcttatgtttgttgacattgatgatatagaagtacaaattgaagttgaagctataaatcttgaatctttggtagttgatggtattcccttgaaccgtataaatttctcttcttgcaagaaaatcagagatttatcattgcctagttctagagataatagtccactgtcatcatttgaagctctcatttcaaatattcctctagttgagaatttggctttgagttgtaattcatcaaagtcagagcaccttaaaatctcgagtcaacatttgaaatgtttcgattttgagaatcgttgttactcgtataatggtggtgagatgaaggttgttacaattgaatctgctccaaaattagcatatattagttatcaaggaaatcttaattttaaggtatcaatggagtcatctagtttggtaaatggaaaaattataattcttgatgcacggatagactatgacacaaaatggtttatcgatttgctgaatttttttgttaatctcagttactcttggaatactgtgacattgaaagtctgcaattatgaggtatgttggttacttgtattgtgtatttcttttatgtaattttgtggtgttatttcaacttcatattgttgttactctctttatatgttttcataaatctgtatatgcagtccctcatctggccagaaaacttgccaaaaaatttgaagaacttgtttcgttatcccttggttagttggaagcatcttgaagtttttactaattatgatcccgagaaagagtcagacttgaaagaagccttaatgtggatttctccctctttagaaacattatctattaacgaaaaggtcatattttagttgctttacaatattataacccctgattattgggatgactgcattttattagctttctttgctaattgtactctttgatccttttttttagattccatttactttattagtagctttgtaataaagaatttactacttttagtatatatgttcttgtgaactactcaatattttgttctatttattaatgttggaagatttggtttaatacatgttgttgcaatttgtacaaatcaacaaacttggcatcacaacaacatatgaccttttctgtatttgaacttcaaacttcatgagagcaataatcctaaaattgctctgattatacatgtttggctaaatgcttgagcaactgttcttctatggctggctgcatagtttggttcagagatgtgtttgatgatattcaatgattttaattgagctgacaaggtctatacatatttgaatgacagcttcagccttcaggaaacatgtataggtacaggttattggttgaaaatgtttgatctatgtcaagttcaaatgtattctggtacgatcgagaactacttgttatggtacaatcttttcctgttactttcggttcctctgtttgaccttgcaccattagggcacttcctgtctcttgggctgaaaaagaaccactgcctatctccagtattcaccattgacatgcctgcatatcaattgaattcttacaaattctaacaaacaaacaatacaaactgcctatctttcattagattttataacttgaaagtgcctgattctcagtacacttgtgtgactattgcattagatttaacattgttcttggaacattgcattaagtaaagcttacatagttttacttctaatcttgaatttgtatgtaaatgtatatgtgtggaaagcagagagaaatgtaaatattagtgcatccacccttgaagttgtggctcttactttggtgattgttacactggttttatacattctctccctcatttctctgcattttgatcatgtttagaagaatttctctctaggattgaactatgtaggataagataaggggtaattttgagtagcttgactattattatgttcttcaaattagagtattcagcattttaagcaaaataaaaaactgttgattttgtatgcttttaaaactataatccaaactggtcaattatggtgtgaaattcatctaaccacaacaaacttgatacaaaaacattcttgtggttttctccgggcatcatctgtaattgttgtactaatttttctgcatttcgagagaaatttccctgttggattgaacttacatcttgtttgtgctgcataatggtctttcaacagaaatttaccatcatctatagatgtttttttgctgcattgtgagaagttcattgctcagcttgtgtcaggaaatgaagctaaaaaattatgatggaggacaggaaatatggctgtctggttggaaagaaataaaagagagtttgaaggggtagaagatatggtgagatatcggttagctaatatgacttttcactatgaaagaaagagaacagagatttggctttgtttgaattatgtagagaatggcaagtcttcctgtactttgttaatattgttctctgttttcttggtaggagttaggatgtttgtacaccttattctgtttgtactattaaataataagttgtggtactttgtttcatttaaaaaacaaaaattagcaattgctcttatctagctttagcttatacaaactttaatatcagttgaaaaggtaatgactatctatacatttgaaagtgttcttaagaaatagggtctattatctataaattgttttttttttgattaagtattatctataaattgttgtgatataaatatgagcatttgtttggaaatgtcaaaatgattttgggagatgggagattaactatttatgtgtacacttttgcatatgacatatttatattggtacacc

SEQ ID NO: 191555 - DNA, 1955 bp, Cannabis indica
aaaaaaaaaaaaactaatgactatctgaccctaacaaaaaaatctcatggaacctcattaatcttatctcaaattttaataagaagtgacattatataattgttagcgatattttttaaaaattattaattaaattatatggtatctaatacttaattgtactaacatcgatataataataaaaaaaaaagtgctagagtaatattagcatttctctatatttataggttaattagtgggaccttctctttatacaaatgcaccacaaaaaagagcatttaattagtgcagtgatggatgagaataaagtgtaggttatatagcaaaagttagggtattgcgccaattatttctttatatacatgcttgagcaatatctattatctactccaaaaaaaagctccaattatatattttcctttgccaaaaccatcatcattattccaatatatgatatcccccgtgtagaacaaaaggaaaaggaaaaccaataattaaattataaatatcttacaaaatatatacatatatgacagatatatatattaatttgaaagttatgtatagatatataaatattggttttagtaattattatgattaaagttactattttctttcacggcaattcatgtatattttgttatcattttcaaataaatttctgatgatagattatgaagctctcatttttgggttatattgttaaaactaaaagtaattaaaataaaatgaaaatttgtgttgggtttaattaattaatcatattataatttactttaatgagatattgacaagtgtttttaatttagacaattaagtcagtcaggtcatcagagataaattttttatatatatttattggttaagaaaaagagaggtagcttttgtatcatgtaggtggagcaataatttacgtattatataattattaataataaagagaaaatcaattaaagtgaaacttagtgagtgagtgagttagtgaatgaattaagaatgagtaattattataattggtatggtggtgatcatgctttgagtagagggaacaaacataaagcaattaaaagccatatatatatatatagcaccttacatatatatagatattattatacctaacaatataaataaataacttggaaaagaaaaaaagaaaaataaataaaataaaataacacatgacactaaacaactactactccttataactaagtatgataaggtctcctctttaggtggcatcaaaatatactctaaatttagctttaatgcccagaaatgcacgaattcagggatattctcttcttatatatatattcattttatatatctcactctatacatataaatcattaaatccataataatatatatatactatactttaatattcaacttttttttttttatagtgccacgccattattatttatatatagttatatatatatatacagacagagtagtacttgtaatattattgtatacttatttgatcagtactctagctttaattatttccataagaagacgcgtgggttagtaaatctttaggtttagattttataattaatttactcattctaatgcatgtttgtataaatatatattaaaatataacaaaaattagtaatattgtataacatgcatagaatataagtttttacttcgatggagcaaagtttatagaagttaactaagattatatatatactttttcttcacttatgtgtagataaattattatattcatatatatatatggaagctcgtatcgggattattaataacgatccattagtgagaaatatatatatataaatatatatatctttcaatcaatgtacgtttttctttgaacaatttttttaacaaaattaatttacgtattatatatagtttgcatggtttccaaccaagtgtaaaatcaatcgtacaaaagtttatat

SEQ ID NO: 191556 - DNA, 1207 bp, Cannabis indica
aaaaaaaaaagaaaagaaaaacttacccaagctgatcaatagcaatgactttgaaacgactagcaagagcatcaaaattcctgaagaaaaagccttgagaagcaccatatccatgcaccattacaagagttggagaatcacttttactatcaaacgaaacagtgttaataaaccttggctcattgctggaagaacgaaaccacctaattttcgaacccggcggacctgaaccaatattcacctgttcttgaacataaggagtcctgccaattgaatcaattccgccatatccaaacaattagaaaggccccatcgcaagtaaacagagaatttaatggaaaaccagtcaattcaataaaaattgttagggttttcggaaaggaattaaggaaattacttgactatagaaagaagacgcttttcagaagcgatgatgtgatcggtggaggtgggaatccatcgaagtacagagggccaaaaggatctggactttgacatagacggtgtagaagtagtagaggcggtggcggatttagtgatctcgtcggccattattctggagcagcgaaggcgaagcgggttcatacgatgaataacttgatgactacgaaaacttaactgaattatctaagaaggtctttaatggcggcaatgtctccatatttatttcttttctttttccaaactagtcttcttcttcttcttcttttctattttttttaatgatttatataaaagaattaaaaaaaaaaaactaatattggttgaaaatatattaaagtcaaaatacatatgtagtccaatatcacctaatgaataagaataaatttagtattgtttttaactaatttatatgtgtggtgtttcactctctaaaatctcaactagtttattattatctagggtgttattactaattttattttaaattttttaaattacaaaaataaattttgtaaattttatatttatttttatttgttgattttatttaagtcgagtctagagctcgagactcgaggttaaatccaaggcctaaggttgagtctggggcctagggtcggggtcggggcgagtttgcgtccgcgttcgaggttgggcaagtgtccaggttggggtttggggtccaagtcgagggttcaggtcgagattgggtctaggtcagggtctgaattaaggtccgagtctaggttccaaggtctaggtt

SEQ ID NO: 191557 - DNA, 1629 bp, Cannabis indica
aaaaaaaaatgttgatggagtctaaggagtctcttgctcaattgggatcttatcttggtgggttaatgttcctttgggcaatatttcaacaatttttccctaatcaacttagaaattaccttgagaaatactcacaaagattggctagtcatctttacccttatatacaaatcagattcaatgagctgactggggaacgtcttatgagaagtgaggcttactctgccattgaaaattacttaagcacaaactcatcactccatgcaaagaggctgaaggctgatgtagtgaagagcaacaaccaatcacttgttctaagcatggatgatcatgaagaggttgttgatgaatttaaaggagtaaagctttggtgggcttcaggtaaaaacaattctaaaactcaaacagtttctttctaccaagtttctgatgagagaagatactacattctcactttccataaaaggcatagagaacttattgttggggcttaccttaatcatgttcttaaagaaggtaaagctattaaagtgaggaataggcaaagaaagctttatacaaaccatggttcttattggagtcatgttgtgtttcaacaccctgcaacttttcaaacacttgctttagagcaagagaagaagcaagatatcattgatgatttgattgcttttagtcaagcagaggagttttatgcaagaattggtagagcttggaaaaggggttatttgctatatggtcctccaggaactgggaaatcaaccatgatttctgctatggctaatttgttaaactatgacatctatgaccttgagttgactgctgttagagacaacactgaccttagaaggcttctgattgagacatcaagtaagtctattattgtgattgaagacattgattgttcactagagttaactggacagagaaagaagaagaagaaggagaaaaaggaagatgatcaagatggaaaagaacacaaggagaaaaaagaagagaaagaagataaaaacagccaggtgactctttctggtcttttgaatttcattgatgggatttggtcagcttgtggtggtgaaaggatcatagttttcactactaattatgtagaaaaacttgaccctgctctaatcagaaagggaagaatggacaagcatattgaattgtcttactgtggttttgaagcttttaaagttttggctaaaaactatctttgtattgaagaccaccctttgttttcaacaattggtaaattgttgggtgaagccaaaataacacctgctgaggttgctgagcatttgatgcctaagaaaattgtttctgggcaagctgaaatctctctcaagagtctgattcaaggtcttgaaaaagccaaacaggatgagaaactcaaagctgaggaagaagaagccaaaaagaaggctttggatgacaaaaatgaagataagcatcaagaatcaaaatgtgacttaaagagtaatggttactagtaaaggagtcattctcaatttggattattattattattattatgtacaattcactaattcagtttagttggtattacccaactaaacttgttttacaattagaagtattaataaaatttctcttttctttagtttttttttt

SEQ ID NO: 191558 - DNA, 1518 bp, Cannabis indica
tttttttttttttttgattgaacacacaatgtggaactttgagagggctgtttctttttgtccaaaggagaaacttcagtggatccatccttgcaatcaatactatcatataaatcaacaagtggaagcaattgcttgtaatctatgtaagaaatgtgttctaaatcatacgaacggatttgtaatctagtaatctatgatttgaatattctggggctttgtcaagaaaaaaaaaatgaaaatatcggtgttagttactatcatatatatgccaccacatacattcctcaaagagctttaaagatcatatcagctgaatatgcgatcacgttctcaaaagtatgtaacaatatacctataacaattttaataattaatataaattaaaagaggggacagcaaataaatcacttaaaaagtgaatggaattgtccaatggttgaattactgactgctctcaaaattcaccgtcgaacgttttaagggtagggaaaaaagataatacccattttatacattttaggccaacctgtcatgatggtttaccccaggagcaaaatcatgccgctgcttcccctccattgcatttgggggtgggcttcctgctttcctcttgcggcttccagacttaggtgactggtaaccagattcatccggtaatgatagctcgccctcttccacattgttcatatccgttgctgatgcctgtcccttgctctgatgatgctcgtctttcacaaactcttgatatttagcatgctgtgagtcctcatgttcgggcctatttgagggcttagaccaactctgtctccgctcttgcttacttttatcatttccagaagccagttcaatgccatcttccagttccctctcaatgagatcatcatcatccatcaaatctgtttttcgagttacatcaccaactgacttccttcgtttctccattatagcttttaccctatctttgtcaacttttatatcttgcggtgaccggccaagtgtgcttggtctattttctgaatttcggccatgatgtttgtccttcaattctctagcttctctggtttcactccttccaacattattttgttgatcttcttcaccggttccttctgacccaagccttaatatagtttggccttcacccaccgcctggtgtgacaaatgcttgggttcagaacgatgattatctctgaattcactatcaactttgtgatctgaaccactctttgtttctatgattccatagtcattactccgactctcagtcgttctagggggtccactatgattgtcagcatgagacaactcggatgctggcctagataacacaggctttgagacaccaggtcttgtacttccggcctgagaatgattgttgttagtcaaatgctcttcattgctcgttgtagctttgacaggggctctatgagtaacaccacttgcagcacttccttcaacatcactagaaggtggcacccgattttgttcgtatagttccaacatttgattgctaac

SEQ ID NO: 191559 - DNA, 2332 bp, Cannabis indica
gctatctctattactctccacaacacattcggccaatgggtcatcgacataacctcctcttgctagatctctcaacttggccagcagtcaagccacgacctttctccatcttgttagcgagcccttcttctttaggctcgttataacaagcacaacataagttttagatctttcctcagctcttaatgaaagcacaaaaatatttaccaagatttttggaaatcgattatttagagcttaagaaagaagtaaaataattgatagtagacacatggttttatatggttcaggcgttaattatacttagtccatgagtccattttattagccttgtaggtaagtattgcatattacaaatgtatacagtttggacatgcactctctattcctcttgtccctttctaaagaagaagaatccaataggaaattttagtagaggttttgtaggttgaagaagttcttcccttgttcatgaaatatatttgtatttataggaggtttcttgatacacactagcttaagtgtaatatccacaggcgacttggaggacaacaacaactgtggtgacggggaaaaagtgtaaacatgcagagagggtgagacttgatatattccttagacatgtaggcctttaaggaggattgtgttattgtccttatttttgaaaataaatgagttggatgaaattcaacgtaggcattattatcaagacaaaattgagaaacacttaataatttttcggacggagagcgtgaatgataaaattgacataattttagaataggaagagtagaagaaggtagatatgtagaacccacatgtgagacaaaagacaacttaccattgcccattgtaatgtgatttaaaccctaatactgagttggagactctaaaaggttgaagtcgggagtgaaatggtgagatgcgcctgagtctatataccaagctgggttagtaaccacattgaatgaaaagggatgggtaacaggggaggattggtttttgggcctttgttgggtgaagtaggcattaaactgacaagagggtgggggagatggttgaaactgaaggttagcccgatgatagcacgaaggggttgtgtgacctactttgaagaaaatttggcatttgggcaggtgtgagttttgatgatgagtagatggaagccacagagaaggggatcgaggtggttgagggttgggtgggtgagggtgttgttgagaggatcgagaggatgggcgagttgtattagggtaatgttgttggggattggtataaggtgggttgggagatcgagaagaaaatgaaggggctggagatgggggttttgggagttgtttgggaaagggtaagttggaaaaataggcttgaagggagctaatggaggcgactgctatttgtcttctaggtgagcttcatagctcaaaagaagagcatgaacttcctcaaaagtttgcataacaggacatgctaagattatagtaacaaaagcattatacttcaaaactaaacaatttagtaagtataccaagtgttcttgatctgagattggttctcctacagaggcaagagtgttgtagagtgacttgagtttttcaaggtaagcaaaagcagtgagaccttccttttttaggctctacaatgtcatggaaaagtcaaaactctgagcaaaagaagcagcggagtaggtgtgttccaaagaaacccagatgttgatggcggtggagaagctcacaatttatccaagcattaagtctaagagagaggcgtagagtcgactcatgaggagccaattgtatctgtgccatgctgcaaaatcaggattgacttgggttggtttcaaatcgatgaactaaggatggcaaagtatcgttctgtctatgtacacttcaagtccattcgcaatgatgatactttgcctttgcatcctccaaacaaggtatttggtatcatcatgttttactgagattgtttgattgagagatggaatatttgaggctaagagaatagatgaagaagatgaaatagcaggggtattgagaatgttaggggcggttgtatgagaagggttaacttgatttttatcagtagggtttatagtagggtgttgtgtgttttggtcctccattggtggtggggtagaccctctactcactacagatatcatgggagtcgttagggctctgataccatgttagaaggaaagcaataaaattataattattttgcctcaagggctcgtttggtacaccttattgtattatattatgttggattttattgtattgtattagtactattaaatgcaatactatgtttggtattgacttgt

SEQ ID NO: 191560 - DNA, 3036 bp, Cannabis indica
tatatatatatatgtatataattctatagatgaatcaagaaagactgcccacttaacttcacttgatggagctaaggaaaggcttcaactgttcaaagcaaacttacttgaagaaggttcatttgagtcttgtcttgaaggttgtgagggagtgtttcacactgcatcgcctttttatcatgatattaaggatccacaggttctttgacaatcactactaatatttgtgtgtttatttattttagtctttagaatgattaacatctctaatagcccaagtaactcatctaagtgttttttttcaatctcatattgtaaagtgatatgcttttcatatttattttttcaaaccaatctttttgatcggtgtaatgtttagtgtcgtctcttaagatcccatattgaccaagtatgagactggtttgtagtatataattacttggacactctcctctcttagggctagctatcgagagtgagttttacctaattagtagtgtcaagtggtattagagctatacaccctcaagtgtgactgacgtctcagaaagagcgaagtgtggattaggcccagagcaggccaatagagtagcgttgtggacgtcggctccaaaggggggtgctttgttaggatcctacattgaccaagtatgagattggtttagtataaagctacttttcttaggctagttttcgagagtgagttctacccaattaattgtgtcaagtggtattagagccataaaccctcgactggcatctcagaaagagcgaagtgtggattaggcctagagtaggctaccctagagtggcggttgggctccaaaggggtttatattgttaggatcccacattgacttgaattggttagtagtatataactactcgggcatactcttttcttaggctagcttttgagagtgagttctacccaaagtgtctataaaactattttgagtatcattttataaagtaactaaaaaatgtttcaaacattatgttaatcttagaataaaaaccagctctaataaccaagtaactcatctaagtataagataagttattagtttgctgcaccgttttatatctggttccttttttttttcaggcagaactacttgatcctgcaattaagggaacactcaatgttcttaactcggttgcaaagttcccgtctattaagcgagtggttttgacatcttccatcgcagcagttgcatacaacggaaaaccaagaacccctgatgttgtagtggatgaaacctggttttcggatccaaatatttgtaaggaatctcaggtacgcatgttagtttcgttcttcatgttcttctagtctatttgttgggaacaggaattggaataggaccgaaattaattattaaaatttagtatacaaaataatagaaaaattaaattcgagttgattcatttccactccatttcttgtttggattgttaatttggttggttacttttgtgtcttttcgggtctagttatggtatgtgctttcgaagacattggctgaggatgctgcatggaagtttgttcatgagaaagggattgacatggttacaatcaatccagccatggtgattggtcctctgttacagccaacactaaacacaagtgctgctgcaattttgaacttaattaatggtatgtttatactgaaatatcttattcatttcccgttcaaactttgagggtgtgtttgaaaattactgtgtaattactaagtcgtgtaataattaggatagtaattacatatgcattctgtcgtctgataaattaattagttattacacgaaaatatattagtagttacatatgcattctgtcgtctgataaattaattagttattacacgaaaatatattagtaattacatggttagaaaaaatatgtgaaattgtgtagttaccttaattacacctaaatcgaattttatcatgaattttcaaacataccctgactttcgaaacacaactttgtatcgaacttgttattcgtttttctatgtttttctttttatatttcttaatccaatccaatattatttttcaaatatggcatttctttccatattgaaatttcttatgagtgagacattgttgctcttcacttgtttggttaatacaggagcacaagcatataacaatttgagccttggatgggtgaatgtgaaagatgtagccaatgcccatattcaagctttcgaaatcccttcagctaatggaagatattgtttggttgagagagttgcccactatgccgaagttgtcaaaatgttacgcgagctctacccaagccttgaacttcccgaaaagtaagttcactgagcttcttctgagtacctacataacaattattatggttttattttatagtcctcgacgaggaaagagcctaactttgaaattggattggattggatttggcaggtgtgcagatgagaaacctttagttccgatataccaggtttcgaaggagaaagcgaagagcttgggtattgaatacattccattagagactagtttgaaggagactgtggagagcttgaaggagaagaagtttgttagtttctaagtcatattctatagtacaagtgttgtattgaagccctttaaatgacttgttcttaataaaataggggcatttggcttgaggaactagaaggaaatgaaaaaaaatggcatttttactttttcttttccctctttataataaaaaaaggtagtcatgttttttaactagttgagcaccattaaatatcaaaaaatggtactgtgccaaacactataaaatagcgatatattgttgttgttggtgtaatttattatcaggttccacacaatttaattaaataaataatattagaaatcgttagtcacttataacacactacatcgatattttaaggtgcataatagcaattctcttaaatatattataaataataaagcttttatgggtgcttgtatagttcaaattcccggtttttttttttacttttatttatattatttaataaa

SEQ ID NO: 191561 - DNA, 742 bp, Cannabis indica
ctggcttggcctctcatgtgtcagcctttaatcactcactagaattttgtggagagtggtggtggtggtggtgtgtgtgtgaattggcaccatattgctaaagcaatcaaagcttgaacacgttgataagttgtttatcttaacgttttgtttcaatcaaatacagatcaatagagtgttgtttactactcaacactcaactctaatattcacttcttaaaggaatcacttttctaaaccaactaataaatatctaccacaccacattgtttatgacatgtgtcttcttcttttcctcttaacaaaattgctacaatttatttatttttcctaaaaatttaaaaaaaaaaaaaaaaactacatatttatatacatctaaatatagatttagttgctactattgagttcggaaccctaaataaattattttcaacgataagttaaaggaaggtgaaaatgacgtgaagtcagcctccacttatgccctaaggcacatatttcttacaaaaggtcgttgtcatttatttcaatatcagatttagttatgagcataaataaattaaacttggccttaagtcagggactctctgaaaattctctttttaaaaatacatatgttttattaattttaaaaatattatatttttttctagataagtaacgagattttgttatggctcaataaagatcaacaaacataaaatcaataattatataatatgtaagaaaatttatataattt

SEQ ID NO: 191562 - DNA, 948 bp, Cannabis indica
aaaataaaattaacaaaacttagacaatatgactctaaaaattaagagtttttttgcgggtaaaccctctcaactatcattctacttgcacccttgaagtttaaattttgacggtaaaaccctccaaactactgaattgcttataaatttaaagtgtcatttattttttacagttaattgtcaatatagtctacttatgtgtacacttaatttgtacacatgtcaaatttatattggtacacctaatattattattttgaaaatattaaattattttaaaattcatatttttttataattttatttaattttaaaataaattttgaaaataatttttaaataataatattaggtgtaccaatataaaggtaccagtacaagagtgtacacataagcagtccatagtgacacatgacaccttaaatttgctactagttcaataatttgaagggttttaccactaaaatttgagcttggaaaattaaatacaattatacaaagtgaaataattttgccgcaaaaaactcaaaatttaaatgatcattattctttctaaagtatttttccacaaaaagtagtaattgagaacacataacatgcatatatattgcttgaagatattagctaataattaaaatctgtcaagtaaaagagttgttattaatttgctttcatatatacatgacttggagtcttttttcttctttctgtaattattcacttgcaaatacatagtatattacattatataaacatagatttatatgatattacgctttgaatcactcacgatcaaaacaaagacagagaacgaaccatgaaaattggctgcatgcagaaatagtccaagttatttacgaaacgaaacctctctctctttagtcctcattgtatatttatctataaaatccagaattaaagttaagggggcgtattataatttttttt

SEQ ID NO: 191563 - DNA, 3778 bp, Cannabis indica
aacaaataaaaatgattagttgattttttttcttcactttttctagatatattcccaaatttatgtaagaaaaaaaaatgcaataactatcagtgttacacacacaactgtgtcacatgcataaactcaattacaataaatgagtatgctgtagagatctgaataaataacattattttattttatttgatgaaaaataacattattctattgaaacaaaaaatccgaaaagaaaaatagcaaatgtttttgccttaatttaaaggcaagttgggtcatgaggggtcaattacttaaaaacagatctacataaaaggactttatttacctacattttgatttggaccacaccacccacccccaaatcctagttggcaagatctgaaatatgtattgagacatttcaccacaggtcaaatgaagctctaccaccgctccattttgtgggccatagttaaattgtattcaaagaatgttacccaataaaaatagacaagtcagcattttccatctacctaaaaaagacattgaaaacacttagagcgagtcagacgtaaccatggttttctccacccctcgtcctcttactatatatatctcataaaaattgtatctttcaattcctctctcacatctttctgtcgttgaagaaggtctcccactcacattcacacaggtttctactcttttcttagatctgagttctgattattgtcttttcgtttattcttcaatgttgtgttcttacatgaatgaatatttttgtctcttgaatcttaaaattgtagatctttatataattttcagttacaactcaaaagcgagtaaacccagattttacattatatgatacaatcgaatttcgtgtttttttggatctggttttaatatgacgatgcaacccagatcttgaaattttattttgggcttctgggcaaatttgagatctgacatttttggtcaattttgatgtaatgtgcagattatagatatggatacctttttgtttacttccgaatctgttaacgagggacatccagacaagctctgtgaccaggtctcagatgccatcctcgatgcttgcctggagcaagacccagagagcaaggtggcttgtgaaacctgtaccaaaacgaacatggttatggtgtttggtgagatcaccaccaaggctactgttgactacgagaagatagttcgtgacacctgcagagaaattggtttcacctccccagatgttggacttgatgctgataactgcaaggtccttgttaacatcgagcaacagagcccagacattgcgcagggagtccatggtcaccttaccaagaagcccgaggagattggagctggtgaccaaggccacatgttcggttatgcaactgatgagaccccagagctcatgccactcactcatgtcctggcaacaaagcttggtgctaagctcactgaggtgaggaagaacaagacttgtgcctggttgaggccagatggtaagacccaagtgactgttgagtacaagaacgacaatggtgccatggtccctctcagagtccacaccgtcctcatctcaactcagcacgatgagactgtgacaaatgaacagatcgccattgatctgaaagaacatgtcattaagcctgttatcccagctcagtatatggatgagaacaccatctttcacctcaatccttcaggccgatttgtcattggtggaccacatggagatgcaggccttactggccgtaagatcattattgacacctatggtggttggggtgctcatggcggaggtgctttctcagggaaggacccaaccaaggtggacagaagtggtgcttacattgtaaggcaggcggcaaagagtgtcgtggcttcagggcttgcccgccgttgcatcgtgcaggtttcttatgcaattggtgtgccagagccactgtcagtctttgttgatacctacaagacaggaacgattccagacagagatatattggctctcatcaaggagagtttcgacttcaggcctgggatgatgtccattaaccttgacttgaagagaggaggcaactacaggttccagaagactgctgcttatggtcattttggccgtgatgatcccgatttcacttgggagacagtgaagatcctcaagccaaaggcttaaattagagggttgtcaaggtcgaagtggttattatcgtagccatggtttggcttgagagtgaagaataaagaaaacttcaatgcatacttctattgctaaagctcaacaagtaaatgagtgagaatggcaatacgagatgtgtgcatttgagtttagctgattagaaggtggtagcaaattgttcgagtcttgtctcattttgtaattctttttgaagatttttttttaccccaatttttccattctgcaagtgattgttcgagaaaactatgctgattcattaatgcgaattctatataatatcaattgatttacaactattaattgttttctcatttaacagtgcaagtgtacttatgttacaagtgcaaatagttcattaatatcaagagggcatgttagttttgcggcttttgttcacccaaaagggtcaaaatgaaaaaaaggaagtaaacgaattcaaagctgactatttctcattgacagaatttaattaaaaaagacaaagaaagtcatgaactgaggatgccatttataggtgaatatgaatacaattttgattacataagtttgatacaaataatgtaatcaagaatggagccataaccgatcatgaaggcgttcttctccagcaccaaacatctcatctactctttcaccgtctctataaaaatgaaaggtaggtgtatacctaatatgcagagtagtttctgggcattcatcaatgtctgcgtagataaatgaaagctttggaaaattgttactcagcttacaaaatgatgggagaatctggctgcaaacaccacacctgaaaacccaataaaaataagatatgtaaattaaaatcttctggaagtcactgaaattacaacactatttagttcaaataaatttttcatcgaacactttgcgtgcataacaataaaatacaattaccaaaaaaaaaaaaactagaatgggggacttaccaagatgcaccataattgatgaccgcctgtaaataggaaaacaattataaaaaaaaaaaagaaaagaaaaaacttacacaaaaatgagaatcaaaagaaagaagtgaaggaagatctcacaggagtttttgatgtcttgatatctgtaagaatatgcttcaagttttgatcagttgaagcactcttcaagttgccgtaacgatttttcggcaaatccaaaccagttccttcaagtcccttcttttgtttcccttccgccatagcttttctcagaggtggagaaggaaaggaaggaatggatactaataactctttcctatctaggcacctctctcaaacttgggaaaagacaaattgcaccattacaatattttattgtttttatcattaattctcctttcttcttatttgctactatttctttattttgtaagagtaatttgcagtgtgaacacttatgtcacgtttactaaagcgtaatcgttatcggaataaactcatgtttactaataagtaatgggaatcaggtaatcattcccttatatttgtttacttgcattattaaaattaggaaagggagaagttgattaaataagggagaaaagaaagggagaacttctcccaccaattttataaggaatgccat

SEQ ID NO: 191564 - DNA, 1808 bp, Cannabis indica
aaaaagtacactttttaagctgttgtgaacaaaacttttgtatagttttcaaagggatcacacatgaaacatttacagaaatgaaaaaaggaacacttaaagaagtgattttagctagctagcaatttcaattgcggcggaggcggatgatggaagggattcgagggcgcatttgccaacggcgatgtgagctcggtgctctttcaccatcaccccaaagagcatatacttcttcgccgtgcacagcatcatcaccgatctccaaatcctcttcactcatcctcagattaactactcgactaatcaagaggcaaattaatgaggtaattactacattccaaactgttatgaaaactgctccttccaactggtaccccaactgtttaaaccatcctcctggttttccatttgagacagcaaatctcacactcgaaccgtacatcatttccagaagattggtttgagcaaagacaccggaaagcagacctcccaataggccagcaaccgcgtgtgtatggaagacccctaaagtgtcatccacactttggaaaatcactgattttttatgcaaaaccatcattgtataccatggtattgaaccagacaatattcccattattccagctgcccatggatctacaatccctgttcagtccaccatagatgatcattaaaatcggaaagagttgttattacatggaatttttgttagttataagaaacatacctgcaccaggggtgatacagaccaggccagtgatcatgccctgaacagccccaatcacagagcttttcttgtagactatcatgtccatggaaacccagaccaggaggctggttgcagtacatatatgggtgttgagaatggctattgatgctatcatgttagctgcaaatggtgaaccaccattgaagcctgcccaccctagccatagaaaccctgcacctcccaacatgtgaattatgttgtttggggaaagtgtctcctatcgtctgacaatctaggacccacctataaatgcgatcttcattaataattatcatctaaaaataaatggttatcgattttttcactatagttataaactaaaatatgtgtgacatgatattgaacattacgttaataacaataccatacaatttaggtagagtaaggtatcatttgtaaatctactatactaggaatatcaaattatcaatgaatctgtttgttgtaattgcttaatttactcttttgttggttcaaaatctttttttactaattggaattaaataattagtagatttgttaccaaaatctatttagttctaaatattcttgaaactctccctttaaaattcggttgtaagactcatcaagagactctttatactttttcttttcattttatattgtgtcactttaacttgcacccattaacatttctttaatctaaaacaccaaacaaattatcctctctataacactagattacactactatctatgaaatgtgacaaaccttgtttcataacaagttgataagctattagataagataaatatgagagtacaaaaattgaacatagtaaaataataaattgaaagatttcgttaaaattggatgtttaaatttttttcgaaaagttaattataggttcctttctttattggaacaatgcagtctataacacttattactaaataaatttgttgaaaagataaaatataatcaatgtatattttttttatcaaagactaaatcgatcatcagaagaataattatgttaaaatttaagatacattatggtaaaatataactttcatga

SEQ ID NO: 191565 - DNA, 549 bp, Cannabis indica
agacagcaacggatcagcctttatgtgggcttgtaagtcaggaatcgaaaccgtatttggcacagaaagagcttgtaaactactgccatcttgcacacgggaaagcgcatcagccgctttgttttccagctctgggcgatactgtatctcaaaatcataccccaacagtttagtgagccatcgttggtgctcctccgccaccaaacgttgttcgaggaggtacttgagactttgttggtcggtgcggaccacaaatttgcgccccagaaggtatggacgccatttttgaatagccaacacgatcgccatcaactctctttcatagactgatttggcttgggctcatggggataaagcttggctgaaataggcgatcggtcgttgatgttgcatgaggacagcccctaaaccaacccccgaagcgtccgtttcaaccacaaaagtggtagagaagtctggcaaggctaacactggtacggaacacattgcttccttcaactgattgaaagcttgttcagcctcggcagtccatccgaaagcatctttctt

SEQ ID NO: 191566 - DNA, 1414 bp, Cannabis indica
tatttcatgatatacagattccatttaaagctcctgatagattccgtggagaattagacactacatacttggatgaagagttacggtaagtaaaacatccttgaaagtcacaaatacatataacatatatcaacctcaaaataaatagacactcctaatgtgctttggcgaaaataaaatgaaataaaacaaagaattatatatgataaagaaaacagcctttgggtcatcaatgatcctttattattccaaccaatattgaaattatttgcttaatattgaaatagtaattatgatatgagagtttggctaaatcgtttaaacttgagacatctcattcctttgtttagtatgagcattttaatgtctaagacccttgacaaaaatagaagaaaacacataataatgtcaaagcaagagaatttaagatattgatagccaagagtaatcttgctaattacaataatttattatatattttgatttactcagtagtaatttataatctataattatacatcagaaatgtttttggaatgaagtaaaggaataagaaaaagagaaatgtttacatttaggcagtttagtaatcagacttaacttaagaattacatcttatcaaattccttacttcagtcagttcttcaattgcaataatccccatttgtgtttctgctgtaaggttgagtggcctaaaaggacaacaaatttctttactaacattacgttttgatttctttttgtctcattcaatattagtgaaagtgctaaattctttctactagagtggctgaacatgcattgttcattaacatgtcctcaaacttagttttgacagaaaattagtagaacttgaaaagatgctattttcgtttgattcatatgctgcaaaggatttctctttatctacatagattttctgatatagaccgtatgcaaatgataataaacaccaactcatgaaggtgatatgtctgtttcattggcagtgtgtctagaggtgatttgggaaacttgttcatcttgaaaatgattgacccgtcgtaccgggttcctgtctgaatggttctcaactagctgtctttctgataggcataaaagggttatatgggtaattgtaatggggtattggtaatgtgtgagtaggaaagggaaaagggtgtgaatgaatttgtaattgagcagtagctctttgaattgggagagtactgggtctctcgattacccagatatcaatacaatatagttctctgtttttcctatttctatccatgttcttgctgttcttagctatttgatagaaaattcctctcactttcacattgcctcccatcaaatgccttaatagctttaatatatgaacttgaattctgaaacttgaatgttttctcgaagaatctccaaccaacttgtt

SEQ ID NO: 191567 - DNA, 1915 bp, Cannabis indica
ttactttatacacattataatcactgatcttcacataaagtcaaatcaataccttctcaagagcaaccgaggccacgaaatcgtgaacctcctttgacttagcaatgattcgatccgccaatttgagaatctcagacgccgataaattaacacgaaaactggagccaggaagatctgaaattgaagaaagagatgtacataagagcatttttctcagactaaaaaagaaaaatagttcagggagaagaagacaaacctttcttctttttcctttgcttatgagagttgaaagcggcaataccgagattgactgctagagcaaggagagcagctcctccagtgaaagcgagtaagtttctatctcgcttgtgtttggacattttctcatcgtttctttgagtttccgacattttctttctatcttgccaaacagaaaatgcgagggaattttgttgttaaaggcggaaaaatagaagtgggttgattcaagttggagtatttatatggtggaccaaaatttattggtttttatttttatttaaattattaataattaaagatatttgacaaagtgagctgtcattagtaccgtcgtcgacttagctcaatcttcacagattgcttaaattctggcccaatcgccggattggcctcctaaatatccattttaatagataatttataaccttttttaaaggataaataaatattgtgttttgcaacatttatccattacaatctttgttttgctaattgataaaattgacattatattttctaaaataataaaaataagacataaatttaattttttacaactttttttaatatgaccaatttgaaaatgactcctcaaacgaataaatacagaaaatataaacagttttgtcataacacttttagatcggattattattaaattttattttgacaaaaacttagttcatgatccaattagtaatttttgcaaaacacggggtctaaaatagtatttatcattttttttaaaaaataaaaggaaattaattttatatattattttttaattttttttttacagtttaggttgctatgttggttttttttgtgagttattatgtgaatttggattgtgatttaggttgttttgttagttattttatggatttctagacattgatatatgttttagcatctacgagggctttttagtttaatttttttcatattattttacaatcatgtatgttattgttattttggaccatctgtaaaattttataaaattgcagatagtttatagtgtttaaaataaagttcaaatgtataaaaaaaaaaaataattacgcatgcaataaaatatttaaactttaatttcagcactgtaaattattctattttttttttaaaatttacaagtagtcttaagtaagtacaacgtacacgatcataagaacaaatacactaaaaagtattcttgaatgacagaacaaatagagagtactaaaatactcacttaagaggtgtactatatagattttcctcgataattttaagaatttgtattattctttaaatccctaatcaagattcgatttgttaattagtcaaaaataacaacaagcatgttatgttcattggcctatacaaagacacatattcttctcatttcagatgggaaatttgactttatatggatattgtaggttaaaactaggggtgtacgtcagtcgatttggtcaatttacgttataatttattcaacccaatgtaaagatcggattgcaaaattctaagtgcaacccgcttaattaacaaaaaaaattcaacccgtccaataaaaataggtcggtttggtcaggttaacccgcccaaacaaagcactaatatttttcttcacattcaattgttagattttaattaattgtgataataa

SEQ ID NO: 191568 - DNA, 1689 bp, Cannabis indica
tcttaattgcagatattcttcttgatgatttcttcattgctaatttaaacaattactattttatttgtcaacagttaaaaactacacttgtttattaacattttagaagattttcaatgccaaataatacttccttcattagttaatttcagaaggtagatccataaatgcatttggataatatagcttggtctcttcaattgatcatctgataaaattaacaagttaagtcaagaatacaaatacttgtattgagtaccctttttctcataatttcagataatcagtgttttattagctcttgagaattctaaagctttaagattgtaagatgtaaaagaaaaaggagagaaaattcatgtagcagaaaacaaatatggatctgcaatttcttctcaaataatcacttgcactaacatagtgcacaaatatataatgtaacatttaatagatgaatgcctcttaacttaaacaaacactacttaggagccccttttttacctcaccatgtagagttcttttagtacaaactctcagtgaaagataaagttgaaagagcagtaagtaaatgtatggaagggaattggaatcggagtatcgaacctctatcttcgtctgttactgatcaattcctgcttcttttggggttttggtagtcatctgatcaacagcatgaactgtgttttgaagctcttcccatatggctttgtacaccattctctgtctattcactgctgattgtccctcgaaggctgaagacaccacatcgatactgcgcatcacagaatagagcaaacagaatatatgaaccaaatttcgagcaactactcagaccgaataggaacttaaaccactccacctaaaaagaaaacctattaaaggagaaatgtttaatttaacttaaggtaaattaagttcctccatgcttccgtatcgacatccacggtactcaaaaggcactaaaggttgtcacttatgggctgatctccacaagtcattgcaaaaacaaaagtaaagagtattttcaagcgacccgggtagctcaaatggttggcctgaggttttagttcctcttggctactaacatagtaattgatatagtttgttttcattcccattgttaacaaagtaaatcaagacaaaatccaagataagtcaccctaaaacttaacaagtgttttcaacttactaaagtactactaacaaatcccaactgccttaactgtctttgacagttaagttggttggtgttatttctgttgcttgaaaagaattgcccaacaagcttaatagcctatttatagtccaccacttcaataagctcctcaactaagtaattattcaagagagcaaaaaaaggaagagaaagctggttctgtgaattcttgagagagttagtacagacagaaagattagggttctgggttttgtattgagtttacatgtatggatgtaactcagggttgagagtgtgttcaatagagtgaaacacttgtgagatgagtttgtgccattcccattcaactgcagctgcattgtactctgattcaacatcaacaaagatacttagagttccaaagctggagtgggtgtaagttcacactgaaattgcctttgaacaaggataaattccttgtgttttatctcttattctgcttgctttaattttccaaatttttacataataga

SEQ ID NO: 191569 - DNA, 1264 bp, Cannabis indica
attggattcttgtgagtgaagggatggaggtgggaaacactctcaattgttaccaaaagagatggttggtggtggtcgaccttatttgttatttggtattaaccacaaaagtgaatttgaataagggattagctataaagtacttaaaattagaatctatttaaccctaattagcctagcttaattaggtgttcgaaacttgacatataatatagatttctaataagtgggttgattattagaatctaagcattgagttaacatgtgttatttttttagtaacctatatagctatagctaatatatacagaggcttcattctatccatgttgccctagctaataataataataataataataataataataataataataataataataataatataataaaaatcaatcaaatttaattaaaaatcaatcaaatttaattatatttaatatacattaaaaccatcttatatttatttatacataataaataataatatttaaatttcttttatacttgtttattaattttggatcttagtacaccttcttaaatacttcataaaaataactcttagaacttatgtgtagcttagtttttatgtgctttttttttataattttttttagttaaaatataaaatcaagtgtaattcacaaatcgaatttttaagtctaattaatttagatttgatgatgttttttcaagttcaattactattaaattgaataggtttaataaaaataaattggattaaatgcctacctttaattgctattaatataatttaatattatttttcactcatttttctttaataaaaattataaaaaactgctacccatttatatagactcatatgtattaagccctaatatgcaatgcttaattatatattgttatgccacttggcagatagtgaacgaaagcatgggtatataataagttgccttcattataaaactctgcacattaaataattgtgtatatctctacttaattctatgctctcataacataaatatcatctatgcatgtatacatatactatgcttagtactaggttataaatggcttattattatcatatcaagattcaagaccacctatgattaattataaatatgcatacattcacatgaagcttgttgtatataattttttagtttggttttcattagtgcttaaggattactttgtggccggtcaagtggctagctatagctactccatcattttgactaaaacatagatatgtttattt

SEQ ID NO: 191570 - DNA, 1743 bp, Cannabis indica
aataaataaataagaaatcaatcaataaataagagacatcaaaattagacaaataatgtgtacacatatatttttatgtggctcgggcttttgatgaaacactaatccacaaatttacttttacaacaataatagagtacgcacttctatcaaaattttgaatagatgattttttacgtagtttgagtagatgaaataattaatgaatattagaatagatgatttttacgtagtttgaatattaatgaagcttagtttacaagtcacagtattaataatagtatttatcactaagaattttttgaccgattctcttttctatatattattagggtatttatatgctcattatgatggtaaaaggttactatattgtcttgtttgtatgaattatatttggcaaaatttctcaaatctgatattaaggaatgattgtctactttcataatgtattccacatatttctttaatataatttataagttaataagaatttctgttcctctcaaactttaacatcatgcccttaaatttttttaggttattaaaaatattttccaaattattaagattgttggattcaataattttttgtctaattttactaagaaaagtctgatataaataaaaaattaggagtataatttagtacatattaaatctaataatcttaataacttggaaaaaatttataacagtttgaaaaaaatgcaaaacttaaattttacaataactatacatggtcaaacataagataattaattggatgataattaaattagttattttacaataactatataagataattaaattggatgattatttgatccttgaaaagcacatttgagtaaaaattacttgtatatggtcaaacatgatctattatgtatgattaaggattcaatcaagagtactaaaatatctaatatttttggtcattttaaaattttattatttcacttaataattgtgcaaagaaaaaaattatcgacttaattaggtcttggctcattgtcatcaacctaatcttggactgaagtcacacactgtatttggtccaatctaatgatacaaagtcaaataagtaatgcatttttatattgcattagtaccatttttattattatttttttaacattaatcttagaagtttacgtattttcctaagccataaaaaaatagtacatcaatattacatatttctaagggtacatcattctactcaattagtggtattgtataatagttattaaattatattatgtagaatttaatatttaattatacaaataacaatataacatttctgcatagtattaattaaatactattggtgtccattaaaaaaataaaaaaaataattaataccttttaacatttcatatcatcataaaatttagtattctgtgaatagttaataattttatataacaatgattaattcaaaatatatgaaatttaatacttaattacgattaaatattaatcattataacatctatagtataagttacaaggtaaaattatagtacatttaggaatattttagtaaactcctatcaattttagcattgtagagaattttttaatttaactttttttataatcacataaattgtatttatttaaaatcacttataaatttttaaaaaattttaaataatttaaatttaaaaaataaagtgtactatagaaattttcctaagttatatatcactataatttttagcattttttttt

SEQ ID NO: 191571 - DNA, 1148 bp, Cannabis indica
ccaaaggttaatgtcaggtttagcttgaacattaaatatggcacaatgacatgaagtagaacagggagaacaatctgttttattaattgtggaatcattacaagaagttgcagctggaataccagctggtttattacaagtaaaggcagtaaaagattcctgagaggcactaggttgagatgtggctagattacattgaagctctacatttggaggagtaaagtgactttgaggaagcacgtatagaccattcttaactctccctttgagcaagactgtccccgtaagtttgtccttaacaaaacaacatttggaatgaaattccaagaagacattattatcttcggttagtttaagaacactaacaagatttttagtaatgtcaggaacttttaaaacagagtttaagattaaaggtttggaagaactagacaaagagtgagtgccaatatgagagatgggaagtctcttaccatttccaacagctagggattcagaacctgagtaaggatgttcacaatcaaggtgttccatgcctaacgcaacatgattggtggccccggtatccgcataccaatcaagatcaatgttgggatcgggaaggctagaggtgagataggcgtgaggatcatcagtgttatcaacctcagacaagaaggcacgggagtcaccaatctttggggtcacaaaagctttatcaaaacggtaatgacaaaccgcagccgtgtgtccaatcttgtggcacacttgacaaaccagtcttgaattggggaaattgcctctgccaaacgttttccctaatggtctgttgggaaaactttgggtattaccacggcctgggttcggagagaacctgctttggttgaatcttgaagaggaagttgtaagatttgcagtgatattgggggtgcgatcctcagtattgaagtggcgttccaatcggctttcatgagtaagaagaagtgactgaacagattcaattgatagaacatccacaaggctcgtgacatggacgacgacggggtcaaactcaggtcccaatccattcaagagatgcattatgaggtcagtttcctccattggatggccagcagtagctaaagagtcagcaagaactttaacttatcatagtaatcagggattgagta

SEQ ID NO: 191572 - DNA, 2255 bp, Cannabis indica
atcatcacaacaatagcttctccaacccttttatcgctacaattaattcctctgcagcttgctagctacagtaacttagtcgataatgatcttgattaggtacgaacgatcgagagggttattaagaaagttactatccaacactcttcttaattaatgatattaattaataattttgaaagtaatgctaccgtacctcacacgtgtcactagctagtacatgtgtatatcataatcaatcattattatgataatattatatatatatatatgtgcatctttttatgtataaataatatttaatatgttaataataatcataattatgatgattagctacatatatagctaggtacaagtataataaataactttgtaataataataaggatcaattaagtacgtgtaatttttctacaatttatattatcatttaccatattttgtcaattcttcaattttatttaatgatcaatatttattaattaataattttatattatggattttcattgcccaaaaaatcatataaacctctatgtatgtatgtatgtacgtagtaccagtgagtttattacgtaatactggccgatcaggtcccacatttctaattaaaatcatatattgaactttcatacgtggaaagttgattcgtgatcctagtgggacactgggacatcatacaatgctcaaaatggacggtatatgattgattatcttacctacattactatacctagctctaatttgaggggttctttagtggtggtcgcatcttatcaagattataatagtttctttctttcatgatcactagtaaaagcggtaaagttccagttgttttattaatttgtctatgagattttgataatttgtctcttgacttgtgaaaaggggaaaaaaaaaactgagtaattggttctacatattgtctaaagagtaactttaattttatttggtattcttggcaaaataccaatacttttgttttaggaatacatcatcgtgttattatgtataagaaaaatgttaatgggtacttaagtattaaaagttattgcatactcttattaatatattttaatattgaatttataatatatttcattttaataaattacataagaaactactaattaaggtgacatatatattgatatagtgcgcttaatataccgaataataatgctcatcatcaaaaaagtttcattagaaaattgctctatatacatgagtctcgaagtagagattcacttagtctccttattgaaaattaatttataactgagtttcttcttatattttttggtgtaagtttcttcttttaaatcaatttatgtaaattatatgatttagtatcgttgatatcgaatattgatacaattagaagaatgctaattacaatctcttattataattttttagtcgattttcgtatcgaaaatcacatgacagaatatttttttgaatagcattattggtatagtttctaatattcaattttaccattgttcaaaaaacttcaaatctacttttaacactataaattgtttgaagtgtttgaaaaatatacaaaaatagtattgtaactagcgaattttactattttttttttgaaaaaataatatttcaatatatatttttcagcttggaaattgattgagaagttgagattgtaataggtggttgacggaaaaaaaaaaatgaaatctaagtagcctgtatcaagtatcaattatcaatgatgataatatgagtgattagcaatatatatacatatagtactacagcttagcatgggtgaaaatatgaaagaaaataatatttatatataattagtaaatatatgtataagagctgtcctttcaagccggatacaatgggtcatgcacccacgttttgttggtcgagtagtcattttcgacagagtttcatttcgaaacgtacgtagggtcccattatgcactctcttcttccatgcaacaattatcatgtcacgctcgaccatcgatcctcccattcttatatgttgcgaaatattctacctagatataattatttctttatttatttttaatcaatttacttacttatttgtatgtgtatacatacacagtacatttaatggccttagacttatagacttttctcataaataatataacttttgattagaaaatttccatcaagaataaactctaaaaaaactttttatttaaaaaaataaatatatgtattctatataaagtgattga

SEQ ID NO: 191573 - DNA, 1822 bp, Cannabis indica
tgtacagaaattgattgaagatgagatggaaaaggtcaaaggatttgcaaaagactccattgttccatttagagaaaggcttaagatcatggctggagttgttaatcctgaggatcttcagttaagttctaccgaaaggaagcttataaacgcttacaatgaaaaacccgtcctttcgcgtcctcagcacaacttttacaaggtaaattcttttcttttttactttgttctcttgttacttagctaaagagtagagcaacaagagtctatatcgccaacgtccccacccaagacaacaaaatcctttaacaaaaatgttccaaatttattttcatatttttattattatttattatttattattatttattaaataatgtaactacattaaattttttggctcaaaatctctaattattttgagacgcgcctagttagggccgtctcaaagtaggacagcggttattgcccaaggcccctcatcccaagaggcctcatacattgtttgagattgtgagttttattggttgtttcatattgcagggtcctaattactttgagattgatctagacattcaccgattcagctacattgctaggaaaggacttgaatcttttagagaacgtttgaagaatggaatacttgatttgggtttaactattcaggtaacttaactttcttctatacacacaaacaaacaaacaaattaactctatattagtacattacatgaagagttatgttttttacttattgtgaaacaggcacagaaaccagaagaattgcctgagaaagtgctgtgttgtgtgagattgagtaagattgattttgttgatcaaggccaaataccaactttagtgacccttgatgatgatgatgatgatgatcatgaatgaaattgagttgattgggcaagcttttttctacttctttttcacattcaatttcttcctaaccaccattctattttatgtaaatcacaaacaaacaaaataataaaaaaaaaatctcttttttttatatataaacttacataagttgtgatattgatatcttgttgtctttgtacccacttatattacatggtgtcttaaatgttggcatgaaaaatttggagcaaaatttctgaaatataatttcatttttaatttaaaatttttgagtttggatgaacaatgcatttgttattgttgttgctataataaaaaggtcattaattttgtaacttagggaataaagtatgataaaatttgaatagataattaaacccgagaaatgagaatgaagatcatttcattttttttttaatttatatattttagaaaaatttagagtgaataataattaagggttttacattaaaagtaatagttttgaaacttcatataacttgaaaaatgtagattgtaaaaaatgaatctttatttgtgagtggttatctggaatataaaagaaaatttttataatttatatgtatatattgcagaaataatatatatatttctttaaattgactagttagataaattgattttgtatattttatttatttatttatgctctaaattgatttttatatatatagaaataattccagttttttaaaaataacatctttctcaaagtctatctctatcacaaaatacattttagaccttagtttacactaaaaatgtcaaaaaataaatagaaactgaaatgttaatttaaaaaatgattggcaacttgtaatatatatataaggtaattgatgaattttggccttaaataacaaaagtgtcccacattgtatatggcttgaaattttgttatgaaagatga

SEQ ID NO: 191574 - DNA, 2685 bp, Cannabis indica
taaaacttataattaatttttcattataattaccactcttcaatatgacttcaatactcgctatagagccttacaaaaaaaaaagaaaagtaaaacccttaatagaagcacatgaaacgcaggtgctatatcagtagagcgttatatatagccctaatttccttcaacttcgtacagtcaacaatttcccgcctatctcacttccatttcccgctacgaaaaccctaaacactgagcagaaacatgggccagaagaagcaaccggccgccgctgcactcagtgatcctaagaaacgacgtcgtgttggcttcttcgctattggtaagtaagacccagggccagctccggcttatttatttcattttcttcaatattcaaattactttcttgtggaaatttgaggagtcgttattatttcttctcccatttctgtggtcactggtttcagttccaatttccaagttcatttttttttgtgggctttgttgtagatgctggaattgaagcaaaagactgcatcaaaatatacttgggtacgaagcttttgttggtcttctcattcgtatttttggatgagtgtgcttaatttatctaattagtaactctcttgcaggatatttttttctttccacttttttagttatttattagctgttcttacaatttgtgtgttctgcaattttgaagaagctgctcaacattcacagttattatatgcatttatcacctagtttatttttaatttactttggttgtaatttgtgagatttatttggtctcgtgtcttatttttggtggcaatacttgatagtctctagcaaagaggaagtggatgcttcaagtagcttttgtattgatccagtcgacttagatagcttttttggagaagatgggaagatatatggttacgaaggtttaaaggtaatagatagttttttgaattttagttcgatgctgactttcttattcttaattttcttgtttattgtttggttttcagatcaacatttgggttagcagtatatcttttcatgcatatgccgatattacatttgaaagcaaatctgatgtaagttcagacatcaatcttgtatatactactgcctactcctctcgctgtatcttctgtatgtgcaccagttcagtgccccccgcccctttttttttttcagttacaatattctctaattgattgctgttgttaatttttcttagggaggtaaaggtatcactgacttgaaaacagatcttcaggtatgtaatatgtatttgatctttgttttaaaccataacatcagtttcttatgtccatggatcttattatttgttatctatgttcaacagaatatttttgctgccactcttgttgagagtaaagaggagttccttcaaaccttttctactcaaagaaattttattaggtatctcatcattgtagttacacatcaaatttaaaccgaaagctttctctgaacctcatgacctctaactcttttctcactgaaccttggtatttgtttttgtgatcttcttgcagatccattgtgtctggtgggcaggtattgcagcaaaagacatctaacgggcatgttgccagttctgacagtaattcagttgccgcctctaatgttgaggtgctttgaacacttatttatgattttatagtattcatagttatgtacgtacatggtacatatatgtaatagaacttctaagaatgttttgtaagttaatcgttaactgattttctgttcatagctgtaattaagtgtgtattgcatctcatgcactctcctcccattcaggttgtccgaatggtcattggtgatacagaagctggacctctctatggtcaattgattcctcttgttttcctactagtggatggtatactttagtctcaacaatgttcttgatctttgcaaaaataattaacgcaatgtttttaaccaatactatatttgactaggtagcagtccaattgacgttactgatccatgttgggagttgtacctcctgattgaaaagaaagttgatcatcagggtgaagaacatagtttgttgcttggttttgcggctgcatatcgtttttaccactatcctggtagttctcgtttgcggattagtcaggtttgtgtatttcatgtcattacactatttaagctatgatgccttaactaaagcattttaaaatgcgcaagtatagatgtttctacatctttcggtattttttttttaatgaggcttgcataaatggcagattatggtattgccgccttatcagcacaaaggctatggccgatacctacttgaggtgctgtatggtgtggcagtctctgaagacgtctttgatctgacgattgaagaacctttggattacttgcaacatgtgcggacatgtattgatgtacaacgcctgcttacttttgaaccaattcagcaagcagttaatgaagctgcttcccatctaaagcaaggaaaactatcaaagaaaacccagatcccgcgcctcatgccaccccgatctgccattgaggatgttcagaaaagtttaaaaaaaaaaaacagtttttgcaatgttgggaggttttgatctatcttggccttagtcctgttgacaagtacatggatgattttgtggcgataatttcgaatcgtgtaagggaggatatacttggaaaaga

SEQ ID NO: 191575 - DNA, 3152 bp, Cannabis indica
ttaaaaaaaattacaaagaaatgtactatgaactcaatgagtttcattcatcaacaagttgaaaggagaccaagtgtggttatatgtagcaaaattcacttagtccctaaactacttcttaatttcggttagtgtccaatcaaaagtaaaaatatatgtatatatattatatacacacacaaacaaaaccccatatcactttttaattgttagttttgttaggtagaaagtgaagaagttgttgttgttgttgtaggctttttcttatgtcggtttttggatcgcttcttcttcaatgtcccggtgcaaccattttcgagccgtctcttgacattgccgccattgctaagagaatcaccgagttcagagactttagcggttttgttgtgcctaacaatgttggtgacaactgcgtatacagtttcttcactttgcggtgttaagatttctcttctcactataaccgcattttgtccacaacacgattcttggattgcagtctctttcagctcttcaaatatggcgtctttgtcgagattaaaacaatcgattggaacctgcaaaacccgaaaattattttaccattttgtgtgtgtcaattaagctaagaaaaagaaaataactgtttaactgttttttgtttttctttctaaccgtaaagtcaataggaatgttcatttcgatgtatggacagccacagccttcgctgaaattcagcttcaaaactaattcaaacgattttgttgaaacggttctcctgcaacatgtcaaatatgcaaaaaatcacgagaagataacgacggtttcagatagtacaaaaaaggcgttatgtaacttctttaacaacgaactcgctatgcaaaggaatgggacacgaaatacaacattcgcagcatttataacattcccgaatttgtacatttgtaacacctattttacaaaatttattactatcaatgaaaattcgctattatgtcgcattaggataccatatttcgatgctcgaaaacaaacaacatgtgcgagcgaggaaaaggaaactatcaccgttaccttttcagctgaaacggttctttttccaagatagcgcctttatagtcctccctgtctaagaaagaaacctaggatacaaaaaccgaaaaagaatagactcaaaaaggagttagttattgaaaaacgaaagacgacacaaaacaaagatgatttcccaattggccccttgcctccattagtattcaaaatcagaacttgagagtggtattgtaagtcaaagtccttgaagtgaaaaaagtcaacttttctaaagagtttactttgttttttcatgaaaacaaacaccatgaaagacaacacaaaacaaagatgatttcccaattggccccttgcctccattagtattcaaaatcagaacttgagagaggtattataagtcaaagtccttgaagtgaaaaaagtcaacttttctaaagagattactttgttttttcatgaaaacaaacaccatgaaaggatttaacaatgagtttcttaaaaaagtaatttcacctcaacagatttgacgaacggcaatggagctttatgtccgtgtacacttgatactcgaagggtccaattcacatattttttatctgcaaatacaaggaaatgaaccatttgagaagtgaaaataaaaagaaagctacactaagttgcaaatgaattcggaaaattttatatatttgttcgttcgttcccaatgtggaatattgaacaatcaactaatcgaagaggggtagctcaaatggttagacatgtggtttactatcatcaggcctgatgtacgagtcgagttttcgagagcatatgtgtctatacaaagctgagagtttacctagactcaaggcttgtgttataatggtttgaaaaagatcaaccctgacaaacggaggaatctgccgattgagtgaaatcatggcacccgaaactacctgtcatataaatttaaaaaacaagaatgattcaaagcatgtcaaagaagaattcggaacaaactaaacagttcaaattaagaattttaattttcccaccttatctacgagtccatgaatcaccaaacttgctttcttgtctttaggagttttctgtaaaaagaaacaaagactaaagatatttccttttactcgaatggactaaagaaagacataagcgtatgcacctgaagattaacaattacgatctttcccccaccacgaagcgattttaaaggtaggttgcacgctggagtgatctgcaggctgtatataatattatcgatcagccaaccaagttaccaaatgtcgggacaggtgtaacaaagacttcattagctaaacgggtaactctgcaattacctcgtccccaaacataagacaacatcagccatcctacaatgcttctcggaaagattcatctcttttgtgggcaatgcatcctgcacattacagagttagaacaaagaatttcttgtcaaaatgcccgaaaactcagtgagtaataatcaatcaaaattttaaattagctaaatatttatacctcccagtcaagcactgtatccttaagttttgcaccacattgtttaacagcacagcgtctggaagtctccttcaatccaatagtttccacctcgaaatcccgcaaatacctttaatggtttatacacgattatcttagcgttttgaaaataactaaaaacattctaaatacactttatcaaagaaaaggttccgagttagacttactcggctccacaagaaggacaggtttccatgaaagagttaccatgcagctcagcaagtttctctcttggtattcccgatcgaaggtggaggccatcgacattctaacaatgaccacataaaaaggaataagaacatagttaggcagaattcttttctaagcctataagctatcagaagcaagcttacttggctgatgacgaatttcagaattcccgctctttccaattccaccaatgccatgtgtgtcaaactaggcattgctcgatgaaatgggagtgatgcttcgggcaaggcttttccttcacgctataaatcagcaattattcaaagaaatagtagaatacattgaattcagaatttttaggattatgttgactattagacatcattagacat

SEQ ID NO: 191576 - DNA, 2315 bp, Cannabis indica
caggaaggccttgattttttttcaagttggcctcgattccccagaagctaatgatgaagcccaggaattttcctgaggaaaccccgcacgtgcacgtgcatatccaggaaggctttctccaaatcattactatgttccccagaatatttgtacttgaccaacatatcgtccacatatacttccttgttcttccccaagacatatttgaacattttattaaccagcctttggtaagttgctctgatattcttttgtataaatgaaattacaacgtagtaatagacccctttatcagtttggaaacttttatgctcttggtccgctacatgcactattgatctgattatagccggagtatgcatcaataaagcttaagaattcattttcggacgtggcgtcaaccatttgatcaattcgcagaagtgggaagtagtctttcaaacatgatttgttaagatctgtaaaatctattcacattctccaagtgtcattggtcttttagagtagcatcgggttggccaaccacatgagttataatgcttcttgaagaaactcaatggaagttagtttctcaacttttacctttactgcatccaaccttaccggatctagcgacctttttttcgtaaactggcatcgccttctcatcgatgtttagggtgtgacaatggtgttcatattgattccagtcatatccgaatggatccacaccaatttgtctcgatttttctttaccatagacacaattttttctctcaccactaggtataaatttcttcccacgttgatgactttggtggggtttatctcgttgatgctaacttcttcaacatcttccactagttcaatcactatttttatccgaactcggggatataactcatcttcaacctcctcttggatagttcctgcttctggctggttggttgtttcaagagaaacttcaatttcttctctgaccatgaataccgatcagatagagacattataataactctttgcgcttctctgatcacctcagactagtcacacacttccattttcacatggaaatttcatgcataactgccagatggaggtgagtgctctgaaatcaactaagatagggcatcctagtattaagttatatgcaaaagggcagtacactaccacaaacatgcaatgtttgaaggcattgacattgtgctcccccttcaaggtgactaggagttagattctccccatcgacatcagggaatcttcattaaacctttgtagttgtatcgggcaaggtgatagatcaacttcagttagtcccataacttggaaagcaaacttgaacaaaatgttgatggagctgccattgtctactagcacccttaagactcttttgtttgcaattttcactttaataaataaagggtcatcgtggggaaagtgcacatgcttaacgtcttcttctatcaaagtgacgagaaggttcatcattcttagacggtgggccatcgattgcactagagcgcatatctccccttcatgtttcagctcattcaaatatctttttttgggaattacgagtgttcctagcaaggtgtggccccctgaagatggttggaatgtggccatctatgggcgacagagctagacctggtgaataagggttccctggtcccagagctaggactgccactgtagcttgtgttagtagagtaggtaaagccagaatctatgttttgggagcttgagggggtatttgtggctcctactgttgggaacgaggccctcttcatgaactataccctgtttgggataaatgatgagaattcgtacccactagctaaggtgtcgcgctctggctaatatttttatctcgtctttcaaataatcacattcattggtgttatgactgatatcaccatgatattcacacttcttactcgggtcccttgtttattttcctcgttggaacattcgtggagtcttctaataatagaccacattacaagttgctttgtaaacattctcctgagtatcgatcaagctagtgtactctatatacttgggttcatactccttccttcatatctttggagctttgctctggttctggcttttcctcctcttttatttctcgaatgactcacatttgattctgaaacctttgtctttttcgttgattgtccgggaatgatattacatctagtctatgctgctccaaaccctgagaaattagtatatgcaggcgtatgtctagagacaacgggtctatagactgctggacttgcgaacaaggttaagagtgatagtcaggacagaaacttgcaaagtgtaagtgg

SEQ ID NO: 191577 - DNA, 2194 bp, Cannabis indica
aataatttagatttatttttcaattacgtccatataaataataaataaagagctacaaatatggaaacatatacaattaaatatatgtacataaatgatttttaaatctcaatctacgtctaaaacatagggtatgggcaactcgtttgcaaatcgcagccactcaaaatgtctcactttttgaattaatgtaccattctcaattcacaaagggaaaaaagtacatggaatttgtaatagtttgcaatgaaagtggcacagctgagctggttttttcttttcttttagtttttttaaaaatcaaatacaaaatcagatgaaagttgcgacaaagtggcctaccaatttaaattttaagtttaatttatattttccctctccatacaatatttgattaaacaagtgtatcaataaaacattcacattgggttattaaacattcattacttaaaaaaaacatgattgaaataaaaaaaaaaatacgagttgaatgttagaagaacttagaagagcgtattaaatatgtgattttatatatgtttgtcacgtagaagaaattattaaattgttcacaatatatatatatattttcttaattaaacaattaaaagtaacatcattttatggagaagcaattaatatttctttaatctttttttttctctgaatggagaagcaatacattttcaatctcatatattgtataatagttataatataagaagaacgaaacatctaaatattatatacacattttatgttttaattattagaaggttcattcaagcatatttaaatagatttatacgtcgtgtgcattccatttagattaagaatatatatgtgtaatcatgcttttaatatatatctcattattcatgttactactttatcatcattatattctactaccagtctaccacaatgactagaagtcttacctaaagagtttgaactttcattctaatatattgataccaaaaaattagattgacaaaaaaaatatggaattaaagacgaatactgggaaaggttattattgttcattagaattggtcccctcagatggcttattaaatgttataaattagaatggtcccattggagggattttatcattgaactaaacaaagaccaaatatttggtcagacatatactttgtttttacacaaaagattcatcgagaaatggaggacatgtttcaagttctatatcagcacaaattaaaaataatatattaaagtataaaataaaaatataaattaataagcaaacatgctgtctgtaaagccaaatccacataccaaatacccttaattagccagcttaaaagattttggtcttcctctattttgggagttctctaacttttggaggaggcaaaattccaacatctggcctctcattattagctttttctctcctcaacaccaaaaaacaagaagataatgatacttaaattaaaattaaaataaaataaaatagatttaatgatattactaattaatattatattaatatcaatattattataatgtgttttgtaaccaaggcttgggaacaagagaaggatgtacactctggctccatttaattgtttgcctaaatgccctcctttttagctttatgctactacttgtttgatggaaagtttattaattttcttatggagtttaattgattaaattgaatctttgatcggcaaagcttttggtccaactcttcagattgaccaataactcttcttctttcttttcttttctttcttcaacaaaattaaattaaaaaaaaaagagagaaggaaaataaaaggaccaacataataatcatgtggggaataattatatcttaaatatattacacttaaatacggacatatctataagaaaacttccgtacaatatataacacaatctttatggtgttttaatgctaattaatttaactatatataatagttcttttgtctttcatatggaaacaagaaactcattcaatgaaaacatgcatggctccatacctttatccttaattcataaaaaccaattaaactatctaatattcatactctatttatcttagttatatttctccttttacaattacatattgagtaataagtacaaaaaaaaaatttaaattagttttaataaatatgtaacctagatcgatcagtagatttcatgaaccatt

SEQ ID NO: 191578 - DNA, 4874 bp, Cannabis indica
gtcaagtatacaactgacttttgaagaaaggtttttgagcgtgttaagagtgaatcagggcatcaaaaactagaatttactctgtctacccctagggatattcttgtcatccttcccctttaattatgagttttatattgtcttttatcatcaccttgatttgattaatgtagacatacttacatatgaattggtttttgctatggcagaccaaggaggaatgtgaatatctaatcaatcttgccaagccgaacatgaaaaaatcgactgttgttgatagtgaaactggaaagagcagagatagcaggtctgtgtttcttacggcaattcctttttcttttgctttccctttttgatccccttaggcctccagatatgtttgattaacatctcatttatgcagggtacgaacaagctctggcactttcctggccagaggacgtgataaaactattaggactattgagaaaagaattgctgatttcacctttatccccgtaggtatgccatcaatcatctttgcttctttttttgttctctcatcatatactctgctcttattatcctatcttaggtttgtaatacaagttaccatttgttatttaaccaataacattatctgcagaacatggggaaggacttcaaattctacactatgaagttggacagaaatacgagcctcactatgactactttcttgatgattttaacactgtaaatggaggtcagcgtatggccacacttcttatgtacctgtaagtgactaatgttttttcccactacttgaatctgattgtatagtctatgacatacattgcgtagttttgtaccttctctgatgttcctcttctgatgtgttgcagcacagatgtcgaagaagggggtgaaacagtgttccctgctgcaaaagggaattttagttctgtaccttggtggaacgaactatctgattgtggaaaaaagggactttctgttaaacctaagatgggtgatgcattgcttttctggagtatgaagcctgatgccacgctagatccatccagtttacatggttagtatttttatattttactttgtttgaaaaataatcaaagcatcttgaaatcctagtaatgacttcaccattgaaagaaatggaagttccctaagtgtgcattgcatgaaaaaaaaaaatattgtcatttggaaaaagattacttgatttggatttatatatttactaacggtgtattgtttctcttgatcgattcaggtggatgccccgtaattaagggaaataagtggtcaagtactaaatggatgcgtgtcagcgaatacaaagcttgaaccagtaaaaaggtaatattccagacttatagagaacacataccagtgcatgtatcttttgagtcttcagtcatgaggaaaagaaaaatcagataattcagctgttttggtggtccgtagtacattttcttagtcttcattgtgagtggagttattgtatggttattacttatagacttaccttattggtcgattgcagtttcacgtatttagattcgtttggagtgaaccctttgtatttgtaacataacttgttcagatttattgttctgtattgataaggctaagtttcctaaagtgctcccttgattatttctggcaggtgtatacaagtggccatctgttactttatcaaagtctcgagccaatagccacattgccattcagcttcatattcttatttatttgtaggctagcacgcaccttgtccttgaagcttcatatattagaattcagtgtatactgttttgctctgctaactttaattttttgtttccagtttctttttcttcatattgttacaaccacaaaccctttacaaaaataaaatttgatacacatcttttgcgcgattcctagatttttcacaatgagagaaataatagagaacttgttacttttcgttacatcacgaagatatatgagttaactttcgttagatgagtttattaactgtttgcgtaatattttcatttcaattaattatttgtcactttcttctgtttctaaatgtttggcctttctaatcaaaaagcaagtttcacatgaaattggttcttaacgagattgtggtgttgaaatgttgcagcaactatttgaggcagcaacatcaagccccccaaaataccatgggttacactttaaggagacctttaatgcacagaccccttttgttggaaaggggttattatactttcgaaaaaatagatgacaaaaaaagcatcatcaaaccaaaacttgaaactgttatgattgataggaatgtgacttaatactgaaaattctgcaccaatgatataaatcatatcactcaaaacttcacatcatagtatagtttcccttgtatttattcctttctccttgccagagcatctaagctcctttatttgaaaataattggggtcggcaataaaacttgcaacaacatgagccgaggaagattttgaaaggtgcagaactcctcaagctgagcgccaagtcacttatagctgattcaatgttttgtgttgatcaaattcctgatcacatatgggagaatgcccccgtgatcaaagtaagcaagttcaacctacaccaggaagaccgggatgtttatttagagaaataaaatgaggaaatctaaagcatcaactagatcttcaacaggatttacacagatttgtaagagcacaatacctcggtatcgaaacgtagtgtacatgtgaacgacttgccattgtccgtcacaactgtcacatcttgaccaggtttaatttcactaacactggctggaagatcaatgctgtatcgttcgtgaccagttaatccaagtgtatctgcatcttctcctgccttgaagcatagagggatcacacccatgccaaccagattgcttctgtgaattctctcaaagctctttgctatgactgctttcacaccctgagaaagaaaaaaaaaatagaagtatagaaccgttaaatcgattgcaaaagccaccgaccatatatgcatggaaccttttaagtttaaaatataccagtagcataggacccttagcagcccaatcccgggaacttccacttccatactcagcaccagctaaaacaatcgtgtcacgtccttcactcttgtacctctgtagtaattaaacagaagtatttaacataagaacttgaaaacaacacgaccaaagcctatatctagaaaatatatatatatactagccacataaagacaccctacaaggccttgctttatgatttagaaaagacacttgtgacaaacatatatcccaaagataataaaaggcaactagttccttggtgatattcttacttctacataagaatttcaacacctcagaagtattttagagggcctaaccttcctatcatacagaatactactggagaaataagaggaaattaccatggcagcatcaaacacagaaagtttctccccagtgggaatgtgaacagttttaggaccaacttctcctttcaaaaacttgttgaccaggcgaatatttgcaaaagtgcctcttgccattatttcatcattaccacgtcgacttccataagagttgaagtctcttctatcaaccccgcgttcaagaaggtattttgctgcggggctgtccttgtgaatgctaccggcaggtgatatgtgatcagttgtaatactgtctccaaagttgagcaaacagaaagcatctttcactccatgaggacctggaggagacatagtcatatccttgaaatagggtggctcgtgtatataggttgatttggggtcccaggaatagagggtgccagaaggtacagataactgattccacatggggtttcctttggttattgcttcatatgtagccttaaacatatcaggaagcacacttgattgcacaacctggaagaaaatgcaagatggaaacataataaattccaaatcttcaatctgagctgcgacaaaaaataaatttaaaatccaaatgaactcatatctatgcaattcagaatctcacctctgctatttcttcgttagatggccaaatatccctgaaaaatatattcttcccatccttgctcaacccaattggttctgtttcaaaatcaatatccacctagagcatttccccaaaagaatgagatacataaaacatcatgttatatcacctagaaattctagacatggttaaatcacttaaaatatgagctatacttgcaaacacacacaagatctgcaaattgatgggcaccagaaaatcatatataaatgatttcatacaacacaagatcttgaaattagtagaatctaagctgcataccgtgccagcaagggcataggcaaccacaaggggtggagaagcaaggtaattggccctagttaggggatgaacacgaccctcaaaattcctatttccagacaaaacggcagatgctactatatctgtagataaaaaggcggacaacaataatcatttctcaaaaattcaatgagaggagaaacttagtacaagctaaagccttaaacttataccattttcagagatagctgatgccactgcttcatgaagatctcctgaatttccaatgcatgtggtgcatccgtacccaacaatattgaatccaagctgattcaaatacttttgcaacccactacagcaatgaaaataatgtcttggtaagaagagaaacatatatttcccaatatggtataatagaattgaaaacacaccttttctgcaagtatttggtcacaacaccagaacctggagcaagacttgtcttgatccatggcttcatctgaaacaaaaagaaattatagtaaaacttgagtccaatttatcc

SEQ ID NO: 191579 - DNA, 870 bp, Cannabis indica
agagagagagaaattaagaactcgttcttcttgttcatctattgttttgttctttttatgaaaaataagtattcacactaggtagaattgataaattactaccgggtgagaattgaagaattattgagctggagaatactcacaaaccacctcgttttcctcttcccttctgtgaaagttgcggtggcatccgcaggcggcgcaagaaagcgcccccaccgtcccttcctctccgttagccatgaactcgcggcagccatccactgcgtagccaccgatattagccgcgtgattcttctggcactcaccatacctcaccgtactcctcacaaccgaagaagaaatagtacttgtactacttgacttgtctcttttaaccactacttgccttttcttcatatccttgtttagctaaaattgaatagaaaaagcaaataaagaagcgatctagcttgcttggtaggtttaatgtggaagttttggagtcttgttttgcttccttaattgtctaagcttgttgccctagctcatccaaaaaattatattccactacgagaaagtattcaaaggaaaaaggctaagctatatctatatatgatcagtataattatgtgtttatatacatgtataaatatagctataggctatacatggtgcataatcgattctatatagtggtgcctaaccctaaccctagtatttatatttataaatgggataaggggttcgttgtattccaccacctcttagagaaaaacaaaaaataaaaaaaataataaaaaaaaaaaaaaaagaaagaaagaaagaaggaaagaaaaggaagagaaaagtgagtcttaagagaagaggtacttaataagagaagtgatg

SEQ ID NO: 191580 - DNA, 830 bp, Cannabis indica
aaaaaaaaaaaaaaaacaaaactagaattttttacatattttactccggcaaagaaactagtagagatccaagaaaaccatacacagtcacatctgtttggagttgaaaagcagagaaatgtcttgacacaactggcaagctgaaaaatgcgattcggtggttctcatacaacttcaactgtttgtccattttttgcctattttttcccttttgaagaaagatacaaaaccaaaaaagataaaaaaatgttactacatgcttggctttagtagaaaataaaaaatattacttgtaaatatagtacctgattgaatgacaagctttaagaccagatagggctctttttcaagtaaacactaggagctaagattgtaatattggtgcgctaaactggcacagagagaatgtatcagaggctacattactaccattcttttttttttgcatattatctcgatgatgttgaagatataactccgacttgtacaagtggccgcccaggaagttttgtgagttccaaacttccttgaagaagggctgccctttcagggtttaaaagtaaaagctgctgcatgtcctttggaagcacattgaacaatgctcgtaaatctccctttagtttttggtaagtggatgtggagttggagtctccacttgcctttccagattgctgcagctaaacatcacatgtaatgtgttagaaagtaaatatgagggaaccatatccacaaacattaaagctcattaatataaatttactcagtagtctacagtaccaaattagtgaaaggagattctaacatataagatatcccatagagattcataa

SEQ ID NO: 191581 - DNA, 5963 bp, Cannabis indica
agcagttacatttctttgggatactcaaaaagtactaataagctcaaaacagtgaaaatgttggttatctaactcagggtgagaggtgaaagggaaatcccttttcaacatgttaaaatgtccttttgttcaactgtatatatggtctgtaaaaagagcttttaaaaaaaaaaagtgttggccatcttatgtaatatacacactcccagtgcagttctaggaactgtcagcttgatagtcgatctgtacacacatattaagaatattaacctttttttcccctaagtctctttggtaatcaatcatagatattatatagattaaaacaagaaaaatatatacagagatggtgagaagacactgaattcagttcataaatctaatttcaaataaaaatgggttcttgtgctgagaaagagatagattggtgtgctgaagagactgattctgggttggtctttttggatgctttagtaatgattgccatctttgttcctttggcctcctacagttgtcactctctgttccgtaactttgttatttaataagaccgaaaaggcccacctccttcatagattaaagttgtctgccgttttctgaaacgatctcagtaatttcaattggaaactttctgccagaatttggtctcgttctcgtgaatatataatatatattagatagtgctttgggataaccgctagtctctatctctattatctctatctattatcactttctcatcccaataataataatagtatttaatataaataactctaatttctttttttgttaattattttgtggtttaagaacagcaaaaaaaaaaaaaaaggtcgattgcttttaagaacccttccattatggacagactatgctgtaacataacaagagttccctactgaaccgtggtacaattctgaaggcaggataataaaggtttgaaaggatgacaaagtaaaccttgagagcaacagaaagtatatggaatctggtgtgtgcaatatatatatataatttttataaatttattagactcagctaatgaataacaaaaacacatcaaagataatggtccctcctcctccatgcatgtatatagtcgaaacatacttacatacattatgttatatgaattttttttttcctttcctttaaaattcaaatcgtaaagtatggagttggaagtgaatagattataatatgtgaaagaattgaagaactattcttaaagtaaaatgtatatagtgacaactgagcagcatgctataatatagtgactattgccaaacagcgaccaaacaagaaactggcaaaaaaagaaaatatggccactgagagacgcgttataagatgctaataagttagtattatttaatggttcttcaaggcccaaaaagaaacactacgattcttcttggcagcaaaaaaagatgacgcagaacaagctaaccaataagatgaagtaaatacagaagaattggaatctagttgatcacgtttagagcccaaaaagaattataaggcgaaagtttgaatcttctttctcgtgaccgaaaaaaaaagaaagaaagaaatgtgatgccaaatacgttaaagaaattaaaacaattcataaagtggcagataagtatggaactatttgtttcacatacatatatttcaaaatatgatacattatgtcacacttgaaagtacagagtattgctatacaaaattactatttcaatgaacagatacatttgtttattattcatggtaccattacaaaatcactctacattaaatttgtatgtatctacatgatatctcctatctgtattgcccaacatattttgtttttccagctctctaaccaatgaaacacaggggttaaaaaaaaaaggaaaaaaaaaaaaagacaaagaccgaaagtaacagcacatgattattattattttttttttcaatattcttatatataatttttttttttttgggtttccaactttccacaatctgaacgttagaggctaaattatgattagttaattttttagatgacacactacaaaatcatgcaacaggtgagggttgctgctgaacctgcgtcgttcctgctgctctgtttccaggcaatgataatccagagaagcttgcgaagctgactcgtcatcacccctcatattatgggacccgcccaacgtggaaaatccttcactttcacagtggcgcaactccaaagccagcgacacgtggcgatcgttgcgaactacgatgctgctcaactctgatatatcatcatacgacgcctggttctggtggttctgggttggtggtggtattagcagtagtacttgtacggacagcttcgtcctcctccagataaaagccagcgttattatcgactggtgactttgtcgtttcagagtccgtgacgttagtttcgtgacgcaaacgacgattctgatgagtttcaagaggattcaagtactctcccctgatcttatcctcctcacacgaagaatcaactcttcctcctcctcctcctccttctcctccttctttggagttcatctccaaatcgttgaactcttccttgtacatttcttcaaccatgggcttccaaagccgtactctcgcattgataaaccagttcgccacctaatatcataacacgcacacatacatatatataataactctctaattattgtcccattgatccaaaaagaaaagggtctacttctttttcttttttctttttctctctctctctctcccttgtaataataatagtaataataataataataaaagagttcttacttgctttgtggtcaaccctgtttgctttgctaggactaactttctctgatttctttgggataactgttgaaacatacaaaagtaaagggaaaaaactcaaaagagttagacacgaatcaaaatgatttaagagagagaaaaaaaaaagtaactaatggcagagagtaatgatgtacggatgaaggaaatgctcgaaaagccaggcacggaggatggaaacagaggtttctggaagacctctctggggtctccaagcatgtcgcatggcggcaagctgattaaaccccctctgttgtctgagctttaagtcaacatagcggagacgaggtatagctgtgttttgaccattgtcttgttccccgagccttctttggatggcttggatttggccacttatcccatctcgcaagcaccggaaatggcgtgagattgttttctgggctagtgaagtgtatggttccgctgccccacgcccggccacattgtccaaaaacgacaccacggtttgcatttggttataatattgcttgtattttctgtctatctacaaaattagcataataacaatgatcaaaagcccaacaacaacaaaaagagaaaaaagggaaaaaaaaaaattacaaaaaaaaaaacaaaaagaaaagaaaacaagagaaaaataaagtctatagcttttatcaataccactttttactattttcccaactttccccttatataatatctgtttgatccaatgctgcatccacttttttagtggtaattattggatatgaacccacaattgaatatgcaacaaatgaaaaaacagtctatattgtctactactgttgaagacattattgcaaaaatctcacaagaaaaaacaaacatgaatatttttttcttctttttgtacgataaaaataaacttaaaagttgtacttacatcgtccaacatggacatgagtttgctcttcttgctctgcaagtcttgttgttccgtttgagatagctcacaagaggagttagcggttgattcactgggatctgcggattgactgttggatttcaaatcgctttctttaagaccatgatcggatccaatcccctgaaacttatggttattctggtttttgttcaaagcctttcgaacatttaccacttcatcaagcaattcctgtacagccttgaggtacttgaagttcaacccattattgttattattattattgaaaccatatgatggttgatcatattgatcatgatatctttcactctgatgcattatctgattcccaaaacactccgttttgattgaattattgttgttgattcccaaaaacccagatgccataatattgaagctctcaacgttttgttggttggttcccaatcccattccccatattattacgttgttagaccaagttaccccatatgatcagaagaaagactgggatttgatgaataatggtactggttatcatgaagaaaagaagtcaaagaaactggagactcatgaatctgtttccctaagctgagagataagccctgaccttggtaatgaagattattattctgatgatcagccaaagaatcaccattcagtactgagtcggtggctatagttggaataaacatcatttcgtttctcccttgagatgagtcaacgcagtaatttgaagagccatgaaaactcatcgagaatggttcagtaggtgaagtactttggttcaaagatgtaacaaatgcttcgtgatcattctcatgataagctgctgtggtagtactactcgccaagtcacattttttattcaagctttgattggggacataagtagccataattggattctaatattgatatctgtatgtatcaattaatgaagaaactcctccgaaatttagtttgatgtagtcgtagtgctcttcacgattattaattggcatccatatctacatcatatatatataccaatattaagtaaaataatgataataacaactataaaaatataatattatcccagaacggcaacaaccttgaccttagaaggcaatcaaataaagtttttcaaaaataataagtaatatacttataacccagattgtcaacttaattagaattattattattattgttattcctataagaaaatagtagaaagcgtatacagttaataattgatccaaatcaattcgaaaaccataaacccagatattgcttattctcgatcaaatatcagaatcagtacaaagttaattacgaaaagcagaaattaaaataacacaaactcaatttaaagtttatacctgcaaactccaagaacaataatcaaatgatcatggtgtgcgtctttaattatagtgggaagaagaaaagatcaaaccttgtgccccaaagaaaaagtattatgattccaaaagtcggccaatacaaactcccttatcccttacctaaaagggagacagagaaaaaagaaaagaaaactaataatcgcaaagaccaaaagatgtatacagatacagtcccaaacaaaaatcaacctccttatcattggaacaacggcaccaactcaaacaataataataataatatataattatcaataattttgacaattttaatagctacagcagtaccaaccacaatataatatttaaaatactccagtttgtttaattacataaaaaaaataaataaaaattaaaagaaataaattgtttaacaagaatatttcttcttctgcaatgcttgtaagttttacacgtgtgagaaactcaaagacacgccttaaacgcgctagaatgttcttcttcttctactactattactatacattatttttcaattaataataataacacaaataaaaataaaagaaagggttcaacgaatattgtctggtggtggtggtggttgtttgcttaagagggttcaaaccctaaccaccagttggtggacctataactctcccccttaaaccttcttttaacgcataatatttgagacactctgaagcatctacaaactttctctattcattattttctattcaatttaatccaaaactaagaaataatattatcataataataatgttattgttaggcctaattaatatagagtatacagtataattaatgtatcatattcatacatacatacatat

SEQ ID NO: 191582 - DNA, 3216 bp, Cannabis indica
tcctttcaaaaaaaaaaatttaagcaaatgaataatatacttactgagaatctgctttacagtctacttattcacactatgctacattttattttttttaaaaaaaaataaataaataaattgcaccattcaaggtctccagttaaaaaagttcaaacccacatcagtccagtatttaaattttaattttaacataatcaaagagcttaagaagacacgcaaattcatgaagtgaatgcaatgagtaacataatgaaaaacctaatctagtttatgaaataaatgaattagtagatcaagagaagggctttaccgtaagaagcagagtcccggacataacaatctcgttagtgctcattggccccatcttttccaacttttcctttgcaagcttaggtgcatcaggactggacttcacagttggcgggtaaatcagatacaaaaggaaagggactacgatcaaagacaccaatccaggaacaatggcagccttggcccaatcagtccacccaattgtcttctgaatcgtattaaaagtcagagtggcactaagcggattagctgccattgccgtcaagaacatcgctgaagaaatcaccgaagtctgaaagcaagtaagcatcaaccaggatcccaatttgtgctccgtcccatctccgacattgctaccacatgcaacgcacaaagacttcaccagaggcaagaaaatccctcccgctcttgccgaaacagatggtatggccggcgctaagagcgcctcactgaacaccaaactgtaacccaaccccagcgacgagctaccgaacagggagacgaattggtaagcgattctgttacctagaccggtcttgataaaccctctggcgaagaaaaatgcgagtgcgatcaaccacggaatcggatccccgaatcccgagaacgcagccgcgaaggttagggtttttgtgagtacacaagctcccaatcccaacagagccacggcaccgagcggcagaggctgagtaatgattcctacgatcgtggccaagaaaatggaaagaagctgccaagcgttttgggtaaccccagaaggaaccgggacgaaccaaagaatgattcccgtcgcaatcgaagccaaaagaggctttatcgccgctccctgccatggcttctgagttgccggaaccactggagaagtggctgaccccggtgctgatgccttaacggtgaatatgctaccggacttcgcgactttaaataaactattcgacgaaatgagcggtcggagattcccgaggccggagcggtcggagattctcaacggagtgatgataggccggtaggcgcatcggtttccgtcactgattacggaggatttgggcggcggaaggcgggatctgagagagattaggggagaagaacaaggcgcggtggttagggcaagagacgccattgagggaggctttgttagcaaaagaggagtgtgaaccgtgaagcagtagactttggagcaatcggacagaaaaaaaaaaatgatgaactgtcggattatgatcaaacggttgagatatgatttgaatcttttcaatcagattcagaaagctttatacaaaaaaaaataaaaaaaaataagctttctttgtaatgccgtcgtttgtgttagaaatctccgccaaaagcactgagaagatcccccttctagccacagtgccaggttggacttaataggggttttttttgaaataagacttaataggggttagtttaacagaacctccgctacagtctactcttacaaggtgaagcccattacacgtgtcaacaatgtagtagtttactgctgacgtgtgataagttggaaaacaaaatgagccaataaaattgagtttagttccacgtggcttaattggattggtgagaaatgataggccctcttacatttgggagatgactcagatgaggtcagaaacgaagatctgattgttgtggactagtcagggccaggagttgaggaggagtgaaacgacggatatacccttggtggatgaacaggccacacaaatgttcacgtgggtaaaaaagtatttctattccaatttcaacttatatgaatttgtccattaaaaaatgaaaaaaacttatacgaatttgatttaacaatgttttggttcaattcaagcccattcattatgtggtccataaacatttagaaattttctttttactattttaatttttttttttttcataattatcttttggatggttcttctactatgctagtttgtttatctacatttgaaaaacttttgacagtaccaagagtcgggccattttttgtaatcccaaaagtcgtatagtctattttttaaaaaaaaaaaaaatctttattctcaatttaaggttagtaattaagggtgttcgtaaaataataaatttaatttaatctgcacaatctaattcaatctaatctgtaaagtatagatgtccgcatactgtgcagattggattggaaaattcaaaatttacacttatggagattggatattgattgacatgtaaaagtttctgatgcaatctaatccacacatatttataaaaaaaaaataaaaaaaaattaaaaattatatattcaattaacattttaatgtaaagaaaatagtaatttaaaactctaatacatataatacaattatatttcaaaacttaatagatcaaatgtatattttattctttatataattttttctacatataatttaaaacaaaattaaatatttctttatacataaatttttttcctttgaatttgtgttatcaagttttttgcaccttgacgtggcaataggatcaaataacacttgtcacatatttctgatacctaggttgaggaaaatatccctagcagcctgcacatgactaatcagcatttgtaatagtttgttatccgagcagggttgtagagaaaatacccgcccaggtagaagtgtgttggtgtcgagcaacgtacgaggattcaaagattaatctcgattgtccagacgcgaagacaatcccaataatcttgggattgagtcagagggaaatggcaacctgttttatttcctattttgtatatcgtaattatagaatcattgtaatttcttattttgtgcactgtaagcaaaagggaaaccatcctcatgcattaagtccctataaatagtgtacgtaaatgacatgcttgtcaagtccaaa

SEQ ID NO: 191583 - DNA, 4024 bp, Cannabis indica
ttttttttatgcatgttaagcttgccatagtttctaacttcatttattaagtctctaaaggtgccagtgagacagggtaatttgatgcatacttgccttgtgaatcatataaattattctatatccacctaactgtctgcattggtcttggtttttgggcttagtcatttccttagaaatgttatatatgatattgatattgttcaaagtttaatcttgagcttgccaatatggacacgatataattggtttctgaggtgaatttctttaaggaaaaaaaaagaaaagcaaattgattgttgtagttgcttgccttgtacatatgttttgcaaagtttaattgcttcatctttctggattggattctggggcaagcaaatgcttaaaaggattggaaaaattaaatgaagttctaggagtgattatgagagttgggtccttaaacgtttttctgtaaagtggttcttggtagtcttcaaataccggtgttcaattgtttttttgggccatatcaaagggattcaatcaaggttgtaatgctttttgttttttcaattgcagatatcttgttccagcagatttaacagtaggacagtttgtctatgttgtccgaaaaaggatcaaactaagcgctgagaaggctatatttgtctttgtgaagaacactttacctcccactggtaaactataagaaaccattcttattaagaaatactattcattattcaaaagttatagttttgtaattttcattccttttttttacagcttccttaatgtctgctctttatgaggatcacaaggatgaagatggatttttatatatgacttacagtggcgagaacacctttgggacctcttatgagcaacaatgctttgagtaaaataataactttaaacttgtacattcccatagctttgtctcttcaaaccaatgttctcatccaattatgattaaactccattgatgatgtctattgtaattaatagattcaatgccatcaattatatttgctgaaaagcatttgagttatatgtgacattttaatttggatcctaaatgaatggtattaaatactcagtactctgttctttggagtttctttgtctaatagataaggtaaattatcatcaccatgttcattttgttaacaattctatgaaaattgaagacttgaataagctgatgtttaaaaaaaccacaactgtgaaactcatacacaaacttctacaaacaattaggagattgccatttaatttagttaaacacaaaagcataacaaagttttctatttgagaaaatgagtagaaagccagtgtagaaaacagtttatttgggattggtgttggtggtgctttttttctggcactgattcttgatccatttgaagccgttggatgtgccacttttgatcttttgtgctcctgccagtgctgcagctttggcttttgttaatccagctttgccttctcccttcttgtttgcatcgctctcttttttggcattgtcttcatcttccattgcaccaattcccccggtcccccattgatcagcccaacttggtccatcactagccattctgacataacaacacaattaaagatcatgagcagaaaaacaaaaaaaaaaaacattaagtggaagagatttgaacagagaataaaacccagtttagtaattgttgtacaagaataaatcagcttcttttcttaaccaagtaaatccaatgatttcacatattttctttttgcccatatttatatatgctattgtattatttaacaagacatcagtgttttacatgtttggacttaaatgttaagttttatgaatgtttcaatgtttatagttaaaaaagaaaaatggatctatatgtatgacatggaaaaacaaaccaacataactagatttttgtgcatttattgcagaaaaaaaaaaaagcaaagctactcaacatactatgattgcacaactacaagacttgttaaatctatagagataaaatacagatgatagaatagaaagagagggagttagcacctgatgatggtagtaaggaagaaagatgtagatggtgtcttgaggaaatcaaaggtggtttgtgaatgaagaatattaggtgttccaagacaccctttaaagtttaaactaaaaataaagaaaagggcacatgttgctgttgatgggctgtctttttatcttcatcttaaacccactttcttctttttttttttcaaaggactttgccaactcacttgtttccatcaggagaagcaaatgtcttgtagcaacatcttagaagagctttgtttggttgctcctttaattaaataacttattacatcctaatcatgtgccttgccttctcttcaattaaactatatgtctatatatctaagggttgagttgaggatgcatatttagtcccctatgttttggactacatattttgatgtgcctcttccaacaagccatataataaagctagattctcttcctcaatactgtgtatatatttatatatattcacatgtcacatataaaaattttcgaccaaagagtaatgaccaataatcaagcacttgtaaaatacttttttgctctatactttccagtaagataaacgttgtctgtactgcttaattcactaactccaaaatcccttttgttgctaagcgaatcccattaattataaacacttaatcatacttaacttttttttttttttttgctttatctaaaaaaattgttactaaccaatcatgaaagcttattatgtgttcctgtagttctccactatataatcatactaatttatttaaactttggtaaagacaagtgaagtatgactcaatcaaaatcataccaaatttgtaaagggggcagaacttaatcaaatcctcatctctctcttgttctaagcactcttgaattgaatcattgctaaattttgtaatttgggtaagaaggattttcttgctggtctcataagtgagtgctttaaaatatgcctagtcctgtaataatttcgaactatgttagacctctttctctttacacatggaacttttcacaatgcttttctttttctttttttctttaccacaagacttacaagttctactgccggtggtttggtctttggacaaaaaccttggtagtttatttgcatgtgaaatgattaatttttttgtacataatgttctaatattgccgtaaattataattactaatcattctatttgtttttatttaaataatatttagtttgattaacacaatattcttattataatcatcattatttttgttacaaatctgttcacccaatttcaaattaattgtcaaatattttcacatcaattattgtaaaaattttgatcaaaatctaatctaatctaagccctctatcttgtgagagattgcaaagctgatcaaccattctaatattgattcatttgtgcagaatttctaaaaattaaatacaatctcattaattattctattttatgtaacaatctattttcattcctcgtgcatcttaaaattgtttggcctataatttattatcttacatagtagatatacaatgcggcaatccttaatcaaattatactatctaactctcaaaccaatcggtaaaagaatttgatgcaactaatcaaaattgaaccatttgtagaattcattgaaaaatctcttaaggatattaaatatgaatatgcaaagattacttatgaagatgatatttgatgtccatttttctatggacctttactgacggactaagttttttcttctcataataaccttaaaatgtttaaagcttcaaacgatacctatttatattgtcgtttatttctaaatgaatatatatatttttgaaaaattgattagatagtctttctaaggaatagttaattcctagttggacttttaattatttaagttaataattcaccaagtctcctacatcatgtttagtagtaggatagaatagcttctttaaccaaataataatca

SEQ ID NO: 191584 - DNA, 4409 bp, Cannabis indica
acagcctagagttaatagtcttttaaattctaaaatagatgtttggcacaacatcttggccatccttcatctaaaattttaagccatattttaaaatccaacaataaaattttcaatcaatgaaaataatttcttctatgatgcctatcaatatgggaaatcccatgatttttcctttagattgtctcaaaatagagttaaaaatgtccttgatattgttcacactgacctgtggggtcctgtcccaattgcatccaatatcaacaacagatattatatctattttgttgatgacttcaataggtttacatgaatttatccattgaaattcaaatatgaagcacttaatgcctttcttaaatttaaagcacttgctgaaaccaaatttgaaaagaaaataaaatgtctcatgtcaaattggggtggagaattcaaggctttcattgatcttgtcaacactcattgaatagaattccatcgctcatgtccacatacatcagctcaaatggtcgagctagacgtaagcacagacacatagttgagatgggactcattttgcttgcccaagcaagtatgcctcttaaattttggcgtgatgcttttccctcagtagtgtacctaattagtaagttacctcctatttttctctcatataaatctccctatgaaattcttttctcacaaaaaccagattatgatttcctaaagacttttggcttagcttgttttccttgtcttaggcccaatcactctcacacatttaaattttactccatcaagtgtgtgaatagggtttagtgaatcctactacaaaggatacaaatatctcactcccgcgggcaaaatctacatttatcgaaatgttgtttttaatgaccttgaatttcccgtgaatgatagttttcttaacatttatcaatctacctcattagtcattattcatagctctacatggtcatctctgtctgttgctaccttttcttctcagtcaaccactggtaccactgaaagcacccttggaactatagatgcctcactgtacctcaaataacacaagttcatactttccctatcaaacctgatctgtttcatgttttgagaggggcagtcttgtagctgataccacatatatgttcccttttagaacacctaaatatgattacaatgctcctgattatgaattttcagctattgtagaactcaaatcatcacctcttccacaacctgctcttttgcaggttgtggatcctatgataaccagggctaagacaggtatatttaaacctcaaaccttcttaagtcacatccagtttaagtttgctactggtgatgcaaatggtgtggaagaaatcctggaacacaaaggctggaatgcaacaatgggctctaaaatttatgctcttaatcaaacaacgcctcaattcaagtaccactatcacctcactataatctcatagaaacaaatgagtttctagggaaaagctcaatctcgatggcttatttcaaagatttaaagccagacttattgctaaaggtttcaaccaaagacctggagtagactttgataaaacctttagccctataatcaagccttattctacggtaaaaaaaatactcaaattgctgtctctagaggattggaaatcaagctacttgatttaaataatgtcttcctaaatggagtattggaagaagacgtttacatgtcacaactccaaggatttagagaaaaagaaaaagaaaacttttttaaacattgaacaagtccctatatggcctaaagtaagcacctcctgcctggtttgatcaactcaaaactaccttgctaaaatgggaatttcaacactctagagatgaaacttcattgttctactataaaattgacaaagacatcattcttatgttaatttatgtcgatgactacattgtaacaaggaatagaaacaaagttgacggttttattactcaatagaagaaggaattcactcaaaaagaccttggttcttgacacttcttccttggtatgaagttcatagagatgacacaaggctatacttaacgcaaacaaggtacataaaagctctattgaagcaggctaagatgacgaatgtcagcctatgtcctactcctaccactacaagaaaactaatgtctcttcatgaggaagagccaatgcaccatcccactatctccagaagcatcagatgagctctacaacatagcctatgttgtgaataagattagtgaatttctcgaagtcccctacaacagttcattgcagtggagcaataagagtcctaagtatcttaaaggcacattgaatattggcctgcatattagctaatgtgataaactaaacataataggcttctcaatgtggattgggcctattgcccaaataacaaaaggtctgtagcacgttactatgtgtacttggaagaaacttaagtgtcttggtcctcaaagaaacaagctatggtgtccaaagtaagcactaaatcataatatagagtattgactcatgtaggagcagaaatttcctcaattgaatccttgctgagagaattaaaatttcccttgacatcactctttgttacatggtgtaataatctcagtgcaagtgaattagccacaaatcttgtgccatgctagaacaaaacatattgaaatagacattcactttgtgagggacaaggtattacaaaagttgcttgaggtaagatacattctatctcacgatgaaattgtcggttgttcaaccaaaggactacccactactaaaaaacccaaaattcccaatagttttacactgttaggtaaaaaattctcgacggtctataaaactgttgcctatatgagcatcgtaaatacttggtagaatgggtgagagtggaaaaatatcggtataaaagaattcctggcggtttaaaactgtcggctacagtcgatactgtaggctacaatttaaaactgtcggttatactatagtggacacttttaaaccgtggtcgtcgatatagtggattgctacaaaaaaattatcgtgttcctcctcctcgaaactacttctcgcatatgtcgcagccgctccaagacctttacaagcttcaccctcatccaccgtgattgtgctcgtttttatcctcctcaaaattttctttcacaagtttcagattacttttcacttgatgatccttgaaactttctttaatttacaagcttcgaatttattttgaacacacacaaatcaagattaacaaactaaataatggctaatagaaatttaaacaacaaataagagaatattgtgcttacctttgtgctgccaagagagagcagaggagacgaacatagctagagagagagagagtggaggagagggacaatgtgggtcgtggtcacggaggagagagagtcaagaaatgaaataaaatttacaaatgcctttggaaaaatgagatatgattttttttggaggagatttatatcttaagaggagggaaatgaaatttaagatggcttgggaaaataaaaatttgaaatttaagatgtgggaaatgaaatttcagatctaaaacgcgtgaaatagaagcatgggaatcgtcgttggtttaaaaccgtcggctatactacaagccacggtttaaaaccgttgcctatagtatagtcgacgattttcaaccgtcagcaattcccttttacaaatgcacgggaatttttaggcacgtttaaaaatcgttatctatacctctcgacaatttaaaaccattaggaatattctatttttttttttaattttaaacactcacttaatttttttcagcgacggttctccaaaaaaaactttttttagaatcgtcgtgaatacccctttttgtaatagtggccgcattccaaatttgagtttctcatcaccaaacttgagctaagaccatcactcctttacttgataggggatgttaagaatgagaattcatcctctgcctcagatagtgatggtacgtataagctcaaaggatgacaactgcaatagtcccttagcaattctattatgatgattaggcatagtaataattgcaaaatatatagtagtagtgcttggagatttgttagattggttaaggataaggaataagtgaccagacttgctccgcattattgaaaccatgatttattggttgtagaaaatgagaaataggggcttacaaagtatttatatatatatatatatatatatatttatatatataaatatataaattttatatacttacttaaatatcacacaaagttgtaggaaaatgggaaatttgcaatatcatattagcctacagattattcctcttagacacgcattaaataaaaaaacctacaggcggacaccactatcaattgaataggagatagca

SEQ ID NO: 191585 - DNA, 1471 bp, Cannabis indica
gactctaaaaagtctacacaactcctaataaagaacacaaaataaagaatttccttaccttgtcaataccgcctcgcgaagttacctcgagaaaaagtttatgcagatcaagatctttcccacctatgactggaatcctagagaaataacatgcacataaaacaatagaaaatgtcaaaataagggagagaatgagaaactcaacaagctaagcataaaagtctttagaaaaagaataagaacatggtacttaaacactaatagaagtgaaaataattcttaaatgtgttatgaaaacaaactttcaaagggatttttggattttgaaatcccctaagcatgttaggcttgaaaactcaaatttctctccacaaaactattttaacatgttttgtggaaaattctcatactatgttaaattatgtggttcatgttttgataagcatgtatgagtttgagagtgaattcaataaataataataataataataatagaaaaaggaaaagactattcaaacataagtaactttgtaaaaacatagtcaatcatactaaatgctttagaaaagtcaacatatacatacttaaccaacaaatccaaagtcaacttcatccacatctcaaagtaaaaaataaaaagaaaagtgaaatgagatttacatgaacttagttccattagaggaatgaagtttctccaaagtatccataaagagtttttgatcaactgcaacatcttcatacctaacaacatcttctctaacaatcaaaggcaaagaagtatttattttgttaccactagaacttgatgccatggcaaggccaaacctccttcaaaaatctctcctttatacttttcctcaaccattaaccaaatgtactaaaaaacactgaaaaaacaaaacaaaacaaaccaacattaatacaaataaaagggtaagaagaaaagaaaaggaaaagtcccaataaacaagggaagaagagaatcaaaacccaagaaaagtagcaaagagtacaaaagtaataaagctgtcataatagccatgaattctcttcagagtactgaggttattacaacaacaacagaatgatgaggatgatgaacaatacatcaatatcattatcagagaccttttgtcaaacactaacaaggcttttacttaaagaaaaaagaaaaaagattcaaactttagcaattaagacccagatacaaaaagtccttctgattaaaacaggcctataatctttctctgacattcctaatatgggttcacaaaacaaaactgtacatgcaaatacatatgtctatgtctataacaaagtccaatgcttttattattattattattatttcttcttcttcttccctgacaggttttgcagaacaataaaaaagcaaactttatgtataaaacaatggttttatagtttggtggggtagtaataatgtaaatgtccatcaatcaatacatgg

SEQ ID NO: 191586 - DNA, 3179 bp, Cannabis indica
ggggcggggagtgtgattcccgtccccgccccttttaatatccgcggacaaaaagtaatcccttctctgttccccatttagatggaaatccccgccccattaagggcgggtacccacgaggccccatccccgcggaaaaatgtgcatccctattcacgacaatagaaattgcattcaagtgatttaaaattggaaacttatttccattagtatgtgattgtaacttattatttattgcaaaccaaacgttggaaaccaaggctttcaaagtgttctaataattttctgagaaagggttcttccgaaattgttcaaagatattattacattataagattttcaaggatgaatttcacaacagattatctagtatcccttaggaaatgttaaatcataactacaccatcaaaatcaattatttatatgccaaccgtgtttatttacagttattgtttcattattactgttcttcatttttattttttggtggaatataaatgactttacaatgtacaagcacaccatgcatttatatgtatagctcattcactctgtagattgagagtgttctttgagtgatggtgtgttgttgttccactttattgagccaccaacttaccttaactcctatattagtatgatattatttgatttgggcttaagcccttatgattttaagacctaatacaaagtaggtagaacaagtaaatttaagataaataaatcttgcctataccccaacatagtgcaactttatatatagtgttagtagatgagctagtcaaccttgtgacaagtctacatacaaagagagtttacacgattcattatatctacatcattttctagttataatgctacttcatgtgtttggtgagtgctcatataggctagccgatatggttactgattttgctaccttgaaagcactgaattatgattttgttccacatttgatacacaatcacaagaacaaaaaaaaaaaaaaggtattgaacagtcaattctgcggaaattgctgtaacagttttcagtgcagcagctactcttcttgtgcagagaaacaaaaaatgccaagacagctgaggtttgtctactttaattttacaaacaaaatgcttgtcaacttatctgtagattgcagaggaaatgaaaatagtgaggtgaaatacatgcatgataaagtggctaacacccttgtttcatagataaaagataccaaaccgaaatgagtcgtaaaggatatgaaacaagagaagtctttctctctaacttcccgttaatttgtttttgcttgaaattcgcatgttacttatataaatttaggaagcaggataattagtttaagtaggaagagctagcttgttgtattgtgactattaactattaatgcctatgtctattatacctgctcaatactcaggtggctagtatataaaacctcgaaacctgttgtgttagttaattggttatggtgtggcgtggcgtggcttaggcctatataaagagtcttaatccaactgattaagaataatcctgtaatgtactttcttaaaatagcaataatacagagagttgttttcatggtctagtgtttatctatccttaaagtttgtagaatacataagttagaaaggttgagagctcattgttttcggttgcgcctcttgacaaaaaaatgtgaagattgtgcataagaaactatcagacgagagtggtgagagagcgacactgagctggcaatgcagtcactcgatatgcagcatcatatgttttctgttcttttccttttgagccagtctctcctttgacctatcctttctcaactcttaagcctctaacttactatttacttctagataatctgttctgcattcagtgacattgtaactcactttctttcaagcttccaacaaatagagcaactgttctactcgatcgtgttcgggtagtttgtgtggagatgatgggaagataagctactaagttttgatatgagtcatacgaagataatgattgtagtctttttttgtaagttttaagaagtcgtgctttgtatagaaccaaagcaaaaaataatacaacgaatcactccatatcgggtgggattttcactcccccactaaggaactttccaataaattatttgatcttatgtaatagttcagtgtttttttcttctttttagtacaatttatatacaatatcagagcaaaatttaattcctagcaaaagaaaatgtacaataaagtttaccgggtgctgcattgaatattatggctagaggtttagagtgcactagactaaaccagggtgtctaaagtgcagattaacacaacagtgctcaaaatggtttttgacgatgcaacaggctatgatgaggctgtttttggcacaagatttgcggttgaagacgtagcatggcgtgccacaaatgactccaccagagggttcacaagattaggtgcttcatcctgtatgcacaccagcaacacaagatgtgtcccaagtaagggaagagcgagtttgtaaaatatgtatgctcattctaaactttttacttcattttgaaacttattccaattccatgaatattgatggaataccaacaaaaaatgagcagagagaagtacctgagggcaatggccgacgtttggaagcacaacaaagtcttctacagaatcaaagctctgataggctcttccaagttcaataggttcccaaggatctttatcaccccatcctattaaaacaggacactgcaaacagaggaatgaaaattaaatataacgagggttgatgccaaataagaatccaacattttgttcatgatactaagtgctaaccttcacttgaggcaataattcctccggtagagggccacccgagtaacaaataaactcaaggaacacatctgcagcgccaggctcgagtcccgggagaaggatgctttgaactagttcatctgtcacttgggaagtatcatggtagcactgaaaatgcagtcgattagaagcagagcaggcaaagattaacaatgcacaagaaagataaaacataaatagcctgtcatatcttacaatgctagttagcacatgaaatgctattcacattaagtttggtcaactaattttactcacaagaatcatagtacaagttcttatatatagctcaatatt

SEQ ID NO: 191587 - DNA, 1464 bp, Cannabis indica
aaacaaaaaaataaaaaaaaaacttaaaaaagatttcaccaacaaaaaaataaataaaagagcgctgtgtataaaagttaaaatataagaaatttcactaccaattactataatatatatttatatatgtatcatcttatataattattggcagtcactcaaaagtcataaaaaataaatgtaatttcttctttattattttgataaagttacaatatttggcaaatttaagcacataatcatattatatgataaatcctatcaaattataattctatcattacaagtgttttaatcattagcaaaattttggttgtatgtatccatgtcgggatcacctttttaagatgggttacaattatgaacctcaccgtagtaatagggaacggaagaaaattttaagtgcaaaatatatatggtattcatgaaaagtatagaaccactccatcgtgtatacatatttccagaatagcaactacaaaatactttttggaagttcaacaataggatcacaagtacaacgttatttggaagataactgaaactaagtctgtaaactttgtgtaaacaacctagcttactatagtacaataaataagaatttcgtactgaagcaaattgggaaactatatatgctgcagaacatgtaaaaactaatggttcaaaaaattgtagaaatcttgagacatttggaggtcaaacttgctaagttttgctagatgttattgagttggtttaaatcgtagaaggtatatacatgttttccttgtcaaaatgatcatgttccttgccatagttggcttctcttatcacatttttgattgactgaaatagagctcctgctcctcagaagttcaacccttctgtcaactcttcttttatcattatttcatcctaatatgttatctcttgttatttgcttcaatggcaaaaggtggaaatacatctccaaagagtggcgactcctcttcctacaactaattctcaagaatcttcaactccagtcactttgctcccatttcatatcactgttattccagtgaccagtcacaaactcaacggtaagaattatcttcaatggtctcaatctattatgattttcataataaggtcaggggacatagccaagtaaggtattcttctttgcatattctcatttacatttaccttctttatagccactagccacccaaaaacctttactttttcaggagctgagcttttccacaacatttttgcccaatcaaagcaaatggtgctttgagtcaaagtaaaaaagacaccattgccatctaacaccctgctatcatctaagatctcaactatgtttacatgtttcagctgacataacaatgaagaaagactcaggatctccctatccaagaggtttctacgaaaattaagattccaattcaccaccaaaagcctcccatctctctcagacaaatattcttatctttgatg

SEQ ID NO: 191588 - DNA, 2070 bp, Cannabis indica
agaatcttagactcacttcaacaaatccagaaatgggctgaagagataaaaacaatccaataaacataaacagaatcaggggctaactcatatgttgttactaaatttagctcaacttgtagaactccaactcgtgattcttttttctttccttacctgaaatagaaagagacccagattctgattctcacttacgaagctcattgataaatctccaccttcatgccaatttccctctccttcgaacaaacctctaaatcataactcatcacagtagacgaaatcctatcagaaaaacgactatagcactgcctgtagcaaattatctcagaagctctcccaagaaatttctcagcatctttccgtaccattttgagggagcaatctaaacagtgccctgaagattgtcgtggtgaattccgagaagattcctttgacaccgctgtaccagcaaatctgtttgggagctcagaaaatataagaaaagacaaccggttctctttcttcctactttccttctttttttttttttcttctttctttctttagttacttagagaaacaacaaatccaactcttctctctcacataagaaaaaataatcataatcatggtcttaataattcagccttgacaggctgtgaagtaaggaggcaagaaaatatgctggagttggcaatgtgtgggtgcttgtgctataattttttataaagaaagagcgagagagagagagagagagaaacatataatactatatatgtgtatgtatggatatagacataaagatattgttgtatacatatactaatatatatatttaattaaattactttgttgttatacttaattcaattgtacttactttgtacacacactataatttgtgatgcactgtgaaagcatgagaagaaagatgaataataaggagagagagagtggtgagtgggaatggaaggagtgagagagtggggccctgacaaaatagtaaaatagaaaccaaacgacaatcctaaacatgagcaaaggtaggccagtgaacaagatattccagacaaactcttgcagatatgcatgaattgaaatgatggaaagatggtgcttctttcctcccccaaatattattaataataatactttttctattattatctttttcaccgaaaatattctttaaataaatatatataaataaatcttcacaataccctttattagcgtaaatttcaccattaatttcattttagtcaatgatcttaatcgaacaaacacttcaaattaattattatattcttaaagataatgctgtcatcttattcgataattattgtcataagttgtttcactctcaaaactattttagtgttgtgacctaaattaagttaacggttcataaatatttgatcaataaaagtatttatttattggttagtagtggaactttctttcttttgacgtgtatgagggttttattttttcttattatatagaagaagaataataataaaatacctgtaatattatattgtatttctcttttatctttttggttatttgtaggcattcaacgaatccgaattgattattctctccgtactaaacaaacatatctagtccaaacttgtgattgagattttatctgggtacagagatgttggattttcataatggatcaaactcttcaagtttggtacctatggtaaaaatataggaatggctacgtggcactaacctacaaccttgccattttttgttagtcattttattattattattatttttattgataattagtattcttatgaaattaaaaagcataaaatttaaaatgctgtttttttctttaaaataaaaaaactggtacataattgcagttttttttatagtatataatattttgaatcttatattttataaaattactaattaaactatttgttttattaaataataaattggaccttatatttttttataatagtacaaaaagtatttaaaattgattttttgttaaaataaaaattaatgataacttgattaaaagttattataacaaaactagatatatttttt

SEQ ID NO: 191589 - DNA, 1129 bp, Cannabis indica
cttataacaacatttattccccattatcatccatcaactttattttaccttaattatataaaaccctatctttattactattacaaagaatattattgtgtatattaatatatatatgttacattagtttttgaagtgtaaagtggtactctctttatttatatatatgtacgagttgatgagtcatgcaaacttttttttaaaaaaaaattaattgtaaaagaatatgattgattgacattacaccattacctttagttttcttttcctaacaattctaaaattaatattaatattgtacgtaagtaaggtaagtaattgttaatcaccagattataaatataccctacttaaaatccaaacagtaaacaaataataattaatatatgagaaaactagaagggtgatcttataaatatctcttaattatcaatctctttttttgggaagattttcactcctaatcatatgaaaatgaaaatgatttttatggaaaaatacaaaaataaaaataaaaaaaatatatgaataagtttttattactagtatgaaatcgtctcttgtgagctattttagtcgttaaaattcctttcaaactattattaccacattcctattaaattattatgactctaaaattatatctctgaattatgattacattgtaaaattatgcacctaaattattactataatcgcaaattgtgtcaccagattttcagacatggatctatgtatttatgatagatttaattaaaaaaattaattaattattaagagggacgatatataaataagcaaaaattatataaatatataatattttaattagggggctagcaagtagtagtgatacattgtgtagtagtaaaattcgttatttccattgaatgtggtcacattgtttaatgattgtttatgtcaacccataataaccaccatttcatttcatttacatttatgtgtaattatattcttttttattcttcctacttttgtgaataactcaataaaatatcacagttttttgttgctccaaccatatataatatgattttcttccaaaaaaaaaaaaaacaatacataatataactcagctttattattaggggtttttctattttaggtt

SEQ ID NO: 191590 - DNA, 954 bp, Cannabis indica
aaaaaaaaaaaaaaattagataggatggggagccctaaatccaaggatcaaagaaactgtgttaaaactaaccaccttaatgtcaaagaataatactaataatattgaattaattttacatcaaccaaccacatatgtatcattggtcaactaaccttgaccaataaaccaactaattgaactgaaagattgattacgagagatttgtatttatagaaatatataattattggttttgttatataaaatacatgtatataattaccaccaccaatttaatattgttttattgttatttattattgtttggtgaaaagtctcctcacatgaatgttcagtgataaaagtacaaaaatgggtttattgtaaaacttgtttaacgtacatcgtattaaggtagattgaaatttcaagttaaattaaggctgaaagagtcactgaaacaattaaagaacatagaattactatttagcactagtaacactattaccatgtctaccaaccaatacatattacaagataattagtaattggaatattagtttgggttttgtggtgaatgaaacagccaataatatgttatatgatttcacaaattatatatccaactgaaaaaaaaaaatatcaatataactataattaatatgtagaaatcatcatgatacagtactgctgtgattggactcatcctaaggaaatgttgggtttaaaggcaaataaatatgagatccaacgacatctttgatgagaactcaattaggtcatgactctgcctaataataaagaaagctagttgaaaaaaataaaatatcgtttcgtcattttattacaatattgatgttatttaattattggaggtctattgcctattggtatttggtatgattgaaagcttaaacatggatatgagaagatgatgataagaaagaacttatatctatctatatatatata

SEQ ID NO: 191591 - DNA, 2621 bp, Cannabis indica
gttctctctctctctctctctctctctctacatatcttttatatttacaattccatttttgatttgttcagtttgagaacagttacattatatcatgctctaatggtgtttgacaaaatgccaatatggtttttgtttagtatttttgcttagttttttgccacattcactttgcagcttcaaccccatttcaagctttacggataatgatactaaaaatcaaatcttgagagaaagatgcctgctttaatatcaccacgctttctgttttttggaggctcacttcgttttcaaaagctcacccatttttctaggaagacttggtttcatagcagtgtagacaagggacctctcactcttgctagctttgatattaagagtaagattgaaaccacagaaccaagggaaacaactaaattgaaagttcccaaaggtaagaagattataagaagtaatgtgattaagccaaagaaggttgaaaatgaggcagcaccatttgcagctcagtcattttctgagcttggattgccttctactttgatagagaggttagagactgagggctttacaactcctactgatgttcaatcttcagcaattcctgttattctcaatggtcaagatgttgttattcaatcttacacaggttcagggaagactcttgcttatttgcttccgattctcactaatgtcggtccactaaagaaggattgttcttctggtggatcatatagagaatctggtgggaagagagctgagattgaagctctcattgtggctcctctagggagttgggtatgcaaattgttagggaggttgagaaattattaggtccgaatgataaaagagcggttcagcagcttgttgggggtgcaaatcgctctaggcaggaagaagctcttaagaaaaataaacctgttattgtcgttgggacgcctggtcggattgctgagattagtgctgctgggaaacttcacactcatgattgtcgttacttggtattagatgaagttgatgaacttctttcgttcaactttcgtgagcatatgcataggatattggaacatgtaggtagaaaatcgagtgcagaccctaggaacccggttgccaagagagttgagaggcagaccattttggtttcagcaacagttccatttgcggttacaagagcagccaggagttgggggaatgatccacttcttgtccaagccaaaaaagtagtaccacttgaatcaatcccacaatctgggccggtcttgtctaagaagaccgatacaagttcaccctcaaatcctcagacacagccaacagtggagctacctccctctttgaaacactaccattgtgtcacaagagtacaacacaaggttgatacattgagaagatgtgttcatgcccttgatgccaagtctgtcatagccttcatgaaccacacaaggcagctaaaagatgcagtctttaagctcgaggctcgtggaatggtggctgcagagctacacggcgatctgggcaagcttgctcggtcaaccactttaaagaaattcaagaaaggggagattagaatccttgtaactaatgaactctcagctagaggtttggatgtggcagaatgtgatcttgttgttaatctagacttacctacagacacaattcactacgctcaccgagctggtcgtactgggcggttaggtagaccaggcacagttgtgtcgctgtgtgaggaacgagaagttttcgttgtgaagaagatgcaaaagcagctaggtgttcctattcctgcttgtgagtttgtagaaagtaagcttgttgtgactgaagaagagaagattccacagcagttagaatgatatagaaaaagaaagattagtttttttacatggtattaaaatttttgaagtatcaagaactgtttgtgtttatttttgtacatttatttcatccttattttcaaatgcagaaactagtgtcaaagatatatgtacattgataagaaaggtttgtgtttcatatatatgtatgaaagaagaaggttgaggaaaaatccttagtcataaaacatgaagttagatttatttatttaagggtaaatttttatttagtcataatcaacttgaagttagtttctgaacatatgcaaaaaaaaaaataaaaattattattatttttgctacaacactttcagttatgttattattaagtttttaatttgacaaaaattaagttaaggatctattatctactattttgagaaatatagtgtttcaattgtcatttaataaaatagggagttaaatatgtaatttttggaaaatataaaatttaaaatggtacttatcttttattaaatgtcaaactcatgaaagcactaaattgaatggggtccatgaatgctataaatatattaatatatataaaatattttttttcgtaagaatatacgtataattgttttttttttttatcgaagcatttatatatacctcttatattgtataatttggaattcgttttaaaactccccacacatactctcttaaactttttatggccgagttaatttgaagtaatttatataattggttagtgtactgattatttaaatgctaattagtaatttttac

SEQ ID NO: 191592 - DNA, 1767 bp, Cannabis indica
ataatgtttatatatatacctttatatatatagtatatttgccatgtttattaatttttttttttaaagaaatttataataatcaatgtattatacggtagttaccttttaaaactgtaaaaaaaatatatcacttttaaaaataaatataaagttatttataaattagtgaagtaatttagttaatggcataagtgtaataaaataatagtattatgactaaatattacgtaaaaataaacattgtttaataattaacacttgtcgtaaaaataaagagagagtgcaaaagaaagtctccttaacactactcattgaattatttttttaattcaagatcacggtattacaatgcaattgtccaattaaaacaaattattaaatgttctcaaaataggatattttttaaatttctcaccataaaaaaatctaaaaatgtatatatgtctaaaactctctcttactttagtttggcatattatattaatcaaatatcaataatggcaaaagaaaactaaataattttgtacatttattcctattattgtacacgattagtaacaaaattaatgtgatgtaacattatgattttacagttatgaaaaccagaactaaaatgacttatatggtattgttgttggtccatagttttgagaaggaaagaaacaaaagaaaaaaaaaatacttgaaatggcgaagaatgaagagagaaataagtgactgtaatgagagtagagtagatatattaagtaaataatagtatgtatgtgagatgtgaccacgaagctagaactatgtcgaatcactatcttccacgtatggaccacgctattgaaacacgtgtccttctgtagagggtttgattgtatacggttaggcccactcatgtcaataatagagcccgagtcacgagggtcctcatcttctctaggactactagtatatcatctcgtataatattaataagtgtttgtattccctttttacaaaaaaaaaaagaaaagtgtttctattgtattctactattatagagaagagcgcattaaataagtaaaacgtaataaggacccaaaaagacacacatcacatgaaagggagaggacctatttttgtgggaccaatcgtttactttgaaattaccgtaaaatccaacgtgtgagactacccacttctgacgtggcgtcaacgtcccggttcctcttcacaaattataaacgttaacctaacacctcaaaatgtacaatattcttttgtttttttggctgcaaaaaatgtactctatatttaattaccaaaatccttcgatatgcaatgtaggattaattaaacacgcattatactttatattttaaaattgtaaatatttgctatctaatcaatctatcttctcctttccaaaaaatgtagacattaataatgattaataataatgtatttcaaaaatagagagtaaggaattattaaaaacacatgtaagaaatatgagtatattctttgaacaaaaggtaacaattctcttctcagtcggcactatacgagacttaacttacatttttggaagctggccgcagggttcttcaagatccttgaagtggctaagtcttttagtgtctgtaatttttaccatgttaatcatgagtgtatttctggtgtaaatgacctagttgtccaagctagagtgttgagagttgttgactctctaattttctcatcgttaatttctaatttagtgataaagatttagattcatgtagtaaaggtaaaatt

SEQ ID NO: 191593 - DNA, 2866 bp, Cannabis indica
caatatttatgaatcaaatctcctaagttcgtgccgatttagtggtgtgtcaaatgaacccgtatttacaattatgtaaatgttgagacactgatgggagtactactgtaactcaaatttcccttattatatttgtgtcattaatgacctgaccatactaaaagacagagtagtttacggccaataatggctctgcggtgtctgcagccttacatattcactaattaattatactatcctatatctcaccgacttctacttttagcttctttaatcatgtttattcaaaagctctgaaactttatcttgtttcgtcttttgttattttatattaatttttctattaatggcaggaggcttagttaggacgagcagctgagaagcttgatatttcaacccaaaacccatgtgcgtatcccatcccatcccagctgtgttgagagaccaaaacgcaacaaggatgataccttcatgattttcgagctttattaattataacaatgaaagaaaaacatttattaaaaacatataacaacggtttcaaatcattcacaccttgtcacaacaactaatcattcaatcacattaattgggtttaagaatgaaaatgctttaaatgtgttgtaatgtttgccgcactcactttctctccctctctctctatatcccatccctctcttctatggcttaatgctccattatgtagttttgaagatagtatttttaacaagcatagacacttgttttgagatttctgcttctgggtattgcttgttttttagtttataaaatctttctgacttctgtgactacttggaattttttgagcaatgggtcacaatctattattctctttcttttggcttttatctcttctggtcggagcttgttttgcggattcatatcaagatcaagagaaagatagggtcactgagttgcctggacaaccaaagaacgtggactttgctcagtactcgggctatgtgactgtgaacaagaaagctgggagagcattattttactggcttacagagtctccagcgagtcgtaaacctgagtcaagaccactcgtgttgtggctcaatggtggccctggttgctcctctgttgcttatggtgcagctgaggagattggacctttgcatatcagacctgatggaaagacccttttcgtaaatccttattcttggaacaatggtacgttgactgaccttaaaaatggccacttttgtattattaattaaattctcactggtttttgttatctgggcagtggcgaatttgttgtttcttgagtctccagctggtgttggcttttcatactccaatacgacatcagatttgtacaccactggtgatcagagaacaggtataataatgatctcagttttgtttcaatttgttagcttgatatgtggatctatatgctgtttgtattgttttgttaattcttcaaagaattgagttgatcttgattccatttgatgctttactcatctgggttgtttgtgtttgtagctgaggatgcatacatatttcttctccattggtttgaaaggtttcctcagtacaagcacagagatttctatgttgttggagaaagttatgcaggtactaaaatttactttacctctaattttttacattcaacatttttggttcctaaacttccattgcaatgaaggaagatctaaatcattacttttgtaggtcattatgttcctcaattgtctcaaattatttacgaaaaaaacaagggaaaacagaatccagtgatcaatttgaaggggtttatggtaagaaatgtaggattgagaagaactttaggggtgatgcaaactgatgatttaaataagtaatttgtgttttttcacaatttatggcaggtgggaaatgctgtgactgatgactaccatgactatgttgggacatttgagtactggtggactcatggtttgatctctgattctacctatcgaatgttgcgaaggaaatgtgatttcgggtcctcacaacatccttctgtggaatgcatgaatgctcttgttattgctgagagggagcaaggaaacatagacccatatagcattttcaccagcccttgcaatagtagtgaattccttaaccgcaacttacgtggtcattatgtaagttttcataacttgtttcttttgccaagaaaatagagggaaaaaagataaacttgtgaacccttttcattggtaatgttgggagtttgaaacaaatgtctgatttgatataccttattgttagtgagaaataacacatatatgattttttcttactcttttcaaactcagccatggatgtcaagagcctatgatccctgcaccgagaggcactcaaaagtgtacttcaatattcctgaagttcaaagggcacttcatgctaatgtaactggactttcttatccttggaaaacttgcaggtaagtcttcataattgagatattggatgcatcatataaaattttaacattctacagcagtgtgatagtctattttttttcagtgacattgttggaaactactggacagattctcccctatctatgcttcctatttataaagaactcatagctgctggtcttaaaatatgggtattcaggtatgtttacctaattcttcttctaacctttccttactttcctctttttgactatttgtatagatactcataattttgatcagtaattgagcaacttaagtattggtcagtgacaaactcatattaagtaaatataatcaaaaccatgactttcaggtagtagttcagtacttcaggtcacatttgaaccattccacctataaatacaattttagaccctgttttcctaaaagttact

SEQ ID NO: 191594 - DNA, 2907 bp, Cannabis indica
tttgacatcagctgaattccaagaatgcaagttacctgcaatcgtgtcttgatagtgtccaatggggtcgttatgcaggatgctgttgcgccagcaacaattcctccagtagcttgaaccaatactatttttctttcttcaggaactaacgaagaatcagacccgtggcctaagaaactgcagtcataagcaatcatccataagtataatacatatgcctatttcctgttgctcaaaagttatttggacattcagatcatgtttggttgcaaaaaagagaatagaaaagaatatatttatagttcattcttttgtttgattgcaatttaagatacaggaatgtcatttttataatagaataacattttcacaaaaatttgtggaatggatattcatacaaatataaggagaaaatactaccatgcctatacactatttcttaaagaaataaaataaaatttgttctattaatttttactctatttcattttctctacttattctcattcttctacttccactactcccaacccagagaacaaactagtatcttgtatcttcttatacatattaaattggaataacttaagtatggagtagactccaaatcaaagtgaagcctaacagcattgcctttcaattatagccactaattaattactagccaaaaatttcaaaaatcaacatcatccccttttgttgtactgatacttggtgaagtctgggaacatagtatataaagttaggtcgcatttagttggaggtaatgaaatgaaaacgaaacactttattctattcatttgtttggttgcattttaaagtattagaatgtcattctaatagaatgacttttccatcattttggtggaatagtcattccattttgaaatggaaggaaaaccattccaatgcaaaatgagaaaaaacttaatatttttctgatcaattttttttatgcattttaaatttgattccattccattcctattcttattctcattctcatttctattcttatgttttcattccttccaaccaaattgtcaaatcttccagtagcataatgtataaagtgcaatatgaaagaattccattgctcacctccagatcaagcgctgacttgaaccataacttgcccaccaaacagcactggagggggaataagtcataacggaaagaccaaatcccctgtacaatcctcggatgccatcagccttcacaatcttacgagcaacgtccaaaccaccattatagtttgcttggccagaatatccttgtaccatcaacttttgactaatctgataagaatcgtaaccataataaaaattgcattagcatacccatttttttacttctcacatatgttgaatatggtggtggctcaaaagatcctagtagaccacaccaaatccaaattagttctcaatgcatatcacaggcatccacttttccactttttctattcttttgttaactattttggttgttctttatttcattgcattaggtatattatttagcactccaaatgagatggcatgaaaaataaagcaacaaataaacacattaccacatcaattggaacaaagacagcctgagaaaaaagagaagcggtcatgcccgctaggccatttgctatagctgccttggttggttctgacaattttactggttccaccaacttgaaggctccaatttttgtagtctctaaagcagtaagaaatattatcctggcaggaactgcaccagtgatcactgtgccaaagcctttgtaaagtccaggaatcccatctcttcttagtaagccacgggcgatagaaaatgcattcctttcaactgcatcctttgaagcaacctgtagcctggttttcacaacactaacagggtacagtgcaactgtaattcctgtaaagagaccagctcctacgacataaaatttagttttgtcaagcctgcagaagtggatgaaaaagatacaaaaatcaggaacacaaataatccaacaaaaaggcacagtaatcaataaattgcacaagaggctgaaactaacattaagagggcgggcaaaataacaaggacacacttaaaacacaggaaatagaaacaaacaaaacaaagataaagctcccaaatgaccaagaagaaaagacatcataaattttaacgattaagatcaaccaaaagtttaagcatccttttccctgtaccctatctacacaagtacacatagtgtttctcatagtaaaatatcaaactcgaagaagaatcaagaaaccacaaattcaaaggaaacaaccatataattgaaattaactttattttatattaagagtatatgtaatgtaagtaggtagaaaacattcataattttcgcaagtaattaacaatggctataagccaaataaactgggggaaaatcttctcttttatttcattcatttctaatatttttcgtctcaaatcgatcaaaggtgcaattttacaatttaaagtcaacccaaaaagggttcaaagaaaggtagcaagacaacaattttcgtacaagaaaacgagaacaaaagagaacccaacaaattaaaatgcacaatacaagagacctaaccgaaagaataaaacagcgattaggcgctaagaaacaatgtttaaactccaaaccaataaaaagaagatggaaaatcgtacttgtcccagttaatctcggtctgactaaacgattgggctccagcgttcgatgtagcagccatggactctctcccttaatcgcactggttaccaagaaaaactgaatccagaaatgaagatcaataacgcattcttcccagaagaaactttggaaacacacttccttgttgttgaaatcaatttgttaaatctgaaaccgccaaattatgggtttttgtttcttca

SEQ ID NO: 191595 - DNA, 4456 bp, Cannabis indica
ggttattagaaaaacaatagattgtcagtcgctctgacacgtacttgtgtgctttctaacctacttggaaagaaataaaaaattgacatcaatcatagtatcttcctttattctacctaaaggatgaacaaaaaaaaaaaaaaaaaaaaaaaattaacaatagtactcactgaactttcaaatatggagagtagtttacactttgtcaatcccaatatcaccattcttgaacaaatgcaattccatcgaaagtcatcttttaattatgactttcaatttcttagtactcatctgcatattaatgccaaaattataattatgatgtatccagaaactatttaattaagacttggtgaaatataaagatgaaactaattacttacctcataatatagtgtcccacaatatactttgcaatgacacaatgcagaatctttggataaggactctccattaagtaactcagacctgttactgtcatcatttttttttctgacaactggtatcctaagacccagaagaaagaacaaacaagaaaccagtaagacaacaaaggcttcagctaagtggcgaagacataagcttcatggtcattaagaagaccctctgggagtaagctcattgccaggcagcattcgaaaccggttctcaaagcccacttagcaaggttgtgagctgcgaaattgcagcatctaggtgtgtgtttgatcgacctgcagcatcattggcattacaagaaccataatcctcatcaccatgcacctggagagagatccggtgtgaagcaaatttctctgatctcaatttggactagctcaattataaccagttaaaattttctttcattgtccaagactatggcttgtatcatgaacactcaaatggttctgctcttgaacatttgtatgcagaaaaaggaatatgggaaatagcagtcacaaatgagactaaaagaaatgaacatattttcaaggtcaccagaaatctccacaggagcaacatccattcttgaagtggtggaagcggtatccatctcgcactacaagttcccttgaggttacaagggaaatgagctttattacctggtgacaatcatggcaaactcgaagatttttcattacatggattggcatccaagtaggtaggctcattagcccaaaagccacagcaagtttttcactgtggtagcatggagaacgaagagcgtttgtaggactaacatagagtcctgtactttctattttcttaatagtctcctccagcattttatagatgtccgtgatttgcggatgattagtgtcatcgacaaagaacacatgtaccttgttgtcaacttctatccaactacgacctggattcttctgaattgttttctccctcataagttttctcacatttgcaaagtcctctagttttccagattctgaatatatattggctaaaaggacataacatccagagtctttaacatttaattcaagcaaattcttcactgcaaattctgctaattcagagttgtgatgggtccggcaagcacttagcagagccccccaaatagtagcatttggtttagagggcatttcatcaattaaattcttggcctcctctagtaatccagctctaccaaacagatccaccatacaagcataatgctctaatgtaggggaaatgccaaaatcattagtcattgaattgaagtaatacttcccttcatttataagtccagaatgactacaacctgaaagtacagatacatagcttatatgatctggtttgcaatttgtcttcaacatatcctcaaaaatttcaatcaccttattgccatggccattctgagcatatcccaccattatcgcgttccaggatatcaaattcttatcacatatagaatcaaaaactttttgagcatcttcaacacggccacattttgaatacatagtaacgaaactattggcaactgagacattagagccaaaccccaacttttcagcatgagcaacaatttgggttccaagtttaagtactgctaaactggcacaagcactcataacggttgcataagtgatccaatcaggattttccccttttcttctcatcaacttatacagcttgagaccttcttcccaaaaaccattctgaacatatgtgcctaacattgaattccatgtgatgacatttcgatctggcattttatcaaaatattctcgggctttttcaacattaccagcctgagagtatccagtaatcattgttgtccatgatattatatctctaattggcataagctcaaaagctttatttgctttataagtttctccacacttcacatacattgtaacaagagcattccccaggggtacagagtagttcattccagccttgactgtaaatccttggagctgttcgccaacaaaaatatacttatgaccagaacaaaccccaagaactgtggtcaatgtaaaatcatctactgcaacagaaccctttctcatttggttaaacagaaacaaagcttcttctgcaagaccaaactgtacaactccaccgatcaaagaagtccacgacactgcattatgttctgtcaagctgttaaacacctgccgtgcaaagtttaatcgtccacactttgcgtacatgtctattaaaccactgcccacatgaacatctagactctcttctgtacgaagaatccgagcatgcaaatggctaccccaaccaagatcatatatgctggcacaagcactaagtacactagcataattcattggattgggcctaaaaccattgttccacatctcaacaaacgtactaagactctcagctcctagaccatgttgagagaagattgaaatcattgtgttccatgatacattgtctcgttcaggcatatggttgaacatattataggctcttccaaccccataaagtttagagtaaccataaatcatactattccaacaaaacaaactaggtgttcgaattcttaaaaaaaaattctcagcagaaactactgcactgcacttaatgtacatatcaataacagaactctgtataggcatgttgcttctgaaatccaatttctccactagattatgcaattggcgagctaatttgatcaggccaagactaccacaagccttcatcgcacaagaaatcgaaaatgggtcagaaacagaaccacaacaccggatcattgtagcaaaaactttcatggtttccccaggttgtccattatggaaatagccagacatcatggtagtccaagatatatgatctctctcaggcatttcatcgaacagcttctctgcttctcttatttgaccagaattaaccaaagcattaatcattgtgttccaactgaaaacattacggtattcaatactactgaaaacacggcaggagtcattaatcaagttgcaactggagtacatatgcaagagatggttttgaaggaaagtcgaattgttcaagcctaaggagatgagttgaccatggagttttcgtgcaatgggaatggacctgagagctgaacaagttttcatggcttcatataacttctgggaaataaccatataagattgttgcactatagggtcggacaaaagaacacatttggttgagaaatgattgttaagagccatgagagatgagcaacacatttcaaattgggggcatggatatggagactgaaaaatagtttcaaagtaaggaaatcatttagtaaaagctatatataactcacaagcaaaaggatcaaatctcaacatctactgctttacccaataacaagaggtggtaattgaataaaaccatcttaaccattctttaataatttcataagcaacaacaaaaatggcaatagaaatcttaagccagtctttttatcaggaaagaatatgtatgactagttcataataaatgtataatatctcaaacctgtcctcaggctagtctacttatttaatgtcactagaatttgtcttccagcatggcttgaagcttcaccaaatatggactgttgagctctgcaaaagaaactatcaatcacctaatgtcatcaagagaggtatgcaaaattcctatatcacaaccactgattgggaaaatttacttgctcttcatatcatatatatgtaatatggcataaattatcttcaaaccaaaggcatttttgtattttgaaatcaattaaccacaaaacaaatgtcattaaatatagtgtcctactgtcctatacgagaacaatgagttcaaagataatagtatcagtatttgatttgacagtttgactttgacgcaactaaaagttgaagatgatggaataccttgataaccactaaattcttggctcaagcaaggatgccacatcaattatatcatttctatataagtatttatgtgttccaaatcaaaattcattttgacaattaaacaacgagccctcaagttgtaaaac

SEQ ID NO: 191596 - DNA, 3174 bp, Cannabis indica
cttctagtttccaagaagatggttggtcaagactgaaatctcttttcttggccgaacaaatttgatctagtttttcaagaattcgatcaaaggcagccatcatggcatcgaaattattctccctttccgacagatcctcgatcctttcttggtcctatttttctgcctttagtttcattctgtcttcccagtaacaccaaccggtctaacacaattcaattcttgaaagaactatgaaaagctattttttattgataggagcaagaatagatacaaaattccaagtttcttgaagaacatggcaaactcccaaagtaatcttttactctaaacaataacacagaactcatcctatcctcataagactcaatctgagaatttataggctagactaacaaggacccttaactagccaaccaatagcaatctaagtattagacaacaattaaacaatcatctcagccaccaaggacttgataactcaacatccaaaatcctaaaccattatactattagactaacaacaaggtgtaacaaatggggaaaatggttttgtcctgtaatagtccaggttgtatctcttacattgaaatatgaagctttttatgtagaaattagaactgattatgtattgtgtgagtttgtctagaatttcgttggttcttgaaagttgataattcatgttgttgctacccattcggttcaatttttcttttttctctcaatggttgtccattacagattgcaaattctgaattattgggtactacttagtttgtatttttcaaatgttaaattcccaatttgcagtgcttttggttgcaatgtgtcgaaagcatatccaaatcagaaaataggaaaatttatgtatacaagaatgaggactacataacatcaatgtttaccttcattttcttctgaattaactcgtctgtttttcccttacagaaaacaccatctgctgcttgtcagctagccatgtccgtgattaagacttctgcagagaagcttgggcctattgtttgtgaatttttaacatcttgcattttgaatagagatgctgtacgaagtgaaaacaaagaattttaccatgaaatcatttttaaaattgcacagtgtgctcctcatatgcttcacgatatcattccaaacatgtctcaagaattactggtaagtaaactttttcaatctgtgttggtttttgttcaatgctttaccttacatcagggtttacagtcataaggaactcattagttgtattttatgtagtatgcatctttctgatatacttgaatttattatatctatttaattaattgtatgattgtatttgtagactgatcaggtagatgtcagaataaaagctcttactctgattgggaaacttctttcactgcctgagttgcatattgcacaaaactaccgtaatcttttcatggaattcttgaaaagatttgttgacatatctgcagaagttagagtgactgctcttcaatgtgctaaaatttgctacatgacaaatcccactgggacagaatcacatgaagttctctgtaagcttttgagctattagttttctaattgtgtcatagtggctgattttactttttgcgatatagactatttagtttatgattcttttgttgatttgaacagctgccctcgagggacgactgcttgatattgatgacagggtgagagtggaggctgtcagtgttgcatgtgatcttgctaggtctaatttaaaaactttctcgcgtaaattaatctctctaactattgaaagacttagggataaaaaggtacatctacattatacattctattttcccaaagtctgcagtattattcctagtgtgggtttttgtcttgttttgttttgaaagttattttttaatattagtataatatgtatatttttgttgtacatgcagatatctgtaagggaaaagactctggataaattattggaagtatatcgtgattattgcaatgcatgttctgaaggtcgcatgacaatatgtgacgaactggaaaaaattccatgtaaactttttatgctttattatgacaaagactgtaaggcgttcaggtttgtttattcacatgtaatagctggttttacaaaataattcaatggttgtctggtcaaatgaaatacttccacaattatcacacaggccccaaaacatggagctcattttggtcaaagatttatttccagcacttctttctgcagaggagaggacaaggcactgggtccatctcttttcgctttttacacctctacacgtgaagtcattgaacttagttttatatcagaaaggaaggtagagtttcctatcaagagaaataaaatcatcgaaaactattatgctgtttgattcagaatactgcgatgaacgtgttggcttttattttgtttacaaggtctctactattgtaggttgcagaatgagatgcaaacttatttggctttcagagcaaaagagaaggtaaattatcattgccatttctctgaagttgtttccactttccttcctcaacatgatagcattgtgttcaggaactactttatgttaattttcagttgcaattattatttaattctttattttgattattttgtttgtttttttttgacatttcattatttgtcttcgtatagcatgcctagtttcacttttgctcttttgttcgttttagttgtattttataagtgaggctccataataaatttgggaggaggtcaatctcagtctcagacatatgattttgtctctctctctctcaaaatattttatccttccctttcttgtatttttagttttttgttattacttgaagtgttgtgtatgttttctagcataaagacttcctaaagtttttgcttttcaatctagcttctaagatactttttgcaattgtctttgagttttaaaacaataacttttattttttattgttaattttctaaaaccaatttttctgtttttaaatggaaaattttgaatttctactgcatttgtgggtgtgtaggatataaagaaatactttgcctttaaaaactgtgaattttgttaaagaaaataaatcaaagggcttaattactatttttttaaaattcaatgtcttgaacttgcaattttgttcttaaagacaatttataaataa

SEQ ID NO: 191597 - DNA, 4566 bp, Cannabis indica
ttaatgtgtttgttttatcataaggtacactccaataatagaaccaactcatgtgatttagattactaaaagggacaaaaattctcattgagaacgagaatagatggtttacaataataagagcttttgtgcctaaatcccaccaaaagaatcaaatagctttgaagcatactataacagttcaatacttcaatatagaaattcaatatctcttataccacattcaccttgaagctttactatcaataatccatcttcaacactgtagctgaattcttcttctttttgttccaccatgcaacgctttggttttgagctcgaataggctccaaatcggccggtccctctccctttaattatcattgtgtagcctgagacttccaccctgcaactcactgattctacagcccctcctgagttgtacatgtcaagcaaacctaccgaagcaaaccgcagaccattaccgaagacctgccatattttcatagtttattgttaaacattgtaaaataggaatttttacaaagaggagaaagaaaacactgaccccaattggagaaattgtatagatttcccattgaagggtgacaagtgaaacttcaagacttctcttctttggcaatatagaaagagatcctgcaatacagttaatgcattacttagctgagtaccaaacaagcctatataagttattcaagagattagaagttaacctgaattgaaggcatatattgcacaatctccatcccagctttcactagcaatatcttcaagaaactcgacatcagcgggtttgacatgcccagaaatggatgttttagtagagattgagatgtgaatatcttctgccttttgtttcagtggccaactaccagctccttggcagttaaacactcccacaaccccagatagcttattcaagttccatattttcatcaggctgcagagaattgaagaagtatacgaaatgaaaaagagagaacattaacactagcactaaacaagaactaatgaaattaaagagtgtaattttattatgttaatacctttttccatccatcactggatcttcaaataaacagtcacgagtaggtcggcctgcatatctagctcttagcaccgatccatcgggtaacaccagctttttaaggatttcgaaatcttggtcacctggtttatcactggatttacatgaaatatcagtaagataagtaattttctcattcaaaagtctgtgaaatgactcattagcttctgtatctcaccttacatatactgcacatccacccaatgctcttgctgcaccatggaattcagcactttcatgtttactctggaaagattaaatgaaaatactcagattagagagactcatattgaagtgtctacaagttattaaatcaaatttaagtctaaaatactgaaaattacaatgatttgaggcatcttacatggaacatatcccaatcaggtaccacaatctctcctaacagaaggctattaaaagcaacagaggcaatgtgcagagtctgcaatgtaggctctcttggcatgaaatcctctgatgctcgagcaacggcactcttagaactaacataaaaacaaatcaagcaaacttagattccgacattcaatcaaaataaaacgaatgtgcaggattgaggtttttcaaacctgaatatagaatctgagttgtgactcatgcagcaaatcaggttgttgtccccaaaatttcttgcaacagattcctccagagcttcttggtactgtctagtaattttgacccgaccgccattaccagaacctaaggtttctaacagattctgaacatcaactttaactccatccgcaccgcagcttgcaagatagctgtgtagatcattatagaagctgagaatcttttcagggtctactagtcctactccatatttctccaagctgtccatggcaatatctgtaagatttcctgtgttaccaggtgactgaattgggtaagcaatctttggattgtatttttccattgatttcgatgaagggaggactcctccccaataaccagctaaagcatgccacatgtaaacaaacctgtttagataagtatcaccttcatggttagacattacaattacaaaagcttatacaacagagaacaatgaaatctcatattggaagccttactttagtccatatttctctttgatgagattgatgaactcatgaagatcagtggaagtttcttttgatgatgaacttctgaacttactattttctttgatgtttaccaatctggttgcaaacctatatgtaaacaacaaaagaggattaatctattgcactgaaaaaagatggaactaagaacattataatgtatcctactaatctatggacttactgtgtcccttcaacaaatggctcgccttctttatggaattcgtttacagtttcttgccatccatcgtcgatgattagaaatttcggtaaacaccctccttccttaaagctgcaaagattagaagattagagcttgaagacatgttaggctgtgaaagtaaaaatgtcaaatgtatttttcatagattcacttatattgtaccttttaagtccctcttcaattccttgtggatcgactttagtgtaaaaggcatcccaagtgcaccatccaaaccaatctaaatgtgaaggaacctacatgtcaagatataaatttcattaagatattcacaatgattaagcataatctttttacacaaagcttaaatgttttataagtcattactttcttcatctcaatatgactgaaagttcctttatgcttagccagtatcctacaacaatgaaatatatagaaaaagtaacattagtagttaatcatggtacatattaactaatctgttaagttttatttaattttcaactgaactcaactcacttgatagaatctttcataagctcataagggttatcccctgaatttacaaatagtgattccattgcttgtgaagtttggaccttgtcatcccctaaattgatatcaaccaataaaatagaaagacaatctcaatccaaaaattttcccattttagaatcaaacaaaggactatttcaaagccaaaaaaactaaccactttcaacacataatcgcaactcatttttgggatttccttccaaacttgagcggaacatggcatcaagaacaggtaagaagagaatgtaaaaggtattattttcaatagattttattggctcagaagataatatctcttcttccaaatctaactcttcttttgcttccaatagaagcatttgagtttccatggcaatttcactagctgattttcccacacgtggtatcatccaccatattttgaatctaaacagagataacatcttaaatcctctgcaataaccaaacattaagaaatgttatcaaatatctccaaacatatatcataccaataataacaaaaaaaggagcttactcaagaatcccaagactgaaaacaagacgagaactggggtatgcagaagtggccccaatgaaagccgagccattgctgagaggttgtgaaacgacaacgttttgaggaactccggtcaagaccagcttgtctcttaccatgaggcagccagccttgatggttggtaaggcagtgattgtcatgatgactttaagttacttactgcgttcaatcagaaaaacccagttgagaaattaaagaaagatacaatctttcacaccaattgacactaactatgatttgttgtatttatattataagaaagaattagaattgtccaagttcagtggtaggttggttggttccagaatacagattacagcttttacaatgttgatataaatgatcccaatctaagggcaatgccacgtcagacacacgtgggatcttttcatatgaaaaatgttaaagggtataagtggtattaaacattttttatgtgtcaatatcgctattagtccaactaaatatcagatctcatatagtttaatataataatttttaaggattattgctagtcaattataacagaacatgtcaagaaggtgctaaacactactgatacttaataagaatgctcttttcatatgaacattgctattaggcaccactacttcttagcaccttctcgatatgtcgtgttacgattagactttatattaaattatataggactcgatatttagttggaccaatagggcgatattgacaaataaaaaaatgctaagcactactaattccctttaacatttctctttccatatatacgaaggtcaacaagatgaaaatcgtgctatatgcacgtgtatgtgtgcaaacacgataacagttaaaagtgggctttgtcttgaattgaaaaaaagcacgtgatcaaagttttcgataagaaaaataatggagctctcaaaataataattaagtagttaatttctctctttttattgattgattttttttcttaaggaactaaagcaatctccaaccttgataccaagttttgtattgcaccaacaacatcaacgataagtttggcacaatttaaaaaaaa

SEQ ID NO: 191598 - DNA, 664 bp, Cannabis indica
gagttattaaggggtgcgtgtgagggttcttatatacatttttttctttagtatagaacaaaattccaaatcaattgacatcatcaatatcccctagacttatcacttgttgggttggatctccctctgaaatagaatctcccactcaattatacattatttcatatttcacctaaaaaaaactaatacatttctaactcaaaacggcaaagctaaatatttcttgcggaagtgacggaaaaatcaacaggaagacttaaataaaataatgggagctgtgaacatatggaaccccattgaagtagctggagaagcttcagaaaattccatgtctcagatccaatcttcatctctatccgtcgagccttccctccctcttcctcaaatcacacctcgcatcatgtaagtctttcctcctccttttgcttttttttttttggttccttttctgttaactttggaagcttgtacatttttacgaaaattgtttgaaaaccagagaagtcaaatggttgtataattcagagaatgcgattactttttctccttttctttttaattggttggacatagatggtattatataaaaatccaaagattcaatctactttgtcttttttatttttcttaaccaacaaacaggggttttaatctctctctctct

SEQ ID NO: 191599 - DNA, 1442 bp, Cannabis indica
ttttttaaaaaaaataacatatattatataatcatatctagtattccacttcctttctttaaatacgcctattttaattttaagggtctctgagtttataataagattctcttattatagtaaggtttgatatcgttttaccctcccagaaataaaataaatatacaaaagcattttataaactacaacataactgagaaaccactcaacaaatattatatataatatgaccaaagaccagaaaaaactaggccataatttaattttaaaaacaatatcaataaatcaatataccagtaaattcttcgcaaaactgcataaagatcttaaacaaattaaaaacgataaacaataaaaaaaatgaccacttattagtgggatgctgcagaactatcaactatgtaataattttaatgctattagtggggtgttttttatgcttaccagctatcttcaaatcacaattgttttttttttattatattagaattttgaataaggtgaatgaaattttatcttaaaattaattgataataaaaatagtgcattattcttatatattctattatcgttccaccacaataatctctccatatatattgaactaaaattgcaggccacatcaaatacttggggacaggctagcccacacttattcccacaaatagataataaaattatgcctccctttcaataaccacatcttaattatgcctttcacggagtagtgatgcctgcataaacaaaacaaaaaatgagaatccattgtgtatttgaaaataatagaaaatgtaaagctgtgtgttttaagataaataattaaatatgggccgggacttacttccacacttgaagtggcgagggaccctgcgaccgcagccttgaataaggggaattgcgcgtttgagatcgatataggcagccagattgggcgttataacttggcaaacacactgaacatgagtcactcttactcgttggcaacacgccgccgagggaggcatcccaatcagcaccgccttgcacgcgttcagcccaatccttctctcctcatggcactgcgcgttgctaagttgtgcactcgcaacctccaccccataactcatcatcatcatcaccaccatcaaacccattattcccctcatcatcattttcattgttaattaataattataatattagctctcctagtacacaccacaagggggttgtgatcataaaaatagatgtaaggttatatataataataatataagctgagatttctgaccggcttttaaagtatacctattgttctttttgtggtgactttttggtgcatatgcattgagtcgttattttgtcgtttttgttttttcttcgagtcaatatcaaaaacataatgcatgtcggcttgttggtttcatcacatacaataggagtgataattgtaattttttatt

SEQ ID NO: 191600 - DNA, 2215 bp, Cannabis indica
ttgtgtaagtgacaaagtagtactggtggaatgacgcctatctcgagaagaagtggaccgagaatgaagccgcctccagagccgagaagtccaccaacagtgcctcctaagaggccacatagagcacaaaatgcaagatgaagtacactccattcaattgaagcctcacagatgtattctacattgcctgtgctcattctcttcttgtgttctttgtataatttcactgcttcatatccaaacaatgctagcgctattgggaactgaatgaaaacagaacataaaaaaaaattcaaaggtgagaaaaagctaattgaccccactaaggtaaagtttgagctagaaagaaaaagctgtctcaatgaataataggctacattgtatatatgtttggtacctgtaagaagaaaaggacccaataccatgtactgcagactttcaaatcattctgtaatcaacaaggttgtgacaaaaaaagaattattagtgagagagtgagaagtaaagggtagttaaaacaacggcgaagatagactagccttgacaatttggagtagtaggaagcacgcccagacagccactaaaaccagtacccttttccacctaaggttcaaacacattacttcctacaacaacattaaaaaaaagtttaagttgacctgactgagcatgtgaaagaatgacatataatatatcaaataaatatatactaaagtataattttctcaccattgttgatttctcttccccagaagataatggcaggtaatccataccaattataactagagaaacacaataaggagaaacagaaaatgcataattatatttcaaatccaaaaaattaaacaccagaaagaaaaaaaatcatgtcaaattgtctcacgttctccacgagagtctacagtttctagctgcctggccttttgtttctgtagaagtttgagaaattagaaaaactgagttactttttcttaaaaaaaaatagtaaggttcaattatcatgtatgaaatgatgttaaaaacactcacgtccaaggtttcattcttccacttctcgagccccataacgaaggaccttgaagaagtccctgatatattatagacaattaaaaaggcatcagctctaagtgtttcaaaagagaaaaggagtgacgataacaatctagtaagagagagaattagaaaagatttgactaacccaagaagaggataatgatgagaacagtgataagccaataggggaacacaacgcttaaagacacaccaactgtgataccaagcatcaacatgggttggaaaagaagggccaaatcatagtctatgatgggcacctcttttgttggatgaggcactcttagattgtaccaaacagacgatattgatgcccccataatcatgcctgaaacaaaaattccagaaaaagcttccccaacatcaacacatgacactataaaaacaaaaaggtgaaacctttttccatttttttaatatttttatatgagacatgaataaaagagtaaatagaaaagcaccaagaataaaaggtcaacctcaaagttctgaaaaagcccagaatgagtatatacacaaaagttttgagacatgcaatccataaccctttcgaacaatattcatataataaaaaggaaaaaaaccataaaagagtttgcgttacatttagagatagcagcagcggactttgtgtcaaaaccaactatgagagtaagcataggaacaaatatgcctccacctccaactcctcccacagttccacaagccgagcctaaaaatccaatcagtgtcgccattacaagtctccaattaaactccaattcctgtaccaaataataaaaaaaaaattaataaaaggaagacatggacatttattcaaacaccaatggaacagagtgacgtacaggccagactaatgcttcggtacttaagtccacaggagcatgatttgatgatgagaaacgagtttggcgatctgggtagtattcatatcgttgtttgatgtaaataagagaaagcgcaacgacagagaaacccgacaaaaggtagagaacaaatcctttggtggtgttagtcatcaccattagagcccgttaaacgacggcggagacaaccagattaaaacgggaaacgacaatattcagttctctgcgttttgatgaatggagagaggagaatgtgtgtaagagagagagagaga

SEQ ID NO: 191601 - DNA, 724 bp, Cannabis indica
aaaaaaaaaaaaaaacatttttctgagagaaagaaagcagaagaaacacatggtacctactttaccataaaccatataactcagatcaaccttattgatttaaagtctttatatgaaaactaaaagcaagaaattctgacccagattgagagcatccacaaacataacaaattgacatagatatagatatagatacatatatatatatacctgcatcgtaaacaaggctagtacgaggaatagtgttaggagagtctttggaagtagaagtgttgcaggcaccagtaacgctgcgtctaaggacagaccagcaaccgcacttggcagccataggtgtatcgagttgcagggattcatgggaagtggccataaaagtagttgagtagtaaagtaaagagaggtgaaaagagagagagatcacccatggttaagagttaaggctaagagggtaaagaagaagagaagagaagagaagagaagagaaaggaatttttgttgggtggtggtgctgggtattggtgttgctgctgctgttggagattgcaggcatcatcatcgccatcatcgcagtgtgtacaaaagaacttttttcccaccaccttttgtgtggggatgcttttctttctctctctttctctctccaatcacctcttttagactctactcaaaatttactaaaaacaaaagtaaatatttaaccctttctttttcttcttaatttatt

SEQ ID NO: 191602 - DNA, 2477 bp, Cannabis indica
aaccttacgcatgatcacttattcgacagatgtcccaattgattatggtttaagtaactaatctgaattgggaaaagggagtatgataagaaaaaaaagaatatactaatacgtttaattaaagtaagataaatgatatggttctccaacattcaattgctaatgtatatggcttttttcttcacttttttttgtcctgtataactagtgtaaataaagctcgatcttttctctttacttttattctttaagctttttctttttgctagtgttgagggacgaaatgttattccggaatggagatgtgggctctctctctctgcctctgcctttctccaaaacatccaaggaaagctaacttgtagtaagccttacaacttcccatggacttggaaaaactttactgtacaagttaaaacaaagaaaaggaaaaacaagacactagaaatcaatgattggttctccaatagtgagattgcgctccacagtccatggcaagtcaaagatcttggctgtgataaatttgaagatcttgtttacattgatgttgtacgttgcacttgaaaagaacagcgttgcattgaatgccttcgcatatgatcttgcctgttacacacacaaacaaaacccaaatcaaatttacacatctttccttaagttgatatgtttagttaatatcttttgcatgattgaagtgttatagtacaatgaatcacaaaggtttttcttttcctcatattggtctgtctgtcagtaaattgtgtggctatgtgttgtttatcgattggtgaaagggacccaatcatacagttaaatctaaaaggaaagaaaattattggcagatctctaaaaatatcttgcttgaaacttaggtcaggtggtcagtttttgcggccaatatttaatttgaataacaaataaaacattcttagggttcaacattcaaggaagaaggatgtatgaataatatattagaaatcatgcttagcaccctttattggtacaattgagaaatcatgcttagcaccttataacatttagtggtataattaaatatttaaataatataatgatttttatagaatattgctaacaaattataaattgccacctctaagttgtgcttgcctctcttatagtaatactgataatttatttgatggtaagctttcactatagtgtgtcaaacatgaaagaaaaaaaaaaatgaagtaaaaccatgaattattctcaaatcatttgaacatttggtagtttgcgtggtacttgttccatatcaatctttgtcagctaaccaattcatgttgttgccaagaaatgtcacgaatagtttaattgagagactcggatatttacctgacttgctattgtccattgcaaatctatgggtagttggatgaaatcatcgaactttgttccaatcaaaactggaattgccgtctacgaaaacccccaaaacataaaagagagggaaaagaaaatcatttaggcaatatcaaccacaacccataaagataattagaaaaagaatccacttttataaaatatagtacataattatggataatatagtaatagtatatatacaatatattcatattacctggttccatttccttgcttgttgataccatccaatgacactacaataattgagtataaaaactataagataaagctattatattaactaacaaatttaagcaaaaaataagagaaaaaacatacatacctattcaaggtacaccgacttgtcagatcgaacatgaacagaatagctacagaatctttacaggcaattcccatatgatcctggtatttcgtatcacctacacacccatttaagaactaataaaattaaatcacacttgctatttattattaattagctttctaaaattacattaaataataatgaataataaataaaaattacctcccacttcccaaatggaataggaaattcgtgcatctccaacgattaatatcttatcaattgagcttaacccattctcattttcatgtttaactacctcttctttctcctcacccatgtatttttcctaaataatcaattaaattaaattagaaaaatgaaagtgataattatataaagtttattcgtaattattattaattaaagcgtaccaaaaagctagtcttcccaatattggaatctcccaagagactgatcttcaaggagactaaatccgaatccattgcataattacgattgatcaccggcgtcgaaacaggtacttccgccggcgccggtacagcttgagtggattcgaaatcagtaccgtccacaacaatcggtgaaggcgaggacgcgatgccttgaggaagcattctgtaacggacagtttttctaaggcaagacatgaggagtcgatccatgagtcgacgaatgcaccgccgcagaatcatcatacgccgttgaattctccgcctgaggcagaactgaaccatatttt

SEQ ID NO: 191603 - DNA, 1924 bp, Cannabis indica
aaaaaaaagattaattttaatatatttatgtttgaaaaaaatactatttattcaaaaaaaaaaaactaaaatatttattcttatttaagtttataaatttattgaagaaagaaattcagtataaaaaattactcgcatattaacttacatttggacaaagcaatgacatgaataattcaggcttatgggttaagcggggttttactctcaaaatataaacacgacataacacttctcatatatttttggacaaaccgagcacccctttatatttaaaacagacttcctaaattaaacataatgtctctttgttttagttttgaaagtttcaaaaccaaagagggaatagatcaccctcagttgtagtctaaactcctttaattcatgtttgtgttattacttcctaaattcgctacagctatgtatatttatgctaataaatacttttagctaatagtcggctttaacttgatagtttattaattggatagagtaaaaatgttatgttttgcatttggtttaatttagttaatatagttatgatagaaaataagtaggtgtgatgatgttaattaatactgttaagttgatagtttgatgagacaagttagaagagttatgttgggcttttttttttttttttttttttttgtattaaggtattggaaggttagattagtatattatggaatagtagtaagaggtagtgaaggcttggctttttgttattgtttgaagtgattgattcctgattacatatcattttggatacattgagacctagttattacgtgatagctagaataggtggtatataccaaaccgacattacactagtagtagatattacattttttgtagatcattctaatcaacatttttaatatatacaactagaagtttctacaatgaaaaagttctggaaattctattagtattcaacatatttccaataaatgtgtagaaattttaatactcttttttggtacatatttttgtaattctaatcatatctcgtaatagtttaaatttgcttcttgataatgtttttgtgaatatgtctattaactgctcttcaattttgtaatacttgagttaaatttttttatttattacttcaaagttcaaaaatcttgaatgaagtgatacttaatgctattatatgcttagtcatactatatgacatacaagattctttactattgtttgctaatttgctgtcacaatagatctttatagttttcgttgtgattctctcatgtcttctctaatattttttttaatcatataacttggcttgtacttattgttggaacaatatactcaacttctacatgtaataattgctagaatattgtgtattttgataatttattagtaacttttttaatatttatattttatttttaaaaatattatatattttgaattattactatataatatttaattttttaatataattttatttgtttttaaatagggaggatgggctgcatagaaattactcgccccaagggagattcaccgcccaaataattaacgggaagatgagataaatatttcccacttattacctgcctcatttccttccctatagtagtgattgatatttggttacattaaatttaggatacacttagagctaattataatatagctagagtcgatcgtttgtgtgtactgacccaacattacactagctgttacattttctatcattctaatctacatgttttagtatatataactagaagtttctataaggaaaaagttctagaaaatatctagaaatcttaatagtattttacatattttttagaaatttctaggaaaataataaattgtgtagcaatttcaatactctcttataattctcttaataaaaaaactcatagtaccaaatttagcaagtgttagtaat

SEQ ID NO: 191604 - DNA, 846 bp, Cannabis indica
acgtgatattttgcaaaaatactccatatataatcattgtttgtagttggatgaatactactttattagaagatattaaaataagtttatgaaatataatctattataaattgttgttaatgacaatttatacatataataaattatcacgacaaaaagatgcttttcaaaaggagatttatttctaatttaattggctaatgttaaacaattaagaatacaattattacaattatcaacatgaatgagtttatgattattttaaagttagaaaatttaatgtttagtgaaatataatcaaagtggggggcacataatcatgtttttaattggaaaagaaatatgctttaaatggaaaaaggcaagatggagaaggttgagctagctagtgatcttaatatattatttgtaagattaattaatgaataaataaataaataaacctaacgtatccaagatacccatgagaaaagccagataatttaaataatacaccatcaaaattataaaaactgagtcattcattattattattattattattagaaatgaaaagaaaaaattcaaattttgaacattatatcatatttatttatttaataatgtgacaaatggagaataaacaaatgaaaaataagtgaaagcttgtaatagcttttgctctctctcttaaggccaaaaatcaataattggacctctcaatctaagtactattataccctataacatgataagcttattatataatattgaagatttagatcttgcttgatatacatttatatttacttttccatatatatatatatatatatatagagagagagagagagagagagagagaga

SEQ ID NO: 191605 - DNA, 3125 bp, Cannabis indica
ttatataaattgaatatataataaaaattcaatcttatttaagtaccaaattaatacaaatatagaataataatattattattatataataaacattcaatctttttagtactaaaataatacaaaaatacattattatatatttttattataaaactatagtgaaatatgttttataatcaataaatagtaggaaacacttatttattttaaaaaataatataaaaaatgtgttaccatttgctatataataacagagttacaaaaaaaagtattataccaagtgctccaacttaaagataacataatttaataattatataagaaaataatatttttaggagttaatatttaaaatggaaagtctttaataattacattagagagtgtgattggagattttcaattactgtgtaattacatgaccagacaaacgtgtgagattatctaattacttcgaattatatactcaaatcaaactcctccatggttttccaaacgcaccataaataaataatgaattaggggtgtgtgtttagaaagcgatagcgtaattggaagtaatcacacaatttaatattttttttactatgtaattactcatgaaatatgtaatttgagataattgatggttccaattgcacattccaattttcataatccattaaaattaagttaattacactatgtaattactattttttttttattttaaataaggtaaatactattttggaccctgtattttacaaaagttatagattggacccacagttttgttaaatgacaaaatggtattttccaaaatagtaaaactaggatcctgagcttaatttttgataatttttttaatgtaaccaacttgaagacaaatcctaatacgaacagatactattaatgtaaacagttttgtcataacattaacacatttagattggatttttattaaattttattttgataaaaaatcagttcacggtcctatttgtaccattttaaaaaatacatggtcaattttgtcatttaacaaaacaaatagtccagttaataatttttgcaaaacacagaatcatagtttttaccttttaaatattgatacacatattttactttgtaattacaacttattttgctaaataaaataatagaaattcatatctaattagtagttacaatgacatatttaagtaattttttttaatatagtctaattactttataattagacaattacttccgtacatagtgaatttatcaagatgattgatcaaaagctcaattccataattagattaagaaagatgtcaacaagtcaatttattggaagacatgaaataatcaatcatatactaaagtgtttttacattttgttatgttgtgggattgatatgtagagagacaactactatataaacacctgattaattaattaaatacataattatgtgacaaatactacaacaccaatgtaagtagtgtgttttaagaatgatacaattcttagattagattgcttcgtcttcactccaattggccttcactttgggcccagtgggcccatcctccccaaaaacttcattgggtaaaccgttcacgaatttctcaaaagctgacttgagcttcccaggcaagatcttctcaatcttcctaaactcctctgacgtgtcgtaatcaatcttcggaccccatttcctcaagaagttcaaccacggaggttctgtaatggccgaccccaagtaatccccggccacaagtgagaatcccttccccgtgtccataacaattttgctcttggcagtatcatttcttattccaatatttcccccgccttgcaaaactgtaccgggtttcgggtacagtgcgtgaccattaagggatgcgtaggcgactggcttgttgccgccgccgccgacgaattcgagctccgaggcttcgacccattcgcctttactgtgctccgagaaatagagcatccataactccccactgaaattgctaactctgagggttaagtgctcccaatcccctatgtgctcgccaattttgcccaatgggattttcagaggtcccaccttagctgtggctggaccattaaaagggtagaaaacccaaatggctaaatcggtgaatgtggaccccagcattggtttggcgtgtaagtaaacttgggcagagctcaaatcaccttttttaactctctctttggcgttttggtccaccggtaagtccatccaaaacagcccgtcatttgagccaccttgtgggaggtttgcaccattaggttctatcccaacgggtttggactcttctccttttttgtataaaagtgctccgtttgcaaagtaccagtttactgaagaagggaggtacttttcgtttggatgaaaatagagcaaaggagagtaggctccacacaaggcatcaacttgcgtagaattaggcatagatgagttcttgttcggattaacgttctttaaacaggctaacgaagacgaaactagagtaccattgctgccaggaccagcaacgaatgtgccaactctaacgccgagagcttgcgttccacggctcgttggccgaagtgtatggacatcaaacccattacttccccagacccaagcttcattctcgcaggcctctgtaaggtccgaacggacgcaccagaccttatctataggtggtttatccttagaagcagtcactactagaccagctgctttgtaaccatcgggaggagttggcaaccagaggtaaccagtgccatcttgcttgattttgagggagtcactgctccaaacaagggtgtagtcgatcggttcagtaagtgctgatgagccgttagagatgtctttggctgccagtgtccatccgaagagaggcttattgttgggctggctgtaggagcctaacatgtgaaagccatcgggtatgagcgagggctcaaagaaggtcgccccaaggttatctggtcctccctcatgagttgaccaaactttgttgaaggttgatatttgacaaacttcaatctctcccaaatcaatggttccttttgcaaaaccttcgcctgtgtaacatatacacacatacgcctacgtaaatatcgttatatatctctatatatatat

SEQ ID NO: 191606 - DNA, 6052 bp, Cannabis indica
tatttaattataccaataactatttaagctgtaatgggttccttaagcataggagcatatataataaaaaagtaaaattgttgtgtaacgggcttgaactgattatttaagctgcggtatggtgccttaagcaatgtagcagtgtatatatatacaaagtggtaatattgttgtgtaacgggcttgaactgattttttacaaatgagaaaaattgtcacaggggctttttggaaattttgattttgtatttagaaaaggttggcgactgttactggagttaaaccactactctctctattagtaggagctctctttagcggtttgtcttctgggctcttgtcttgtggattaggtgtaggctttgtcctgcctcattttagttcctccaaccagaattttgaggccaaaattaagtttttgaactgggttttgcttctttatacttatattatattaattctttcttttttttttcttctatttttttctgtgtgtatcggttttagcaggcttccaaggttgtaccttggtggttggtttcatgggcttgtgatctttgaacgttttgtcagagtgtttaagtttaaaaaaagagtgtgagagagtgttgctgagaaagaagggaagatgggggaaaaacctgaagtattggaggctgttctgaaggaaactgttgatttggtaacatagatctgagaaagtttaatccttttctggttaaagctagttctttctagttgtttttttgtttttgtttttaactatttttcgttttatgaactttttgaatgcaggaaaatatacccattgaggaggtctttgagaatctgagatgtagcaaagatggtctcaccactgaggctgctgaggaaaggctgaccatttttggtcataacaaacttgaagagaagagggtgaagctttcatttatgttttggctcgcttactttgttgtctggtaatttttagttgaactcctctgttttctgaagataacattttctgggtctatttcaggagagcaaattcttgaagtttttgggttttatgtggaaccctctctcatgggttatggaagctgctgctatcatggccattgcacttgcaaatggaggagtaagctctcagcttttttagggggggttagggggtggggttttctattgctaaattctaagaactttttctttttttcatgaatttattgagttttatcttcataattctttctttagggcaagcctcctgattggcaagactttgtgggtattattacccttcttgtcatcaactcaacaattagttttattgaggagaacaatgctggtaatgctgcagcagctcttatggctcgtctagctcccaaagctaaggtatgctttagttgtatttatttatttttgtaaaatcttgaagttgtaatttttatgttctggaggagagtgtttagtgatcaacttatcatataattattcttttctaaatctttgtttgtttgtttgtttcttcgtctctgtaaaggtgcttagagatggaaggtggaacgagcaagatgcttcttgtctggttcctggagacatagtcagtattaagcttggggatattgttccagcagatgcccgtcttcttgaaggggatcctttgaaaattgaccaggtctgtttgctgactatgaatcttttttcttaaccgcagaagaatctactttttggtctataatgagaactcaactcactgttcattatgtttgtatttgcagtcttctcttactggggagtctcttcctgtgaccaaaggcccgggagacggtgtttactctggctctacctgtaaacaaggagagattgaagcagtggtcattgccactggtgtacacactttctttgggaaggctgctcatcttgttgataccactaatcaagtgggtcacttccaaaaggtaatgaatgattagcatatcatatattggccagggtggacttgagaatgatggctttagtcacagatattttttgttctttctctttcttctcaattagttctctgtatttatgctgtaggtcttgactgctattggaaatttctgtatttgttcaattgctgtggggatggtaatagagattatcgtcatgtacccaattcaagatcgtgcctatcgtcctggaattgataatctgcttgtgcttctcattggtggaatcccaattgccatgcctactgtactttcagtgacaatggctattgggtctcataggctagctcaacaggttggttacttttccttgtggatgttgctgcagagctatgtctgaggatttaagatatatctcaaatgtttgttaatgattaatgcagggagctatcacaaagaggatgacagcaattgaagagatggctggcatggacgtgctttgcagtgataaaacagggactctgacgttgaacaagcttactgttgataaaaatcttatcgaggtcggttaacagatgcttcttcttacttgttgtggaagtgcttttgttagtagtatattataaaaattatttctgcttcaacttacaggtttttgccaaaggagtcgatcccgatactgttgttcttatggcagctagagcatctagaatagagaaccaagatgctatcgatactgcaatagttggaatgctcgctgatccaaaggaagtaagtagtcggtgatataagtgttttttttatcacaactttgcagtatcgacgcctgatttaattgattttttattatcatgaataattttttcttttcttttgtataaggcacgtgcaaatattcaagaagttcacttccttccttttaatcctacggataagagaactgcattgacttacattgaccgtgatggtaaatggcatcgagtcagcaaaggtgcaccagaacaggtaattttaccttcctttctctttttgtcccttgttcttttgatgtcatatactaagctctctctgcattctccatccttccagattttacatcttgctcacaacaagtctgaaattgagcgtagagtacatgctgtcattgataagtttgctgagagaggtctacgatctcttgctgttgcataccaggtatgttggctcccacttctcatttattttgtggtaaactagtaggatgcttgttattctgggtatgtatataatcagttgagaaaacacttcttaataatgtttatgaaatatgtccatcattatatgcaggaagtcccagaaggaaccaaggaaagctcaggaggcccatggcagtttattggtctcctgcctctttttgatccacctaggcacgatagtgcagaaaccattaggagagcattaaacctgggagtaaatgtcaagatgattacaggtacacttaatagttaaatggtctaagcggtcagagtgcaaattgagtcatatgaaaacctatggctaatattaaggctactaaaagtgtacttagattatgttctcttaacaaaattgattttttgtcattttctttcataataaaattgatcagtatctgatatggacatacctgcttcacttcaaaatttaaatgaaacacagccctgaacaatatttttgagcagttagatgctgattcttgtgcttttcatcaggtgaccaacttgctataggaaaggaaactggtcgtcgcttgggaatgggaaccaatatgtatccttcctctgctttacttggacagcacaaggatgagtcgattgctgctttaccagttgatgaacttatagaaaaagctgatggctttgccggtgttttccccggtatgcttcttcaatatatgtttaattgcatgcttgacatgatcttttttaaaattaaccttgtttgggccaaattattgtttcatgttcttccattccactcaatgactcccttgatgttctattggtccagagcacaaatatgagattgtaaagcgtctgcaagctaggaaacatatatgtggaatgactggggatggagttaatgatgctcctgccctgaagaaggcagacattggaatagctgtagctgatgctactgatgcagctcgcagtgcttctgacattgttcttactgaacctggtcttagtgttattattagtgctgttttaacaagtcgagcaatcttccagaggatgaaaaattacacagtatgatttggttttgattatgtattctatgttattgcctagaaaatttctgtgttagtcttttggcccttgttttcagtattgccttttcgttaactgcttgatcttttcactttgcagatatatgcggtttccattacaatccgtattgtggtaagttagttgttctttgttcactatctcgcttatgcttaaaattcttttatccccaatatttttttacagtattgttgacaagatttggttaacttgagttcccaagaggtgttttacttttctgtacattgatattcttgtttgtaatggtgcagctgggtttcatgttgctggctctcatatggaagtttgacttcccacctttcatggtgcttatcattgccattctcaatgatggttcgttgctctatccacctgatatgatatatatattttttttttctaggggtacatcaactgtgaaaaaataactaaaaatagtgcagcttgtttcttgtcgctggctctaatggggaaacttgtcattatctagatgacttgcgttcgttcattgtcatatatttgatgacttaaagaataggtcatctaacttttcctggctcctgggctcatacaaattgttatagttttattggtcctgggttaggcgtggtggatagtttaaaaactattatatatacatatatatatatttatatatgatggttaagtttaggggttctgtgagttcctttgtagtgtttcttacattctattacatttcaggcactatcatgacaatatcaaaggatagggtgaaaccatctccactgccagatagctggaagctgtcagagattttcacaactggcgttgtgcttggtagttacatggcaatgatgactgtgatatttttttggcatacaagacagacttcttccctgtaagatgacttgacttaatcatctcatgagatggaagtgcatcacatgtctaaattatttatcaataatgcatgtttttgtcttgcttgtgataattatttttgtaattattatcctgtatttgttgattttacttatgattccgccatgttaattttttagcgcacatttggggttgaaacacttcagaagactgcacatgatgattttaggaagcttgcctctgcaatttacctgcaagtgagcactgttagtcaggctctcatttttgttactcgatctcgaagctggtcctatgtagagcgtcctggctttctgctagttgcagctttcctggttgctcagctggtgagtccagatcttttttcatttttcttcaatggtttaaggttgttctttctcttctcttatctcaattgatacaagtaaaattttaactcttgagctttcgattgagcagattgccactttaattgctgtctatgcaagttggagctttgctgcaattgaagggattggctggggttgggctggtgttgtctggctttacaatatcatcttctacatcccacttgatttgattaaattcttcacacgttatgttttgagtggacgagcttgggatctagttatcgagcaaagggtatgaatctccttatcttactagttttttttctgttcaactttatctgatgagattcttcctcttacttataaaatggattcttttgttttatagattgctttcactaggcaaaaggactttggaaaggaacagcgcgagcttcagtgggcacatgcacaaagaacattgcacggtttgcaaccaccagattcaaaatttactgagagaacacatgtttcagaactcaatcaaatggctgaagaagccaaaaggagagctgaaattgcaaggtgagatgcaatcttcatgctcaaagctgtttggctt

SEQ ID NO: 191607 - DNA, 1978 bp, Cannabis indica
tttttttcaattattattcttttcttttttacatatataaataaattgtgtactcggtttttattcaattaccggtattttccttatcttccattagtttctgccactttcctaatttggacattggaagcttttagcctcagaggagaggtttctgaataaataaggttgaaatcgtttctgggtttttgttatattcctctgttttgactttattctcctgctatagatgataatagatctataactgtggtactactccttgggttccatcttggagctactagctttaaattattgagttttattttttacttttgaattttatttgggcacatttcttttgaattttggaaagttgggtcttttatagattcctcaggctatgcctatacattaaaaaaagaaagtgtattctgattcctttcaaaaaaaaaaaaatgctttcttgatttaacactgatattattgcagtgaaatctctacctcctcctccatttcccaccaaaggttcctctctcctttccctctttcttttcattgctcataatccttgattgcccaagtttctttgaagaattgaaaggtgtgaaaatccaataacttgatgttttgaagtgggaaaccaatccaaaacaagggaaggataaaaaaaatagtaataatggaaattctctcttcccctgcttcttatatttccaactcgaattggcttcttcaagatggcaaaagcaccaactggactgcggctgagaacaaagctttcgaaaatgctctggccgtgttcgataaggagactcccgagaggtggcacaatgtggcggccatgatccccggaaagtcagttgaagatgttatcaagaagtataaagagttagagtttgatgttagcaatattgaagcagggcttatcccaattcctggctatacaagctcaacattcactttggattgggttaacaatggtcgtgcctatgatgggttcaaacaatcctatggttttggtgggaagagatcttcatcaactaggcctgccgatcaggaaaggaagaaaggggttccatggactgaagaagagcataagtaagttgtttctcttgaaattaacaccatgttctgtgctttagttgcataatttttaagcaattgaggtgacacataatcttttttagttatttaatgttgctcttgatcaataggttgtttcttatggggcttaagaaatatgggaaaggtgattggaggaacatatctagaaattttgttgttactcggacaccaacccaagtggcgagtcatgctcagaagtacttcattaggcagttatcaggagggaaggataaacgaagagctagcatccatgacataacaacagtcaatctcaatgacacaagaactccctcgccggatgagaagaggcgaccgccctcccccgaccactctaacatggtctcccagcagcctaattctgctgccatgtccaggactccatttcagtggaatcaaccaagtaatggtggagtgaacatggggtttcatatgacaaatggaaatatttttatgtccaatccttatggggttaacacttatggacttaaagtccagggacataatcttcacagagctgctgttcatgactcttactttggacctcaaagtatggcttttcagatgcaatccacacaacactacccacatggatgatgataataccagttgaacaaagataaaactattgttagtggctttagtttgccatattttcttcagttttactagtataggtctgattttgctttttcttttcttggtttcatgtgaatatgtcgtccaaaactttagatcaagtagtttttgaaaattttgagggaaccggattgagtgtttccttagaacttcaaattctgatatatgaaactgagtggaagcttctcagacagctgagctttcaatttgactcttctttctctctctctct

SEQ ID NO: 191608 - DNA, 2212 bp, Cannabis indica
aaaaaaaaacataaaagaccgtattgctaactaatcgcaagacgacatgtctagaagtgctagacactcacttatgcccaatagcaatgttcttattgtatttgtcgggtgggaaaatcctctattatttagagatcatgagctatttttcaactagaaacccaaaagaatgggttagactttcactttcttccaataaactttgggcctttggcccaaataataaggttaggccgacaaatttgttcgggcggatatggatctacttgacccgttacaatctcggcccgacaaccagtaagtacatatcgacctaaccaaaaccctgaaaaaacccctctcaaacacaaaaccataaactgatttttgacggaggtgaaggaagaacttactctctccaatggcggccaaggaccaagataagagtaaactcaagaagaggaagcaagtccctggtggtgctaagcctgacgctcccagctcaagtcccaaaaaaccgaagctactcgccgtaaagcactcaaaagctcccaaaaatgacttgaagaaaccatttaagggttcagaacacaccaaaccattcaagggttctgaacacaccaaatctggacctaaaatggagaagacggatcccatgtcaaagcgagaacgtcgcatcaacgcaaaggttgatactttgctgctttggtgttggttttagttgtattgccgatactggaatttttatctaactctatgatagaattgaatgtgatacttgggtttttaatcaatattttgcattgggtttctgtatttatatctgttttgaacatttaagctttgaatgtggcatgaagaaaattttggcttgtgggtcttgttgcaggatcttgctgaggccaggaagaagaagaggaagccttattacactttagaacaagtaagtacttttgttagcttcggtatgtctcactgctattcgagaattttaacaataaaaactgaaaattgataaatgttggcattactctaagactttgtagaggaaatgaaggtagactaaatttgaacttagtgcaaaaacatgattaattaattgaggcattgcagaaatttatcttggacttgtgggctaattaactttgttatatttcctctcattgcaataggagcttgcacatttgtgggaaaagatgagggttcgcaatattggcaaagaagatagagccaagtatgtatcttgcataagaatttacttgtctttaaaaaccatgaaattgtctttctgtttttttattcatccactttttaaacttcttccctctgtatatgtttctgaacttggttttaatttgtaatttatcacggtaaggttgatcaccgaagcactacaaaaaatgaagggaaagatagctgaaattgcaggctctcatgtttcttctcgtgttctgcaggtgattatctaccacttagttatactttctgttttacacatttttcttttgtgccttttttgcttgtttctaatgttttcctctttctttagacttgtgtaaagtactgttcaaaatctgaaaatgatgctgtatttgaggagcttcagccacattttctcacattgtcatctaacaagtatggtgttcatctggtgaagaaaatgctggacaatggtacaatttttctgggaaatatgaataatgaaatcaagggtcttttgaagctgtactattttgattatgatgaactattttcatatttaatttgttattgttgctatgtttacagcttctaaaaaacagcttgcggtagttatttcatctctccatgggcacgttgctcaacttcttcgtcaagtggttggatctgatggtatgttaacaattcacaaaatgagcttgcaagttaccctgagtagattgtatctcctttatgtgttaggattagataatatcttcatagatgcttctgtagtattttaattttccttatgaattgtttttgcagtcatcgagcatgcataccaattgggaaatgcaactcaaaaacaggagcttttgatggagttgtattctgtggagctacaaatatttaaggatctcgtcacaatgaaagaaagcaggtaaaagattaggcaactgaaagtgttgtttgatgaataatgctgtcgaattattttggacttcctttacttgcactgtacttctgaccaatctgttaatttttttctttt

SEQ ID NO: 191609 - DNA, 1052 bp, Cannabis indica
ttgtactcaccaaaagaagtccaccttcttccataggaggtagatttacaagagagggtttcactaatagtttgtccagaagggctgtaaccctctgctctaaaactcgctgcatgaaacattaaaatctacttataatcatgaagttgttgaccaatattgcagtagttcaaaaagccattctaataagagcaaatttactagatttacctgaactaaaatagccatgacatcattaggagaagggaaaacagccataattgttgcagcctctttacgtacagtatctgcaagacaaataaatgtagcattaagatgtgtacgtgtttattacaaagattccaacctcttgaaagagattaatgaaagtctcaagacctgtgatttctttgtacaaagaagcaagcccacgagcaacattgctaggagtggcctgtgaagtatggtcaccaagaaccaatcttgtatctgcattcatgacttccacgttgataaacattggacgagttgccacataatgttgcatggcactagtacccctgttaaactgtataaaaaattaaaaagatgtgacaacagcaatggaaagagactcctgatatgctaaacaatatactttgaccaagaggttcaccagattctaagttaaatgttgatgcactaagtcactatcacagaaataaactaaatataagacaagtaaaaaattaatccatagttcctctttccattcccctcctaccccccagaatatatgaagctagcccaggaacataaagatgacctgaagggaggatttcagagaacatggattttttaaaaaaatatgaaaggaactttgggaggttgaataaacaaaaaaaaaaaagcatgaacctcagtaagtcagttacgcgaaaacaccacagataccaatcaagtagaagagaaaaacaatgcaataatcatttacgcgaagtttagagttactctgaaagtatcattcaagaaatgaagctttgtatataatcagtagaatactatacaaagaaataattgttttaaaaaaaata

SEQ ID NO: 191610 - DNA, 1750 bp, Cannabis indica
gttttttttttcttaagatttggattatttatcttagtctcaagttgcatgatacaaggtgggaattatattattggaaggcttaagttgtaatttccaattattctttcatgttctattttattttcaatttcaagagtgatcagtagatcatcgtgcaaactatataagagtttggttaaatcctgaacaaatttgcaccatacatattatataatatatggatatttgtatgtctttatgtgagttctagatacaaaaatacatgcatgggaaaatttcttctaatatatattttatatctagtttatatatttgatggcatttcaggagcaaacatgtaattgcaattgatattgattcaaagaagattgaatatgcccaccataatgctgcagtctatggagtagatgaccgaatagatttcatcagaggagattttttccttttggccccaatgttaaaggtactgaagtttctcttaatgaaaatttgggtttttatttaaatggcgtggcttgaaaacattcagttacagtccttaggctcagtacacccttggttactgccttccctcttaatgtgcttgcaaattattatgcttccaaaatataaatgatcaaattgttttcaaagatttttttagaagggattttttttttaatatttccttttaagaatttctgttaaaaggcttatgtattagtcaaaaaggaagttttgaagattctttaaggttatcattaatgttgtctctggctcatgtttttatctatgagatctggccagattttttattttttaaaacgacatgttccttggctgcaggcagatacagttttcttgtcacctccatgggggggaccagattatgctaaagtagatacatatgacattaagacaatgcttaagccacgtgatgggtatgttatacattattttattttgtaaatctgtgaatgaataactcttcttctactctccctagtttaactcttctatgttcttgtgcagatattttctattcaacgctgcaaagaaaattgctcccaaacttgttatgtttctcccaagaaatgttgatctcaaccaattggcagagctgtctctgttagccaatccgccgtggtcactagaggtatcttttaacttatagaacaagtcaaagtgcctttcattattttatgtaaagaatgcttaaagcttttatatattatgtatatatgtacatatataaattaaaaagcctttgaagttttctctaaattgattagtttgaaaaagtaaacaatgttgcatttctgaatgccaattggatagaactgagtatgaccatgcaacttttatgtggaagtttaattttcatcctctagttcagctgctgcagaagatatttcatcctcataattgcattttttccctcattcattcttccagcaataattgatgttgagggtgccaatttatgttcctcttcatatacaccttcggtatgtttgtttttgttagggaggagtaacagtaagtacttctgtggactattatgtagctattttttgatactaacctttgaatatttacaaggtaagaaaacttagcatattggtagataactgtctgagtaaacaaaccctagacctcatctgaccacatgggtgacgttagtatactaggtttatgttatttatggcctattgttatctgggcccatgtctttgagagaaaataattcctgacatctgtttttttt

SEQ ID NO: 191611 - DNA, 1592 bp, Cannabis indica
gtaacatacaattaagtattaatcttagtctaaataattatatttactgatacaagtatgaacattgtattttgtattttgtattttgtaacctcaaggatagtacctgaaagagatagagaacagtatgtagtccaggcaattgtgtttcaacggcgaaaatgggcataccgaagttataagcaacaacaaaccaatttttacttgtgttaaaatgaatgctatagagttgagtcgtcttccctgttttgagactcaaatccacactctgttttgattgctgccaagagttcaggagacacaccaagctgagttccaagttttctccttgcatttgcatcattccagttcttcttaccagattgatcgtaactgccccctgcgccccaacctcggtaaagtatgattttgctaggctcttgagagactagaactgcgcctgttgcttgctgaaagtaacagaaaatcccatatcttgttagccttttttcttttcgggggatgagtttgtcaatagaataaagattagcatgttttcttttaggaaaaatatgatctctaggagtaagagttcagacctcaagcatgaaaatgacttcctgtactgaagttccttttgctctgcctttcacattcacaatagcaagtgggtgcttttgaaagtgagtcttgattgttttaacaacgcctgttataatgttgctcttccctgataaaaatattgatgtgtgatgagctcttataagtcaacccttgtatgaatcaatagcaaaatttgtaacaagggagagcagaaaagcaatgactgagctagaactatttacctacagcaatcacagggcgttttttcatcttaagggcttgcttccggagaagaagcctctctctgttggaaagttgtatagctgtagagggcatctcattcaatccattttctaccttatttggaactgatggttccagttcatttttgtctgtaaatgaatctattgctttggtatcagaactacaatgttgcaaggcatcagcatcaggagtgtggctcattcccttggactgaaatccacataaaatgaatcgtcacaatggaaatcaaagatatcaatttaaacataacactcctcgatatcagtacaaatttatcagatgtgaagacaaaaccaaattgaaacaggttaaataattttttttctgattcaaaatcatttatctataagctaaagtattctcttaccccaacaatctcttccacttttgttgttggaaaagagatagaatcatgtttgacttcaacatcaaacctcaaactttcagctgattcggtctcattcaccttatctcgaacctatatcatatcagttgtaaatttattcctaccaggaacattaactggttcaaacaagcataagttaacaaaaatatgagtgcctcaccgagctacttgaatctgaatcaccgactgacttctttttaatgacttcattttcctaaatataaaagcacaaagatacttaagcaaaagggagaaaaaaaattctaaaacagcaagcagaaaaataaagcaagtgatagaattccccagtttaagccta

SEQ ID NO: 191612 - DNA, 3272 bp, Cannabis indica
aataaaataaaaaaaaaagtaatatgatatcacaaattttaaattttaaaatctaaaaggtcagtttctacattggcttcaaccaactatgcaatttgttaggaaccaattattcaggtcatctaggatcagagaatcaattggaatccgtcaggtgagttgtattctatcagttctatcagtttgtaagtatgaagtatggatggatggctggaacctcatcggaaggagagaatttgttaacatgagggagatttcgaaaagtcacataaacatggttggctgagtagatatggaggattttgtaagtggaaattgggagcattgttcttgtaggttcaggcccacaaagggcctagctaccttcttctttgtatgtctctttcatttcagtgatgcacctgatgaaacctgtatatctatccaattggcataagcaaaaacaccgaaacagagagtaagacatggattgatattcaatatggacaaatactcagaactcagttcaaaagactcagaactcagaagagccaatactcacataacaattctaaacatggttcgttaaatcagtcctactctctaatatattctattcaaaactactaacaaacttttcaatccagagacctaataaaccaccactcagctaccaaaatacccaatatgcccctcacatcagtggcatttttcttcctcctagtgtaagtgaatcggataggagatctatcaacaccccttcacattgactactgccactctttttcctatagtcatctgttttctctgtttgggttcgcaacaattttgcaatgaaaatgtgcaattttatagactgctagtctgctagtacaaacccttaatcaaaacgtgtcagcgatatgttacctattaaagaagtgcactggtgacaggacaccgaaaggagatccgactgccagaataaaatctcccttcctactagaaggtgatatcgagatctttgccacatcctgtccataaagagatgctgatcatgcttataattactatgtgcagcagtattgccagttacagtttttatagagtagttgttgccaaataaatatataaatacatgaaaggtaagaatatgaagtttacattggaaaataaagaaactcctagaatggccattctagtagttaacttgcccaactgacttgaagttcctgactctgctgggtgcacctgatttcatgataatgacaaaatgttataaataaggtttgcacacaaagaataccaaaaaaaaaaataaggtgaacctcatactaaactaacgtgtgtctgggagacatatttcagagattgacggctctcatttaatgatgctaaagaccaaccaacctcccatccatgctctaaagaacctacagaagcttcaaaaagtgattgaagtgccgaggcagatgcaggaacatcaatctgtatcacacatttcgaaactataaagtgcaaaccaaataaacaattacactttcccattgagaataatttatcacattaagtattgataactataacttttatgattgaccacaaaagccaagagacatttctatactatctgcaattatgttaatatatggtaatctattaatcaatgcgaccagtatgccttagcattaaaaataatagcttgattttgctgttgataaaaaaaacaataatagcttgattgaattctacatatcatcattcaagaacttcatattttagaaagacaccatctttaaaaaaacaaaagatttagagtattcactttcaatttcaagaaattcaatgcatttctacataaaatcaccatatcattcatgtgcttttatagtcttttacatatgaaaataatgaaacaacaacacggggtctcgtgagatttaaggttggaactcactcagtttgcagaagtaataggtccggatacatcacaacgttttgaataacactttccatgcttatttaatagtcaaaacagcaaacaagtaatgacattcttactatttttaaacactgtgcagcatgccaacgagaagcttctctatccaaatcgttagagtcatttcccagccctatttctttctgcaaatcaaaacaactgattacataataatgcctaacactagaaacaaattagtttacggtaaaattttgttataagtatgtataagtgtacatatgcacgtacaaaatgaatgaatgaaagtgtgcacttagctatatcgctattatacctctatcataatatcaacctgaacaccaggaatacactggggccggccctgaaaattaacaacaaattaattatataattatatattcgtattttatataaaagcaaaatataagcagcataatggaattactgacctgggatatgttattttgtttgtgctgagccgaaagaaatggctcgacaacagacgcaacggtaacaaccagaaccggaaatcgatctccatcgccacaaagttgctcagcaacaacagagtcataaagggtatgaggcaataacattccagaagccgaaagagtggtcctgccggagctacatatacccagaaagaagccataaaataatatgcatatgcactgatgaacacaatttatatgaaagtatgcttctgaatagagctttcacttactggtattggtgaaacgcgtgatttcgcattttgaggccttttggatcctaacgaagaagttatggtaattgttagagcagagttgaaagccaaaaggacaaaacagagagaaagagacagagtgacttacaggaccttggactctgaccatgactgcgaaaatgcgagccaaatcaagggtttccggcaaccccatatggaaaagaaaagctgttatgaggtgagattactgattcagtgaagttttcatggtccgagtacacaaattccggaaaacatacctcttcctatgtataacaatttctttggtattttcgatttggggcgcaatttattttgatcattgaattgataaatgaaagcgtacttgcgctagtacaccaaccgatgcagatgagcctcgcacgacaccgttttagccgcttttctcatttggatttggattgtccttttttattttttaaaagataatattggagtataaggcttgtaccgttgtattttattgtattaaattcccttacatgtcttacttttacataaacagttaatgctttagatttaatagacttaaatatttaatgtagcaaaaatacttaatgttacaat

SEQ ID NO: 191613 - DNA, 1455 bp, Cannabis indica
aaaaaaaacaacaaaaaataaatccacaaaaacaaagtttgtcaaggcatattttctaccataagaacgtacatcaggttattaggacaaaaagtgaggaaacttaattatgccagcatcaaatgaccatcggaataacatatttgcttctcacacacataaacaggtatcaaattaagactataatattgttgtgtaagcattttgactagcactttaaaaagattgctattgaatgttgagagtacaactctaaaccaaaatgatattttcacagttatgcaaggctattaaaagactatatggaaaaaaataaataaataaataaaaaataagaagactatacagaagttggtcctttctcgtacaatacataatgcaccaagtaaacattctcccaatttttttacgaaaaaaaaaagtatatatataaatattaccgtcaattctttaatttaacaattacttagatacgtaagcttactgttgcaatacattctacttttaaaagtagttattatatcagtactacgtaaaaagcagcagtaccacgaatcacagctcattatagaaaatcatatttaagaacttgcaaagactgttattcaacaagattttcatctgccagaacttactttcatctgcgagaacttcaacatgattctcattatctatcacattaaatgagatgtttcccagccacaatactgcagtaagcattgcaaatacactctgttgatcttctttgcttatatgaacaacatccagagcttcctgaaatggcaaccatgccgagttcaaatgcagaagtaaatatatttttacataacaataaaaaggtaaaagtttttgtgtacaaaaaattgaaatgagaaaaggtaccatgacaatttgaaattgttcagcatcattaacacccgtaattgaataacaattgctttgactcagatatttatattcgcttgcactcttcaaattcagcttttctgaaacagaaaatcaaacaaagaaaaagtaaaataacagaaagaatatatatatatatatatatataaaggacacaatcaaaataattaaaatccacaaaactagtgaatgagttgcagaattagcatcatactgatacttagaagcaattgatgaaaggaagagagatataaacaacatatatgtcaattaacccttaagttttcagtagacctaatagagtaaaggaaaaaggaaaacaacaaattatattgctaaagttttacccatcagacacataataatttaggcagtccttttgaaagccgtcctaatgttatacaacttatcacaaaaaatgaaaaaggtggcatcatcacatttgcaaaggctacttaaatgtttaaaattaatttaattgcacaaataagagcataatcatgttgaatttgtagtatgacacagcaatacccatgagacatggttaaa

SEQ ID NO: 191614 - DNA, 2238 bp, Cannabis indica
ttttttttaaaaaaaaaaccctttaacccttgaagggttcacttcactacatacatttccaagaaatcactgacataattgtttttttatttatttattctatggattttattttattatctcttattgaaagaaaagaagtcggtttctttcctctttatccaccttcttcctccaaaattaattttctaaattctaatcattaaattcccaaaataataataataataataataataataataaaatgaaatgtgaggctgcaatatatttatttatttatattaaattttgtttctttgtttctggtaaataacatatacgtttccttcttctgtatctttctatctaatatctatcactttattgattgtgttttttggattcttcttctttcaccactgctttcacttttcctcttttcccttctctttagggtttttgcgtttctccatctctgtaaattcaccttctcactcccttcacattgctttttcatccttttttgtccgattgaattcctaaaggtatgccttttaatttaatttgtttggttgccgaggaaattgaaatgaattcttttgtgatttgtgtgtttgagttggttctctttttgtgaaattgaattgtgtatttcttcgtaaccaaccggaagattgaattgctgttgttaattgatcgatcatgatagttagtacatggttattagctgtgttattaaatttgttgattgtaaaattgaaattgacatattattggtttttggttggatttatatgttttctagctaagatgttaagatgaatattttcaattttatttttgggaagttcttttttaatttgtttgtattgtaatttgacagtgtggtttacccctatgcagaagtgtttagtgttgagattggttggtttgggagtttggactgatagtgcaacttttgttttagtgtagacatattattggtttgtggttggtttatatgttttctagctaagatgttaagatgaatattttcaaaatgttttatttttttgataattgcttttttaacttgtttgtattgtaatttggcagtgtgctttttttcctgtgcagaagtgtttagtgtagagattagttggtttgggagtttggactgagagtgcaactcttgtttatcgaaattagtgaatgagttttggttagaaggagcatggatgatgaagtgggggaggaggttcgtccactgggcactgttgaatgtggacacctccaaggcaaagaggtcgaattttttatgaaatcaacaggagaattgttgaactcgcaggagatgctactgccaggtgagaacgattatggtaggagctcgcatcaggaatttgaagaactgttagatggtaaaaatgtacagagtttaaaccatgtaaatacactagaaaccccgtacgatagctgtcctcgcacaatggatgatgctggtgtttcagtggaagaattgactgtgagaaatgtcaatgggtctaatttaactattgttgggacatcagctaatttaggaagggtgcagactagacaaacccagtggcaacatctataccaattaggaagtggttcaggcagtggaagttcacaatcaaatgttgcatatagggataacggcaagagaaccacaagcggtttggatgatgcgggttactcatctttcaacgactttctggcacaaaaggcatgtgatgataaccacaatgaagttgtggaggaacctagaaattctgaaaataaggtgatattagataatgctccgggttcgggttctatccgaacaaagattctatctaaatctggattttcggagttttttgtgaaaagtaccttgaaaggcaagggggtaatatgtaaaggcccgccaaaagttgcctttcatcccgagcctagagtaaagagtaaatccaggcttggtattggaagtgtggcagctcctgacacatcaaagggtctggattccaaaattgttaatccaccttcctatgagttgaaaactaggtctagggctggtggttctgattgtagtggagtcaatttgagagaatggctcaaggttgggggctctaaagttaacaaaggggagcgcctgtatatttttcgacagattgtggaacttgtagatcattctcactctgagggagttgccttgcagaacctaagtccatcttatttcaagttgttgccttcagttaaggtcaagtatgttgg

SEQ ID NO: 191615 - DNA, 3832 bp, Cannabis indica
tcttcttcttcttcttcctctctatctctttcttctgtgccttttcagcttcgcatcttcaatccaccacagcagccagacgcgtcgtccttggagctgttttttcaagcgtactccttttgggagagactctttctctccaataaaaaaaagaaaaaaaaaacactttaactccattccatcacagtgagtaaattttggctttactttgcttactcactcaccaaattgattcctttagagaattttgttctatgggtattttttattggctatttcttagggtttcttttttagaacattaatctttggggtacaattttattttggttcttgggtttatgcaatttgttagtaaattcatctttgcgattcttaccagcattttacatgctgagcgtgaaaaaaataaaagtttgtaacttttgagtgtgtatattgcttgagaattctatttctttgatgggtttgagctcgtttttaaagttgaactctttgattttgtggaaatgaatgcttgaattgtgtagatctgtgctgggaagtgtttgttagtgggttcttgagctttgggagtaatatgttgtagcatagtgggcagtgaattgggtcgtatgagttgatctatttcgatggcattatgggtatgtcaaggtgtaatgagaattgggtgtattggaacaactgcaattatgtgactgttttttctcttgccaaaatgaaagatcttttttgtttagttaattcattttttcagatattagaaaatgatccagatgcttttagttgaaaatggaagtgaaacagacataagatggtgaaaatgtgagccattccagcaagaggacttcattgatttatgcagtaaaggttgttagaaattagtggattttcaatcccagtttgttaagttaagaagattgtcagtctgttacagcagttcagatatggagctggtttatttgtcaatattagttctgtgcaactcacaatttggttttgcaaattgtacgacagaaccttagcttcatagcgttcatttacttaccaaaaagttggattgcagtgttaaaataaaagccatgcaagcatgtagtatttttgacaaaaaaattaatgaagaggaagtaggtatgattttgaactttgatattaattagtttctgtgagaccagttagttatgttgtaacaaacaatttattagccaggcttttaaaagtcatccaattgaggtgactttgtgggaacgctcttaactaattctggtttgtagtgccttgctgtgacatggtcaattctcttgaagtaatcactccttgtatttgcttatgtatgctctcttaatccctaagcttatcttcattaaaacgttctttttcttcttaaaatctttcgacttgctaagtttacttcctggatcctaaaaagggagtcgttattttatcttttgtatataagttgcatgttgcaatcttgtgcattttatatataattctgcatgctttcaacctctgtatgaaacattttgtttggcttatatgagttgtattttgtctgaattatatctaacaataatatatttgatctgtccactccaggttattttgtgaaaccacttttaagctgctttccatgttgtgcatcctgaaatgagtccagtttgcctacttttgtgacttttgaggataaggccatttgaatcgatcattgtaacttttaattgtgttgcatatctttacatcaattgggtgtaatgtgatagctcatttgaataaaaataaattgaactcagaaactgacagttagtgtaagctcggaacaccagcaatgccttcttggtggggaaagtcttcctctaaaagaaggaaaaaagaaagcgaataaagagagttttattgatacattacacagaaaattcaagagtgcacctgatgataagagcaactcaaaatcaggaggctccaggagacgtagtgatactgtctcaggaaaggggatctctatccagggttccatccagatcaccatcctccctccacacaagtatcaagatgtcaaagttttgcagaaaggcctcatgcccaaccgcttccccttcctaggacgcaacttagtattggccgtaccaactctagcattagtacatcctcaaaatcagaacttgacaagcggtcaaagccattgctggtttttccccttccaaagcctgcttgtatccttaacagggcagatcctactgatgctgatggagatttagccactgcttctgtttctagcgatagctctaccgatagtgatgacccatctgagtcacgtctaataagtccccttacatctgactatgaaaatggaaacaaaactgctctgaacagcccatcaaggtaatgttcatctctggcacaaagaaatattatgttttcccttccgtgatatacaatgtctgactaactttaattttatccttgtgaagggtaatgcacaaggatccgcccgctactttgaaccaaaagaactcaaaggaaacattgaggccatcaaatcttctgttcaacacccagactttgtctacattacctaaaaggcaactggcaaccatgcatatgcaaaatttgcaaattccatctcatggtgctttctgcagtgctccggatagctcaaagtcaagtccttctaggagtcctattagggcatttggtactgagcaatttctcaactctgggttctgggcaggaaaaccatatccagatatagcttctgctcactgttctagtccaggttcaggtcataattctgggcataattcagtaggaggagatctgtcagggcagctattttggcagcacagcagatgtagccctgagtgttctccaatccctagtcccagaatgattagccctggtcccagctcaaggatacatagtggtgcggtcacccctctgcatccacgtgctggaggaaccccagctgaatcacctactagcaagcctgatgatgggaggcaacaaagtcaccggttgccccttcctccattaacaatcactcacagtagtccattttctcctacatattcttcctcagcaactccgacagtaccacgcagccctggtagggcagaaaatccaacaagccctggttcacgctggaagaaagggcggcttcttggaaggggcacctttggacatgtatatctgggtttcaacaggtatgtttgtagagggttttatgctcaaaagtgaaagctttagttattgcatgtataatactaattaacttttttgcaactcaataagtaaatgcatggcagaattgtttatattattttattataattatataattaacttttaagatattgtattgcagaattacttaatccctgttcatttgctctctttctttacgcatgcaatactttgctttgcccatttttttcaaatgcaaaaattctttagcaatattgtttccctcatttttttaactgtagtgaaagtggtgaaatgtgcgccatgaaggaagtaactctgttttcagatgatgcaaaatcaagagaaagtgcacagcagttggggcaagtatgtttatttgtagtggattgttggtgccaagaataatctattcatcgtgatattgtgttttttttttttttttttatttttttttttggttgttgtgggtattagttgtagatttactgtttttatgttgtcaggaaattgctttgctaagtcggttacagcatccaaatattgtgtcagtactatggatcagagacagtaggttccttgaacacatcaactaaattgcttatcttataatcttggtttggtgtga

SEQ ID NO: 191616 - DNA, 2810 bp, Cannabis indica
acccagtagaaaaagtaaaatgaaacttaacataaatctcatttcatataacacttgatatagtttggggttattttcaaaatattaatgtataaatcataattttaggcaaaaaaaaaagtataaataactagtttatcaatagacattatacctcattacattacaatttgaattcatgcacattcaataacaattcaaattgaactcttatcacatttgcatactctatatctttttattcagttgaaaaaacccaaatatccttctttctcaatctccatatcattatcaccacaaccaccaccaccaccacctatgccatgatcatcttcatcatcacacttccttttccagccagccccaccaggcccaggcccaggcccactatcatggcccatagctaccggcccactattcaaaatacttttaagcgggagcataaagtaaaactctttgcgaccaatcttaagcaaattcttggacttgagttgaactggaaaacaacccgcgcggtgatgaactccatcaacgaagcacccgttcctaccgagtacttctagggcaaaacaacggcgcgagaagtcgtagaagatggtggcatggtggcgtgatatgttcctccctccgccgaggcttgagaggtcgatgtctactgatgatatctttgaatttcggcctaatcttatggagtaagtttgcatgtaatactcaaaattgtctcctattagtttagcaaatcctacctccttctcgttattactaccatttgttgcatccattgaatttgaagcactacttcccatcattaatccaaacggtataaaaaaattaaaattagaactagaattacaagaaaaaaaaatgataagtaatgatcaaatattgtatactttactttaatcttatagtaagtagtagtaggagatattgctgagtactaacattttaatttctattggagtgtgattgaaatttatcaaacataataaaataacataaatatgtatgtttctcctataaaaaaattattttgagactcttatttaaaaaatttggtacttatcaaaatcagtaaaaaaatgtgtattttttttttataaaaaaaaaaaagttgagttattagattaggtgagtcctagacacagatctaaaatcggacttgctcatgtaaataatttgtaagatttatattatacttataaatctacaataaaattttgataattgaatcaatactatgagcatgattaaaatttattaaaaaaaaattgagaaatttcgacaaaaaatgattttaaaaggaacattttaatttctataagaagagtgctaattacaattttttattacaatctcttaattaatattaaggacccaaaattatatatggaaatatttttttcatagtattattcgttatagtttatagtaccgaaaatagagtttttgaatcccaattaaccatgcgtaatacttcaagcctaaattattcaaaaaaatttaaaaatttacaataatgatgttctaagtataataaatattgttagggaaaaaaatattgtaatatatatatttttttatacacaaaaattaactataaaattgtaatgaaaaattgactgtaactccaattttctacaatggagatgtggcagtacagtcaaaatcctacatagaacaaataaaataaaaatatatttgtataaattgataattattgcattcagcaaaatcaaactaggccaactttgtacatagaatttggtcatactaatatgtatatataaggacatatatattatagtaaaaaaacggtcatgaaaattaatgtgaacatttaatacgttaaaataaataaataatttaattacacaattaacaaaacaatagaattaatttttcaaagagagaaatgaagtgaaaatatacccaaataataatgtaggcacaaggtagaactctatgcctccaatcttaaccaaattattgggttgaagcttgacaggagggtctccggggagatgaagaacaccgtcgatgtaacaaccacatctaccgaggacttctaccgcgaaagaacgacggtagaagtcatagaagattcgggcatggtggcccgaaatcaagtccttgatacccccaaggctgcacaagtcgacatcaattttgacctttttgtaccttttacttgatttgttacgacccaatattatagaagaagtgaaaatgcggtactcaaaattatctcccaccaatttcccatattctatttctaattcctcctccattaatatttttatggagaagaagaagaataagaagaagagaattttatgtagaatgaattgattatgttttctctcattattctaagtcttaatatttataggtgggatgaaattatgcaatgaatcgtttcaaaacggtgcttaattatcatgaattattttagtattgcacacatgttttacgtttttgcccccaatttaatagtgtattttttttctaaatatattttactctctcttaggtatttttgcacttatagaaagagttttttttttttagtacctaaacaaattgtattagattttttaaggaaaattttcataataaaaaaataaataaggattaacaaaaataataaaaatacaggttggacagattttaaaatatatttatagatgctaaatttttttaatagaaatacatgttgatgtattttaatatatattttttttttttgacaatttgttattttcgtattgtttttattaaactttgtaaaattgtaataataataataa

SEQ ID NO: 191617 - DNA, 2394 bp, Cannabis indica
tttgtttttggcagatacccaatactcctataatatatgcatcacgaaatgctgtattgttagaatcgccatcgccttttcaacggtcttacattaaaaaactggaagaggagcgttctcacatgagttcattggagctaaagatcttggctaataaggggatttctaaagaagaaacagaagatgagcaaactgttagaaggaagaatgtccacaagggattggagatgaaggataaagttcagttcaaaagaaatagagcaaaggttagaacttagaaactctttcatggaaaagatttaagtcctattgattgattgactatttgcttgaatgttttattctttttgcagggtccaaatccactttcatgtttgaagaaaaagaagcctgataatgcagatactcagcaaaagaaggttagcatttttcttcttcattagtgatgctttggctgttttcttttctgtcatgaataattggaataaaaattaaacctttcgcaggatggaaatgggaatagtgattcttctaaaaagagaaatagaaagcgcaagaggtcagagacaaaccaaaagaaggaggcttcggagaactagagtaccaaaatccccaagtctttcaaatgattctttaattttgtagttttaaaagaaaatttaggaaaatagacgccatacattgcatatgaattccctaattgagggctggcaaaatgaggaacaattttacagatgttataactgtttttcgacttccattgtgtttcattgcaattttgttctcctaatagaagagattctgtatagaaatgggatatacactcactcattcttaaaatttccttgagatgaactagtttaaaagtgtttctacggggacaaactacaagtgagtgtgctcttttaccaagaaaaaattacaagtagtttgtccttgtaagcctatgtgtagttacaacttttagcaatacacatttgaggggatgaatctcgctcagctcacaaccgtttgaactaatgaattgatcagacaatgttaattattagaacaagactaaatccaaagcttacatttgagattcaacatcttttagaaatttagcaacattattaatccataaaataaaaatataaagttacagaataaaccatatgataggatatgtggtccgacaatgacttggtataggaagccaaacaaaatacaagggaagaatacactacataagttggctaacaatcattaaacactaatcattagtaacttatacattgtttcaaacttttatctcgtttggcatatttaataccaaaaagcctggactaactaactgggtatcatttctttcaacaaagacaaactgggtattatttgtttcaataaaggattttttgtaaaatttgtaaagggttagatctgcaaagctgcatctaacattattgtgagaagaaagacagctccaacgattagaaactccggggatgacctccactattattacctgccaccatgaagaaatattaggtactcttccaatgcattattggctggattttacagttaacttgaaaaatgtttgagcagagaagaaagtattaccagttccatgccttaacataaacatgcgcaaatgaggatcaattggtaaacccatttgttcatatattggatcataaactgtactcctgagagtgttggccctgatggaagattttgatgtcaaattctcatgataaaataaactcttttgaataatgggaatccttagagagaagttaaatgacgtgtgtaccttgggttctgagcagctgagatattgttctggcttagagaaccttgagatggagaaacccaagtaggctgttgatgactggaagattgtgagaagttgctgttttcttgccaagtcattttcatctgtgcattcaatcaaacctcaacagtgaaatctagttgtattttctagtacgatgaagaggtagaaatgtctattatatgcagctatgaaagattaaagtgattggcaaaatagttttgcattaaaaacttttttctaataattctatggaaagtaacattctttacacgctcgacacgagattcttaatgaaagactactttgcaacgaaattatgaagaggtcattttgtaaagtgacattagaaagatctattttcataaattactctaaaagattagtagtagttaagaatataggtatggaaaaaccaccttcgaagacctccgtgatgactctcctgcttcatactgaccggaattcacaaaatttccctgcatctttttcaatggaaaacaagagttttattttggttagttgttgttaagtgataattaatctgctatataatcaaaaaaaaaaaaatgaaaaat

SEQ ID NO: 191618 - DNA, 7836 bp, Cannabis indica
agaagggtactatgcagataggacatccaagcaaaccgtggatattctgagaagaagagggaatacgttggaatcccaaatcgaatctttgagggccatggtgcaagacctcaaactagaggcttcatttttcgacagaactgcctctgaagccgaggtttgttctggcattttttttctgagtttattaaatagttggttatcattttggatgtgtcaaatgctatttactttttttttttgtagagaaaatgctatttgcatttaaaataccattttctgtggtagaaatgtagttcaagttaattgattgttgtttgtttgacatgtacttaggaaggaattctagagataagagaagattatgtggaggaaagttctgttgaaggagaatctgaaccaggtttgtttgtttttagtaactttagagtttagactgaaaaatctgaaggagaattagagtatctgaacaatcttgcagtaaattgtcatgtttatttcttatttactgtagcttttaggacagttgacgaagcaattccttctgtgtgctactttgcattaaattcccagtccttctaacatgcttgtgaaatcatttgaaatccatatatgttattggtagactttggagattttttttttgtaaagcaaacaccttatccttcaatcaatgtggaacttatttagtgtattatcttttaattaactcattttaatgaatcttttattatttctttattagaaacataattgagatactgatgcttcttttctggactggttatagaagtttcttcaagcttttctgaagtagacaacaaaaatgctaaaattgaagatgatgaatttgcacgcattatgtcccgatttgatgaacttgagaaagaagaacttgcagctgaagaagatgatgatgatgatgatgatgacgagccaactaaagctgatttggatagtttctcagataaattatcccttaatgagactgaaaaaccagaggtatatgtagagaacttttggctttagaaattgagtaactgactgactgcactgctttttagttgatgcaaacttttttttttcttatttaaatagaagccagagttgaggaaacctatggatcagacacagaatacaagggcagtgattaaagctgctaatcttgacaatgataagcagcaatatgatcagccagaattgcctgtatttcatagtccttttttttttggtgttattgttcgtctaatttttcagtcaatatacattaacttacaccaataaatttgtctaccagtgcacaggtttggcagttcaaccggtacctaaaggttagttgtttgccctgttacatagacttttttatggatttggatcatcatacttaactatgtatatccaacgtctccattctagaagttctacaaaacctttacacaaaggttcactcgattatagtttgtctccagtattatatttccttagatattcagaaagcttctattcacctgtctcaacatcattattatgtaaggtctgactatattttgaagaaagttaggttggtttgcatgtcaacatccaccaaaaacctagcaatgtaatctttaagctgagattcaccccaattgttttcctatatcttgtccagatggatcatcacacagtgatacttccgagagatatgtcaaaaagtctactgagacgacattaatgcctcctcaagctaataatagcctccaagcttttagttctccgataaatgaggtatttatgtcttttttctaaccttcttaatgctcttgctatacttttgtatatgtgctttcttcccaagcagaagaaaatactacaattttaacttccaagcttattaacttttgaaatagagcattgctatactcatggtgcttagcaccatgatgaagtgtcgtcttataattggttagtcattttttataatatttattaatgtaaaacaagtggaacccgatattgagttgtagcatttctcttcgaaataagtattgatactacaattttattattattattattattattattattattttcatttatgttatcatatagagatgacaatagtttgttctttttttgatggagatcatgccaagtccttgattggaatgtaaacatccttgattggaatgtagacattcttttgcaactagattacatcacttaatatgttcacatgtcaaaatttaaagcattcgcacttttaacttgtacgggcaaaataccatttgtggtttatcttggttttatttattaattatcatttcttgtttgatatgatgtgcgttagaatatgttcttttcctctattatattgcaaaagaactctctaattattattattatttttaaaggtgtttaatatgacttcatatttgttttacagactcttgttgaaactccaaagccaaagttcgacagccgcaaggtcaaatcttgagtgaactaagaaaaaaaaaaagaaaaaaaaaaaacctttaacatgtagatagtcattcatgtttttaggatattcatttggtatctgtctttcttacaggcttttacaggttctattgttgagcgggctgacaatttaaatacaagttcaaaaaatcagaccccatctcaggtaatttatttgtgtgcagcactaacaagacacaagtgtccattataattttgatgatttgaaatggtaacgatggttttctcgttgctgtttggttttcagtcttcaaaaccggtttcaagattcaagatgcagagaagataagtaaccatggtgatgcttggcacaactggatgaagaaatgccaaatttcccagttatgattagaagttgactttagatgatgagggaaaggaaaaatagaaaccgagacccaaattttgcacaaaaccaaagagctttgtttaaactcccgaaacgtagatcaatatttgacattattttagcttgtaaggttcatttatatagttcgacattgtcaatttctcttgtcaagaaccaaccagtcattactgatatcgctcttgaatgacgccaaatttttctgaacttctgaaaagaaatggctgtaaatacattcatctaaacgcaatgagggaatgctcaatgctgtttcaatcatgaacattcttttcatcactactttaccgattctctaccacaaatcatatatgtacagtattatttacataagctgcagctacattctaccttctcttcagcccccatagggtgtcttatccttcctcctcttgtaatctcggagcacttcctctctctctgaaggagttgcagttaatatccacttgctgaactctaactctcccataccagcaaaccgagcaaggagactatattgaattatttttcggttcttagttgaagaatccatttcattgatatgtatgtcatctaataaatttctatgaacaggcatggatggaggatgaggttttgggttaccattctgagataagccctcttgcagcttctcttggaacccaggaccatagtttacaatatcttcattgcgatgagcataaacaacacctgaaatattgtgaaactgagttaagcaacaatgcaacaataaattcgtgaaaattacgtaattcttaatcaccatccacatgaaaatattaaaacttctagttggaaactgtaagtcactgcaaaagtcatcgaaatcacgagccaggtgacttctttacacatggtgaaattgtataaatcaatcaggtcaaacttaaaaataatggaaacataaaaaacgaattaaaaataggaaaatgaatggcaaagagcacaaaaaacacttgcccagatcttcaagtgcagggtcactcgaagctttcttggaatctttggacgttttcttaatccaagatcctaatgatgacataggaccaaatgtttctgaagaattagttaattcttgctttctactatcctcttttcgcttgtcatgcaacccaatgatttcgctggtaaagaccttatcagaaagatcgcggaacaagttacaaatcccaaaaagttccccttgaaattctttgcaattctgaaaatggaaacagcatattgaaattaaggaaatttaatgtttgaatacttaaagctaagactttctttgtttctacctggacaccttcaaaatagcgcttttccatttttccagagacagcaatgtttgctagctgctgtttgtagacctgacgcgagtaaacaagttcttctaaagagccagctgaaaggaaacgaaaaaccaacacatgtcgcttctgcccaaatcgaaaagacctatcttgagcttgcaagtcttgagcaggattccagtttggatcaaatataacaactcgattagcactcacaagattcaatccaagaccaccagctcgagttgatataagaaacacctaaacatatattttgttaggtagcaggaaaaacacgagtttatttaatcattgattgaaacgaaaaactaacctgtttgcttggacttgagttgaagtcgtcgacaagatgctggcgcaagctggttggtgtggaaccatcaagtcgtgaaaaggagtatcctttgcgtataagaaacttttccagtatgttcagcatcctaataaaaagaaaaagattatttcaataacaggaaaaagatgtctcaaaccatcaaatggatagattgaagatttatgcaattaatccatttcatgaatatacgcatgaagagtaagtctgattattaaagttatgctatatccattttatattatcaatattgacaatatgcaactgaatgaaatggctgactcaacaatcctacttaggttcccacaaaaacttttcccagaaccctccttttctcttctgaaaaattctggtgaaactgggaagatttggttttatgctactgttcataatcaattaatcataaatcaaccagacatatagttacatcttacatgttatagacctaattgacacattggcatttcaatgcttgttcatgggatcacataattaataattagtccccaactaccaggagacagaaaataagcaaaaccccttggaacaccactaggaatgtgactatgaaaagaagtttaattattttgcaagtaaactgtgaaagataataataaagaaaagagtaaccgtatttagcatacgcagtaaactttacaagagtcacctgacagagtaactgaacaaaagaactttgtcacaccgtaaaatccaagaagacagtaacttctctagtgctcgcattttaccacaatgtttaacatcactaaggcccataaaactttcattttgggtgctccctcccaccaaatctatatctgggccaaacacagcagaggcaaatttttcgtctctcttttgcttatctgggtcatctctagaattaggcttgatcaactccaggtgattacttacctgaaaaccattcacgaattgaaacatgtggcaacagaataatatcaataaaaagtgatcagataacgattagaaaaattgtactctttcatgagtaagcagattattattattattttcatttttactctttaaaaggaaatagagttctagtaattcctttcctttaattattctacaatttttgttcatgtaaaaagcaagccttgatttctttaatgagcagaaactgagcctaaaaataaattgtgaatattatcggtagtattttacacttcagaggcatttaaggtaagaccaaaaccccaatctcttttttattaaaggtattccgggtttatctcaaatttccatcaccatgtatgcttttcttccgtgttcatagtctttacttagtctacatatcactgtttctaatatgaaatctaatgttgcactaaaaactaaaatgtaaagtgcaaaagatgactaatttgtcttcaaccaattatcatatatagagagttgtgccattgtgtagggccactaagagatgatctctttcacatagcttttcaatgaatacaaacttttacattcatacctgctggagcttgacaaggcaaggaagaacgatacaaaaggggcaggaatcacaaccatctggattgtctttatgaaggtagggccaaattaatccatttggtataatccttttacaacatccagcttgagtgagaggacttccacagctacatggaagatccttgtttattaggcattgaaagtcaggtagctgtaacattcttctgtaggcccgtttctgcaattcactcatggcacaaaacacaacattatcctccttccccatcatgagatgcccaattgtctcctcttttgtccttcttaacaaatatttacgaagaacagtcactaagtgttgttttcgcttatcagctacctccacaaatctttcaggagcagttgctctttgaccatgcttaaggggttcatcataaaattcacggaagtgatcgcgcgatcccaaagctcctggtgaaacccagtcaaagagattaaacaattccataattttgttctgcattacagttccagtaagaccaaagcgttttaatgttttaattcctagaaatgcttcatagagttttgatttctcattctttaacttgtgtgcttcgtcaacaaccacaatctcccaattcacatctgataaggcgcgtctttgaattctgtaggtgtcaaagctcgtaataagtacttcaactgcgcgtacttttaatttttcatatactagatcacggtttgcaccatggtaagcagaaacactaaaggtagcccacttggaaaattcattctcccaattgcggataaccgaagaaggacaaactatcagtacagggcctttctgtcctaattgattgttctttgatgttacagggtcaacaatatctccatctttctcataaatagcagccaaaaatgcaattgtttgaatagttttgcctaatcccctgttccaatgttaatgacaggcagtcagcagtgaagttaatcaccccaccaaaatccacatttaggtagacaggttttacactcaagtaaagcaccattaagaaaacacattatcaatacaaaaaattctaactaaaattatcccgttataagaaaaacgttgtctatattcataagcctaagctagatgaaaaacacatacatgtcatctccaagaatacctccatggttgttcttgtataaattatataaaaacttaactccctccctttgatgttcaagtaacctacagtttatggatgaaggaacctgcaaataaatatcacattattctacaattacactaactagtaagtatacaataatcaagaagataaataaacacgaactcaaatagtggaagcataaaatgaaattacctgaacaacaggaatctcaccctctgaggtcaagaccaacggttcataaggtcccgtatgatcaaactgaaattcactcacttcagacctcagaaacgcttctggtccaggtttttcttcttcttcttcttcttcttcttcatcatcatcatcattttcatcgtggtcttcaaagttaccacctttatgcttctgggatggtggttgaattgggggtggagagatgggatcttggaggcgcaatagttgctgagaaagagaacttttggggggttttctagaaattggggagccaaagtcgtgggaagtaaaggtccttgggtaagcctcaatggaggtggaagacgatgaatttgagcaaggcttaagcgtttctttgaaggcttggagtgacatgagagaattgggggtttgggaaacttttttttc

SEQ ID NO: 191619 - DNA, 3318 bp, Cannabis indica
gtttggttgctgggaaatgagatgaaaaatgatatggtgagtaaattggtaattggaaatttgaggttcaatgcttaaactcttaagctaatttgggaatgtgaactaaggtgaaactaatttttttttgatattgttggagatgtactgggtagaggtgaaatttatgatggaattgttaagtgggtttttttgtgtttggttgctgggaaatgagaagaaatgatctggtatttgggttattgtattagagaatctacattgataacttagtataatatataagatgcatgagctattcgaatttcggacattttatcatacaccttgcaacctgtttgtaaatccaattcaaagtcacttgtgatttgatttggagatagcaagtcatagtgagcccttgtgttcgagctgtccaagattggtgagctaaaaaaaataattatcatcttgaggtgggatattagagtgtcctgcactgacaacatgtgataacttaattatacacctcactttattctaccttctaaactacgcttccacattggtaacatattgctttagagtaataatagatagtgggaaggtgaactaagctgagtaaattgggtaatggaaatttgaggatcaatgcttaaactcttaagctaatttgtgttgcttttatttaaaccagtgtattgcattgaatgccatgtgatttgcaccatattttgccataaaaaaaaccagaggactgaattgtgataatggcacaaacacaatgttctgtttttccttatactagtttcagaacctattatgtcctagatattttcacttcctttggctattgatcggttcatcctatttttgttcttgtgcaatatttcattagcttgttcttaactttctaatttctttctgtattccagcttagagatttgagaaacacttagaaaatcgaaattcaaaagatttgtactttagatatttagctctaactagtttatggtcgcatacactgctttcagttctcagtttgcgcttcggtcatatttgtatattctcttccatgagttggttggccgacctgctacttggctgtttagtgaggacaaagtaagattcgttctgccttcttcagtgttattttttcatctatgattgtatttcgtttgtagttgaacaaatatttgttgctcattgcaggtaagagtattctatgctgtaagaatctatctcggtatcctctccgttatcacagacaccgttctagtggtagctctatcaagaaagtacggaaagcgccttgcttcttacacacttgctactgtgcttaaccagtggttgtttcttcgctagcactagtgagttattcttttccacgcatcatttttttcacgattttctgtacacgggttggtttattcttgaatttatcttatgttcactttcttttcaggtttcttgcctagttcattttcgatgtatgccatctccttatcgtcgggtttgtttcttctcgataaaccggctatgtcagtagcagttgcagccatcggtgtaatcctaggctggcctttctcaattttagcttttctaccagtgactatcttctctttaacccgaaaattcaaacaagtgtttgttgctggagctatcacctctgttgcacttctcgtaagtcttctctcgccaattaatttagtttatttcttttgctagacctatgaagccatatgacaagtgtggagtcatttcaggcattatcacaacttgtggatcacgtctactacgggaaatggacatcatccgtgttaaatttgatgctttacaatgttgtcggaggtggtgaaagccatttgtatggaaccgaagggtcgctttattatcttaggaatgcatttaacaactttaacttctgctttgttcttgcattgctgtttgtggtaatattgcccattgtaaaggagaagtacacccctgacttgctaattgtggtctctccactatatatctggttggcatttatgtccttgcagccacacaaagaagaaaggttagataattttttcaattcaattgctagttatactctgttttgtataatgttcatccctttctttttcatgtaatcatgatgcaccatatttaaaaaaggacactaatggctataagtacctaaagttttgagttagtaagtggcataaacctaatgattttttttagtgtataagtacctaattaaaatttgtaagttcggactctgttaagaagtaactcatgttactcatttctttccacacctaatgatttagaatctgggctttacacgaaaattagagttttatttacattgcatacttatgccgctaaatttttttatgccccggttacaaactcaaagctttagatagtgtggatgtctatgaatggaatggtgaacattagtcttgtttcggatctattatctaatgtggtttctgaccttgatatctgctttggtgttggcattgctgaataaccagcctagttcatctcctagcttggttattatgctctgtcattttagtctttttgatggtttctgaccatgattgctgtcacaggttcctttatcctatatatccacttatctgtgttgctgcttcggctgtcattgagagctttcctgattttttccgagacaaatacgatccccatagaaattctctacttgttatggtgagcttatcctatacatttatatttttctctcgaacatggcttcgttctgaaccttgttgcttgcacacgcagatagccaaacttctcagaccggtagtactcggcctcattttatgtgcttcacacgctcgcacattttctttaatcaacggctattctgctcccctagagatttacaagcttttggagcaccatgaagatgttggaacaggtgatgaccaacttcttctctatttagactttgtgtacttttaaaagcttgtttggcatcgagtttttcgcatatgagagtgtagattgatgagtaagagctcattacaggtgctgtactctgtgttggaagtgaatggcatcggttcccatcatcatttttcgttcccaaatatataggagaagttagatggattgatgacggttttcgaggattacttccattcccatacaattccacccttggtggaactgctgcagcaccgccatatttcaataacaagaacaaagcatccgacgaccaatatgtaattaaatcgcattttcttaaaattttcgattaataccctattcatatctcgaaaatctaatgaacttccattaatggttgcagctcaa

SEQ ID NO: 191620 - DNA, 2412 bp, Cannabis indica
tttgaaggcgaatacttaattctaattattcgtaacttaaataaattttaataaatgaaaagtactatttttaggcctggaattataaactatattccaatgtccatgaaatctcctactcgcacacattatcagataattagttgccaacttcaatcaacacgctgcctattttgatcaacctatcaattttaaaatttgaataagcatatgaaaaataaaataatggtgatttaacgctctccatctgataattttaattaaagtaacgaaacaccagtgtgagataccaaatgagataaagagttatgactaaaaccaaattcgcagcccaaatcccttaagaatggccaaaccaaaatcaaactagaaaaacaaaaaaaaaagcaaattgcttcagattacagaagttaatgagcaaacacaatgtgtcacagaacaaagcatatcacagaataaatttaagataatatggaaagtttaatagcaagcaaaataagcaaattacagaaaacaatttcagagaaagcagatcaatgagcaagcaaaataatcatatcacaaaaaacacttttcaagaaaataaaacagggagtaaataaaaaattacattaacaccacagcaactccaatgatacagaaaccaatattaaacccacaaaactaaataatagtgtataaccattgctattaggtaccctaggttgtccaacaccatgccacaccgtcatttgtattttagaaacgggtttgccatgttttagggtattacttcagcatttcactaaaaataaaagcacaatatcatcatggtataatgattaaaagcaaatcaacactaactaggagttccatctaacacccaaagaaaacaaaaccccattatttaactaagccctaatgccataccacctaacctacttacacagtctgagatgataatcatgtttaattataaaaattatatctacaactgttctcagattctagttgcgctcaaatgttagttttgtataaccatttcactcaaataaatgcacaagaaattaaactccacaattatcactatctagagccaaaaatctttgcaacctagattcaactatacgaattcgttttcctcacattaaactcattgccataacaaaatttgaaaaataacataatctaatgtttagaagaaaatcgccaaaatttcttttcctccattttctctatcccaacctctcatacttcttaaacatgtgtacacaggctcgtacaagagagagacagagagaagttaattggcttacttgtgtacggactacttgaaccattcctcctcgaggaactggagtacaaagatgtcattttcaaaaaatctttgaaaccccaaaaatgaacgaagagccaactcggaggccaaaggccacagaattaccaacatttcaaattacaaacccagaaaataaaaaatacgagaaaacaaacatcaaaaataaatttcaaaaatattcaacagccttagatttaggtattcatcgtgaaacttcagaatcgggtattttatcatcaaactaataattagatttagggtttcatcatgatacctgaatgatatgaatgctccaacacaggaacaaaaccgagtaacaggagaggaaaaggaagttgagaagcgctcaaattatagagacagatcggaaaagtgaaaaattcaaatggtatggatgaaaatcagagaatggggagaggagaaggatttaactagaaaaaactcaaatggggagagatggaagaaccggaagaagatggaggagagagatcggaaaccattgttggtgacttaattgtttgttttaatgaacatccatgtcatcggccgatgtgactaagtgtacaaaaaaaagaaaaaagaaaaaaaaagaaagaaaaacaataaaaaagagattgatatgatatgaaacaatttacacattataattcacaaaagataaaaaaaaataaatttaaaaaataagacaaaaaaaataaaaacaagcagatttttataagaaaaagaaagaaagaaagaaaacttttaagatgagtgttgatcgcaaatttagttagctgacagcgaaatcgtatttatgactgatatcattatgtgtacacaataaaaataagtaaattagaaacacacggtatttttatagaggtttggcgtcttagttagtgagtaatgacctactctcctcttagttgtattcatactagagataataccactcggatcacaagtgttgtggattctgaaatggctctcttaaaattaccagagtgaagtaggcgaatctcagacttagtctcttatacaatgcctggggcgtgtggaaaagagagagagggagagagagagagagagagagagagagagagagagagaga

SEQ ID NO: 191621 - DNA, 3334 bp, Cannabis indica
gacaagaggaattggagatgacaacagggtgggtttgaatgaagaagagaaataagaagtgaaaggatagcaaattataattataaagatatcataatatagtaatatgtatcattccattagtctatttttttaacaaaaaaaaaaaaaaagaaattatcactctttcctaatttttcattcatcctgctctcagtctttcctatccaacacaaccttaattgtacataatttctaaaaaaaaaaaaaaaaacaaattagcttctttgtgcaccttgttaattgaatccttaaacaaaacacatgctaaacgaaaattagaaatcaggggtattaaagtcttttgtgaaatttgaccaaaatttacataaagctccattgatgaagatgatcgagtatgaagcttgcgcgttcttcttactgtaaccctaagtaccactgtattgttcacactggttctccggcctggcccatcatttagaagaccagtgttcatggctcgaagcttcattttgtggcttcacggccgtggcgactctggacccgcgaacgaacccattaagaacttatttacttcacccgagttcaggaacacagtctggtccttcccttctgcgcctccgaacccagtcaccttctatagtacgttttcacttctaatcttttgggcaattactaattatgtgtgtgtctttttgtttcaatatacacttcgttcataattgtgattgttttatatctgtgtctgttttgatgacttaaatttttataactcacatgggttttctattgtttttgttcgtgtgtgtttttgttgttatcatcaggttcttttacgttcttttgaaatttttggagaagactaatgttagttttgttatgttcccaattatatatatggtgttctttataaatcaggtgaatatagtattcaagttatttacaatttcagtagaagaaaactaaacctgttttgaggttacaagggtttactaggaaaatacatttaaagtgttaggtttcttacaaaatatataggggctagtatagtttgggtatgttccttcccctgaattttcagacaatcttatttcatataatgttatctttgttatttcctttttcttgtagatggagctataagtccttcatggtttgacattcacgaggttccgattactgctgtaagtatgacatgttttatactttttaaatttcctttttcagatttcatgtaactaattgagtggaatctgaagtgtaaaagtgttgcagtaattaatttgatcacaataataagttctgaatagattttactgttggcttgtacggcgaattgtttggtgcatttaagaagtgtttgagatgatttccgtcttggaacctatccagcactaagttagatattcctggctccttatacatttccttagtattggaaaattttgaaaagggttctgaaaatgttttcataaattaatttgttgtagaaattctcatcattcacttcattttcaataacaaaacttaaaatggtgctatgtaagctcatttataacgtcatttctggtttattttgatttcttctgcacctttactattggtttcaggattcaccaaaagatgaaattagcttggttaaagctgtagagaatgtacataagatgattgacaaagagatagctgccggcactaatcctaataatatatttgtgtgtggatttagtcaaggaggtttgcctttctccttccttctctcttaatctcactagttcacatcactgcattattgatctgcatttattgctagtaactttgtatgttgatcaatctccaccaggtgctctgacactggcaagtgttcttctgtacccaaaaactctggggggaggtgcagtaatcagcggatgggtcccctttaatccatcattgattgatcaaatttcaccagacgccaagagggtactccttgggatataatttcgatatgtctagtcttggtctgcatgttttccttttttcccttgtcattttctgaagaaagtagtaagaaaatgcacatgtagtaaggcccatcctcacttctcctttgctgtgtaccatttcatgcaatcatacgatgtgaaatatgcaaattaattgctgtttagtaaataatttaagtacacgttgaatctaacttgatggggaaactgattatattataatacattaatacatattttgagttgtaaacttaaaacttctgttccattcgtgtgtttttgtgtttcagacacctattttgtggttacatggaatggatgacgaaagggtactgtttaaggcaggactagctggcccccctctccttgaaaatgctggtataagttgtgagtttaaggtaatatcctactggtcaatatataaatttgacatttgttttttgtactaaaatttgacccgtgacaaactttgttctggtatacttatttgcagccttatcctggtcttactcatacaataatcagtgaagagtttgagtatctggagtcatggatcaaaactcgtctgcaatgttcttcttagtgattttaatttcattactgctgagcatcatcatatcaaagggaaaaactttccaacaacttttctggggctgatattctgttgcttgtttatatgaataaattttatttttaaaaacaactttcaccgacctggtagtattgtatattgtatcaataattgcaagaacaccaacgttgttggaaattctttattactttagctctcacttcatcattaaatagtctccttccctacctttttaaaaaatgtccttatgcagtgtctgaacaaaaaaaagtaatggcttttagtctcattttcatgcagtggtatgagacagacaaatacatttcacttaaaactaagccatcaaattagaatatataactttcaagggtaccaaaaaaatagatgcggctgagtatatataatatatgtatagatggcatatgtcataaggacaaattgctctcttggacaggtgattattaagtaaaaacttaatatcgttatcattcatgtgagtaattgttacattatctttattctcttaactactatttttttcagaaataattaccataaccatttggaacttaccacttttgtatttgtcatggaaagctagctacatacgtacaatccatcttaaaacaccattgctgtcctgttgaagatatggacttcattgagtcaatgaacgaatattcataatcattattaaaataaaaaataagaaaaaaagaaaaaaaataaaaataaaaaggagaattcccatttggtg

SEQ ID NO: 191622 - DNA, 1858 bp, Cannabis indica
tatatatacatcattatatttatcggctcataatggtggtgaaaggccaccattgctgtgtttgtatgaaccatgatttgtacaatttctcaaatttgatcttaaggcatgattgcctacttttcaatgcttcataatgtatttgaactgtctataggtgtttggtgggatttaacttatctcttgtttatgatttgaaaactcatttatgaggtatcgtgaaatcaaaattatgagtttaaacccttaagcatgtctgtttagcgtaaggtgtcagatgatcttccctatgcccattaaatgtgtatacagtacttagcctcaaatgtgttacactcagcctgtcctctcgtgtccttttccgggtcgaatttactcgtgaagtagaagagacaagaaataccgttcgtctagttggaccctcccaaaaatgaccaatctgttattattcttttatactaataagctccaaaaatgattaagatggtgcgtcccgtaatatgaattctattatcacatgcctcgcttctgaactcttagcaacatttagattattgatcattattatttggcttttatttaaaaaaaaatggtaaattgactaattgataaatattaagtcaactataaacataagaaaaaaaataaatagattaaaaatatttttaatgccacattttagacatgcatgtgtaataatatagattaattaatgatatagagacacacttgtacataacttttacacacaaagatgtgtattcaattttagttgtatataatttggtaggtacccacccatatagaattacatttgtgcgtaaaaatatgtataatttaagtgtataataaacaaagacaagcttaatttgtgtggttactgttgtgtatttcacacaaaaaaaaaaaaacaacttttatttggtgtcttttgcggggtacgtaaaccagtcattttcctattcctaaatatacgtataactcttcctggctatactttttacgactctttattcttcttttgttatagtgtctttagtgacaagaagaatcacaataaagtaataataataataataaaggccaaatataagagtatagtgtatccatagacatggttggctaatttagtgagcaagctagccaagctcatgagtccagagagtgaaaatcatttatttatttagaaaaatgaataaattttttttttaaaaaaagtactctgattccattgccctttttggctaaagtcaaggtggcacatgagaggtccatgttaaaagtagagtagccgtccaaaagccaaaaaaaaaaaaaccccaaaaagtgtgccattttgatggagaccgtcccatgactctttacccaccaaactaccccatcaaaaaacgcctcgtacaaagtcaaattccatttcaaagcataatttaatttgtatttttccaactataaatttaattaagaaaacccccccaattatatctttacgtgtatgtacatcaatcgacattcaaaggtaacccaaaagttcgaaaccccaaaaaataaaaagcatattctaatttggaatccatttttgatgccttttagatcataagaattttgttatcatttaataccatttgatccaattagttaacacaacatctcttttctctttttgtgcaatatcttgtattggctccattaggtttttggcatggattatgtgtcacctagacataggaggtcacatatttacatgttatgtgggaaccaccaccacaaaatatttgagggtcttatatacattcttttagagatttatggtacgtttattaaattgtaattgaaaccaaaataattaattaaaaaaaat

SEQ ID NO: 191623 - DNA, 934 bp, Cannabis indica
tcgtgccttgaaaagttaatcgtagtggctaacgccatctcgtgtagcttcacttttgacatagtttactgtaaaacagtaaagaatttttttttgcataaatgccgaatttgtgctgcatttagaaccttgttattggtttgggtttctgtagaatgatctttacacaaatctatttattgaacaaatttgaaacacatctatacctactgtaaatcttctgatgatgttaccctttttactttacagtttgaggatgtataattcacttgttgagagatgttttactgactgtgtcgacaccttcaagcacaagtccctgcagaagcaagaggaaagctgtgtccggcgatgtgctgagaagtttcttaagcattcgatgagagttggcatgagatttgcagagctgaaccaaggtgcagccacacaagattaaacaaattatcctcaataaaaatgcggaggaaccaattttaatttgttcttaattgccaccatgatttggtttcttgtgtgcatctctataacttacttcatatcatttttgatgccttgttgaaggctaaataacatgcatgttttagtttgtagatacatggcagttgcttttttcatcacttagattgattgggttcttcaaattttaatcaatttttatacctatattaatattatgtactgtcatgaaatatttggtttgaatttgcttcaagttatacgtgggacgtctttcaggactgtaatctcattttttgtttttgcaaaatttaccctattcgttactttatttgacgttattattttgtccaggtttccaataccagtgaaacatttttatcatttgtttgtcatcttgttttctgaaatataatatttaaataatgtaaagagaaaataagagaagtgtgataaagtttaagagtttgatgtaaaa

SEQ ID NO: 191624 - DNA, 5913 bp, Cannabis indica
tttttttttttttgttatcattcctagtgactatgatgtcatcaacgtagataacaaccatgatgatagaactctaggttttatagaaaaatagtgagcagtcaactttggagaagtgtggctttcaactttccaaactatgctctaggggattgtcgaaggccatgagagacttggtcaacttacatccttttttcctttgagtaagctccatacaacgcctcaagagcactccaaagggtagcaaaagtttcagatcccatcacctcagtcacaatctcctccgtaatagatccatacagccagcccattagaagttgttcgtgtacgatccattgttcgaagaccgaagtgaattgaaccccaaaaccaatcttctcatcaccatctctattgacgacacttggaacaaactttggtggcttcacacgagtaccaatcacatagtaatctagacgatggcccctaactatgctggacatcatatgttgacattgaaatagtggcaaatggaaaaataatgaaaaataaagagaacaccacattttatagtatttcactctccatatcatgatgttaatggagttatgtctactttgagcttttattatcgtaaaaatacattttcttacaagagaactagagaaaaaattactaagtctagtttcacctcacaatttttagagagggaaatagtgaggaaagagaagttatgaccttgtagagagaatagaaagtgtgaataatgagctagaggagctcttcttttataaggaatgaggtccaactaaattataataaaataatagaaaatttgtacaaaactcgctggaaaattcatgcaattcacagtcgagctcacgaactaatttttaggtccaaaaagttaaaatcgtgaaaaggacattagacaagcttagatccatcttgaataaagctttccaattccacttgaactgcattatttgaataaaaattgagtaaaatatggccattttaatgagcagtgtgtagtgttgaaaaactaggaattcatagatgggcggccaagttgactttggggcacccagaatgacgttaaaatttggttttaggggtcttaagcatatttatagatgctcggatgatgcaaaagctttccttagctcattctttgactcgttattcaccgtctcttcggcaattttacatgacgcacgcgggagttgcccaaatgatcacctataacaactatcaccggtgatcactagtctcatatgtgtctgtggacttgcgcatgacacatgtacatgagatattgacttacggaagcatcaaaatcttattttggtggcaaaataagaccgatgcctgagatagattatcgtttgatggatgaaacactgagccctagaccaatgtcaacttaggcacccagtgtggttcactgcctaggggctgaaccactacttggatgatattttcttctgattctaagtcttagatcctattttgggagaaaataagaacaatgcttgagacggagtcacaatcaaattgacaaaactacatgttcatgtagaacatgtcaacctgggtgcctaatgactgggtgaatgtcacactagtcacccatattttcaactgggctcttggtggtttcatttgatccttgaaagcacttatatcttcatcattgaacaaaataaggaaaacttttgggagacttccctggaaaagtgtaccaaagtgccaccggccaccttatgttgacctggcacctaatgtgacctaggggctatcactgggtgactagacagagttcaaagctccaaaatacatctcgttgatgttcaatcttctttttggtaaaaattactccatggattttagttttgtcaaactagcactggcattactcagtgaagtgaaattagtgctaggttgtaatgtcaacctaggcgcccatagtttgatttggcctcctttggggtgtcactgaagaaaattcatgtcctggcattgttcctcgttggatttgaggaattagggtccaaaaagttcccaaaaacctaaaccctagtcgccgtgtcgcccatgtcgacgatatgtcaacttgggcatccattggggttccagagtgttgggtgtagtttcttatagacttatctccaatgtttgaaacttgtttggggcatgtctctcatgtatcctagtgcaatggctaagtagattgcgcataagaagtttttgcaaaccgaaactgatgcaagacggtgcacatgatatcaacctaggcatctagtattgctactagaactaggttgagccatgggatgtccacgtgacatcctcagcctcatggttcatcattttagggtcattgtaacctacttgcttgaactcatcgaaggatagcacccaaaaacaacttcgctagatcttggtgcctacctgggtgcccctgaatgttaactaaggtaccggcacagttcccaatactcaagttgaccaccctaatctcgggaggtagggccccaaaattgtttcctttttgccacgtgtcaaaagtggtgtccacatcattaggtcaaatttcagggtgaacaccatagttctccaaagaatgaaatttttttgatccagtttcagaatggttgtgttaggttgctaccaaaaggttcactaggagcgtgagcaatactagttgaagctacatttgtagttgtgacatgtggtgttccaatattgctggaagcagtccatgctcttgttggaggagtttggttgggcgaaaattggtcactgatcgacataggcacgcacctatttcactgctctgataccaagttgaaaaaatagctagtaatgagaaaattactcagctcaaatgatgttgaggtatgcctctccttatatagataaagtctgatacaaagtagaaatattttgaagcattgtaacaagaatataatacgcggtctgcctataacaaattctaacaacctaagggtattcccacgatattagaattaggaaaagataattacaaaatgatgactatgacaatgtagcaagaccataaaatacaaggcaaaataaaactaatttgtctcttaattataacaaagaaaattaatcaatccttaactattaacctttaaaaaaggtaatttacaactattaatatgaaatttaaatgagttctcttaattttctaaggaataactaatttaaatatgatttttactcttgaagtactaccattttcagatcatgcctttagaactttttttatagttaaaaatttctttcaatctattcatgtttctaagttatgcctactctatcagtttcaatcttacgtggccaacaaaaaatttagttgacactatgaatactaatgtggcattgttacgtcaacatcacatatataaatacaattaaaattaatttttagtttatttatttattttaattcattttaaaaataaatttataaaacttataaataacttttcaattaaattacactaggtactgattttgtcaaaaaaaatatcatgtaagtcatatgtttgcttatgtacaattaaaattgacaaaaacataactcaataacagaaatagttcataaagaattttaagaagcatggtttgaaaggaatgaaatctcctgttaaaaattagtgtcacatactgtgttaaacctatcaaagtttaacacattaattaatctattttatattagatatgttaactacttttgttgattttattagaggtttaatttttttataaataaaaaattaattaacatgtcaaattttaattgatttaacataatataagacacgactttttaaaaaaatatatcttaattcactttcagcgacataaatcttacttactctatactcaaatttaaacacaaaatacatatttccattcatgaaattcaactaagtaaaaaaaaaattaattatgcattagaatttgaaaggccctttattttaattatttcaggtgaaaaattacgcttgaaatgtcactccaatactaatttattttctaaccaaacataagaaaagagggaaaatgtattccttacaaatatcatatttccacatctttcaagaaaccatagaagttcaaaatattcttgagaatttttactttatttttttcaacagcctgtgaaatctgagtaaacactagtacgatggctttcattaaacacattttacaaataaacattctaagcattacgcagtacaacagagagcttcccacagctcttagaatcctcacaataggtggacattttcaattgaagagagaaaaaaaaaaggaaaaattggagcatacaacattttatgaattatcatcaattatgatcacttaacaatacagaaatactgaaatattgaggctgttctgagttaccacctccggtgagttgccagcccgaaattgaagaatattctggcggcgactaccaggtgcacaagagatattaacttaactgaaatggcaagaaacggttgaaatcgaaatgcacaaagtggtagaaggcatcaagcaaggtgagcttagctttatgatcccaaacaagggaaacaacaattttggttagatatggcagcgttaatcaaggactgagaaatggcagaacatggctcaaactacatctagatgcgaagttgacctgtcacagaatcacggcctgaatttgaatccttgtgtttcatagaaagatttgcgaattgagactcgaggtctctgctgttagtgcgtctgtggctagaagatggtggtggctgttgtggaggtggctgctgttgctgcttatacaaggttttcagccttccaatctccctctccaatacttcatgctccactaaacaagggaaaagatggcaccatatatcttattcgcttttcaacattttatttgtgtacccatatgtattgtgtgcaaactacagaatcaagaaatgcccagaagaggcagcattgacattgacattcttattcttatgattttccacttgcactaacaatttatgatttactcaaagtcaaaactgaaatacatagcataaaggaaccaaagcaccacaagtggaaagagtatatagacacccaaaaaaggtacataaaacatagagaaatctaatgaaattataataaatatataaataaacaaagcaaaaactgaaaataaaaataaaaatagttaaacaagaaatttcccaccgtattctgcaatcatgatctcctttatctatttagtttagctgatgagaagagaaattaaaaaagaatgcatagcaaggttttgcatgagcatttcaattttgcattaacaattgaccaaaggcacctcagaaaagctaaattaacaagataggccacagaaacatccataaacccacaatgttttttgagttttcagaaagatagttacaaatttctaatgattaatttaataagcatgagctccaacatacacactatagacagttcttcactcctaacagtagttttcagttgcattcagagaattcccaagaaaatctagagcatttttcaaattttcaagtataaccagattaaatcaataaaataggacattgcataagttttcaaacaataaaatcagctaaagaaacttacagtatttaataagttgctcctgcgccaagctttctagccgttgcttaagggccttattctccatgctcagaataagattctgctgattgagaaattcaagttctgctgtaacttcagaaccttctgcctgtagaatcacacaaacaaaaacattaaaacaattttctattaaaaacttaaaagaagcattatgtgttggaaagtgtctctagaatctagatacaaaaggagtcctccagaaaataataacaatta

SEQ ID NO: 191625 - DNA, 1010 bp, Cannabis indica
agacctcaacggaacgcttgctgatcatgaatgcattaattatacaaaccagcacaactctgctcgctactcctttgatcttcgaagaatggtagctcgaaccggtctcatttatttgggctgcatgagggggaaatttacctagtttcagaagacattggggactattggaggagcttcggtcaaacgtgcacggttggacagggctttggcctctattgattggagattattatttcctaatgctattgttgaggcgataacggtgagtacctctgatcataaacccatccttctcaatacagatgggggagctagatgtactagatcccaattaagtatgaattgatgtggggccgtgatccgatatgcctttgggttgtccgcaatgcctggcgggacaagcttcatcagaacccaatggtaaacctttatcgtaaatcgaagaaaacaaaggatcatctccaaaaatggaataaaattcatttcaaaaaaatccaattgcaagtttcggaggcgaaagcagctgtggaaaagattgaatcaaatgatcaagttcaggcagcgaacctcggagaggctcgagctttgttgaatgaggctctccgtagagaagaaattttttggaagcagaaatctcgagttgcgtggctcagggatggagattagtgtaccaaatttttcatggcgtccaccgtaatcagaagaagaaaaaattccatccaaacactcaaaacggagaacaaaaattgggtgagcaacatcaaatctattgctgagttattcattgataaatttaactctactttctcctcgaacctttcattgagtggccctgatgttgagttcctaaactatacattgattggagagcgtgataactcttcccttatctctataccttctgaaaaagagattgagatctgtctaaagagtatgggacaggataaggccccggggccggatggaatgtccaatggtttctacttgcaacattggaatgtgattaa

SEQ ID NO: 191626 - DNA, 1402 bp, Cannabis indica
actataaaaaacaggaaacatgtgcctctcaagaaaatggctagaatataatatatgaattgatttggaaaaaaatcaaagatttcaagattaatcattatatttactgagcactttcttgaaacctatccaaattttaataatactttactacccagggtaaccaagacacagattaaataaataaataaataaaagaagacagagaaaaggaaaaaataatctagaaaagcagtgtgcctcgggcataattttcatgtgctggcacatcagatgctcacattaccattagaataatgttgcctatcaaatttaaaaaccaatttgtactattagatgaaaaaacagatacactatgtataacagtggcaagctaatagcaaattccatcaaaagtttagagtataagatataacacaacccagaaattaaattctctcactgtattagcctacacaattatcacccattatgaaaagctttctaatgaatgagtaaaaatatgttctaagccttttgattggtaaaaatatgttagacttttaattggttaaaatacattataagcctatatgtaaaattatgtcctaaaccttctaacaaggctaaaacaaacttatttcaaacttcgtgcagaaataggtggtcagggagatagaatagctcacaatcaaaaggtcaaacgaaaaggttaattagaaatggtattgtacaaagtcaaagataaggactcaatatataaacaattaacagctcagccaggccaatacattgtctgtggtgcatatgataatagaaaataaatcaattatcgagcattgctcctaattaaaaaaaaccattatttaatggcaattcaattataaatagcttaattaaaaaaatcattttcttgttaattatgtaaattattgatcaagtagaaaagtaagaaagaatatttacctcaagctggttcatcatgtcaatagtggcgtctaagtcacccttgtttgccaaataaacaccagcaagtgactgctcagagaaattaggaaatgtcatctgaagaaaatccaaatccatgtcgaactcttcatccaaaatctgtttttctaatcctacattcacattctgtgatgatccaccaaaagaattgtggtgaggctggttcctcacagagaaaacatcttgactaaattgttctacaggagaacggaaacttccttcaaaagaagaattgtggtagcgctggttcggggacattagagcaggttccacctctctttttgagagtggaatgtaagcagctgcatatggattcaaagtagacattccaggcttcatagcttcaatttatcaaactatcagccacctgttcttcagaccaaaaaaccagttattagcagatgcaacacataat

SEQ ID NO: 191627 - DNA, 1698 bp, Cannabis indica
aaactatgctaatgaaaccactgtgcccacaatggtatgcaagattcaactaccagagtaaccagaagatgttacaatcaagacatctctctacatttttgtcattcattatcttcatgagacaaccctttaggtggtttcaagacaacccagcatcagcaaacattaatatgttacctaaattaagagcttgttacctcaagtacttctaacaaagtctgtctatatactagataagtttcattaacaaaagaaacgagcattagatatttaaagcaataatcaaaatacgatgccgaatggtaatgatgatcgcgatgattctgtaaaagtaagaggtaacatacttcaccagcactctcaagctcctcctcagagcaaccagcccaaagtgggtgagccctgaaatcattttccatcttagccagaaactcctgtacggcactactatctctctctggatcaggtggattgttcgaaaacgagactataaaactgctctacaaaaaaaaaaaacacaaacaaaccaaaaatctttagtctctaatatccccgttaagcctctctaattaaccaaattcaaccaaaacagaaaacggattgttgcattgaataaagtgaatgaatgaccttttgatagacttgacaaattcggcagcggagggattgcgcatgcgttccagaaaatcctggaggcccaagaagacatcggtgttctccattgatccacagctgtcggattaccaaagttaacggtggtgattgtagagagttaaggtataaaggagttggtaaggtcgaatgctgagaaatagcaaattcccagttaactaactgattttgagaaggcgaattcccgtacactgaaaagggaaaacatattaatcaacaactataactgacttaatagtcttatacctaacatatgcgttgtatcgaaatgcatcgatagctaacaatgcaaggaaaatagataaatatgaacgaggcgaaatgtcaaacaaaaacatgaaaatatcaaacactctctaaaccaaaacagattctcttatacccaatgacccaaaacgtaccttaggaatttcttccatggacgccttcgattctagttctttaggaacccttttctctgcaaaacccagctcgaatgaacattactatgtcttcccttgagagtcttgacaaaaatctacaaagagcgagctcagaaaagagtgaagactaggagagaaaagagcgaagactgagttatcaaactctgacctaattccctaaatgaaattttacttacttgattttaaacttagattgtacgttgttctgtgcggcaattaaaaatttacttctcgatcttcttagaaaccgccaacttctacgcccatctccgccatagtgttgccaaaaagcaaacctttcgagactatcggaatctgaaaattgttttcctcttcgtcgtcttcgactttagagctcaacatcaaccaccaatcgaacaagatggttaaggattcctgttgaagcaatcagagcagcgaaacataatggtttagcgtttgttattggctttgctcaagtgagtggcgatcgtcttcgtagcatctcaacaagttagggatctagaattttgtatagagatatgaagtttagaaaagacgatcttggtgcagtgagtcgcacagtcccgtctgattcgaagtc

SEQ ID NO: 191628 - DNA, 1483 bp, Cannabis indica
aaaataatatataaattgttatattacaaaaagtataatagtgaacaataaaataacacatgcattaatattaaaatatctatcaataataaatatatgactatatgtgcgcatggagctaaggccaagactaggatcaaagtttgaggtcaaatccaaggcaaaagctaaggcgtaggatgaggtcaaggcctatgcgcagtgccaaaaaaattgttcacccagcgtccatgacatgtggtcgaagctagagcattggatagtcaaggcttggttctatggtctatggtctggggttggcaccggggtcgggacctggtatacctaatttcagatctgaaactctcacttctttttcttctccatcttttctctcaacgaaataaatgccaccaccatttctcttaaagctccattttctccatgcaccattatttttccttatttttattttaaatcatctagttttctaacccataactgatatacaactataaaaattaattaatttttggatatgagagtagatgtaagagtttaggtagacaattttttagggttttcagagaccaacggtcagcgaatggtagcaattttgagtctttggaggttgtcttttaacttgcattgaggtattcattactttaatatatatatatatatatatatatttatatgtagttttacttacattgcatattttttagtgtgtacgatatagggttaggatattgtggtggtggtcaaaaagttcacgattgttgttggaaaatcaataagtcttcacctcaattttcttctgcaacgagaattttattaattgaagttaaacaagcttaaaaacttaatagaaatcctatttttcaaatagtggaaggaaaaaattctcattgtagtagatgttttagctttggcaagaattacttttgatcattggctaaaaactcaagacagtacatctttgtcatcgttttactttggtaatgttgatgatggagctcagctttggactaaactaggtttgaataacaatcaagattaatgttgatgtttctctgtttgatagtgataattattttgggtatgggcttgtggcgagatttgattcaggggcttttattgaagccaaatcaatctgtcatggtggttcttttgatccagaagtaattgaggcattgggtattaaagaggctttaagttttgtcaaaagcaaaggatgaccacacgttgagatagaatctcaaatcttgctctctattcaagctatacacagtcattcttctatgagttctatatttgctatcatagttcaagattgtcaatctttattgctttctttacctgttaaagttcattttgttaaacaatcaacaaaccgattagcagatgttattgctaggttttctcgatctttctctgatcgtaccatttgtgagactaacgctccagctattatgttagatattttgtattccaaatgcta

SEQ ID NO: 191629 - DNA, 1138 bp, Cannabis indica
aaatcgtaacttaccaaaatgattacagctaaaagtcgacagtactccctatgcggccccctaatccttaacttgtgcagaattaacgatccaaaaggcttaacactccacttgtaaatttagtttcaaaccaaatacttaatttgccaaacttaaaatggagatgctctcctccaaatcattccattaacaaaggccaagatcgagtacaagcattttgggacattaagcgtaacgattattcaccgtcaatccaaggatcgctgaactgaactatatgacaggaccaccttatgttttaagcaaaacatgagaacaagtatacctcaacttcatggtcgaaaattaatgtgttccaggtcaagattaaaacatttcatatgaagcatacacccaataatctaactttctaaggatggaagagggaggaaataaagcaaaattgactttttcaagcgctacaactataagtataactgaatgagttcatcactgaccactgatggagtgagaacacccaagtctgtgaaaagtagggtaagatactgaggaggtgtataatccctagctgacctttcgacctcaacctttgaggggatgggtaccccaaaatcaatggggcgtaatgctggagccatgtctttctggtctaatgggtaaagacgagcaaactgcaaaacaataggatgatatcatggaatttgaattcaacgactgtcttctgattttataaattgaagaatatatcacggacaacaaatgtgtttaaagagcaaatttcagccaaccttgtagctttctgcggccgcataaactggtttgttcatgctctgtgccacaagtgcaatttggtatgtccccatcatgttaattattcctccactttccaccactgcatctgcccctacgagaaccatgtcaacctcgtccatggtataagccaccgcagagtctatcaggagcttcacaggaacatcaagcttggtcaactcatttgaaaatcgtaaaccagttctgtcgggtctgccctctgcaatttacataataatcaggaagctatgatggttaagtgaataaaaggtccaatacactttaattaaaatctaaattaattttccgaatttatattgaataaaaa

SEQ ID NO: 191630 - DNA, 1467 bp, Cannabis indica
ttttttttttttgataattcaaaatttcattgcaaccaaagtaaccttacaattaaaagcacataaaaggactggatatatcaactcattacaaataaatcttatatgtacaagtacaatgcatcaaactactctcaatatgtacatgtaatttttttcccctgaatgctatgtattctactcctaacttcatcaagtataccctgtatcaccacttctactcttttgacttgttgaagccaaaacgcctcattcctagccttccacacacaacagcaattgtaaaggctgcaaaaacttgcttcttgaatctgctcaatcgagatctcaaaatccatcttagcaggttatatgatgacttagttttagctctccatttcagcttttctttaaggcttctaagtcacttattgttgaatgggtactcgaagaataagtgcttaatatgttcttcacttaatttgcccacatattacacatatatcatctgttattatgtgaaactttgtgaagcctctattttatttttaatctgtcaagtctagccaaccacaaaataacactgtgttttggtaagttaagcctcctccaaacctcattactccataatatatgagcttgaggagggcaaaacatcaaatactcttttcttaatactgtaattcatttgaacaaatcgtcgagcatcaatgtagcttttaaattgctccttgacagctacaaccttcttccaatacaaactactttgtgtaggggcaatatatgcccactaatcctcatctttagtgtataaattgtgcactaatttcacccataaattgtcttttttactagccacagcctagatgtatttcccaattaaagcaacatttcaattaaggatgttttgaaatcccattccaccctcactttgtggtttgcagagcacatcccaagccacatttcccaatcccatataattagatgtaccttttcaaagaaaggatccacaaatggaattaatccttttcaaaatctccttaggaatgatcatgatctgagaccaataagagtgaattgaaatgaccactgagttgatcaatgttattcttccaacatatgacagattgcgtgtactccaaatttgaattctagctactattttttcaagtaagctttcacaatccttagctgaaattcttttagcacatatagaaatccccaaatatttgaaaggcaagtctcctctacaaaaacccgaagcttccagaacttttttaacttcatgttcaggcatgccactaaagtatacaactgatttatattcatttggatggagaccagacgttcttgagaatagtttcagtccctacagcaaatagtacatggatctaaaatcttcatggcaaaaaagaagcacatcatctgcaaaactcaagtgatttaattgtaaatcttcacatctctaatgaaatttgaagtctactt

SEQ ID NO: 191631 - DNA, 4610 bp, Cannabis indica
gaggtgtgccactatattattcagtaacaataactttaacattgtcataattatttatttatttattattattgattaaatgatgtattacttcaaaaagaattatatggacaagatacaatttgtcacaaatacttaaaattctaaattattaagtgaatagtaatcttaagatgacggtaaattaaagtaaaacttaatttagtggtcatctaaacaagattaaaacaataatcataatattgacatagaagaataaaatcaatttaatatataatggaatctaaaaaataacatttaataatgaaactaaaaatttatatctcgagttttgaaataatttaaggagaagaaaagatgaagaacactccctgattttcataaactttcgaaactctacaaaaatattattttggtgcgtcaatccaacataaaaaaacatcgaatacatcactttttactcataaaaataacttttcttcaaaaactcaagttattacaaaaatgacaaaaaatactaaaattactaagtaacaacatcttctaaataagaaggaatcaacaattttacagcctaaaaagctcttatcagtctgttacatcctaaggctttttgagcctcttgattctctcgagtgcacccaaacgactttcatcgtctttgttctgagcttcatcctcttcattttctcttctcttgtgagccaactctccaaaaacagcatcgggtacatctttttgcttgagttcaactatttcgttgtcttcgtcagagtcattttcttctggcagctcaatatcttcgtgatttgctgtgactttcaacccttcatcggtttgtgattgtactccagcactcacgaatcccaccttcctattaccatctttagcgataggatcgtttgctgcaggagctaactgcctctctagagcagccatttcatcttcggggacacctgcctgtttcaatttctctttcgcctcatcaaggtcgacggtttgatctttctgcatcagatactctggcagaataaagtgcgtctggaaaacaataaatataagatcagtattaaaaatacagattattacttgacaaacaatcataagcttcaaaaaggatgcatatgaaaataaaactattttcttacctggctgtaacttgcagaaacacttcgtttaatacgaagcatttctctgaaggtatcttcattgccatgttgcacttcaaagttattccactcttgccagaaatctgtatctgatcgtgggtctgaaaattgcgatgcaaagacaaatatcgcacgagctcggtcaatttctcccaagctcttctcaagctctgcatactttgaacacattttcttcacatctttatctggaagaccagattctatagcttgctcatatatttccctagttttttgggacaccaaagatctcagcagcacggttgatgtagaggtcatacatactaaatttttcactgttcggaacagccttagtggcttggtcatagaccttcatagctcgcttcgccagaccatattcctcctccagtttggcatattgtagatacagaggtttcactgcatcagcaggggtctgatagacaaaaccgaaagcattagttttagtaccataacaagttgttaatagaaaaacagagcacaaacaacattagtagcagaaacaattatctaacttgaaatctaaactgatataaactattgattatgtttaatgctaatacattaaagatgtatatctataaaaccaatgatggagacaagagtaaagagagattatttaatcctagtataatgtcatcaagtcttagtaaactagagacaaaaaaaataaagatgtttgcagcttttggaaacatctgtctaacaaacatttaagaagatataatatacaactaaccaacaaaactaaattgcaaagtcaccagaaaatagttgaaggcactggcactagtgtgtttaattataagacaacaataaaactgaatgggaactgcacataccgtttcaatagcgtgctcaaacagctctcttgcacgttctagttttgtccgtccatatctcttcacaaatttcgttaggtaagttacccatatgtctttgacatgtggatacttaaatatcttcacccctctttcatacaccctaaatgcatcttcgaagtatttattttcctgaaacaaaatgattattattaatcatttgaaccaagtcttgatagcaaaactttcagagaaattaatggaaaaagaaacaaaataaattgcatacctccaatagatatgcgtaattaataataatttgtggcgtggctattctcagatccattatcctttcatagacttctcgggtggactccaaagagccgaaagtctcctccaaatcaacgtacaaagtccatagtctcaaagacttatggagcttcatttgtactggttcgcttccatcagcagccactgtaatagcaataaatgcaaaattgttagtcacaagatttttcattattaataaaagacattcagattacagttgcttcctttacagatataaaacaccagagtctgaaaccatgcaggttttcttttctttttaaattttaatcaagagaaaatccccttactcacttactgggcccatgtttgaaactaaggctcctcgactaaccataccaatgttcacaggaaatagttcaaacttgttctaacatcttaactaaacctatgttatcttccaacaaagcaacagaaacaaaaataaaagtaatgactaataaacaaagcttaccataaatatgattaaaatcaaaaccagtgcatcacctaatacaagtaacattaccataaatatgttactttaccctgatcactaattgcatagaaaactttaaaaagaagaaagcctaacaagtaatgagaaaaacacaacagcaattcattacctttacgtttaacctccactgatggctctgctgtagcacgtctcatcagctccaatgcccctttaggatttttatgcttcaattccatttcggcccactcacaccaaatagtagccagattatccacagtcttgtagttcacctgcactgctttatcaaagatcactcttgcattcacaatatcactatgggtctcatacagctttgcaaatgcaatccacagcgtatgcggtttccccactgctttcatgggatcaactgtcctcaccgcctcagtgtaagtaaggatctgttttgtaggattaccctcaaacagttttaccctccgatgccattgctccacattatgtggattctgccgtaaaagaacactattcgctaactcgggtcttctatccatgagattgtccaatctagctaacctcaaatctacatccttatcatcgtgtagccaacaagtactaagaatcttcttctcaaattcagccaaagacaacttcaaattcaacctcacatcttcatcctcttcatcgccatcctcttcctcttcttcatcatcgctcaaatccataacctccattttatgagccagcatgctctcttcaaattgagcataagaatcaaaaataacactaaaatctctaaccgtaactacagtagtcataccctcctcaaatatatctctagctttctcatgtaaatttctcctaatgtaatactcagccagagaggtccataaacgaccaacctcatcagtaaacttcctaatcccacccctaataatcgcatccacattcaacccagaaacctcattagcatgtttagtcagcaaatcacacaattctaaccaaagcctatgtttagtctttcccttaatagaatgaaactgatcatcgttcaacacagaagctaacctctcagatgcctcttgccaaagaccagaatttatcaaaaactcaatgaaatcctcaatatgactagggtcgtactttaaataccttcgataaacgcgaagcgaagtctcaattggaatacccttttggctgacgaaaacgaggtaaggctcccaaattcgatcgtgctgagtgactggtaaagcgcatagtgctctatcgaaggttcgtcgagtccgagttataaatttctggtccgtcaaagtctggaggtacatgatccaaattctgggcatcttatgcattgtaacgagagctcgttcgaaggtattgtttaaggtctcgaagtgggagtgagtgacgggtaggttacgaaccaactcgaggcgttctctgagataagcgtgccagagtttgtagcttcctggaagagctttgagagctcgctcgtagatgatgaagcgtttttggaatggcgagtcggcacgagcaatgaggtatctccaccatagcttgagactgaaggggtttcgaagaagttcttcttcgtagggaagatcatcttgagaagggtaaagatcttgagatatggacattgttacagtgaaaggaaggaaaccctaaacccctcaatggaaattgaagaagacgacgaagaagaaattaaaattaaaatgccaaaatatttatattatagacataattgagaagatcagcccttttctattagaatttaaagtaatttgcggcaaa

SEQ ID NO: 191632 - DNA, 2968 bp, Cannabis indica
aagtaaacataatagattttgaagaagaaagaaaattcaaagcatcaaattaaaagaggtatgtagtataatttcctcaatacttttttagaacatatttcatttaaaattttaggacctatatatatgtattacaattatacaaattatttgattttaaagtatcaaaattataaaaaatataattttctcagtaaaaaataaaagtaaaaaaagtaatgagaaattaacatcacaacaatcataaataaactatacagttttaattgaagaacatatttttgtaaacagaaaaattcaaactgtaaaaataaaaatttccctatattaacgtatttttgtaattgtatttttagtttttggtgtatcatgtaaaaaatcctaaataaatctgcctttccattagcatatataataaaaaagaattaatgtatatatttttttttttgcctaaactatcatcattgtaaaattttgtccttttaactttttttgttgtgaaattttttctagaattatataaatcattacaaatatcttcctttaattacattctactcatttttaaaataacttacttatgtagctataagttacaagtataattgtagtacaaagatttatttaccaattttaaattcaattgttgacattagacatacaaacattaactctaagaatacttatacatattcaaataattcattattagactctcttttatgtaattattttttcagtaatcatgaattggatttgtttgacgtcatattagtgctccatcaacaaattattaattggagggcgttatttgtagcaattttataatacaagaagaaattttaaattaagaacaaaactttataagggtcagttcagaaggataaattatatttattcaataaaataataggtaagattcttaaaattacttcttagttcttattatgaaattttagccatttgtaaattcataccttccatttttatttttttattaaaaaaaaaaggaaaaaccttcaaattaggagttgaaactatatttcaccaaactagtaatgagtatttttcaattgaagaccatttaagtggttatctgttcaaaaataataatagtaattaataactagaaataataacttcttaactaaactaataagaaagaatattgtttaaggttctttatcgtatgataaatacggtaagacttttcatgcctaaatctttagttgtcgaagtttgtcttttttctttgtgttgacccgccaactttctccgggcttaggcatagcttagtcggggtttgtgatcaatgcagcagacgtagcatgatgggtttcttctctatgcgttgtattccttttctcaatgggttgttctttgttattagcaatttcttgcgggttttgggctttgtctgttgcagttggaagattcgtccgatcagtatctaggtaggattgttggtggtggcatggtggtctaaggatggccttgctttcagatcgagtagggattgtttcggtccatggtgttgtgaagggtggtttcaaatcaaatttggcgattaggttttgctattgcagcatggtgttgtgacgagaggtcggtagatctatctatatattagttttatctctgtgatatagttttgagtgtcttttgttttatttcgttgttggttcatcttctttgttctttgatggctcgccatcaagtcgtttttagtcattcacttgtttggaataacaagttctcttcaaccgaagaagttgttaatggtgcaaatacgcaccttccataataattcaatgctcaagctagagttgaatgaacctactacaacaatttatattattgtgtctcctgagttgtgaaggaacttgaatataacttttcttaaaattaattgtaatattatataaatattatttatgtttcttttgttacaaattaagaaatcaagcgatcgattaatttgctcgtttttctgtttgcttttttttttttttttttaaacgtttatatattacaatcatgtttcacctgggacacgaatccaggacctccaacacacacacacacttatgccacttgagctagcctcaagtggttaagtttttctgtttctaaacctactcatgtttcccattggggaacatatcccatatcccgattgggttgtcagctattattttagctgcttgttgaatgatttcttccaaaaaaaagagttgaaactatattttgaaataagccatatctttgaagatgaagatgagaaactgcttcaaaaaaaaacatcactgttcatgacaaaacttgatactttatttcttctctttacttttttttaggtaaaaaacttgatacatttccactcatctgaaaataatatagacttgatttttgatttgactagcccaaccaaaaatgcacatatgggattcccaatgtcgggtaaggatggttgaattaccttttacgatcattattttattttgtgatataatcatcatcattccggtaatttaatagtagggttctttggaaaaatcacatctttatttatattcatggagagtaacaaggatttcagaacatcataatcaagcagaatctaacaaaaaaggaatctctttcacaattaactaaactggtaaatgagtatcaatcaagatataaaaactcatactttcattatgctaaagttggttagttttataaatagttgagttatttgaacacaaattccaacaaagtgccattgattccaatgaataagaagttcatactaactagacaacaatggggggcaaaccgagtaaaagtgaatgtattaataattgtggagttattggagtgtagttggtacactacaaacatcaagtatgacacaagtcacatgccttcaaaaattaaataaataaataaaataataacaataaaaaaaaacaatcacatggga

SEQ ID NO: 191633 - DNA, 895 bp, Cannabis indica
cattttgcatcttagccttttttttttagcaccttaactaagtgggcatagatctaactagtctatacccaggcctgtgtccacatacatacagagagagaataattgaaacttcaccatgagtgttgaaatattatcaaaaataaggtatgtcctttgtccacttttgtttttgttttttttttacagattagttgtcacctcattgattgtcacatttaatgtatgcgtctatatattatggtaggtggtgttctaattaattgataaaaaatattgttaatcatcaatataaaatctttttaaaaaaaaaaaaatcatcaatataaaataatgaaaaaaattcttataacgaccacattgaagaatataataatagattaataatataccatcatgatcattaatggtgtggtcagaaatcgcatttaggtaattctttattactttatttattttgagaccactagattttacattttagattttaaatgtatgatctattttgtttgattagttaaagaagtaataattgaatgatcatcattttttttttttatgtaaatattattttcaaatttatacttaatgctattgatgtgaaatattttccatttattaaggatgatcaatatacactgtaaatatgatagcgagaaaaatatatggtgtaaatattattacattattgcgtgtaaaattgttaggtcgtacaattaatatagttggttttgataaagaattgatttattttcccttaaagtgttatcattaattaggtggagaataatttgaaaaataatctttttgatttattattttatttgtggcaaactctcttattatatgcattcaataaaaaaaaagtaatagactacactcataaagttttttt

SEQ ID NO: 191634 - DNA, 3246 bp, Cannabis indica
  modified_base (3016)..(3016): a, c, t, g, unknown or other
agagagagagagagtaccgtttgaataacaagagtggtattattatagagatcaacaaagacaaccaaaagaagtactatagtttcgtaactgaaaacaatattgtggaaacatcaatataaacaaaaacataaaaactaatgttcatctgaaactgaaacgaggcttcggaagctaggctagtcgtctcttcttttaacagaaatcaaactctggacatagtagttggatatacaggtgctcacattaagcctaggaatgagaagagatctaaatgtttggtaattgaggttgtaagacactactccgtgacgatagtttaccatgagaagctcatctgtgttccaaaatattagaggggagtaataggtttcaaagttcccaatggttggatgttgagtccaagaatattcaccatcattgttgtcatccaatacccacatttcaatagtacaaggaagattcacttcaaattcctctacctttaccataagcaaggcaactgattgattccattctacaaggcacttttcatattcaacaatgagaaactcctcatcattgtcattggctgccccttgtattggacctactggtggtggcctggtgtgaaactcctcagtagacatgtcaaaagtaagaattgtttcatacccagtgtttaataacatcaaccaataaaaaactcctttgcacaatactcctctgcctcggcaaaaaggagcttcttcaagttcttcatcaattacaatctctttccaagaatcggaattcatgctgtacaactcggctgaacatgtaaatcgatgaccaaaaatcctgaccaacttaaaatcattagcctgcaaatcgtatccaaatccctctccatgagtcctcacaataccacgatcattaatggatgttgcaggaagaatcctggtttctctaataacaggatttatgagaacagattgacctttatccatgaagtactgagctatacaaatgattccattacaatgataggtacgataaaaatcatacatctcatcccaaagataggtatgaggtaaatggtcgaaaaaatcactcatacaatgaaagaggttaaagaagtcggtaggataaacagcctcagggattctaaacgcagaacgtaatggcttcatttcctcatcccctgttaaatcagagctaacccaactcaaaagtattgaagttgatgacaagccatcgttcttatggtggtgttggaatgcaaatgatgggtcagtgatcaaaccgtgccatgatttggaaacccatttgagtcgtgcgagagactccgcaggaacctgtacaagaatatctttcatgagttcgtctggtagcttaccacttaatgcccccattaaggttctttttcttgatctaaacaaagctctggcgctccaacaaatttcagaacaaagatgagttaaacaagattttattacaattctaaacaagaaaataggcaacaagtttttagtaaggacaaataccaagaaaactcatacggaacttgaaaataaaacaaacaatatatatgcataataatcgtttgttagaacctttctttccggtaaagaaatcaagaaattggtagtcaatcaatagtgataacagttttgggttgaacatagaaaaatggcagagacgagatcatggataataaatagagagcgcgagagtcaattgaaaaagaaaagctaagagttaagagtttgtacctgtggtgtcaactgtcaacgatggagatgcttctatgaaagaggaaatcaatttagtgaacaggggagagcgaggtcgttcagtagaatctttttatttagggcagttacaatatggatgtagtttgtttgttaaatcttgctcagttttagttttcggttttattttcaaatgtaagaaagaatgaagtaatgatttgctttataacttgatttggcgggtggagactgggattgagtgtgcttggctctacagtagtcttatatttgatatgtaatttcaatatatattcacatatagcatataagtaatttcggctaagatatagagattcttattttttttatgattaaaatctacttcaaacataagtatatatatgataccacaccaatagtatacaaaaagaagtgtcacctctaaaccaaattcctacaatttcagtctcaataagccccaccaaattggttatacagttaaactaatgatgatttcttttccgcagcttcaatgtcttctccaagcccaagggcccaagctgagtccaattcatatgaattcaaagaaatagtcttcattatcttagttggcatgctatatagacgctttatcaatggctttggtaagctgagtcccttgttaaggctcttattcttcaaatcaacttcttcaccatcaccaccatgttcttgcatttctactgctctttcttttaaagttactgacccttcttcctccaatacctctaagggttttttggacttgtttctgtacaccgagtatagtataagttgagcacaccccaatatgaatcctattgcatttggtacctgaaacaaagcataataaagattgtacctttgagcttggatgatttacattgtcaagtcatttgataactaaattttatacgtaagagttaggaaacttacaccaatgaagaagtccttgaccagcatagaataaatggaccaaatcccagcatttaaaaataagaaaaatgagaggaaaaagggcatgtactccacactcttcattctaatcaccaacccctgaaaaaaaataaaaaaacaaaaacagaaataataaacaattctttcatttctcttttccttaatctacatatagtgaaagtggtataaaattaacttaccatgacagtaagtggtgaggcatacatgcctatagttaatgcagcacacaaaagtccaacaaaggtaagttttatttcttcacgtattgcaaaacagagtcaacacgattactgatccaaaaaaccccncaatccagaatggcaaacaatttcccctgtttttaacctgaaaagaatatttttggtaaccaagtcaaactaaaaatctattcactttccaaaagtggaacagaaatgaccaataagtgtaactatgttataaagcggggccttaccttcttagtccatgggagcatagatgagaaagatgattacatagattagttgcaagatggcaccagcgccattaactgtcatga

SEQ ID NO: 191635 - DNA, 1835 bp, Cannabis indica
aaattgctttttgcgtataacaccatctgctgatgtaaaagattgttaatttgtttcttcttgtaactttcttgctgttttgtatgcttaaactatgtgcttaccaaagttttcctctaccacaagtgaggctatttatacatatcgggaggaggccagtctaagacaagtggcctctttctcttttcgaaaagaaaaatgtgatatacatacaacaccatcacataaagtgtgactgatatgtagtttctttttgggatgcaatcactaggtcctatttgtttttctgtgatgcaaccgcaaaaataaagaatggggtattgtaaatttttattgtctaattttgcagagttagtttgggtagtatgttttctgtaatccaatgtactccttgtattatttttttctatactaatagcacaagtagtgttgttttgtttcacagctttaatatttgggacacaatcagtagcttttatgttcctgcaaagaaatcagtgatgaatctctatattgccgttatggattttatatattttatatgaatattgccttaatggcttatataattacatattatttattttttatattttatatgcacatttttcggatttacaggtgaccatggacattttagttcgtgttttccattcacattgctgtgatgttcacttaaatcatgggaacctattgaatgtgatatggtcttggattggagttaaggcggagtatagacaaaaagtggctgaggtacatcaaaatactctagcagttataacatgtgggagtatggtcttgtttttatgattctactttttttattctgttttaagtttttgtttaccaaggttttcatccgccacaagtgacttattttttttaaaaataaaatagaataaaataaaaaaaaacatgtgggagtatgaactaacattcattttcttggttaagcttctatccatgatgggctccttgcgtcctcaatctactgaacggaaatcaaaatgggctgtcataaggcgtcagcttttacaagcaagtaacaataaaaattatgtctgtatatacatttatatatatatatcgtgccaataattttgtttgcttggtatgcttaaccttttttttttcttgctaataattttgttttccttggtatgttttggggaaagaatctatgattttattttctccaagctgtcagttgttacagtggaatttgaatcggatgtgttctagggaattagcacacgttacaccctatccaagcgattgtggaatgtttatgtggaatttcattaaacttatttttctatttgtttttccttttattccaggaacttcatttaccagaagctgttgtaaataggttgcagactgtcgctttaaggttctgtggggcagcagatcaggcacttcctagattgaggggagcattaccatctggtacctttgttatattagacttaatttttttttttttctaaatgaaattttgttaatgaaaaggaaaaacttaattcttaaggaatacggaattctctatagaagatatatcaaaatcaaaataacaaagcatatgtattgttccaactctcatttggtgatggcggaatttaatttttatttgaaaaagagaaagggacctcttgtcttagacttagacaggacccttcccgctatgtatataatctacacatggtgcctctctcttgaaagatatgactgcagttttccatcataattacttgataaactgctagaaccacgcagttccatattataatttccatcttctcaaagccaattccaatgggattttccttatgaat

SEQ ID NO: 191636 - DNA, 2809 bp, Cannabis indica
  modified_base (2792)..(2792): a, c, t, g, unknown or other
ctctctctctcaactcaatctgatatatctgaaatgataagtgttgatagcatttataggcttgggatcaatattctaaagttagtggctgtaagaaattaggttcttaagttacttaggcaataattaacttcacctaatttaatcaactctccttttagcaagatctccatgttagcaaaagtaagagtgaattcaggagcatgaatgaaggcttctagaatcacagaccaatgcactcgctgaaggtccttcctggataggaaagagccaaccgaagtcgactatctgggaataccttccaagaggtacaactagcccttcagaactcctttctcaaggaggactagctttcctgaagaccctttccgaaaggtcaagaaaaccttctaggacctccatccgcagtcaacaactttctgggaataataataacttttggatatgtttttatttagaagaactataccacatgtaaatttatatcttgagtttgtttgtttttttaacaagtattgcatcttatgcaaattctatagatgataaattgtcctgaaattttcttattgtataaatttattctttacataattagttatctcaaataaaaattatatttttttagttccctccaaaataatattactaatttatcgagccaagattcaaaataatatagattaatttgtccttggtcattatatatatgttcaaagatgagatacaatatatgtacattttccttgaattaaatagaaacatcatatataatgagtactataatatttattaaaaaatttatagatgatataataataattgaatgaaaatataactgcagagatttttgccatctgagtttggaactgacccagcaagaatgaaaaatacaataggtgcagaaagagtagtatttaatgacaaaatggaagtgagaaaagctattgaagaagcaaatattccttttacatatatttcagctaattgttgtgctggttatttcctcggtggtttgggtcaaccaggtcactatcttccttctactgactttgtgcatttgcttggagatggcaacaaaaagggtacaaataatatatataaatatatatatatattagctaaaagaaagtataagcctaaaataaattcgaaaatccatactcaaatcatgtctttctatttttttaccaattaaatatactcttaatcatcactactaaattgtaaaatattgataacttatatacaactaaatataagactaataagcagtgctataattttaatatatgtaagacatttatatagggataattaaattcctggtgtataagtcccttaacaataattatggacaactttctaaaaatatttatttatttatctaacaatttacgtgtataaaagctaaatatcgttcactacaagaacatgtatataatttaatgtaaaacatgaagtacataaaaatgatataaaatacagaattaaactataaacatattgaatcgaatataactgaaaataccttcaactattaattcttttaattttgattcttcgatctttggatctacgaaagaaaactaaaactgacgttactgtgagtattcggacttttataatcactctaatgctcttagattgaattaatattttcacataatgaatagtgagtttgggaccgatatcctatatttatatatgagatactctattagtatctatgccacattagttgtcgaaaattaaatcggtaatagaatattgagaaatttgcagctaaactcctttaagtttcaatttgtatacacttaacccattaatctttcttttaagtggaaaaaccctttaacttaacttctacttgcaaatctaaagtattagttaaactaagaaacgaaacgcgctttacgtgcggttgtattttatttagtgataattaaattaaaaaactatatcaaattttgtattttaaatttaaatattttttgtacataatttttaatagtatgagtaactattctactaaatcttcattttttttactcttaataatgtaagaaaaataaattatgttttaatgtcttaattattctaattatttgaaactaataaatgattattttttaagtaattaatttattataaatatacattattatacagttagttttcaaaatatatatagatatataaaaatagataaatatatataaaatttattaattcaaaaccgttgttaacatcatatctcacttgttgtattcgtcactacattaaaagttattgtcattaccgtaatttacttgtaatcatcctatccttctaatttattaattaataataagaaaacagatacaactgcatctaattaaaaataaattcaaatgataagttttagatattttcaattaaagagatatcttcaaaagttagaattcgaaaaaatcttcacacaaaatataaattctcaaaaaaagacaattgaaaaaattaattgtcatcacaaaataaatattatgtgataaatatattgaatatttttcaaatatttataaaataaataaattaatacatttggtttagatggatatgttataaataattagtattttaattaattttaaaaaaatattaacaattataattgtatgtattctttaaattagatttaattttctttcttcaattaattattataaattagaaaaataattgaaaaaaaataagagaaaaaaaataaaaataagtttaggtagtatttttttttttttatttttttttttttntttttttttagtttttc

SEQ ID NO: 191637 - DNA, 2103 bp, Cannabis indica
ttttgtgaaataatccctattataaataatattgttattaagcactaatggttcacttctagatatgttgctttgttattggctagtgttattcttttaaagttatcaattaaactatataagatttgatatttagttagattaatattaatattgatacataaaagggtgttaggcaccactagtacctgttagcatttttctattataaatagtaaataacattttgaattatgtgttttgtaaaaattaacaatgacaaattggactttatattttttaaaatagtactaaatagtactttgaacttaatttttgatatttatttttacgataattaacttgaagacaatttttattgcgaataaatgcaaaagaaaatatacctaattttgtcataacaattttatattaggttattattaacttttattttgataaaaaaaacagttttttttttttaaattagttcagagtactattttgtatcattttagaaaatataagatttaatttatgatttaataaaatagaatgtctaattggtaatttttctaaaatataaggtcaaaaatattatttactttatatataaataaatagtaaaaaattgagaaatttccataaaaatttggtgttgtttgatactaccaaaaatcaaatcatataatacacatgagatgaaatagcataaggtaatgaacctagctccactaaaaatttggggatgtttgatactaccaaaaataataaatactagatgtcaaaacattattagaacaaaccattatgttttaagattttatgtttggtataagggaaaagaaaagtagaaaaaaataataatatgtaaaaatgaaagagagattcacaaaattgtgggaggagttaatcgattaaaattttgaaaagataattctataatataaaattaatgtcatattttccacttttacatgaaattttgagaagttaatcgatgaaaagtattgttatttgatattttaaagtgtctaatattatattgatgtgactatttgatattttaaaatgtccaacactacactaatgtgattagaaccgatatacattaacaattccattaccacttctttaaaaagagtcttgtctttcgcaaataataaagaaattgggttttgtaaaatgagaattttgtgcgatggtctaagatgtttgggctaatcttgaatttgatgttttataattgattagtgatttcttgtattatttattaaattaaaatatatgagatttaatattaaaataaataccaaaaataaaaaaaaaaggtatcctttaacaattctcttgtaataattataagaagatgtaaactatttttgcatgaattaacttaaataacaatttgttttcttgtcaaaaataataataaataaatattaatactgaacatcactaaggtgggtatttcagccttgttttttcttttattgttgtgttttgcatttaatgtcgttcatgctgttgttgagtcgttttttcatttaatgtcgttcattttgttgttgagtcgttttgtgtattcaatgttgttcattgtcgttttttacctttattgtcgttttaagtcaagtcatattactatagtttgatatttatttgaaaaagcaaagatcattaaacataaacataacaaatcctaaattaattaataaaatctaaacaaataccttttgagttttgaaaaatgttaccaaagtagcttaattttgaataatcattgtaattctaatttctaacaacttttaagagattttatgaagaataaaaaatcactgcaaaattcttgaaataaatacagtaaatagtagtagcataagtatttaaaattttgactatgtaagcggtataaatatctaatattgtaaatttttttttttgttttcagtttcgttagtacagactctattagtatattaaataggacacatataaggtctatattttatcattgagtttggacaaaaagatatagtatgagttatatgtttaaatcttcttttaacaaatttaacctaagtttgcaaaaattataatttacaaatgtcaaatacttatgcc

SEQ ID NO: 191638 - DNA, 1866 bp, Cannabis indica
tgtgtaccgatttttgacttgctagaatgtattttttttaatgaaattcacacaaatgctaaataaagttagtaaaatcaagtgtaataaatatatcagcaatttactaacatttattctatttatagagatatgtttcataatctttggtgctataatgtagagaaattcttattaattacacattttctattatcaaattaaacttgcatgtatttataggtgacatcattttataaattaatatagtaaaaattttaaatatgtgtctaaatcaagtttttaaagaaacttggaacataaaggtcaatgataattttaaaataaaacaactattattatattgcttgttgcttaaatttctaaatatgaaaactcattatggcagtagataaaatttgctcagagttactaaaattctggttaattgtaaatgtattgggttgattaatgaagattcttattttgattaaaaaaaaacagaaaaaataaattattaatattcaataaataatttacgaaaaatacgggcaccatttccaacataaactacccaaggggattaaacatgcaaaccaaaatagttatcaaaaacaaaaaaaaaaggttaattatgttacattattaatttccaaataaacaagtacgacaactaagaaaataaattacacgcaaatcaataacgagtaaaacgtgaacaatttcaccttctcatctccactcttattcttaatcactacttccaagcttcataatttcctccataaacattgtcatattaatgtatgaagatccatcttcttcaacagttttctcggccatcttttgaagctttctacttctttttcttctttccttgctttcttctccaccatccaacatttcgtttaaaacattcttaactctttctcccttatcgttcattacccgaactttctcttcctctccccatttacttgaatcttccacccaaagagttgtagctatgttcaaaacattcacaaccaagttttcattataaaaatggtcaccaaatagtggccaggtaaccataggaacccctgcacatattccttcaagtatagaattccatccacaatgtgttaagaatactccaatagcaggatgtgataaaatcagcacttgtggggcccaaccccggatcatcaaccctctatccttggtcctttcttcaaatccatattcctttaaccatttctctagttcttctgaagcacttgctgccccacttataacccaaataaacggcttgtttgaagcttccaatcctagtccaagttgtatcaattgtgaagctaccaaattacataagctgcctaggcaaacatacactacagagcttgtcttccacaaatcaagccacttgagacattgatcctcatcaatagaagattgtttgcctctttgagccttatccaattcatctctgttgcataaagaaaccggtccaacacaccaaactttaccatccctcaacttcttgtagtcatcgataaaagctggctccaattcttcagaagtattaatgattattccataagaacctttctcagcttccatccattggtcaagaaatcgtttacttggtaactgagctttggtaatctcaaaccgttttgacaaaccaggcacaacaaagcattctgtttcagaactaatattctcaagaacattggaactgtacacattacgccaacataacatgcataagcagctcgttacagagaatgatatcattgggatgttgaaattttcgagctatgttgattgtccaaggtaaaaaccatgtcaccaattatgcatttggcctcaatagctctcaatctttttctgctgtgttgcatc

SEQ ID NO: 191639 - DNA, 3417 bp, Cannabis indica
aaaggttacatcccattttgcttcttcgaagcttggacttgggagacttcgtgcaagaaggaaatcgagaaggcctggtgttatacgtgcagtgatgcctcaaactcactcatacgaaatgttagtaacactaggaaggctctgcaagtgtagaaaaggaagttacaagatgttcatgaggcagacatcaaatccctagagagaaggctccaatggattcaacaacaacccatttcggatgctctgaaggatgaagagttgagagttcaagatcgtttgttggtttcttggtccaaacaagaaagtatgtggcgtcagaaatcacgggaaacttggcttgccttaggtgatcgcaacacaaaatactttcactcagccacagttattagaagaagaaggaataacatctgggcaatcaaggataaagaagggaagatttggaaggacaagaatggtatagcaagagctttaaactcccactttagtgatctttattcttcctctaggccaaacattggtgaagactatgatgatctgtatgggaatcgctttaactcccaattcaatgaagattttgttagaatcccgtcagttgaagagattaagaaagttgttttcagccttcaccccttaaaagctccggggcctgattggttttcgggatgcttctttagaacatattgagatattgtgggctcttgcatttgttccactgtcaaagaagtatttcagaaggggtatattgatcctagactcaatagcaccttcatttgccttatccccaaggtgaagtttcctctgtctgtggatcaatttcggccaattagtctttgtaatttctcctacaaagtaattgcaaagatcctttcaaataggttgagtccttttatggaggagttggtctcttcatttcaatcggccttcactacctggaagatggatagcggagtcgtctatccttacgcaagaaataatccataagattacaacggaaaagaggtaaagggggtcttttggctctcaaacttgatatgcacaaagcatatgataagatggagtggaattttctcgagaaggtcctaagagtgaatggatttaatgaaagaagcagccgtcttgtaatggcgtgtgttacgagcgtttcgtattcggttctcctaaatggccatcctctaaagaagttctaccctcaaaggggcttaaggcaaggagatccattatccccattcctttttctcctctgtcaagatgtactttccaagttaattatcaaggaggaggaaagaggtttcttacatggaattaaaatctcgcaatcaggccctcccatttctcacttgatgtttgcggacgacactatactttttgcccgagccaatgagaatgatgtctgtatgatgatgaagtgtttatcaacctatgaaaattggtcgggtcaaacttgtagcaagtcaaaatctggggtgcttttctctaagaatatgagtgtagaaaagaaaaatcgtctactcagtattcttcagatagatcaagttcgtggagatgaaaaacatttgggaaatcctttcattttcaaaataaggagaagagaagactatgcaagattgaaggatagcttgatgaagaaattggagggatggaagatgaaattactttcatatggtgggagacttactcttatcaagattgtggcttcctcgatgcctttatatgctatgtctaccaacaagatccctctatcttcttgtcgtcaattggatgccttaatgagaaaatactggtggttgggtaatgttgagaaggacaggtttttggctttaaaggcctgggattacatttgcactccaaaagcttcaggaggtttgggcttgagaaggtgtgaggacataaacagggctatgctaacaaagcttgcttggtttcttgctactaataaagatagaccttgggtgaattgcttgctgggaaagtactgcagatatgacaatttctggagtgttaatcctaaaagtactgattcaagacaatggaaaggtatcttggaaacaagagacatactcctcaaaggttcaatgtctttagccgcctcaggttcttctattaatttctggactcaaccttggataccttggttggaatatcaggaattttcagagttaatgcaacaaattcgaccgagaaggtacacaatctcaaccttagctgatgtttcttctggtaatgaatggaatgaagagattattatccagatttttggtttggatttgggcaaaagaattctcaaaatccccaggattccttaccctttcctggatcaagttgtatggaaacacaatgcaaaggggcaattctctgtgaagtctgcctattacattgatcaatctagaagatttgcaccagaaaaagttatttggaagtggatctgggaagaagaaattcatccaaagttttcggtgctcctttggagaatcttaaatgaagctcttcctaccaggaatagactcccttttgttcgagataaagaatgttgtttatgtggatcggaagaggaaagtgccctgcatttgttccgtgattgcagcttctcaaaagctgtttggctaggaagtcgatatcctttgaggattgattgtataccgggggacaatatgataaattttttggacaagcttatttcttctatgacaatagtcaataggaaggagctgttaaattttattggttgcgtgttctctgagatttggtaccaaaggaatgcattctgtgctaggaatgttgatgctgatccagtagtagctcatcagaatatcgaaaaggccgtgaaggacatcaatatgctgcatacttgtactgagatacacaggggtgctgcaaattctgtcgctatttcacatgaggatcaggccctggaaacggtttcttgtgtggcaggggagagatatgttatattcactgatgcgtcttgggtaaaaggagctgctggggtttcagcaattggcgttgacagggccaagggacagtggttcgtcaaagcccagagaacttattccaactcagttctggaagctgaactcaaggctattctcttagctttgaattgggctgttgaagaaggttggaaagaagttatcatcctctcagactccaagttagcagtcgatgctctgactatagttgaaaggcctcctgagtggaaatcctctagtattttctttgatatcattaatgtgtcaaaaaacttatggtgtgtaagttctttttcattagtcgtagtttgaactttttggctgatggtatggctaaaggcgctagagtcgctgaagatcaagccgttttgtatcaaggggatggagttccccctgtgatttccatctttttttctagttaattgaactaaaagttctttcaaaaaaaaaa

SEQ ID NO: 191640 - DNA, 1207 bp, Cannabis indica
aaaaaaaaaacagaaaacaaagcttaaaagacaaaaggttagctcaataccttgatacaataacctccttttagctgccgagaacacaaccggatcaaattccttttccttccgcttccgaaagtaggtcttaacgtcaaaattcaaatgcttgttcgattcgttgaattcaattccaaacagcgaaacggaacccccaccaccaccggactttgattttgacgcaaactctaccatggacgaaaccaccgccatggaaacagtaacgagttgattatccaaaagaataatcggcgagttagggttcgagcagaggctcccaatgtaatccggcgtcgcatcgaacaactcgcacttcgaagaaagctctccaagactcgccggccggcctatgctcaacaaaatcgccaagatatgccacgctttctcacaatctgcggcggtgtttacaccaggcacttgttctgagcagctaagatcgtaatttgacatagcttatctcaatcaaaccgaatctttctcattagaaatcgattatctgaaacccgaagttcgatctggaatagtgtgaaacttgaaagaccgaaacgatatgatcacatgagaaatgtagcaatagtataactgtttggtagccgagaaaacgcaagatgggaaaagaaatggagagtttgaacttttttttttttttttttgttcagagtgaagagtttgatttacctgagagagaagcgggaaatgatttttcacgaaatttggatcagaatagttccccgcttttttgcttcgcattctcgaaattacggcaaattaatggggcttacgttttgggcctttatttgggctcgatttcaaacattttgggtttactagtaaaactacaccctaaccaatcgtgaaaattacaatgaaatatgggattttgtaaaaaagttataaaaatatagtatttataggtttgccactcttttgtggcattttttcatatttaagactttttatggtatttgatatgccatatttttgtaaaccttttatctaaactcatatttcatgtttttgtttctaacttaaatagttttatttttttttagtttattttacatttaaactttagggtttctttctatttaaaaaatttacaccaaatactaatttttttttcaaacattacttttataatttgacaaagatatttttacattta

SEQ ID NO: 191641 - DNA, 3479 bp, Cannabis indica
aattcaagtggcagggcacatcagttatgtccaagctaatacatacataaaataaacacgtgtgacatgtcaatatatgcacacttcaagggcgttaaggaggtattaacgcaattgcgttttctttttacattatttttcttttcattgatgaggaaattttttgtatacaagtatggaggactaagttaccaaaatccacctaaatttaagtcaataagcaacttaatgttttttttctctctcgagttttatcgtttactacacttcttaatttgttccacacatgaattagtacaacaagagttccttttggaaacatttgttggaagaaaaatgcccttaaaaatccagaatccaattctgtatactaaattttgttctagccaatgtggcaaaatcagtcttcctcatccacttcatgaaaaggcaaaggtactgtcttcactgctctaaacttgccttgattatttagatgctcattctccaacctaaaaaatcatcatcattagaataattttgtaaattttctcatgccactgtataaagtaagagccaaaaatcaagtcttatgtaattctgtattttgttttacctgaaaaagttccaaagccctcttctaatgacttcaagggcagctaaaaatagtccagttactctgtaatcaacatgtccaaaacttgaatgaacaacagtttgcaaccacgcaagcctgagaactagattcaatccctgcataacataccaataatccatacttcaataccgcatattctaaacaacacaccctttattgacttgccttatcttttgaattagatttggaatcttttatgttgttaaatggcagatagaaaaagggccatgacattataccatggagaagtagtaaatgatctttcggcgaagcattaattcattcctaagccaggggttcttggagtttgattgcagtaaaccccaatcctttacaaagtcccaatacaattggtacattgttgcaaaacttgacataatcacaacaaggcaaagccatcccacagtcctttctttctcaaatgctactttggtccccgcggctaacatggcggacacatattttcccaggttcagaaggtgattcttctgtccctcatcgaaccatcgtctagcacactgcagggtccccagttttaagaaaattgttacaattaagaaattagtgaatgcaaatgcacaaaatagataaaagaggatagtctttaatggtaatgaacctgcatagctctccagtagtaaggtaggaaagaaactgcataggcaagatctctgtagtgcttagttctcatgcagtatccataatcctgagttttgtagcttccagttatgtagtaacatgctacgtactcaaggtttctcagcattggaacctatatatccagtatgaagaaaaagaaattgtcattacaattattattactaaaaaataatctaatggattcggggtattgtgcattttatctacctgactgcatagttgatcagccatgaagaagtccagcattacaacctacataaatcaagtaaacaaaacaattaaatatttgttggtgccttgttggtataaagttttaagagaaaaaatgaacacataccttatagagaggggacagaatgatgtttcttatgacacaaagcaagcgataacggctagatcggtaaatgatattgaaggggcagactagcaagagtaagaaggcctgttcatgttgaagaatattaattagaaatcaataaatagttttctgaaagattcattaaggagtaatattaagtttattaaagagctataaaattaccaatagcagaaggccagggattgcttgaacttgagtataggaataccctttagttagaaaggacaagtgaacaaacatagtccctactactacagtcattgatgttgtacatattagaaatacatctctgtacttgagctcctttgtttgagccaattcaaatatgaagctataatttatacgagtctttctccatgcaaagatgttgcaaccgtacagaaagaagtgcaggaacaatagagtaaacatgctggaaaaaaggaacaagggtcaggttgataatgatgatttgttgaataatttttgtttttaatggcagcagattttttttttgtttgtttgtttgttttttttttctaactatacttgcctaagtacaggatacgaagtttccatatagatggaagtctttggttgctttttgtacaatcccaaaatatgagccatgatgacatatccagtgaagagtgctatcaaacaaccagtaaataaccctgattgagaacaaagaaaaataagaaagtcaattcaattgtcataatgtttaagcaaactgtcatattctaatttggttctcatagtaagaaataatatggtgaaaaactagtataccctattgactaggcccactttaccactagatatctatgagatcagactcaactcaatcatgctttcacaacagtgtgaaaatctagtagatcataattgatagaaaaatcaatacaatacaaaagaaaaggtccaaattaagaatccttatacgattttccacaagctccacaactacaaaacataatgtttccctataggctctaatgagcttttatttaaccttgtacaaccaagtttgtctccaaatatggctatggggtagaatgggacctagctttatcatcccaccaaagaaaagtaaaccagtcactgcctcaaatcttagtttagtggccaagtgggaccatatatatatattttctttttcaccagggcttgttaacacttatactttcataaagtggttgagcttaaagttgtccactaaacaaattttggggtctaatgaaaaaggatgtggcttttcttgtttttttcttcgtcttcttctttttaattgtagattttgttattaaagttctaaacaaggactcaccaatgaagaatgttacagagtgtgattcttttcgctgatgcggtttgaggtacttcatggcctttcttcggtcttcatcagcaaagtttttgatgaatagctcctcaacttcgtctgctagatttattacctgtcattttctaactaatgagaaaatataattttgttggtctacaaaattttggactttaaatcagtatgagtcagacaagcatatctgactttgttatatgatgatatctaatgatatccattgtctcagacaaaaattgttaggatcaatggccacttgacattgtcggaaaattactcagaagaaattgatatattttgtggctaacatattaacaagctcctaaaatgtctaaatagaaaataacaagttaccattgttggccaaataaaattaccttgtctgagctgttgaaatatgaactttcaactactttaagataaatggggagaacttgttttccagtgacctggaaaaa

SEQ ID NO: 191642 - DNA, 1675 bp, Cannabis indica
ttctagatttcctctctctctctaacgacaacaatgtcgctgtcgtgcggcgtggaatgcgtgctgattttgggctgtatgcgttgggcctggaaacgctgcacctacgtcggctccgacgacagcgccacctggcccaacgccactgccgacgatttcgaacccgttccccgcatctgccgtcttatcctggcggtcaacgagcccgatcttcgaaatccccaattcattaccccacgctccggccaccgcctcaacccagactgccgcatcaagcgagtcacatacgagcagacccaaggccgatcaccgccctacatcatctacatcgatcacgaacaccgcgagatcgtccttgccattcgtggtctcaatctggtgaaggagagcgactacaagcttctgttggacaatcgaatcggtatgcagatgttcgatgggggttacgtccaccatgggctcctcaagtcggccatttggctcctgaacgaggagtctgaaacgctaaagcgtctgtgggtggagaatggttcggagtaccggatggtgttcgcaggccactccttggggtccggcgtggcggcgcttttgacggtgattgtggtgaaccacagggaccgattgggtgggattccgaggagtaaggttcagtgttatgcgattgctcctgctcggtgtatgtcccttaacttggccgttaagtatgctgatgttatccaatccattatcttacaggtgcttcaactctttctttctctttctctctctctctctcggtcggctatggccatcaattatttacgctaatttaaataaatatgagatgtttttgtttataattgaaggaagtatttaattaaacgaaaggagttaaggaaattcgcaaatcacacacaattataagaatgatgtgttattaattttattgtctttattgctttcatattttcatgttggatcttgtcatttttaaaataattacgccaaaagaattaagactgagagacgcttattttggaagtgaaaattagaaagagaaaaagaacaggaaaaatgtgacaaaaataactgaatgaagtatatgattggttggtggtagcctgtttattatcgttgaaaatatcattagttttcctcttgtacttggtttaaggttttttgaccctagaaagagggaagacagtttccaaacaatgctccctcccacaattacttttattttactttttaataaataaacgaacttgtattaaagaccttccacatggccttattctcttatttctccccagcaggcaaccatataaatagacgagtagatagccataacagctaccgcccaaagagattgaatcttcttgatagaaataaaatcaaatctcaggcccagcactactttacagttttttgaaataatgtgatcaagaagactaatctctcaaaactcgaatccttaaacataagagaaatttctttacagaaataaatgatcaactgatagtttcaccattattttagcataaaacacaccaaccaaatggccaaaagaaacaaatattgtcatgaacgtttagaccccccttcacacataaactccctagctatagtggagctgaagatttctcataatcttctttgtaatagagcactgctgagtggattccttagcagcaat

SEQ ID NO: 191643 - DNA, 3787 bp, Cannabis indica
caattatttattatatttattacataaaatgcttatatatttagttaacaaaaatactgtgttaatagtttggtactttcattgagagccttagtaataaaaactcagaaaataccctccttataaacacaattacaaacctatatttatggcagataatacccctcacgaaggaagccatccagaggagactactcatcgccacggaaaagaacctcagggatcacaaagaactaacacaagtgaaacccctcgttctgggaggaacgatggaaatttcaattcaactagagaacagatcccagagaggcgaagtgaagatgcctatgatcccaccagatacgtcccattggtggaattagaaaataggaaaattcgacagcgcttggctgaatcaaacagaagaaatactaagttggaacaacaggctacggaagtccgggctgcacagggaaccactcctcaaactcaacccgatccatctataagtaggccacgaggaagaccttgaggtttcaggactaggaggaaagaaaataatcaagggaatcccacaaattcttaggaagaacaacctagaaatacaaaggatatcttaatggatagagaaaattaacccaatacgggcaatacaagaaatgaggagcatcaacattatgttctaggaacttttgatgaattgcaaacgagggaaatgaacaacctaaaataccaaatcatcttgcatgaatgtatatgcaagacagtcgtgaccaggaaactaggaaactcctcgtactgatgggagaaatcatggaaatcaatttgggccaagtcgacccccgaggcatcctcaaagaccttctcgcacagacagagagaatacacacacatacttgagtaggggacgtgtgtctaatctctttcagagaagaagaccaatacgagatgagtcacgtgaagctagttcaagtacaagggagtcgcgatctcataggcactgtaggtcaactgggactcatagacaaatacaagataggaatagataacgacattattttacaaatcaagaaagtatgagtaactcacgtagttaccaatctaaaagtcactcagggactagatccatgagtaattacaattagaaacattgtgaactcgacctccgtgaacgattaaatctaagtcaactagaactatgtgaacatttaaatcaaaatgcacccgatctacgtaaccaacttaatcaaaaagtagatcaacagcctgtggatcccattcagttactagtaatacaattggaagataaatttaggaaataccaagatggagagtatgaaaaactaccaggtaggattaagatgaagagactaaaccattccaccctaatgtcctaaactcagaattttctcaaggatttaaaaatccacatgtcttgcaatacgatagtaccactaatcctatcacccacgtaaacaacttgaatacaataatgggcaagtaacgttttaaacaacttgcaatgcatattgttcctaatatcattaacaggggcaacaagtggttggttcgacaagttcacccaccattccataactttgtgggagcaattgtcaaaagatttcaagaagcaattccaagctgtaagagatcatcgaccatgagcatcttcattaactaatgttaagcaacaaccaagagaatcccttaaggtgtacttaatcgattttagtatggctacatccaaattcagaaatttgaatgactgtattcaattaacatcccttcatggtggaattacaaatgacttgtcaaccgctggggcagacttatgggatgatttgcaaggacgcccaataagaatatcaacgagtttaatgagagagcatagatttttctgcaaaaagaagaagcacaggatgaagtcaagctattaaaatctagtttgggagataaacccataaccagtacaacgacagcgagcaccatgactacaatagtgcaaaatctgaatggttcaaatatcaagaggaaggacgagtcaaaagacttatccaagggtaagaagaagcataagaaacatgaaaaattatgttccaatttatttagtgtatactaaattaaatgaaactcatgaaaaaacatctatctggccaatgaaaatttagtcacatttcgtagaccaaaactgatgggacatgcagggataatgtgagattcaactaagtattgttgtttccataatggacatacaactgaagaatgtcgtcagctaaaagacgaaatcgaaagtctaattttgtgaggatattttagggaatacgtgaggacacaaggaaatgagcctaatcagcccaataatctgaatagcccaagattacaacctccccctatatagagtgatgatatcttagttatttttggagggccacacctcgcaggaaacatcaatagtgcgcaaaagacgtagattaacgagataaagaatgagacatcagcatcagctctagaacctcttaagaaagcaaaatcatatgaaccacacattgtcttttctaaagaaggctcaaagcatgtccgatacccacatgtggatcctcttgtaattacaattcaactcgccaataaaagagtaaagagggttcccgtggatttatggttgctctgtcaacatcctttataaggaaacattaaagaagataagattagaggaagcaaaattaagaccttgcatggtaaatttgtgtgagttcacaagcaatagtgtcgtaagtttgggcataattgaacttcctctaacaatgggggaaccaccattgtccgcgactcaaaggcaagacttcttagtcgtcgacatccacgctgtctacaatgtgttaatgggttgacaagtgtaatatctcgataagcctaattgtaaataatttgggtttataattatattatgggttaattagataataagtgggattatgatcctactaatctagttcaacataaattataaagttgctataagtggataaatttgttgtttttccataattgttacctgtcaccttccctgcatttccttctctttttctacaatctcacttgcatgcacccagccatgtctacatcatctgagaacccatctcttgacatccatcttaccgaagaagaagctttaatccatgagtttgacaacgtttccatccgtccagaaccccattctaaaagcttctgcctggttgtgaaaatccttacccccaaaaccattaaaccaaactggatttgcaatgctatgaaggatgtcaggatcacacgtctccccttctttgtctctaagtaccaatctggtcttttcatggtctgttttggttgcgaaggagataggagaagggttgatgaaggtcaaccctggcattttgatcgatctcttatgtttttttccatagctgatggctttgatatcattcttcccacacaactgaggtatattcctctctagatgaaagtccaatttagtccttttagaaactgtttttatggtatggcccagttcatacctgatgctataagttgaggttcaaatctcctctctttacgattccatcgtccttttcctacgaatccgtgtgctccttgatactacaaaatcccttcatagaggtatgaatgttcatttttgaaagcttgcccttacgaaatggcttatgttttagtatgagggcatccaaaattattgttaccactatggtaaacttgatcacacatataccaagtgtgacaggttccttcagcattgtgatacctacgcctatcc

SEQ ID NO: 191644 - DNA, 6398 bp, Cannabis indica
aaaaaaaaaaaggttgaaaaataaagtgatgtttgaaacattatcagtaagctctcagtcattattaatttggtgaattatggaatagtgtgtttatagaaaagtacttcattggttcataatgtgcttatggcataatatagcctaataaataattttcaactaccctttaccttagtcatttcattattaccttaaaaagtcctattgattctaagtcagttgacattaatggagagaggtaagacatgcaagaatattgaatattggtttgtggaaagttggaaagaaaaaaattggtatgttgttgtccaaatgttgaattctaatttgaatttatacactactttttcaatggagacatctgagtaattgagttaaaattctacctaaatttttttattgaagttctgtaggtggtcacagtagtctgtgaataaaaatggaggcttaattgtttgtgtgttagttctagtttgtgtttagtgttgtcttactcgagggcgagtgatgagttagtttggaggagtttgttaggctatttttagcctattcttcagagtgttttagttttttttttttcttaaattatagtttttggaaaaaaattatgcttatttttttgttttaggttttgacacttggaatgtataaattggtcaaatatcagaaatacagtgatttataaaatagagaactttagaaaaaaaaaaaaaaaaactaaaacttcaagtagaaattaaaccacgttctgttcagatttaggaaaataagaaaacctaaaagttttagatttttttagctattcaatgcatcaagaatcggctcattaagagtttttatgcaagagttatacatattttactgagagaggtcgaagcagaaaagtgtcaggtgttgtggtgcccaaaactagcatcacaccactaattatgcctccaaggtgccaccgcgaggttttaaagaggaaaaataaagtgtcgaagttgctcctggcaccgcggtgcctattgctggcactgcagtgttgctgtcaaaggaagacgggatttttcatcttttctcgtgttttggatgaatattctattttaaaagaaaaagagggcttcacaaataaagggggggacccaaaggaggcagaaacaaaacactaaaaaagaaaaagaagaagattggaggaagcagttagtgatccgtgacaatcccaaactagtttccttctcattctcttttattttctatgtttatgttgatgtttgatttgattatggatttaattatgagctaaactcaaaatttaaggatttgatggatattgttcgacattatttcatgaattaataatagttaatttttctttcttccttaattgtgcaatttatttatatttgttcttattaaatgtatttgattggtcacattatgcatgatctatgatcctaatgtaaaatctgaaagtgaatgttaggaatgctctaaaaagtaaatatgggtcttgatgtgaagtaaaagtaatcacatagcttatgttacttttagattattgcttaatgtgaattgtttatattatattatcttagagatgcagtcgttgacatacaattaaggcttttatgatctaaaaagagtttacgttaatttataatctgtcatcacataggaggaagaagattagttaattagtattaaaaattgggtaatcaaagcaattgagggctcgtttgtaacgtcgtattgtattgtattgaattggattatatatcatatttttatataatatgatgttaaactttaatttatactaaaatattatatatttaggtgccataaaaattaataccacatacatattgtatattgttttacataaaaatattacataaaatataatttaatataatactatacaatacaatacgatgtaatacgacgtaccaaacgaaccctgaaatcatatccctaattttacatccattgttaatttttttattttcttgttttcttttttcctagtgtgttgcgtgtgttccaagtttagggttttttcttaagatcttttgtggggctagggattctattgaggttttgtggtcacgttggctgtgagaatttagagtggttgtgaaattgtgctggttcgatccgccttgcatcatgagtgtcctcagttagaactgtcgtggacttggcaacagacagaatggtaagttccttaaagatggcattcgtcacaagaggcctgcgtctattttttcttttgaaactttatgcaagaaagataagatggaatggattcatagacaactggagttcaaaggaaagtttatggtagactcgagaggtaagagtgggggtgtagcaatgttatggcgttagaaagatcaggcgaacttaatttgtttttctcaaaaccatattgatgttattacaaaggtcaatgtatggaggcttggagtttaattggactttatggtgagactaatagagcacaacgtgggaagacttgggatttggttcgaacttttgtgcaaaactctagcttgtcttggtatgtaattagagacttgaataatatggtagattaggtagataagtggggcagggcaccataccttaggtggctagtggacaggtttaataaagcttttaaagatgtggggttgagagatatggaactggttggtcatcagtttatttgggagcgtggtaggggtacttcagagtttataagaactcgtattgattgggctttagttacatcaacttggctttctttgtttgatatgaaaagactttataatttggaagactcgtcttcgaatcataatcccaatttgttaaaatagaaaagatctgtgttggcggtaaataggagattgtttaaatttgagaatacttgcttggtagaaccaatgtatttttaactagtcaaggagagttatgaaggaggttacttgatgaatattcagcagaaggtgtgggtgtgtagttaagctacgagttgggcagatggatattacaacgaagtttgggtaaaggataaaagtgtgtaaagtcaaacttaaaaaggttcacatgaagaatgatttgattttgagcctacggttctagttaatttaaaagaaactatttactattcttgattaaaaagagatttattatcgccagtagtcaaagcagttgtggttgcaatccggagattcaaatagcaaattttttcatgcaaaaagcatgttcttggcgtcgtaccaatcacattcctaagttgaatactgatcaaggtgattgggcggagtgggacaatggcctgcaagtgttggtggtgaattatttttctaatttatttttggcttctaatgctaactggcgggaggtggttctgtgtgttctgagtattgttttagttgcacataatttggagtttctcaagcctatattagaagaagaagtgcagcatgctttgttctaaatgcactcaaagaagagcccgagaccggatggcatgaatcctacttttttcaaaaaaacattgggagatagttgatcatgatatggtgaggatggtttgagattttttggattgtggtgttctcccaaagggtattaatgaaactaatagggttctcattcccaagaagaagaactcttctgtgttgggagacttgtgacctatttctttgtgtaatgtgttggtcaaagtgattactaaggtgatcgctaattgaatgaaagggttgttagatgttgatgtttatgtgtctaatacttaaagtgagtttattttgagtcatccaatctctgacaatatcatggtctcttttgaagtcatgcactacttgaaaagaaaagaaaagattggcagggtagtatggctcttaagttggatatgagtaaggcatatgacagggcaaaatggggttatcttcgtgtaattttgcttcaaatgggattcatggagagatgggttgatttgattcttacttatgtcactttagttcttatactattgtacattgtggtggagagatgggacctatctttccaactcgtgacatctgacaaggagatcaattatctccatatttatttataatatgtgcctatggtctttcctcattgattcgagtatatgaatctcggaagtggattagaggaatcaaagtttgctaggaagctcctattatctctcatatgttttttgctgatgatagttatatctttttcaaagcttcccctgatgatgctacgagagttttggagttgcttcataagtttgaggaggcatcaggtctcaggtcagcaagttaatttggcaaaatctaatgtctttttcagtgccaatgtgacggggccaagtccattggatcttcgcaatgttctacaaatacaaggaacttctgaacacattacttatcttggtttaactaataccttggatcagtttaagtttgtgattctaaacttcttgaaggatagaattcgtaagagggctcaagattgggatgggaagcttctttcatattttgggaaagaggttctgattagaacggttgctgagccattgccaacgtatgccatgagtattttcttgctcctgattgatgtgtctacagatttggagagaattatgagtaagttttggtggcatctaaattcttcttataatggcagtattcattggatgagttgagaaataatgagtagacataaaactatgggtggaatggggttttgtaatcttcatttaatttggcaatattggaaaagtaagggtggtgttaactgacaaaaccaaactctttggttaatagtgtatataaggctcgttattttcctaggggtaattatctttcagcattccttgggaataattcaagttttgtgtggaagagtgtcttcgaatcgcaggagcttctcaagtttgggattcattgggcaataggttctggtgtgaaggttgatagtttgcatcagccatggcttctagatgatgtgtgttcttttcttactttagatgcccaatgtttggtgggccataatgtgagttcattgatgtgtattgataagagagaatgggatttagatattattaattaaagatatttttaatgagcgcgatcaacaacatattttagctgttccattgtataaatgtagctgatgatcattttttatggtctaaggagcatcatggtttctactcaatgcgtagtgcatataagttgatataagcttagaaagaaaacaggactgcagttgattcttctaggttctggcacaagctctagaattcaaaggtataatcgaaagccctcaatttggtatggcgggctacttcgaattgtttgcccaccttaactcaattaagtggtaagagagtcccaattcaaattatgtgtctcgtttgtcaaaaaagtgagggaattatttttcgtgtgcttattttctgttcattcgctgctcaatgctggcagagcttttggctagggttaggccgattgttgctgctaattttagcagttggtttgattaaattttacaaaggtgcagtaaggacaagtgtggggaggttgttatattgtgttggggttatggaaggctcgaaacgagttggtttgacattaaaagtaagctacagtggattgtgatcttatctcatctatgagtggtcttgtggaatggaagtcatcccaaaataaaggttcaaaggcttctttttagtttttgaagctagtgatggagcagaatttcaggttaagtcgtaggagaatacaatcaaggtaactggtgctgccattttctgtggtccagcagtgcttagttatagcatagtcgctcgagacgctcaagggaaattatggctaagtcgagcagttttgctagtataggcactctggattcgaccgaagcaattggcataaaggaaacactaagttggatcaaaactcaaccatgtcaaaaagtggagcttgagtcagtttgcttggtagcagtccaagctattcgaaatttgttacatatcctttcttcttttggggttattatagaagattgtcgtaaacttcttgcatctctaaataatgtttccttgtttttaattaaagatctgctaacatagtttctcatagtgttgttagagcatcttatttttttcagatcgagtgttcaacaggggtgatatttctgttaaggtacaatcttgttatttgactgatttagtaaattagtaaaagttatatatttgctttctaaaaagaacaattgactctttaattaaaaaaaaaatattaattcatttcattgcttaaaaaaaatccccataaaatatatattcatttaaaaaaaaaacaaaaaaaattgctatgaatactgtatttttattttttatacattttttt

SEQ ID NO: 191645 - DNA, 932 bp, Cannabis indica
cttatacctgtctttttctttgccattctttctctctctttcctttttctttgaattatttatttcaatattattcaccatctcaccttatttttagatattgaatagagtggaccactttccctaaaaaaaaaataaagaaagaaagaaaaagaaagggacaaacagaaaaacataagtaaacctcactataaacaaatcccataccattgtctcaggtggtccttgtacttctgtttttttcctgctatttcttctaatttttattttctattgcagcattaatggttagatagctccttaactaatttttttctgtttttttaaaaacaattttactggattcttccaacatgatcgactttccaaccatcgttttgaccttctctgttattggaggaaacaaggatattatgcctctatatgtatatatatatttacttaaaacccaattctttggaagttttcttaagtaccaactagctactaggatatatgtatatatatatatatatttataacaaagtgtatagttaactaaatgaatctatgataactacttcaatgttcatgtatgtcttttcctcttcttttctttaaatgttcacaatctcaaaccttaaatccaatatttatagaaactacttgttttttagttaaagatgtgatttttatcttgttttgattacatttttgcttcaatcgatgaaacccaaattaataaacaaaaaataaaatctgggttcttaagtatatataccatattgttcttctttccatatgaaatttagttgttttgtttatacatgtgtaggaaaggtggggaccgaattgaggagatatatggtgcattaatggattgggactttagagagtttggttgggagtcaactcatgagttggaccctaaagaagatgatgatgatgatttg

SEQ ID NO: 191646 - DNA, 1273 bp, Cannabis indica
aacaatcagggctgaaacttcttcataccaacataactcattgaagactggaaaccttttatttgccaaactagggtaattcaaaatcataaatgggttctctttaggatatcaatactcaatccaataaccatacgcctccttttcgaataatatattaaccttcatgaatacttttcaaataaaactcgtattgcttcccaactttgctacccacgagggtaaatgaatgaataaaagaaagattcatactcaaaattattttcattcaattattttcaaaatatattttgttacaaaataaacttttttaaaaattaactaaaataaaggattccatgaaatatacctcttttaataactaagaatatttcagttattagatcttaattgtaatattttaaaaaatacacttcaaacagataattcatcaaaacacaagtgtaaacccaatcatatgaccagtgttataaaggaaaaagtttatttgaaacttttacatttttcttcttttttgatgaaaaaggaaactattcaatcgatcagtccattttttaataatggatataatataaatcaatagataacaagtatcatatttttttaagaaaaagacttttatacatggagaataaattgtttgtttaatttgtgtattgacattattataaaatgttatacatgtagaataatacggaagaaaaaaccgtctttaattttatacagtgtttataaccaattttttttaaaaaaatatatagcaaaaaatttttagcactaaatgagaaattaataatacaatcagtaggaccaattagatgattatatttgtttttctttttatgaaatagaaaatagacatctaaattaagaaattaaatattgtgacatacaaaagtgaaccaataaagacttgtcaattgaacaccatatcattcattaccatcataatctcaataaatcttggtctaaatcttaatcattttctgtcacaattcacaacaactgaaaatagaccattaattctcattttacaacaccattaaaatacaggctgtaccatatgtctccacacacacacacacaaacaaaattaacttaaaaccatataattaacaacataaatatatatatacatagtgcaaaaagttagcaagcatttataaattcatttaaccgtgttattaaatctatctacacaaaaaaaaatataatcaatctctacataacttcatatcataagaacaaaaactacacctaattctctctttca

SEQ ID NO: 191647 - DNA, 2335 bp, Cannabis indica
tttatttatttttttgagtatatgatgcctggatttttgtatgtatgtatgatattataataaagacaaaagttctttcattattttattatgaagaacaaaacattatctcatgggtttattctgggaatttacgttgatcaatgttttagaataatgttaataatttattgagcttagaacacttacaaattctcaaggatcatacaaaagcttaggatagaagaaataaattatagatgttaagaggaattctacagttgattttattatgtgatgttattattgatttatttattttttttcttttgatacatttcaaatatgtgattaaataaaaaaaaatgtgatactattttgatattaagattttttattttatttttttaaagaaaaattgcgcaatttgaaattgatgtggagagctgacttagattagaagttagaaccacaaaatctgcccgaaaaatatgaaaacaaaataaatgtgatagtgacggttaagataaatgagtagaacctctaccttatatatattattgtgtgttgacaaattttgtaaatcattatttgaaattaacacatgataaaacttctttccttcttaatgaattgtgatggtttacaagtcaaaaatcatcgatagctatagattcttttataacaaacaaaattagaaatattctagcaatattaacaactttttatttatttatctatttcaaaaaatttcaatattaaatatgtgtgttatttgcagcctaacaaattaagagagaacgttattttcaaactagatacaaatacatttcccattttttcaaacattattaactaaactctttaactattctttaagaccccttaaatgttgggtctctaacagagtggagacacatcaagccacaagaccaactatttcaacaccattttctttctcgaatttgtagttatctcgaacacacatatttattaagatattttaatggatttattatgaaaataaattgtgtggtggtccgaaaatggggaccagaaaatccagcctaacaaattgatttattcattatgaaaaggaaatgtcaatataccctacccactaatagagaactgtaaatacgtgcttgtcgtgttgcctcgatttgtattttcaaaagcctgcaaaaatacggatagtcttatggcgggatacaaaaaatatgtataagttgtatcgtgttatgctgactattttataaatagccttagtacgactcgcaattttagaattttcgagtcgtgttgaaaattttataggtaggcataatacgactcgtaagttcggtattttcatatcgtgagaagatctcttttaagctttactcaaatggacatattttatactgtattatttaccaaattaatagaatcacaaagaaaaaggatcgagtgaaaaaaataagggagacgactcccgtatcgatcaggatgcacccaccaacaatcgaaaaaccaccccaaccagacaacaacaatcagaaaaaaaatacaaaaaaaatctaaaaaattgttaatgaagtggaatgtgaaatccacaatttaaatcttaaaaaagaaaaagatgaatattatggtgacagattgttatcattgagttaagttttaaaaattaatttaaataaatgcaaatttggttgatatatatattatactcgttttttgagaaattaaaaaatcaaccctagctacgactttggccaagatttacaaaggttggatgagattaagacatcctatttgagggtctcatggtgcatgttagaaactcataaaaatactaaccaatcatttggtgcagggacccacaccaaaaggtgcccaacttagggtttatgggctgcgcgagggtttttatcttagagtccccaatccaaaccaacaaggacttgactcataaaggcataaaaaggctaaaacttgaacataaagtcaagattacacaaagaaatcattcctcatggcatggccgacctgtccaggtatctactctcaaagtactaagggatacttatccaaatgtggtccccggacattaagaagcataacacaagggaaatttcattattaatgcataataatacatcccttatcaaatttgattccccctactaatttttaccaaataattcctttgattacattaactttccattttacccatttttaaaataaaaaaatgtaaaaaaaaactgaaaaaagaaaatccaaaacccctctcgtctctttgtccctctccttactttgagggctctctctcacacagctccctttaacctccttgatctctctctctctc

SEQ ID NO: 191648 - DNA, 1038 bp, Cannabis indica
tttttttttttatttaagtgttttgtatattaccatgtataatttaggactcgaaccgaggacctccaacacatacgcaccctcctatgatcacttgatctaacctcatgtggtgtatatgtatatgccttaagcactaaagaatgcacatttaagaattcctttgtatagggtttataccattccattgcagtagttgttggacacattcttgagtcttgactatacaaatgcttgaagaacaagtgattatgtgtttcaagatcatgcccacaaaggaaacaatcttgcaccccttgaattccttgcctttgtaatatgccactcattctcaatattttctaagtcatcaacccaagatataaatctatgtttaaaaagactgtactttgcccaaacatgtttagcaaaccttaacaagcaatcacaagtcttctttatggaatagtactccattgttttcagttcttttaacttatcccttacctacattattttaactcactacgagctacaatcttagtaagtttcatatttccaccaatttgaatcttttaagtaagttttatgcatccatttaactcataaattatctttattttttgagttaaagtccacacatattttctaatagctcacaataagcctaatccctcttgatcttttggcttgcaaatatctttccaagccaaaagatcaagctgtttatattcagaaagtaccacttcataaaaatcacgacatattttatcaatagtttgtaaattttgcttaggaaggatgagttcttgggctcagtatgtataaatagcaacaagaattgagttgatctgtgtagctctcccagcataagataagtgtccagaactcaataattgaatttgaaccatcattttctctatatgaatttcacatttaatagaggaaatattaccttttattattattattaggtaaaatttatttattttttctaaaggacagatgaaaggatactttaagtaaatcatacatttgaaaaaaagagagagagagaga

SEQ ID NO: 191649 - DNA, 1405 bp, Cannabis indica
tatatacaagagtagttatattccacataaattgttataagaggattaatgatgacatcgaaggcatccgatcaaatttaacttttttttttttttatggatccaatttaattagtaatttttttttaaagaatttaattagtaatttgatttaaaaaatttatccaatttaatctcaaaatctaatccgatccaattactaattaaattatattgattttttaattggatattaaattacacacctaattttaaatattaacttaaaaatatgaacaaccatttattaactttaatactttataaaaatatcattaatacaagcgtaatttaactaaacgtttaaaataacaatattgcaagtaataaaatataacaaaacatcaagaatatatttacatagaacaaccaaggattacaaatttaacaaaaaagccactaaaaatataattaatatatttttttattatataaattaatataaataattttaatgtatataaatataattgaattggattaaattttaatttgattttgaaattgacatctaataactgatccaattcaattagaatttaacttttagcatattcaactacactccttaatgcagagaatgtccaaatagtgtttgaatttgtcttgattgactgcctttgtgaacaacatagcaaaatatttttgattattttttattttaagttatttcttttattgattattctgattccagttagaatttaataaatatgctataattggtgaggacatgagctaaatatacataatatatattatcaataatgcacaaaacattattgagctgaacaaatataatcatctgggatggacatttggttattaatagaaatgtatatatgttggaataataagcttcattttgaatccttaagatgacgactgctaattaaattgccagagtggcactggcatagcaagatatttaaatatatagattaatgtgttaaactaatctaatagtaagccaaatggaatacattattgaggaatccttttaattgaataagaaattatatatcatataaatatacaaatggcacatatatgtataagaaattaggctaggctcccattctcaatgacatgctcggatccaagggcgcaaacaatgacgtgaagttcaaaagattcccatgtaatttatatgtatgtatgtataacacttaattatatatagataaggttctctcctagttatatatgcacacatatatttatgcatattctctctctctttctcttttttgacggcataactatataaatgccttataatattatatgttgttttaattaattaaaccaatcatattgtgggaattattcatccaatgtaagtatttatttgtttaaaagaaaa

SEQ ID NO: 191650 - DNA, 1254 bp, Cannabis indica
aaagtaaaatatttgcaaagactacatagtcaagttaatcaaaataagagagtgactatgccaaattgaacaagaaggaacccaaatttttttctatgatttacggatttcgaaaaatcatcaaataagatttttaattaactacataattatcattaaattaataataattattaaacagagtaaaaaaattaattaaaagtcatagaaaaattagaaattaaattccaagcacacaggaaaaaagaaacataaaaaaaatgacgtcaagagtggctgcacgtgcccacacgcacctcggctgagagtgggcttcgcggttggacatcatcttcaacctatagcctgatcctaatgtgagtcacgtgacccggtccgtgcgcaggcaggttggagctatttttcggccagaaaacacggcaaaaacaacggaaaaaggaggggtttcatccgggatttaatttctaatcaatctaaaggatcaatttcaattataaatggagtaaaaaagatagattggatcgtgttcaattcgaaactaagaactaagaaaggaaactaattctcctatgtatgtcatgcaatttgaaaaattaatcgtataaaaatattgcaaataaattggtaatgagatttacataattaatttgacggtataaataattgaatcaaaaactcaaaattaattttataaataaatcctaatattttaatcttgaaatttttctaatttagtcaatgattttaatgatgtaatatatcaacagaaaaaaaaatttaataatgaataaaagccctaaagttttaagatgaaagaatgaaaaatttaacagaaaataataacaaaattaatatgtaattgaagaaaattaacatatacatattaattgttatataaattattggtacgaaatcatatacaataagcaatctaatattatatattagataaattaataataatcccaaaaacaatcaatatatatatatataaagagaagtataagatactaacatgttattttaaaattcttttaaagtcatctatttattttcttatttttctaattttttatttatacctctttaaaactattaattaataataataaaaatttaaaaaatttatactttgtaaaactaaaatacatccgtttaaagaaaaaatctaaaacaacttaccaatctatctatattattgttatctttttttttttatataagcaaaataataataatctaaacctaaaatat

SEQ ID NO: 191651 - DNA, 1270 bp, Cannabis indica
atacaatatgttatgaaaaataaagatcaatggatgaaaataataaaagataaataaaataacaccaagacaattataactctgcaaagctacaaagactaaaaaagattaaataaaatgttacaactctaaaaacacaaaatacaaataaaatagaacgagtaaaatatgtggaagactagaaatacaactgaatgcatgaaatacatgtaaatatatataaaagcaatgtatagtaaattataaatatattataatagtatatgtataatactatattatatgaagactgtagtaaatatatgatatagtatatataatataatattatcaaagaagaagagcaattacataagtattaaagggggatcattaataatagctagaacaaggattatacatctttgttcaaaaaccttatttctcttactaccaaacacttagagaaaatatggaaatgcttttagaaatagataagcttagagagttttctagcttatacatagatgtctattaattttttttttgttcattgttatcaacattttaattattatttaatgggataaaatgttacacaagaaggttgaaaacatgttaaataaattcaaatacgtttatggatgttttcaaaaactaggttctaagtgatagaaaaataaccataaaacaatatgtcgtcaaccataaaataactttttttaagaaaatccagtattgattttttgtaactcttcttcgagccatatctttctctaacgtcccaacactcatttaaataatataattgaacattgtagtagtttttaaaagtaaaaaaagttattccattgattctataatctctatatgtaatatcaatttaattatatataatcaaaagtgatgcatagattacaattttcttaaaaatttttgtaacatttcttatgtcatgtgtattattaaactatataatttaattactaaatacattatatatattaatcttgtattaatatataatatatcacattattttaatcttattataatattaatttatttgaataacgaataatataacaaattctcccactaaattaaaatttatgacacttcattgtaacaattttatttaatcaatcaaaatatatcatatatctctcactttgattgaataaataaactcttttcataaagacttttctcaagttcataaagtaaagtgtcttttaacttgaactttactatagtgtaatctctataaattttattaaaaatttggttg

SEQ ID NO: 191652 - DNA, 1885 bp, Cannabis indica
cctgtgcaatgatgtcttatctagaattattctaaagatacaagaactggggagaattcatggtattcaattagcaagaggagctccggctatcactcatttgatgtttgcggacgatacaattcttttttgtagagcaaatggaagagaagctgagaatcttggaaagtgtttaaagatgtttgaagattggtcgggtcaacgctgcagtaaaccgaaatcagacatccttttttcaagaaactgccctgatacactacgaagcaaaatttccatgaagctgggcattgattcgatcaggggggatgagaaacatttgggaaacccctttctcttctctagaagccgtaggaaggattttgactttcttaaatcaaaacttctttctcggcttgatggttggcggatgaaaactctctctattgctggtagaatggtgtccattaactcagttgccatggctctcccggcctatgctatgacgactaataaactcccgacttcctcttgcaaagagatggatgccattgtgagaaggttttggtggaaaggccatcttaaggactctcggtttctagccactaaatcttgggactccctctgtcaacctaaacgctgtggtggattgggatttagaagatttgaagacttcaatttggccttgttgtctaaattggtgtggatgttggcttgtggtagtgatagaccgtggattcaatctcttaaagctaaatattttccttttgaatctttctggcaagttactcctaaggcttcggatagtccagggtggaaggggattcttgaggcgagatgtattattgttgaaggagcaaacactatcattcacaatggagaagatatagatatctggtatcaaccatgaatcccgtggttgaactatactgaattcagagacactatggaagggatacgtcaaaaagctcctgctctactctcagtagctgatttgctttatcgtagaactcgaacgtggaatgtggggtttcttaaatttctctttggtgaggagttaggaactaagataagatcgattcagatcaatcatcaaggcacttcggatatggttatttggaagggaacaaattctggtagtttttcggttaaaagtgcttatgtttcaagtcaagaagcgcgattaggtgaaaaaggaatgctttggaaggatatttggcattctggcattcatcctagacaaagtatgattctatggagggctgtggtggatgccttgtctactcgaagcaagtatgggggccataatggcactgggtgcctcttttgcagtgacaacatggagactcctctgcacctgtttggtagatgtacccttgccagagcaatctggtttgggggccctgttcccattcgatctgagcaagtgcaaggttctaatctttctgaatttgtctctggtatcattgctatcttgaaagctgcaaagtttgaagggccattaatctggctggcttccattatggagataatttggctgtggagaaacaagttgaaccgaggggttgatgtctgtttaaatcctgaagtggttctgaccgaagttaaaagaaggtattctgagatggttgaaagtctttgtctgaagcgaactgaacacaatgatggtccttggaagatgccggctattggggggaaaagcgcctcgtacttcaaaagttcttatagctgatggatgttttaaaaaatggcaagtctggtggagcttttgttgccatagattatgacagacgaatttgggagggaagtctttcaatggggctcagacagatgcgactggtgctgagatggaggcaataaacatggctctgtgctgggctgaagcaagaaattggaaaaagtttgctgt

SEQ ID NO: 191653 - DNA, 1508 bp, Cannabis indica
aaaaaagaaaaaagaaaaataataacaattaatgtgatagagacaaacatatatagaattaatagaaatagagcagaagcacatgaggtatgagttagttatatatgtatatatatatatatatataaatatgaatatgagttatatatagtacagtatagttgcagagagtggtaaagtaagtgttcttgagatgtgttccgatcaagaatttattcatgtgacaaactgcaccaaatggtcggataactaagagcacacaatcatgtgaagtctttcccttcattattattatctccatttactctattatctttttaatttcatttttacatatataatattaattaattaactaatttatatttatacatatctatatataaaagcgtgcagtgttaacttctacctctaatgagtgtctacatatgtacaatatacatagcttgtacacgtaccagcttctatcttttaatattttctttttttttttttttattaatctcctatctccactctttattaatttgtttagttattcaactcttatttttaattaatttctaaagatctccataaataattattattatttttatataattatatataaaataatgttaaaaaataatatacaaataattaaaattataatatatatataaaaagaaaaaataagtagaacacagatactaaaatgcagatcaagttgaacctgcatctatatacatctatgttcacaatgcatcatgatggtttagatgcctataatcaggccgacctggcataagcagaattgccattgcctaggattcacctagctttgaatttttttttcctaattttggaaagtacaacatttttttcttaaataaaggcttaaatacttaacagccatagcaataatcttatattaatgaatgtacataatgacacaaactcacccagaatatatagctcaagtattttaacgagtctttattgaacaaaagtgtgaggaaagagagtgagaaattcaggaattaagaaagacttgaaagacaaaatataaaattttaaacaaacaaaagcataaaataagagaatactaccatatacatacatacatagatacatagatagatataatattattattcatattttagctggtgaggaggactgagaggagagaaggtaaggggtacccctgtggctgtggtgagagtcttcctaggagatgtgccttctaatgtgaaagccctttcggttggagcaacataaggcctaccagtccccactagtgaagtacttctcttagtaccatttggagacagaagcaatcgaaaagtccaattcagaatctttggtgcaaacaccctgtatagtaggaatatgtcataccaacttggaaattttacatatggatctcctttacatgccccagaaactatcaactttgcaaatttctccactggaccaccaacaacatgtacctatacataaatgaaaagtaatttacaatattt

SEQ ID NO: 191654 - DNA, 1061 bp, Cannabis indica
gtttttggttttttttttttttttaagctttatcatgcatgttgttgtgatccaatacaacaattaaaacaactgtaagttcacataaaggtgtttattattagctttgtgcaatgatgaattttcttttctgtgtgagtttgtataccaatgtatagccaaccaaaattgacagactccttacaagtgcataaaaatttacctacagtattttggatcttatttgtgtgattcacattttagtttttacttgtgctgattttgttatgtcttatttaacacggatactcaaattttaattcttggaattgttcgcatatattctgattgaaatattactaatccaagtcaattaagttcctaattcctttaggattttaaatatgagaacaaacattggttagacaaacaatcgacaaatgctagttatgaccgcaacattcttattccagttgcacgagaatcccttaagttagtgtgtttacatgttagggttaactatgtcggataatgttttgtcattttatttttttggagaagaaatgatttataattgtggaattagtctttaggtgggatattgttgaatgtttttctgaccatttaatgctgtttttaggtggaaaataactttttaatccaattatttttgattgttcaagcagaggatcattaacattctgggaattagaataactgccaatgtggtgtttgtggttggtcctttcgagttattggagagtatgatttgtgaaagtttctttatgattatcattttttatgtttgggattcttaccttgctagtttctaggatagaataaagtttgaagaaattgataaagaattgtctaaaattaactgcacagcactacaatcagctacttttcattttccttatttcattttacatacaaacttatacataacaccatatatcagctattctattttttctctagtttaaatattatatttgttaatatattttatttatttaatttattttatatatttattaatatagataatggaaaaatagaaaagaaaacaacaaaaaata

SEQ ID NO: 191655 - DNA, 2009 bp, Cannabis indica
ctccgaaactcacgggatactttggatttttttttattagaaagcaattttttagtttttacattatcatattatatatatgttataattagttttttattgttttgggtttgtgaattgttgcatatttttattatattggatatttttttttttagattaaaatgattcttttctaacaaaaaaaaatcagctttttttttcttccaaattatagtgtttattgagattttcggaaaccggttaattaaaacttaggcggtgtttgctttgatataatgtaatgtaataagaatggtaattgtaatatgaatggtaatgtaacggaattagaattgtaataggaatggtattataatgtttggtttaactcattaatgaacattgtaatcaaataaaataagttgtatattgacaaaaatacctttagttttattatttttaatatttaaagttaaaaaaaatattaaaaaaaggcaaaagagatattttctaacaatgtaatcatcattacattggttttatgatgtaatgggaattacaatacataagtgatattttttttttgaatgtaatagtaatggtaatggtaataataatgtaatgaaataagaatagtaatgggaattgattaagatgtttgatttgttgttagaatgaatattagaataaatgataaattgaccaaatcatcccctactttaatttttatatttaaaattaaaaaagggcattagagtcattgtagttttactttatttagtcttttgtgatgtaatcctcattacatagcttttctaatgtaatgggaattctcttgtttaatgtaattatggttacaatgtaatcccattacatcacttttaaaagcaaagcaaacattgtaatggataatttgattctattaccattcccattacaacaaaccatacatgccaatagtgtaatgactattacaatgtaaaccattacaaatgtttaaaaaatgaaagcaaacaatgtaatggtaataatgattccattataattcccattacactaagccaacacatgccattaagaaagatataaaacaataaataatagacagttttttacctgatttcggggttaattatttttagtccacaagtccatagcattagccttatagacaagtgttgaatattacaagtgtttactatatgaacatgaaccctcgattcctttcgttcttcttgaagaagaagaagcttgtaggaattttgtagaggttttgtaggtaaaaattatcctctctgtacatcataaaaataagggtattttaggaggtttcttaatcaacatgcctttagggccacccctactgcaagagatccgaccgttcgtttggtaggtggtcgcttcatcatgtgatgcgcaaggatactgactagtatcgtctgaacatatagtatgtgtcacccaaatgtctttcctttaaaaatcacccaatgaccgttgggtaataggcatgtacgacagtgcacatgcatcgtactatggcttgacatgggggacagaaactgatgttgtaccaaaacaagcatcgatgtcactttagtggtctgacaagtacggaagatgaccttccgcgaggagggcctttccacgagtgagtccgggaggaacaccttttcttccgcacctaggaggaacaagtggcaggcacaaccgagcctccgtgtgtccttaccttgtgaaggatgtaccttctgggggagccttttattgaggccaggacgagaggctcaaatcagctaaagaataactcgatttttttcattagatttcacatgtcatttttgcaaaaatttagacaacatatgatttttgaaaattttatccaccataatctcatgaccccaaattatcattaaaaaaaattatctataataagtttttattttgaaagaaatgaccccaaattataatgggaaagttcatagtattattcaggttgataagtattttaatttttagtttttttt

SEQ ID NO: 191656 - DNA, 3212 bp, Cannabis indica
aatgggaaagaggtaatgaacatcacttcattttgtagaaatagtctctgctaaaaagaatatcactttttccacacattacacatgaaactttactaaaataccaaaaaaaaaagatacaaagaaatactctgtaaaataaattatgacaaaaaggaaagaaaaagagaagggtcagtaatacgaattcactgatattgcaaaccaaaatcttcttcagcttgcttcagcacagctgagacactactgaaaaactctggctcgtgtgctttgatttcatcaagagtcttcgattcgtgttcatccacctgaaaacatgtaacagcaaggaaaggacaaagttgtaaaccaagaatcatttattataaaagtgaacttttaattatatctaaaaaaaataccttttattaataacaaaagtcaattaatcaagtaatttttatatattatatctattaaacgtttttttccatccaaaaatattaggggagaccatccctaatatacacaatgttcgacccctgattgtacctatgtttagaggaaatctagtaacatggagaagcagaagtcagagcattgctcttggagtttgtgaacaaatgtggataagaagattgctgtgtcaactacgaataactttgacgagatcaatcaagatgctatgtgatagtcaatcagctataggtatttcaaaaagtcaagtccatcatataattaaaaaatgctgaattagattgagaataaaattgtgcagacactccaacaaagcttgtgtattcttgtcaaatattttaaatacctacaattaagttattgagaatgctctcttgtctctcctccctcctccaagtaagtagtttatggtttccatgagtccagttagaatagtgaaaaggactagattgtcgggaaatgagatttcaactactgggatgctgctttctggcttctcggatcagtagcagagttgctcagaaaagggatagcagggtaagtttaaaagaaagtatttacgaagatgagtttactggtgggagtcttcaagaatagaagaggggaattctaaagatttccaaagtaggcaacagcttggcttagagtgtgattgtcccggcagagagagttgaaatggtggaaagaacttccaaactgtttggataacatagtaggagccaagaaaaaggatacaagccatagttttctaaacaaacaatggcccataagaacagtccaaggaggacatgggccaatggtacagcatggagggaaggagaaaaggcagggaggatgaggctgggggctaatgtctgatttttacttcctcagaaaaatctgattggtagaaagatcaatgattaatttcacatgaagaagaagacagggaagaaattcgaataattcaggaaggctggtaggacgcaaacactagagcaatgctgtcagtgttcgggattccatggggcgattcactatgcaatggagactttttcctcaaaagtcatcgagatgagtcccttgatggatgatagaaccattttgtggtgttctttgagtgaggaaagagaaaggttggagggtgtgggacaagtaagattaccttatgaaatcatctcaactcttcgaataataatttacgataaacaagttttgaaatgaattggcaaatcaagatataaacaaatgcatcgaacaaatggatgttgcattccaacacttacttctttaaatttcaagagaactaaattagagacagatgcaggtttttctctatcccacctggaaaagtaagaagcacacaaattccaagcatgtcagtgtagatccgtactgcatactacaataaaatatgaattatgaattctgattctaatttatatggataacatttgtaattttatttctgtaatgatatattctgtttagaattaaagcaacattttccaatttgtcacaagagcatttaaacctccagtatagctaatttttaactaacttacacaagcatgaccttattgatctgtgattaaagcaccgtacctcacaagcattaactcattgacagagcgccacattccacgccctacatctttaggaaatggctctcttgcactccttccatgccataactcttttgtcacatacatcacttcatcaacatctacctgtaagaaagataattaatgtgcaaccaaaaagtaagaatgtaagacttgttaccaattgtggtgttgttatattatgctgaaatgtcagaagagtattttatattttaaaaccattcaatatgacgaagaaaaagtataaactgctgagaagatttactttctattaagagtaatttttgagtacacattacatagtgtatatagatatttaaaacgtacattaagagagaataaaacaacaaactcttattttctagaaataacattctctgactaaagctgattaatttattcatttgaataattcaacacttcccgctcaagcttgatcatatatactatataatccaagcttgtcaatcaacctttcaaacaaaggcacatgccatgcctttgcaaacactttgagaattctttgatcaattttctcctttatgaaatgacaatcaacttcaacatgttttgtacaatcgtgaagaactggattataagatatggaaatagcaactttcccatgaattttccaacatgtagcctttgtatatccaagcttgttcaatgttcacaaaaagggcgattatgccatgacctaggagcatcagtacctagggttagacatcaagggagagtgctcaatttcagtagtgagagggtaccacatctgtatgtagctttcttcacgacgaacctcatcaaaggccgcaaaaatagaggacggaggatttttcccaagaagacgaccatgaacctcttcataatcccagttccggccatgcaagaaatcacacaatctttcatgatcaagcaatttttgatcgcttcatctcaccgacataaaacaaatcaatttcttgccatagattatacaaacaactataatattgtgttggagttaggatttgttttcgggggtcccgaacttgagttttgtagagaatggtgaatagaattatgtgttgtattccataaaatagtatatatttatatacaaagctaggagacaaaatgggaaactactaattgcaaaatagaaaactactaaat

SEQ ID NO: 191657 - DNA, 2679 bp, Cannabis indica
agaggggggggggggaaggagttggttgtgtgttgaaaatattgatgaactttatttttctgagcatgaaccataagacttatgatggtgggaaggtgatcttattttaatattaattcatacaaattgggttattcttatcatcaattgagatgtggacaaagaatcttaggttcaacagtccaatacatttagactattattaaatgaccaattaattagtctttcttggcataataatatcactaatgtggtgagtctttcttgagaaaacaaaaggtatgaagaaagagagaaggagttggttgtgttgaaagtagtgatgaactttatgaataataattcatgcaaatagagttattcttatcatcaattgagatatggacaaagattcatataggtccaaccgtccaacacacttaaactattattaaatgaccaattagtctttcttttggcatattaataataataagatgaaggttccaagaaataagtaatttgtttggttgttttttccttttgctttgttgctaacaaatagtggttgttcagagagaaagaagaaattagtaagtattgtttcaccaattagttgccaagaataagttatcctttaacttactttagtatatcatatatcaattaaaaaaattacccaacaaagacacattataatgcgttacaacacgattcaattataatattattaattaaagagcaattgtatctagaaattgcactcaaattactctaggtaatgccacattttgcttccacgtctagctagttaaatcaaattattttaaacaagagaataacctacatctaataatgaaagaactgattcaaagaaattgtttcaaattgatcatgaatatcaaggcagtacacacaaacatatctcgataacttagttgtaaaaatgataatatcgataagcatcaaatattatgttataaccgaaaaatattagctgctagaattatttacaaagtaaaagaagtgaaataattttgttgcaaaagatagatgtaatgatttgattatataaaaaataaagattaaacttagtactctctagtcaatatgggataaaactttcaaacacataaaatatgtaatatgagatccaaattacttgctacttagcttccaagtgtagtaaaatttccaaacaaagacagtaatatttacaatttgacaagcagaatatttttgtactcattctttttcatttcatgatctttactactcttattcttgactcattttgattatttcattccaggatcgagtgttggggtccgagtccaagttggggctagggttagtggctggatgccggggtccaaattcaggtctgggttcgggctgaagacagggtctcaacaggaagttgtggtctatgtccaggtcgagttcaagccagggttgacatttaggcaaaggtcaagcgtcggaatctaagtctgagggctagggttgggttagggtatgggggtcgtggtccatgttttagagtcaaggcccgagggtcaggggccaagttgggtttggggtctaagtccgggctgaggttcaatctaggctgaggttcaagttcgaattggggtcaatgtccagatccgagttgggtctgggttcaaaagttgggtcggggtcccaggtatggactggggtcagggttcgagtgtaagtccatgtcgaggccatggttgaggttcagaccaggagtcgggcaggcccgaccccaggcataggcaagctaggcctatgcctaggacccacctagcccaaaggcccaaaaaaactatcctcttttaaaaaatgcacatttttttactgtttgaaaatactacattttttttctacaataaattcaaggtctgaaagatactacattgccaaatcagaaatgaaatcatgatctaccttgaaatctaggcattgtattgtagaaaatatcatcaccaattattattttgccaaagtaaccgaaataagagagtagtagttgagccactttcgctgtgtccccaaatgaatgcaggtacgatcatatcagcactaatgcaccggatctcataagaactccgcagttaagcatgcttaagcgagagtagtactagaatgagtgactttgtaaaaagtcctcgtattggacccataaaattttattacgttaataaaaaataaaaaactgaaataaaagagtaataagaaggactctatcttaatagattaaaaaaatagccatgaaacatcaaactagttgctcatgaaaattgttattaccttaacaaagaagaacatcattagccgatcctagagttacaagtaaccaaaccaatgatcagctctgtaatcgaaacccccatcataagaacgaagagcgaagtagaaaaacaattccgatgaaggcaacacttacaccagcagagactgaagttgataaagaaaagaaaacattaaggaaaaacatcacacttaactattggagaataagacaacacagaaacaatgttatgaaattaagaacagataattgtcacaacattacaacagcaataatgttcaaagagagaatttaaagaaggcctacttgtgtataaataagccacaaaatgttgggggctggaattgtccaattttctgaaatgaaatctttgagactca

SEQ ID NO: 191658 - DNA, 1302 bp, Cannabis indica
aaaaaaaaaaaattaaacaaacattggaacttagttttctttcctatttagttctcacacattgttagtatatttcaattggttatatccttattacttaattagctggaaaactttgtaaaaagacaagagattcttttcattaacttctaattaaggacaaagttaattagtcctttaaaagttatttaaatacaaggattagagcctaagtcttttaaaaatttatgtataaatttataggctaattagtatttttgtcccctgaactttgacatgtaccaaattatactccttgaacttttaaggttgttaaaaatgctctatgaactatagaaattgttggatttaaggatttttgtctaatttcattcaattttactatttaagtgattatttatgtactaagctatgctccccaaactttaatatctaccaaatcatgccactcgaactttgacatgtattaaatcataccccctgaactttcatctatgttagattttttaactaaaattaggtaaaagtccttaaatccaacaatctcaatagttcagggggcatttttaacgatcttaaaagttcaggggacataatttgatacatgtcaaaatttaagataatttgccaaatttatatatattagtatattaattaagtaaagttttttattttaaacagatttcattcaattcaaacgattacaaaagaaaatactcattaagctaagctagatattattaagtatagtttatacatattgattatcctttagttagaagaagggtaaataattaagttgatgtaaagaccgcttagctttaatttagaaattagcagataattaaaactttattatgaaaactatttattaatattgaattaattatttatgatgatttatttgaactcagaatgcatttttatgtcacatatagaaattttatgattttgcattttttgtgcccgacaacattggaacacggtgtatggctattagaatcacgtcttagtatttttagtatagtgggacaataatttagacattgggaatgtcgggaatagtcgggattttagagtttcccaaattacctataagtgcccttttatgttatttttgtgggaaaagggtaaaaaagtcattttggccattagtctttttgtccttagtgaattaatttattagtaatgacctgattttttattaattatcttagctgaaatttattttagaaaagctaagttttatttcattttatttcaaaataaagaaaaagctaagaaagaagctctctctctctc

SEQ ID NO: 191659 - DNA, 1040 bp, Cannabis indica
ggcattctattgtcccatttttttaattaatggaatacttgaattttctctgttttatattatttggaggaattgattgagtggattttgataaatgcaatagtttgcttttataaatttttcctgaactttgaaaactttgactgataaacaggtcttgtgtgatgtggattctggaaaggaattcattttgtgtgaatataatcgagatgcagactcttataggtaaagtaatcatttctctctctctttctactttgataagtttaaagtatgaagttcaccaacctgaaaagtggttaactttctcaaagttcgtggatttttttgagtaaattggcctatatattggtttacctggatactttttacactgttgtctttttcataaattagagagacaattacataatatgtctgttcttctagttgcttttggggtctgtttatgctttgccttttcttctgttgttgatttgagtaaatatgaattgacagaataagtaggttcaaattttggagtggaaattttcactaggtgtagccattgctctcaattataactcttttcattcggaattagctttcattagatatttattctgttattttaatacgtttctttgtttgtatagatcaccatggtcaaacaaataccatccatctttagaggatggggccttaccttcagcagagttgagaaaacttgaaatcgaagcaaacgacatctttaccatttatcgtgaccagtgaggtcctttacttacctcattattagcattgatttcttttatgatgaatatttctgtaactttttaccattctaatcttcaaagaaagaaaactagaattattatacgtatttacttagcagtttggttaacaatgtattggtaggtattatgaaggtgggatttcatcagtttacatgtgggaagatgataatgaaggttttgttgcctgctttttaataaagaaaggtaagctcattactgtagcccaggcagccactgatttatggtttctctctctctctctct

SEQ ID NO: 191660 - DNA, 3329 bp, Cannabis indica
tgtttataaattatggtggtgaagaaaccaattctaataagattcattatgatgcaattccttaagcgtgtgattcacatcggtcaaatctggtaaggcatcatcccctctgtatgccatccataacggcaatgactcagctatattgccaagattgaattcaagaggtttcagatgaccatattgcatcaggtttttttattactccataatcatagttgaagaaagtaccctttcgaattactaccaagccacaaaattaaaaaaaaaagaattaaaataatagtaccagaaaccagagtcatccttcaatttataaagggaaggaaaaattaaatattacttatgagtggtaagagctaatgcctatgaaagaaaatcataacgagctaagagttaatattacatactttgaaagagatggcgtatgttctttgctgatgatgatgggtatgttctcaaaattatgatgaaaatgatgaaacattacagttgtagctttttgggagatttcttcacagctattatgaatactagtgatttttaattatatgaagagagttcctcgtaaaatctccaacttacagtcatccatatatgaatcagctcgtctctcacctgtctcccttaactattatacctataaacattaccaaggcaaattcaaattgtcatgcttcatcattttgctgaaattgtttttagcaaagactgtgatagactcaaaaaacttgtgtttgacgtgtacattcagttacttatgtactgtaataattcacttttttggaaaacatggaattgagggatttcaacattataaagatcaagcaggggcaagtgataaagcatttaatgtaataatcctaactgaagttaatgacaacataatgtatatacaaatgcactaggttgaaaggggtattaagtcaatgcacccgatctcaatggacttctcgtaaaagtaacaaagaatcaaatatattgtaaccctatgtaaaaaatataaataaaaaaaaattctatactacaaatatgttatttaacccttgcaataactcaatatcatacaataactatattagcaaccccttcaacaactatgttgcaacccttacaacaaccatactaataacttaatcttatacaataactatgttaaaaactctcacaacaaccatgttagcaacccaatctcatacatcgaccatgttaacattccaatctcataccacaaccatgttgataacctctacacttagtatcatcaataactatgttagcaacccttgcaacaactcaatctcataccataatcacgttagcatgtcttgtagcaccccaataacattcaaaaacaatatttgaaacctttatagcaatcatgttagtagttttattttagacaaaaattatgttagcaacttaatcttaattttatacaacaattatgttagcaacccttatatcaaccatattaacaacttaatcttatacaacaatcgtgtcagcaatccaatctcatataccaaccacattagaaacttaatctcatataacaactatatttacaagttaatctcataccacaaccatgttaacaacccaatctcatacccaaaccatacttacaacaatctaatattatacaataaacatgttagcaacccttgcaataactatgttaacaacttaatctcaaacaaccatgttataaatctttacaacaatccaatgttatacaacaaatttgttagcaacccttacaacaactcaatctcatactacaatccttacaacagcccttagaaacttttataataactctatttcatacaacaattatgttggcaaccttgttagcaaataaatcttatacagcaaccacattcgtaacttaattttatataacaattatattagtaactctaattaatctcataccgtaaacatgttagtaacctttacaacaactcaatctcatacaacaaccatattatagcaacttctacagaaacttaatatcatacatcaatcatattagcaactttacatcaaccatgttagcaacccttacattacaacagtcacgttagcaacatttataacaacacaacctgatcatacaataatcatgttagcaacccttacaataactcaaattcatgtaacaacccttacgacatcttatacaacaactcaatttaaaaatgataactaacatcatacattcccctattaaggctatagagtaaaataacttccatatcattaaaattatttttcttgcaaaacaaaaattaaatgaaccaattcatggtatgtatgcaattgagttattgtaagaattgttatatgagattgagttagtgtatgagattatatgtttatataccacacaaatctcatttttatatatattataataataaaaatattagtttttcttcatcacttgttgatgtcaactaaaaaaaattagatcagttaaagtactgattattttttcttcgttttttccaaaggccataaatgataagtatggtatcattactttttaaaaaaaaaaaaaaaaataggaagcatggtatcattctaccctagagatttatttcttctctttaatttttgaatgtatatttatttgcaaattttattaaattaaaatgtctaatttattgatgatgactcaaatacataataaaatttgtaatagattaactaattttgatgaattataaaggaagttggtgatcttatttttttgaatataagagtttgtgattaactacaattatagaagaagttggtattctaattatttagaaaaatgaataaacccatcatcaagacttgaaaatgtgtgatagtaaatacatactataagtaaacaaacaaagtctctagaaaaagtaagcaaaagagtgagctaatagtaaacataaagtataaaccgtatttttgaaaaaaaaaaaaccaataaattatatataaatgaaataattttttaaaatccgtataagtgaataaaaagtttttttgtatatgtaataataaaaaaccgcccccaaaaaaaatattaatttatatcttaaaaataaattattttgaataattaagaaaattaaaaaagaaattaaaattttaaaattaattaaacgatttaaaaatattattttttattaaaatatccatttagatagaaaaatatattaaaaatttaatttttgtaaaaactaaattttaagagaacaaatttgagtctattttttttctcaaaaaatctagatttgttttagtaaacataaaatttttcagtttaatttctaact

SEQ ID NO: 191661 - DNA, 3901 bp, Cannabis indica
tttgtttacacaaactctgaaattgaaattaagaagagtaggcttaaaggattgtatatcgttttctggttggtgagagagctcgagggaagaatctcatgtgtttttcttgtttgtttgacttgtttttctcttttctcatttgaaattttcttagaaaccaaacagagtaatattaaggtatgtgtgtgtacagctaagatttgtttgttaccgattgacagagaattgagctttgaatgtttgtttacacaaactctgaaatcgaaattaagagaaggcttaaacgattgaatgtcgttttctggctggtgacagagctcgagggaggacattcatgtgtttttctttttctcattttaaattttcttagaaaccaaacagagtaaatattaagtgtatgtgtgtactgctaagatttgtttgttactgattttgaatgtttgtttacacaaactatgaaaaaaagaaattaagaataggcttcgtttggcgtaagttccatcatttttttaattttaattatttgttggattgtttgaatatcgttttctggttggcgacagagcttcgatcgaggaagagattcatgtgtttttcttacttgtttgacttgatttctcgtttggaattttctcagtattcaaacagagcaatattaagtatgtgtgtttctgtacagctaagatttgtttgttactgattcactgaattgagctttgaatgtttgttttctggttgatgacaattctctagggagaagaattcatgtgtttttcttgcttgttagacttgatttctcttttaccatttataattttttagtaaccaaacagagcaatattaagtatgtgtgtgcgagggaagaaattaaattttttttttgcttgcttaacttgttttctcttttctcatttgaaattttattagaaaccaaacagagtaatattaagcgtgcgcgtgtacaggtatgatttgtttgttactcattcacagaaaattgagaaggctgacatttttggttcaggtggcatgatgcgggaacttatgatgtcaataccaaaacaggaggacctaatggctcaatcagaaatgagcatgaattaggccatggagcaaatagtggcttgaaaattgctattagcttgtgtggtgagcttctccaattcgtttctagtttttctttttcagatgtaaattatgttatcaactaagatttactagattttctggtgttttgacatcactaaatagcaattgatgatcaaagaacactaatagacaacatggtggatatcaaagcatcaaaatttcctcacctaatttttcttactgtttgtgtttgttttttcatatcagaggaagtgaagtccaaacatccgaagattacctatgctgatctttaccaggtgattattatcttttgatttagaagctctgtttgtctcagaaagaaaaatcctgtcaaaatttgttaaagattaattaatagataggtgctattctcaatatctttacaaactttagaaaagagggtatgttgtaaaatatcacaatttatttttatggactgttatatattctaaagttggaccacataggagtagttaaatatttaggtaactctactctactctactgtctctcaataaattgacattattatttacattcatggagttattcaattaagttatgtttggtttagcttgctggagttgttgccgttgaggtcactgggggtccaactattgactttgttccaggaagaaaggtattttgttgattaagctttttaagtttcatatgtatataatatatatagtgatccttttagtaactttttacatatctggatcaggattctctggaatctccagaagaagggcgtctcccagatgctaaacaaggtttgctttgcattgataaagttttgtgacaaaacacacaaagccccaaaaagaaagaaagagagagaagtcattttttgtgtaataatgttttctgtttttgaattatttattgcaggagtatcacaccttaaggacatcttttatcgcatgggactatctgacaaggacattgtggcactttctggtggccacacattggtaactctcctttcttttttatcttcttttttctaggtataaaatagtatttttttttttttaaaaaaatattgtaagtttaaatttttgataatttcttttctatcataacaaatttatcattaatttttttttttattttgacaaaaaattaatttagtgtattatttaatactatttaaaaaataaatatctattatcaagatccaataactattacaaaataaagattaattagaagaatgtaagtattcatgttatatatttggttttgttttagggaaaagcacatccagacagatcaggctttgatgggccttggacaagtgagcctttgaagttcgacaactcatacttcgtgtaagaaaataaatgaatacttcttataattctgtaatgacactttcattttacaagtatttaacaagtttatatatatgtgtatacttatgtaacgtagggagctactgaaaggagaatcagaaggactattgaaacttccaacagacattgcattactggatgatcctgcattccgaggctatgttgagctatatgccaaggtaatgtatatgaatatgatcattcatataaactttgcatattttcccccttgcaaataacttggaagttaaaaattgtgctatctctactttcttatcacaatttttagagatgcacaatttttaattttatgtttggaagttgaattttggaaaataaaagataagaagaaaataaagttaaaaataaattctcatatttggtatggaattattttttatagaaaaatatttaattcaacaaaatttttcacatcaatttttattattatttttttgttgtctacacttcttttttctttacatttttctttcttcactaaaatctaacttacaagcatagtctaaaattatttttatgtaaaacattgcacaaaatatcttatggtgctcaacacattgaattttgttttgtggggcttaaaataaattatctctacttgaaatttgtagagttaggaaatttggtattttgtagtgccttaattattataaaatatatttttgggtttttttcttaacatttggtaaaatgaaactaataaattgagaagggtgtttcaattttcaagaaccaacttagatttcttgttctgacttaaaactcgatattaaattgtaccaattttcgtgtatccattatcgtaacactattctcaattaattttgtatggtggtaggatgaggatgcattcttcaaggactacgcagagtcgcacaaaaagctttcggagctagggttcagcccggttcggtcgagcaacaaggaatttgcaaagagtagtgtgataattgcacaaagtgcagttggtgtggctgttgctgcagctgtggtcatcctcagttacttctatgaagttcatagaaaaaccaagtgatgaattaatcaatcatttatataattagtacattaatgggaacattattaacgcaaatcaaaaatataagtcctcatttgagatgatgatgttgtagtcttgactcttagaaaaaaaaaaacaaaaacttgtggcttttgtttcaatttaatataataaacaataatgtcattattataaatatttatatatattcttagagtactttcaataacttttctagtttattctttaaaatatattactataatatatatattaaattaatattatttttattttctagactatttaaataataattttagaatatatacacaatattgataaataaaatattatttatata

SEQ ID NO: 191662 - DNA, 1763 bp, Cannabis indica
agtgcagttgcattttgtcatcttcaaggcgtggtacaccgagacttgaagccagaggttcttgtttgtcacacttgccttattgttatgagttatttgatttgtgtttgcaaacttgttatgttgccccttgaatttgagatagtaagcactcttatgtatctaattctttatgatgttgttaccgactcttgcttacagaattttctttttgctactaaacgtgaagatgctgatatgaagcttattgattttggcctttccgactttatcagaccaggtgattactttgctaccagttgcagataagagtggcatactgtccaatttttcttttattttttttcttgagcaaatgttttcattttttttacactagcacaaaagaaaagtcgaaagtaattttctatgtttgaatgtagcagaagagagacttaatgatattgttggaagtgcatactatgttgctcctgaagtccttcatagatcatatagtcttgaagcagacatatggagtatcggtgttatcacttacatccttctgtgtggaagccgtccattctgggctcggaccgagtcaggaatttttcgtgcagtactaagagcagatcctagttttgacgatttaccctggccttctgtgtcccaagaggccaaagacttcgtaaagagacttctgaacaaggattacagaaaaaggatgtcagccgtccaagctctatgtaatttaacttctctattgctttgtgcagtcacaagatgttcactagttaagtttcggctttctctttatggtgactgtggtataatgtattatttccccacatccaagagaaagttgatgccgttgctgggctatttctttgagctatttggctgtttataactgagctttattatactgcaaaaaagaaactaaaactggtccagcaatgtgtacttcatttatgttacattatttagtatttggtaaactagatttttgttgtagtttatagttgtttttatgttacaaattttgactcattctaatttttaagcttaatcaacttcttcacatgcagctcatctgtggttaaggagtgatacccgccctgtccctttggatatattgatctacaaattagttaaatcatatcttcatgcgtcacccttcaaacgtgcagcacttaaggtactatcattttcttgttagtaaataatgaccatttttaatttcttttcttcccaaaatggttatagtagctgttctctaatccttttttttttctcatgctttcaggctctttccaaagctttgacagaggatgaactagtatatcttagagcacaatataggctattggattctgacgaaggacatatctctcttcgaaatttcgaaatggttattttctgctcctattgatactgttaaaatatgccttgtaaaagccattcttatgaaagatattaacttttcggttttcaggctcttttgcaaaactcaactgatgccacaagagagtccagggtccctgatatactgaatgcggtatgtaaaatttctgctagtgttgatgtacttttactcccaagtttgcaagctcgaacttaatttttaaatttattacattattgtttctctagtaatattagaactgattcttacttctgtgtatcatttttataagtttaaattttgagagctggtgtttgaaacatagtttgtgtttaaaattagttttgagaaatgtataatgacatactatgcaccacagatc

SEQ ID NO: 191663 - DNA, 4435 bp, Cannabis indica
tattattattttttttttttgtggagtatggtgtaatgaagaccatctatgcagtgtgagtggtttggtcaacacaacgaccctaccctcggatgggggctatcattctggttttttctgtcaatctttaactcaatgctacaaaggaattcgacacattaaaaaaaatgattcgtacgaaaattcttatcttaaaccatttctgtttttcatttaaagagagataggagtatgctttttcatgtgtattttcagctatttacaaacttctatatttttattttttaaaagcatttatacatttctaattggttgttgagaaactaatttgtgattggttttttagaaaataaatggaaagcttaatatagatgacgaagttataaaatattgatatacaaaaagaagaagaagttattatgtgtaaaattttatttgtcttttggcttgtgctccaaagataagacaaaaaaaagtgtaaaaaaatataaaattgaatgtaatttaattgtgttctaacattacttaattttttattaattgtgattgagaatgggatgtgataggatattgattattgcggtctgtgaagatttgttttaattattaaactttatttggtgcaattggcatttaaaaactgtcaaaactaaagtgttgcttcttgcactctctaccctgcaagtttgtgaatgcgtcgttttctcatcattaattaactgagcctttgtttcattataaatttataatatgaaaaaaaatctattttcgagtcttgaggaaaaaaaaagttcgaaacattgattttgttttacctataatggaagtttccttaaccctttctgttcttttctttttcattgatcatgaacttttgtgagattgtttatattatttattttctataggcttgctaagtaagtggtgatttaacttgatgtaattgcaagaattttatattgaaattaagtttgttaatagaaaggattctcttctgattaaaaaaaaaacatattattttcatatattattcatataatacaacagttcaagaaaatacatttgcaacgggttttttatttcagcaacatacatttatctttatggtttacacacataaatatataacattaccaagctgacaaagcaattctgacttaagtactgcttcaatagttatccttacgaatacttcaaaattagaggagttttaactaataaattaaataaacacttttttaaaattaatcaaattaattccacataccaaaaagaaaagccatcaaacagggagtcagatttaacgacctacgtatttgacttttgttttatgagtgaatccaatttatcaattataagaaataaaacattacagtaacttttattttactaaacatttactcgctatttttcctcttcgagttttctattttatcttatctatagcttcatggtaatatgctttttatacgtttctttacttttttccttatttcctaatcattttgtttgaggaaaaaaaaatacattttttttctaagtttgtgcaaacatacaattcattcattattatataattacgtgttaaaaaaaattaccaattgaacttatatcgttgaaaagaaatcttctagcatgttttttcttcgaacaatgataatatttaaaaaaaaaaaaaaaacaaaaagaacaatatttccagaaatagtactgtgtgagctaatataattaagaaacataaaatcattagttagatacaagtaagattaaaaaaaaagaagcattaaatattaaatatagagagaataaaaacgggaggttttatcagtttcgttcataatcctaaataaaaaataaaaataccaacaacaacaacaacaaccaccagaagatggtcccaccaatatacaatacaaccacttggccgatatttaaatggagaaaatatggggcccatgacacaccagcatcaacactttgaaacgtgtcgacatccaaacctaaaaccccaaaccttttggttggaccacagaaccccgcccaactatccttccctttcctcttctctggggaccactggaccggaccccacaccccacacacgccttccttacatcgagaattgtgctctaatgaggtccctcccggacccctccccacctcgccccttggggcccgcgcccaccatcacatgaccaatccaaacaccacttgctggtcccattccttctcttctcgcacggtccacggacccaaaaagcccaaccaataccctttcccttcctctttctaaaaactttaaaaaaaatattatatatataaatgtattgacccaccacaaaagtggtccctacctactacaaatacgaccccactttacacgtgcactaccttttaaacgcgtccacacgtgaccacgtgacccacaccccgtctctccgccttcagattttctctctctactcctttttttttttttttttaatttttgaaagtcaatttttcgaggaacgagtcatgaactggagttctttcttatcgtatatctccaaagaaaaatctctgagcatctgagttgttgccgtactcgtcgtcgttgctgtggcggcggatgcggtggcggcgctatctgatgttattacactcggagtcgccattggtggcggtttctgcactgaattgattgaggttaaattagaggaagccgtagtagtagtagcttggaatgaactggggcagtgacgaaattggccatggaggagacgaacgacgatgatatgggtctggttgctgagatgttgataaacggtgtcgctgagttctggaatgtgaatatatggggttggcttgttgatggggtattattatgtccggcaacggaagccataggtgggaccacgaagaacgctcctggcacgacggcgtttgaaggtatggtccacatggggacgaaaccttgaggcactgcttgttgttggtgctggggctggggctgttggtgttgttgttgggtttgagttagaggtgccaacccggctgagactgagactgaaaagccttcgtttacgtccacatactcactgttcaccggtcgtttccgcttcctcttaagagtcgggtcatctggctccgggtcgggcgtatcggtggggatcttaagtgttccgttaacagacatagctatggcaggaacggttcctgttccagtggcggctattatggcgggttcagcgtgttcgaggagccatctgatggtttcgccgtcggatttgtgaccaagttcccgggtcagctgaaagatccgagcggcacaagccgcaggcattcggatcctccggcctcgaccctctactttacgatgacgatccttcgtcgaagccctcttcgccactgtccccggcactttaacggtaagcggcactaattgcaacgcgtccgccgacgacctttcctcgggctcttcctttggctcaaccgacaacgaagtaggcgccgcttcatttaacgacaacgtttggtttgtttcttccgtagcgacggcgtcgtttcgctcggcctcacctccgccgttgattttcatctccacaacccttctgcctttctcttcctcagcttcgttgttctgaatcatggccatcataaagtgacaactacaacaaccccaaaaaaaaattacagacagaaagattttgagataaagcctaagttgaaagaattatgttagagaagaagttgatgaagaaattagagtgagagagtctgagaagaggtggatgccatatagtaggaatataaataagaataacatgtagaatatgatctgagaaaggataaagtgtgtttcatttatataaaaggggtgtactgaagggtacaccattattagcctaattatttgatcattacaatctacggtcaccagtccattatcacatatccgccttaccttacatgatgacacgtggcatgttcattctgaatagggtttatctcttcttgttgaactcattggtcaacctttgctgacgagtctggtgagatgcaatagtacgactccacctaagcattccctaaccggaaaaaaaaaattgaagaccgataataataagtatcttttagcttgtttatttcttttttttttaaagaaaattatattaataagttcattagaagtatttttattgtaattatgacgattaaatctgtacaaagaatgacgattaattatcaataaagtaatcgatcatattaaatatttttgttcaaaaatgtatatctattaaaaaaaaaaaaatacatttgtgtgggcaaattgatatttatttcattccatatatacttattatttcaatattttgtaggctataattctcataattatgataaaactcacccttggtacccaaaataacatacaccactaattaaaaacaat

SEQ ID NO: 191664 - DNA, 1011 bp, Cannabis indica
ggggtcattatgaggaaaatgcacataccgagtgtcctctatgaaagtgataggaagattcattgcccaaggacgttgagttggtgatttcactacgacacatgtttgcccttctccatctaactctctcaaataccttttttaggagtttttggtgcttctcacaaggtgtggtcctctagagattgttgccacatttccatcaattggtggcggatctaggcctgggggattttgttttcctggtcctaaagccaatatggtaactacagccagagctagtggagtagggaggtttagaagttttattccaaggacctgagggtgacctacttcttgcaaagagtttatggtaccctactgtcctggaataatcatctttgagtgagcaaccccctaactgggatagatgatgggaatccagacctattgtctcaaatgtccttctctgaccaacatctcaatttcatcctttaggtggttacagtcattggtggagtgtcttacttctccatgatactcacacctcttacttggatctcttttgaattttcccccttgagtcgtccatgggggttttctataagggaccatgttgcaagttgcttcataaatattcttttgagtatccaccagactggagtacttggtatatgttggttcatattttttcttggtttttttggaattttcactttgtcctgaagcctttcctcctctcttatttcgagactgacttacattctactatggaattttcgctttagactatctgagagcgatacttcatccagtctatctcgttccatacctagagaaatgggtttgtatgggtgcttgtacggatgtagatggtctgtagacaatcgaagtatactgtgttccaggaacaagagctgtagaggtaaatgtaagagcggaagcaataggaactggtgtcggagggacaccaaatgctttctgatacgtgccttccaaactgataaacccttgtgccttagccatgaattc

SEQ ID NO: 191665 - DNA, 1059 bp, Cannabis indica
aatatttgtaaaaccgattgatttagattaacctttcccatgttacaaaaaaaaaaaaaaagaaatagcctttcccaagaccaaactggtgttttcaaaatatgtattagaatatatattacacctagttatcattttttaaaataatagattataattcaataactttaggatgtcgtattgtattctatattagtattacttaatacaatattatatttggtattgatttgtattaatagattgtgtaaagttataatatattttcaatacacttgaccccaacactgactgcgggtcgggtatcaggtccgggtctggatcctgagtctaggtctcgggtccgggttcgaggtctgggtctcgggttcgggatccaggtccaaagtctgggtcccagattcggggtccaagttcgggtctagatctggattgagaaccagaactgggtcagggtctaggtccggaatctagggtccgagtctcagatttggggtctaggtctggagtctgagactgggcctcgggttttggtccaggtttgggatccaggtccgagaccgggtcttggttcgggtctaggtctgggtctcgggtttgggttcgggtccaggtctaagaccagatccgggttcggtccgggtccagttctcgggtctcggttcaggtctttgtcctgatctgggtctgcggtccaagtctaggtttcgggtctgggctgggattcgggttagggttcgggtctgagtcctaggtccgagtccgaattcgggtcttgggtccaggttcgggtttgggtctgggtcttgagtccgggtttaggtccatgtccaagttcgggtctaggtacaggtccgagttcgatgtccgggtccgggtccggcgtccgagtctggggttggggtcccaagtccaagtctagggtcttgggtccgggtcataggtcacaagtccgggtctcgggttcgagtcatgggtcacgggtccagttcttgggtccgggtctcgagtctaggtctaaggtccgaatctgcgtgaaaaagagttgatgatgctttc

SEQ ID NO: 191666 - DNA, 3335 bp, Cannabis indica
aaaaatatagttaatgaatcttaagataaggtgctaaagtgctgagaaatagcattgctctaataaaatttaggattgaaaaaatatgtacctggggcaaggtaggatgatgaagggaaacccttggagttggaagaatattgcagtagtccaggaagggtaaaactcaggcgaggctcatcgctatcgtcgaccacaatttcatcaggggaaacatgacccaaaacgacatttggggaacaataagaatgcaaaaaacgaagagcttttgccaccccgattgcgatcgaacgtcgtcgttcccagctcaaactcctcaaaatttcactcaacaatttcccttcacaatactcgtaaacgacatatccgctgcccttctgagaagaacgacatactcccactaacttaatcacgttcggatgcctaatcttaccgaaccctttcacatccatccaaaaattagcaccaataaccgaaaagttaacgtcgttatttatctccttcaccacgaactcagttccgttaatacttgacttccctttgtaagctatcccttttctgctgcccaacgaattattaagcacgttatttcctctttggacggacgaaacgacgtcgtttagtgtgacagagttagcaatgctggaatcgaagaactgcacttcccaaaccgatccatcgtcgttttccattcttttcaagtccaggtactttcgcttacgattaatcatgactaaaacaaagactatagaaataagtatggcgaaagaagtcaaagcgataaaaaaacaagtgagaatgagcctccacgaaaaatgtttccttaagcttttctcacacgatggtaaaccactgctgacaatatcaccgctgcagagttcgttcccggcgaccgagctggcgtttatggctagaaatgctccggtaggcggtaaacttccgtggaaatgattgtgagaaacgttgacttggacgagcgactcaactcggcccagatttcgtgggatttcgcccgacaattggttgtccgataaatcgagaaaaccgagaaccggcatttcagtgatactagctggaatttctccgattagcttattgtgactaaggtctaaactcaccattctgtcgcagagagccaattctccgggaatctttccggagagtttgttatagctaaaatccaattgcattaaccttgaaaagtttttgatacttgtaggaatttctcccgctaaatgattctctgataggactaagttctcgagcctttcgctaccaaacgatttgggcaactgtccgtagaatttgtttctggccagattcagcatttgaagtgaaggcatattccatccctcgaaatcaattctgccggacatactgttgccggagatatcaaagaagtaaaccaagggaaattttgttaactcaggcgacaactcgccggagagaagattattctggagacgaactcttcgcatgctctggcactgagccaaacgctttggaataattccctggagagaattagaaaagagaatgagcttgaaaagcctaccggaatcgcacaagccgtctggtattctccccgaaagacgattagtggagaggtccaaaaccgtgagattgtttcgtttcccgagatctcgtgggatctcgcccgataattcgttggaccacaactgaagaacttgaagccgaggaagcgaagccaaaccggaaggaattgtaccggaaagtttgttagagaaaagatgaagaatctccaactcccgtaattgactcactgcctcggaaatctcaccggagagaaagttatcacttagatcgagcgaaaccaaacttcggagctcaaaaacagaacgaggaatcggaccgttgagcttgttctggtacagaaagaggtaccgtaactgggtgaggttcccaattgagtacgggattattccagtcagactattgtagacaagatcaagatgatacagatttttgagttccccaatctgtgaaggaatttgaccactgagattgttgtaacccaagtaaatcaacttcaaggtcttcggcagtttttgtggtatctcaccactcaattggttggaagccagggtgaggtactctagcccagaaatattaaaaattgacttcgggattggtcccactaagacgttacccccgagatcgagatattttaggccgtagaatgagccaatatcatcagaaatagaccccttgagcatgttgttggagaggtcaagtgcctcaagtgttaaaatcgcaccactcgggatgtctccagtgaaattgttgttgctcaggttgaggtaccgtagcatattagagccaccaaaaagttcctttgggagctccccagtgagctggttccccgataggtctactttttcgataacgggtaaccgaaatagatttgccgagagtttgcctgtgaagttcttgccagtgagttcgactgagctgactcgggacgagtttttgcatgtgataccttgccatttgcagacgttgtttggtgctgctgatgaggatgaccagtcggaaaggtggttaaagggatcattgatggaagccttaaacgacagtaaaagatggatttcgtctttaccatcatgcagagctgagatagtagaactcgtgctgaacaacatcaacgacatgaatatcaacagtgttggatgtatcatttgagctgctgatctattgctttccatgatgatatttgttatttcttttctttctcttccaaactcttgatgtctaaactcactgcagttagagattatcaaaaattattataaacatattatattacaattgattaaacgtaaagctgattcatatatatttggtttacatgtattccgtattactaactaacgtttataattattacataagtgaatttaagtaaactgaaaaattctacattaatgataatattgtgcatataatttactaaattgattatttaataacgaaatcataatatttagttgaaaaggtttaggtaaaacatctaaaacttacctaaatatcataattaagggggaaataaaaaaggatggtgatgatgatgatgatcaggggagagtaggctattggaatatttatgccatgaaggtttgagttttgagagtttaaataggtatatacattgaggaaaattaaaaaggaagaaaaggtatatatataggagaagtggacagagaatttgaacataattaccaaagaccacccatttcatgacaatctaatcttgtttgagcacaaatggctgaaagggatacttgagagtagagaggaaaagaaaaaaaaaaaaa

SEQ ID NO: 191667 - DNA, 2054 bp, Cannabis indica
taagtaaaataatacaaaattactatgtttagtaacattgactaaaaaaaatagtgtttgtcattttattcaacaaaagaagaagcctcttcattcacgtttcaattcccaaaaagatgcaccaaaattatcagtatctgcgtcactatcagtttttgtacctttaatggccattaccaactttccaaaatctgactacttccatggataactcaccctttttctttttcttcttattcccttaaaaaacccaattctcagtttgtacagataaaggcttgtaagttgattacaagaggagggagatggagctggatctggaatccattgcagaggcaacttcaggagctattggagctttggttagcacaactgtattgtacccacttgatacatgcaagactaaatatcaagctgaagtccgagctaagcatcagcaaaagtacaggtgaaaattgaatttgatttgagcccattatctttgccttacaaaattcaatttcgtgcttgcttatatttgggcgtgggttttgtaaaagctgagatttttatctgtatgcaaatgctatgactcttaagattttcgctgagtcagtttattggggctgaattttgatgtcttggaattgttatgtataactgctcttcattgtagagtgaagaggataatctgctctgaaacttcaatattgtagattaatacaatggcagtgtatagattttcgaaaaggaaatgttagtctgcggtttttgtttgtaatttagaactatgagagatgatgcttctgtatctcgtgatgaaaaggcttgacataactttttgctttcatagttaacttggatatagctcaaaggtttgaaacaactgttttaggtgatagtgatacaaaactaaaaagatattttatttatgactagtaaatttatgcataagcaagaggcatattggtttttgcaggaatatttctgatgttttgtgggaagcgatttctacccgtcaagtgttttcgctgtaccagggcctcggaacaaagaatctgcaatcctacatttcacagtttatctacttctatggatacggtttctttaagaggttgtacttgaagaaaagtggaaatacaaatattggggctaaagcaaatttgcttgttgctgcagctgctggggcttgcacagtcttagtgatacaggtcagatgattcaatcataggtagatgtccagatatggaacatttacaatgatagtaaatagcatgagaaaactgataaaagaatttaatcactgctatttattaaaagctttctttagttctgtgaggtagtgatgaaggagaatagtcatgaatatactataatttgttaggctagttgcttatttcatttatgtggttttattttatgttatttctattatgatgtcatatttattagtgggctatataagcttatgagtaggattgtaatggacattattgaagattgaatagtaaagttgagtgtttctcccaattagtagttttccccttgtttgccattgatttggcttgagctttgctcaccattccaattttttacgtcaagctgagtgacacaaatctttctaggaatatttcttattcagatgccatcgaaaggaaattttcacttaaatccttgtatcaacatacacaagcatgatttataaaacgtattttgattcttaaaagttgacattggtatctctgattgttcatttgcagcctttggatacagcatcttcaaagatgcaaacaagtgagtttggaaaagcagagggactttggagaactctttcaaagagcacttggagggaggcatttgatggtcttggcatctctcttcttttgacagccaacccttctattcaggtacctttttcattcttgtacatagacatgcactacaggatttgttaattcttatcttagattgtagtcgagaaaatcaattttcttccgtatttcggtggagtgtcaatgacctatctgtaagtatgctaattgctaaatgccttaatcacaaaaaaaaaaaaaaaa

SEQ ID NO: 191668 - DNA, 4076 bp, Cannabis indica
ctatatcagaacacataccacaactgcattcttcattagtgttaacttcttaagagtaatagctagagaaagtttatggatggtagcattggattggacataccgagtattagctttttgttaccctgcacaatatcatttcctgcaatatttactagggaaaatttcaactgtttccctatttttacaacttggttacagttttcaacttttctgaatggcattttgattggaggcttgtttgcaatcttccaattgacaatccctggggaaatcttgtctagtgtctccaaaagcacccatctacatagaaccaactttccacttcagttccaaaagaaaactaaggaataaacagttctattttacatatgggaatagccacaaaaatgtataactaataacattaaaaaaagagttaaagactaagacatgtgtgttctgttccacattgctcatgtgtgagtgatttatgggatttatagtacatcttgcagctacaaaacctaaacctttaaccccatgatagggtttcggtaattggataaatattgtgtttggtgtgattaaatttattgggaaaaaaaaagaagagttataataaagacagatactctacccatctctaacgtcttcaaagacattgttgatatatgctgaatttccctgactgtttaaccagaatcgaaatgctctctcttctcttgagatttggctgtcatctggcaaagtttcaagaaatgatatctgttttgtttggcttgagagaccattcctacaggtgaatgaagaacacacaataagcctttttaagtgaaaaatgcagaataagtcacattacatacatttctcagtgagagtgagaaagaaaaagattatcacctatgctggaaaatatgcgcgacgaaagccaagttaagattcggtgaaccttcaacaatgtctttagcagttaagtatctcttgcaacccatcctatcggcgtgtgcaagaactaactttgctctttcaaaggggtcttttgcagccaatgcagatggtttactgtgctcgggtgcaagaacgtttaagaggtgagcataagcctcggcatcctgcagtgagttttgactccagagagttcaaatataagctaggaggactaatctagcacatgactatagcttcaactaatgattttgtaccttgacatcagtagagaagtttgtgacaatttttctgtattctgatttcttcaattgaaaattcatccacctcaacaatatcttctctggtggtagactcattaactcttccacatcctaattaattggaacattagaagaatatagtatcagaaaagagaagttgttggcataagaacctgaaatctattcctaaaggaaccaaaaacaagaaactcagtgcaatagtacactttttacctgactatcatcaaccaactctactaattgaggtgttttcttcaagttgaggtctgccaataattgaatctacacaacaaaagaaaacaaatacaaggtcaacaattgttttgaattcaccacaacaagtaatgttgagaataataaagtcagtattcatgaaaaatcttaccttgattatctgggaatcactccaagaaccagatgacgctgaagacaaaagaaagaggtcattaacatattgattagcaaaactaaaaaaaattgaatatgtatttgtctggtgtttgtatacaacaattgtacatacccttccttcaatgaaatcctgagtcccaatattgacaacagtgcatccaatagccttagcagagttgagacagagtgtatgattctcatttctttcccaaggattgagtactctcttagtgttgatagctctttcatcaattgttcccggaacagccacattgatcaacttactgcaaaaccaaacagaatgattttctacaatcaaatctacatcctgaaaacaattgaactgtaatcaaaacagaaagatcatcattaaacacaagatggtcaccataaaagtactccatccttaacgatctcgaatagatcgttcgtagaaggatcaagaggaaggtatctctttaaaaaatcatcttctgatagataattattgatatgagcaacataagatgccttttctgattcactgattgtatgaagcaaagtagtggtagcagctttgagaaatgcagaggagtttttagcagcactgccaccagttcttgcactagcgtggccattaagtttcaaataaacctgtcaatgtcaatccatatatacttccttaacacaaaaattctgaaatggaatcaatcaacccttttcaatgtagtccaagattgatcaaaaagctatgaaatttactgtcacaaaatcggatcatattaattaactctgattttaacttctaagcgttttgatctagaggataacagatcagtttgaaagtgctaacaatatcccattaatgaattgaaaatagagtcaatgaaagagtgaaactgaccctgagaaagaactcaaaatcaacatcatcatcaagattatcgtgataattttggataagagaagctctttcttcctctgtcaaattctctcccacaactttcaaactcgacatccttgaagccaggtcaccaaccgtaagcctaccactctctctcctcatgctagtaaacttaaatcaccaaaacaaaacagaacatcagatctttaaaccaaaatataaactctttcataagaagaacaataaggggcaatgacttacgtgagatttcaagctacgaagctcaacttgggtgaattggttttgaagccatggatctgaaacaagaatgcccacgtagcctgacatcataaaagctcaagaactcacttgcccagataaagattttcacttcttcttcttcttctttaataagaagaagaaaaagattgaagctttgaactctggggtgttgtgtagtatctgtatctatggcttttatgagttaatatttttgaatgaattaagtttgagaagaactaaaaaggaggagtagtagtgtacagtagtagctaggaggaaaagagagagaggagggccaacacagttgggacggtgtagagctgtcagtgttcaaagttgctcacttgataaggaattcaaattatgagtgttaccatcatcttcactttctctctccttcttcttcttcttcactttctctctctaaaaaagtaataacacagtaaacttgaaagagagaagagtttggctaccaattgggcctgggcccacaattatcttagtagagaattcaaattatgacccttgtgtccctagctactgtggtttggccgttagaaaatttcttctttaaaataaataaaatatgctccttcttattattatttgtttaaatattattttaaatttgtatcttgtaaaaattattgattgaactatttattttgttaaatgataaattggaccttatatttttcaaaataatattaaatagtaccctaactgattttttgtcaaaaaaaaaacttaataataactcgatctaaatgtattatgacaaaactggttacattttctacatctctttgtgctagaaaatatctttaaattaattatattaaaaaaaattattaaaaattgagctcaatgtgctatttatactatttagtattttggaaaatatatggtcaattttatcatttaataaaactgaaaatttaatgagtaacttttacaaaatacaaaatctaaaatggtattaattattattattattattattattattattaaataaaatgtttattcattaaacataaaactagacttcatggtctttacaaaataggttcatatgaatggagggaaaatctaccataccaaaatagttgtgggaagtaagctcaccttagggcaacaaaattatttaagtaaatactattttatagcctatattttataaatattattgacagaagttttgtttaaataataatttagagtttttattttttttaaattattatagtatacaataatattatgaacttaattttttatttaaaata

SEQ ID NO: 191669 - DNA, 1356 bp, Cannabis indica
atacttaccgatattgccacgatcataaggagtgccttttagccttttctttgttctttttttgtccaagaaaacatgtcatatggtcagtttagtcagaattcccagcacgatcacagaagaagaggaaagctggccgaaccgaacctatctgaaagtgaagggaaatcgaaaatggaaaaggcaaagcaatttctgcaaccgacccaagcagattcagacataatctctcgcctcgtcattccaacccaccgacccggtgctgataccagtttctacgaagatttcgccctcaaaggcatccgagtggaccgagtcgaagaaggtctggttgtttgtaccttcaaggtccctcctcgtctcaccgtaagtcattcaaaccccaaccgaccctaaatttgatattccaaagatcgtatatcaatgaaagcaaattattattattcttgatacaatttgcagtgaactcgatcatgctactgcctactggcgagtcttgtttgacttgaaagacttttgatttggattctttgttgcaggataggaatggaaaattagctacagccgcaattgcaaatctggtcgatgaagtcggcggtgcagtagctcatactgagggtctacccatgaatgtatcagtggacatgtccatttcatttttatcttcggccatggttggtgtaagtgtcaaaacacccaaaaccccttttttatgttgttgggtttatcaagatacatactttcccattgataatctctgtatcattatgaactttgtgcctaggatagggaacttcacagaaaaacttttccccctaatttcagggaacattaatcacttaggaaaatgaaattttcaggaatgagattagaccagttatgattagatttatactagctcaagtggttatgtgtttgaatggttggttcaagtcataagtgataagagcttagacctgggggcaataatgattgcattttcaatcacttttacatttatttgttaattgtcatgaattagtagattttgggttgagatttccatataggtgttttctgggtactaatatgtgatagctggattggaatttgcaggatgaattggagattacatcaaggcttttaggtagaaaaggaggttattctggaactttagtgctattgaagaacaaagtctctggtgagctaattgctgaaggtcgacattcattgtttggaaaacatgctagcaaactctgatttcatccatttccagtctcaaatttgtaaataaatatgcaacaaatacatgaaagccaaagagagagacatatagtttatattgttcagggctggtgatgtattttgattagatag

SEQ ID NO: 191670 - DNA, 3698 bp, Cannabis indica
tctctctctccctctctcttattgtagtttttactgtacttttaggtgttttgggtaagtttctttggagaaaaactatgtaatttctctttttaatttttatggttttagatacaatattttttgtggctctatggaatatgtatggatccatttatgatttgaatagttttttattgtttactttttttggggataagtccaagtatttacttttcatcttggtgttagttagatcacttattgtgaaaatgtatttttttttttttcaacttgttaactaaaaatttctataattgtagtgagtatactatctatatctaatttttatttttctgggtatcattttgcttttggcatattaaacagcaaggaagaaatgaatagggaggcaaagctgattggtttggtagttagaaatttaataataaatatgataaaggaagctttcatgcaaggaaaagattagtggtccccactcactcatctagctttgtcatatcaattcaatgcatatgcttttgttatgggcattcattcctccacattagtcattcaccataatttggataattcattatttaattattcatcaacttttacattactaaccaaattgatccatttctcaaaaaaaagaacaaaaaaaaacccaatctatgaatctaagatcatttggttttcactacacattttactagcaaaaatattgaaggctaacgataatttaattaataaaggtctaattttgtagtaaggttttatataaaatataatataacaataatacacacaattcatttagaactatttagataatccctatatagatattatctaaccccaaaaaaataaaaaatatattatatttgctataatatttattattatactccaatatacagtaactatttaagatgaaatatgaaatattattaatagtcattaataaattaaatatttaaaaaataattaataacattattgttattaaaaatatatattaaaacttattatcatgttgaatgacaaaactgcagaattaaaaaagtatagtatagtattacctcactattttaacacttaaagatgtttacttcatcaacatctcatctaatgattctaatccaatctaattatttatatgaaaaaatatctacacaccccatcaagtgacttctcctttggtctaaaatagaagattgaactttagtctatgagtttatttttttttctttggccatgttgttacttttttcttaaaaaaaacatcggaaatttcttaggaaatgcaatgaagcaaaacaaagaaggataaacttttaatgtttataatttgaaatagcaacaatctagtgatgaaatcacggtacattttgtcaatgtaaaaatttttcacagttgaatatgtatatatatgtgtgtatgtatgtaaaacataggagataattaggagaggctaaagtatatcatttataaatagaattgcataaataataccatcagtaaatacttagttaggatcatcagaaaatgtgcagttgaagccgggacagaaatataagagccaaatccactgatcaacacccaaatcagtctccagtttgctcaaactcccttgaacaaaaacactctcaaaccaaataaaaaaagtgagtcgtacactaatcaacgatctcaagcaactacatttttttcaaatctctctcaacattttttgtatagtaaaatgttttatgtctctagccaatacgattgaagggctaaaactgaacaacatcagtcaactactaaatgatagtcggttgccaagaattcaagtattgtataagtttagtttaatcactcaccttgtaggtagcttagaagaaaaaaggttcccattctttaaatacttctaggaacaaacttgaatctatttacagtatagacacgcttatgacatatcccacttgtcatttcagattgaaccaaactaatctcttgtttctttaacatcagccggtgtggacaagggatttccacttagtttcatcccagcttcattcaggccatggagaggaaaatagaatttttgggggtatggagtaggcaacacattactcattatagaattgatcaacaatattgccaaatctcataaggactgattacctacggtcttatttgtatcatagaatcaataacaataagtcttgtttgaatgacttcaacaacaaaagacctgtacaatgatagtgtagtgcaagagactggtccttggagctatgtctattcaaaatatatatttaaggaattagtgcgtgtcacaattccatttatgtgcacaagtcctttatcagattgttatatcaataggaagctagtactaactaaactctgaattaactttgtgccttcgctcatagactaaattatatttcttttttcacaaaatgaaatgatttttatatatttttcctttttggggcacaggaagattgtcaagaaatgtggtcatgaccggaagtattcttttcaatgggagcaagaaaagactcgaatatggtgctattgtaagtttctttcttctttttttcccagatattattgaaagtgtatgcatagtaaaggcttatattcatttctttttttattatacataaatatttatttaggcttatgtgacacaagaggatgtattgctgggaacattaactgtaagagaaaccatatcatattcagctcttttaaggcttccaactacaatgagcaaagaagaagtaaacagcattgtggaggaaaccatctcagaaatggggctctatgactgtgctgataggctaattggaaattggcacttgagaggcatcagtggtggtgagaagaagagattaagcattgctcttgagattctcacacgcccttctcttctcttccttgatgaacccaccagtggtcttgacagtgcttcggctttctttgttgttcaaacacttagaaacgttgcacgcgatggaagaacggtcatctcatccattcaccagcctagtagtgaagtttttgctctctttgatgatctcttcttgctgtcaagtggtgagactgtatattttggagaagcgaagagagctgtagaggtaataatgaagaagagaattagatatgtgaaaattatgtttacttgtgactgaagttatgatgtgtttcttgtgatgttgtagttctttgctgaatctggtgttccatgtccaagcagaaggaacccctctgatcacttcttgcgttgtgtaaacaaagacttcgacaaagttactgccacgcttaagggatcgttaaaattgcgagtacaattcttcctgcaactgagctcttttgtttgttgtggttgttctagttcagttgttttgacaattgacaatgttgtaacaggatgttccaacaacagaccctctcatgaatgtggcgacagcagaaattagagctttgcttgttgaaaaatataggtactcaaagtatgcagcaaaagccagagccagaattcaagaactatccaccattggagtaagcaatctgctccataacacaacattaaacacacatattagcagtttcaaaacttgtttaaaatacttgtgttgagaaaataagcattgccctaagggaccagcctgagattgataatggtgtggagagcattgtcaaaaatttgagcaaga

SEQ ID NO: 191671 - DNA, 1587 bp, Cannabis indica
gatactgagtcttttgatgtgcctgcgaggaggtgccccataggcttcagcaactggctgcaaagcacaaggtcgtgctttgcattaggcagaagtacattagatataagccctttatggctgaggtcaaggattatgcttgtcacagggcaggtgagccggttgccaagaagtcaaaaattttgaagagggaaccatatgcatctaaacggtgtgggtgtggatttcgaattcgtgccattgtgccaattgccaattataatgagaaggacaagacttttgtttatcaagaagaagggatggctgttttcaagttatatgctgtacactcaggtcacgagccaggacccttagatggaaatgcgaggataatgcatagagttgtgggccataaaggcggctttttgttggatcaagatactgtatatggtgtgaacgaggatatggagaatgaaggttttgggttgattgggaaggatgaaggtaattttcatctttcagttttgcagcaggtgcatgaattgaaaaccgaagttggattcttagaagcaaagattggaaagatgccgcgcgagttattgtgctcggtatctcgggatttatttgatattgttagtagggttagacgtattggacaggagaatttgaagccaatcggatttctccaagataagccacatcctgacgatgtattggttggggaggatgatttggctcattggagtgatcatcaccatgaaagaatatatgggaacggcaaggatactgaattgatagatgatgatgaggaaagttttgagcggactcttgaggatgttgtttcttgggatcagcttaggacagattgtagaaatcaaaaagatttaatgggcgagtcttgtaagtctgaaaagtggctgaaatgcagtaactttgacgagaaaagcattcttgattgtgaagatacaaagctaaccaagcccttaagacatgacgatgctttagtagcagatgtaggtcttgttggcatacaagtcgatagtttctaccaagataacccaaaatggtatgattctccttgtggattggactccagtgctgattgtggagatggtggattcaggcacggagagattgtttagactttcttgaagatatcaattaagcctttctaacatatgtgagtttatagcggtgccccttctcgagttggatgtggggttgtacatttatgtatacagaagattggagcctccgacatgcattttaggttccttaagtgcgtggttctgtaaagtatagcccaattgggcttttctgcacatactttattcataaatacttgttaaccaagtttttgtcatttaaatttttagagcagtcctaacaatgtctattgggaaactattttattcaacatttgtactttttctgtttgagattctgatatgaagtactggcgcatattcggtttcacgtgtttctcctgttaaaaacttaaatgataaaagatttatggacctcatgtgttgtgatcatgtcatgcatattattcttctgaaagttgtgtggaacaactttccttactgaatccacccttgtactact

SEQ ID NO: 191672 - DNA, 3746 bp, Cannabis indica
aaatcttcaaaagtcaacataattaatgactaataaaatgtcactatcctatggggacaaatgaagtgtcttattgtagaatttttccacaaaatataatactctgacaaggtattagtatagcataataataaataaacttttttgacttacaattttacatattattattattatctaagcaattaccgtgaaagagggttgataactaaaatattattaatttttaacatcggtcaaaagaaattacctgagacacgaaggaaaaccaccaaacaatactagtggtagttgaaagagtatacttagttaaaatatgagctactacataaaaccgttttaggacaaaataaaattccacaacatgaaaatcatgacaagccaaataaaaatatctttaagcataaattcaatagaagattcaaaaagaacataattaatgagttaaaacatgttgctttggcaatcaaactcaaaatgaaccttatcaaaagccaagtaatttgcactgaatcacaacctggtagatagcaagtgcctctaccatctcaagttcagaaaaaccttccaccttccaaacgataagcgcaaggaccgaccttaaatcatcctaagccaccatgcccaacccactcgtgcttgaaactttgtcgagtccaacatcaatgttgatcttacgcacgcttttttgttaacccataagctttttttgtgacgttgacatcaatatttgacacatggcatgaagtatgacatcacggagtttagtagactcaagtcataggagtcgacctctgaggggaccctagccatgcgcccatgttaactttgggatctctaggatggaagttcgaacttcaataacttgaatctgatccactatcttttagtattatgtaccatgaagatatggagcaacctaatccatgccttgggagctggagttacacgaacttgtaacttgaaagccaacttgggcatctagggtttcacccgatgcccacgttgatatattcaactagggtttcaatttttgggaccgtcttagtgcaaaattgtcaaacttgcattgcaacatcaactagacataccatgaacaatattttaggctttggaatcagaattggagcaagttgatttttgagcactcagggccccgagcactcagtgcccaagttaacaatctatcaatttaggagccttccaagtatcaaataggagatttgacttttgcatcttcttcttcatcatcaaaaatagggaaataggtcttttcagaggaaaaacaacaaatccttggtaacaaaaaatactgcctagtgcctaggttgacacttgggcctgggccatttaaaatggagtttttcaggaattttttctagcatcttctctattttcaaaaaatattgagatttaactatttctggggactaaacagaatttccagaggggcaaaaaggggacccaacacctaggttgacatatcgtcaacctgagctaattttgatcaagttcagcaaaaagtgttctggacatttttctgtcatcagaaataacaaagattcaagcaaatttagggaggaaaccacaatccctagtcactagaaacagggcccagcgcccaagttgatcttgggttgggcctagcgcccaggttgacaatcaacctggaacgctaccttcaattgctaaagtgtcaaatctgatgcgaccattgaatctgaaatggccaaaaatggggtagagacctcatcctcaagtttaaaagccttagaattatcaaaaactgaatcctgagagctttggagtaagtacccaacgcctaggttgacaaatggcttggtactaaccaaccgctgtaacgggatgttctcccctagcaccaatcagggcctcactatttaagaggagctaggagccttgctcatgccattgcaactcgagttaagagcaccatgtccaatttcattcagagagaggtcaatcagagatctctcatcaacaccagtagtattagacctctccttaccatagtcttgagtaggaggagcgacatcaacagttctaccactcttcctaatcttcttctttgaagtagtagaggcagcaagaattccttaaaccacttcccttattggaggctcagtttcctttggcaccgggatcttcctcttcaagttcgaacaagatgccatagcatccaagaagctcctattttctgcaaagaataaagactagaggttagtgcaacaaaagagaaacaagacaataagttaactatatagcatggagcatcacccacctattgagtctccatccttctccagaacagttcgagtggaggtaacatctctgtcatcctagtctaagaacataaatattctttctgaacattccatgtcatttcgaatagaagtcacttcttttgtcacaatttgagataaaataacagtagcactctgagcatcttcatcactttgctcgagtggcatattacaagattcttcagggaagaaagtgttagcatacacccgctggaatgacatgatcaacccaaccttccaaagattttcagtactaaagagagtttgaccatctctttcttatgcatcaatctcaagcaacatggcattagctctcctgttcatgtcaataaaaggagcatgtcttttgaataggctgactttttggaaggtctcgacggaagaacatgagtatagaagtactcttagtagtaaagaccgcatttactcttggtaatgtttttatgaaagagacaaacatggaagtggtaaaagccttgttctttaccaattggacttttttcaagtcgcaaagaaagtttatctcatgaggagttggaatatgccagttcctaaggtggtagaatgtgaagaaggtcacaagaatcctatagctatttggatttatctagatataaaccatggatgcaagggcaagcaagcacccacatccatgtgcaatctcgaccaggcactacaacaagtattctgggagcccttgggaccaccatgttgaggcttccaaataatagtttcaagaagacaataatcatctcgaatagtttgagcttgaagctcgtgagggtgctagacacaagaggtttaagcttaaaagctcaatctctcagatcttcactcttaatggctgccttaagaacttagttgccatcaactttccaccatgcgccttgtccaagttcttagacgtaggcatagtcagcttagctctaatgaactaagccacatggggatcatactcatcaagtaatcttatacttctcttcattctagccatcttaagtttaataacttaagttacttacaactcaagaaaagtcaaaattgggttgaaaaaagtcaaagtaacttgtaagaaatttttcaatgcactaggagagtgtttttatttttggaggttttaaaagaattattctgagggtttttgagagcttaaaaatccttagagtaagaccaacaaaggaagagaaggagaaaaaataagaagaaaaaaaatcggcgtggattaaaaaaaagtttttctaccttggaatgaagaatgcttgaaggcttaatgataatgaaatcccaaagttctctctaaggactataggtatgtgggagtgaaaagagaagtgtgaaaatttgtttgtcaactcacttatttatagttgagttcaatttcctactcctaaagttaacaagagtcttttaaatttaaagctt

SEQ ID NO: 191673 - DNA, 2776 bp, Cannabis indica
gtagggacaattcgaaattgctcccttttatgacaaaattgagtaaggtgttattctcctctacttaacttactcatttattctctttaggtcttctttttttaagtttggtatgttgagttgctagatatgcgttttatataacatgatttagttgctagatatgtcttttttcaatttgtgtttgtgatattaattattagttaattatgatttaaagtacaaaatgcatttaagtaataatatccagcttcaaggaagaagattatgaagaagtgtctgaagataaggaagttggaaaaaagttgacttagtcaacaatttcttttgaatgaaaaagaagtggattttagtcccacatttgtttgtagtaaatttgataaacctgaaaagctataggtacagccagaagcttaattttttataataacatggaaattctacttttaaacaaattgtatgctacaaaactgtgaaacaaattccaacaatgagtaagtctatattgcataaagaaaattcaaaatttgtaccaacaaggaattcaaaactttgtacttttacttaaagagagttatccggacgctctccatgattatatgttacaatcttgttcggaagacgtttattccatataaatagtggagtcattctattatttagggatccaaaatcatattttacgctgctcaaatctctataaaaactttcgagagagatgaagttgttcttgcttctcttttcataagtaaaatataactaaaagggagtagactattaccacaaaataggactgaacgtgttcttagtttatgctcttattatatatatattctctttgaattaagttagttctgaatcgctttcaagattcggtgttgttggctagaagcgaggtcaatattttggtgttttcattgagagttgaattcaagacaagcaaggatggttgtacaaacacgaaggggtaacctaaatgaaacaacggaccctatggtgactaatctgaatgtccaaactcctgcaaatccaagagatcctcaagcaaatgattcaaacaacacttttctagttctcctagaactggtgccactctaaacactcagaacactggaacaactagtacccactatgctggggaaactgggtcgggcaacggagagccattaattggcgagccttgggtgacccttgatgatgataccgagttgcgtaacttgaggaaggaagtgtcttagattcagaatcacacgaacacccttcatcacgatcaggcacatacctgagcagccatgaacgaagcattcacccaacaaaacaattttttttaggaatggatggataaacatactgaaagtttaaggcccagcaggaagcaattgacaatcggtcacgcgagactactgagatgataagacgatcaggctacaattgctcatagcaatcattctcgagatatggaaaatggggcggatagcgcgacccgcgcccgaagacgtcgagaccgacatgcttagagggatactccactgactgatgttgatactacgaggaggccaccaggtcagttagctttgaaagaattagaactcagctagttgatctcaaaaccactttaaaccagcgaagagaacaaagggatagaggaatccctcctaacgtacaaccaattaatttggacagttatgttccagtcaaaactctgaggggacaacaggtgacatgagtcggacaataggcaggccaagttgatccaggggtgcaagcccaaatagatcaccttaagagcctattttagatcctgactgatccaaaactcactgacctagaactcgaccgagcacgaggttcaccattcactgctcgtataaatgcactccacttgtcgcccaagttcaaaatgccaacatggaaagtatatcaggtaaagaggatcctttatcccacatcaagtactttgaaatgcataagacttgcaggcagtgctgggagatgtatgttgtagtttttccagctacattggcggaagttgcccagcagtggtatttcaagctgactccgggaaattttgattcatgggacactttcatattagaattccatgcgcaattctcttcttccaggcaacttcctgttcacttagaggacttggacgaaattaaacaactggctgatgaacctctcagggattatatcagtaggtttatgaccgaggctacaagggtaaaaggcttaaccgaagaagaaagactagcagccatactcggaggaatttttccattggaggatttatggaaagatatcaagagactaacaataggatccatgacagaatttttgaactgggtagatggatttataaagctagaagaggaaattcgaacagctgctcgaagagtagatgttttcggctagaaacagattagcctaattcctactgccactagtacttccattccgtacacttcaagccaagctggaaatagccagagcgaaaaaaggttaaatggtgaaaacaatcaggggaatggtaagaaggaaaagttcaacaacaatcctgaacatcaacatcctcgtgagaaggtcccaaagttttagctttcactatcttaaccgaggagatagaaaccatccttagggcaacagagtccgcagtgccatacaaaatatctccaccaatgaagaaagatataagtaaaaaggatcagtccaagtattgtcgctttcacaaggactacggtcgcgatactaatgagtgcaagaatctaaaaaaaga

SEQ ID NO: 191674 - DNA, 2746 bp, Cannabis indica
aaaaaaaaaaaaacttaataacatttcttctattcaaacattgaactttataatgtgcatgcattggatttttttgattaattttcttagattaaaatgaatagtgaccttcccaacaatattattatcattatttgcaatggaagtataggttagctcaaacacaattaaggttggagttgaggtaaggcaaattaggagcttagctagttcagaggcccaaaaaatattgcttttttaaaaatatatattttttttagtaattttcaaaaatatcatatatattttaactaaaaggctcaataatttttattttcttaaggcccgataatttttattttcctaaagcgaacaaatttcagggccgaccttgaacacaactaacctactctactactcaaagtgagtttatataatggggatttttttttttggaaaacttgttaagttgggttgagaaaaagtttcttagtaaaaataattaggaaggaatcaaattggtattcctcacataacatgaacacataaaatgccaagtagtagtactctacacatttacataaagattaattaatgagtaatgaatataagtgtgaaacatttatacctaacttcatcctaccatttcaacagatacaagaagaaacaacttacatgagcaaaagaaaaaattcaagctctttctctaacataaatgaacctctcactcagacgattgcccagaatttctttcgacagattaacaccgattctttattcttttcttgattttctaggacatgggattcaacatcccacaaaaattttggagcaagagcttgaattctcgaggtgatggcttcttcgtctcgaattataataaatccctgtgaaacaaacttgtcaatgaactcttccacatgagtaaacaaatcccacagctgcaactagatcaatgacaatctcgctacgaatttttttctgttttttactctaaattctgactaagatgattgttgccatgacatgcaattgggatttgggagagggatttataaaattgatacctgaggtcgtgcaatgcgatccatctccagcatgatatcttcgagcgtgcagccttccccgcggtttttatagtgagagaaaagatggttggcgtgcaacatatcatacgtgcgaggataagttgagaacggttcgcacctgatgcagaaacaatttacaaaatgatttcgtggggaagctaaaacatcggtatataaaaagtttctcgaataacatgaacataccaatcatgaaaagcaccaaccagaccgcgatcataaatggctgacaaagtattcttcatgctagcaggaactatattcatcacccaaacaggcgatgcagtcaatgctacagcaaatccaccgcagaaagcattcatatccatgacatttcgcacttctgtctcgttgacgttcataagcctccagtatttactaatttgctcttgccaaaaggctgcatctgaagcaaattcctcctgactaatacctgatataaacataataatcagttatctcacctcatgaacaattactttgtaattctacattaacatactctgcattctacaattgtgaatttcactaggaatgccaaaccaactacaattgttattccttcccaaattcggatattcagtgttgttggaaaacctgttgtcaaacttagttaattgctaaaacggaactcatgtagcctttattaactaattctaactgtaatagttttataaacaatgagctgagaaaactataaatattttcacagtaaaagagggaaggagaaaaagcacctattctgctaagactttgtgaatacacagatagtcgctcgggtctagaaggaagttcttgaggatgtgtttgtgcacccttgacttgaacacaatttctgagtggtgtattccatgatgcagcagagtcatctacagaatcacatatatctaaaatgttatcatcagcattacgcatgagacatgattgatcatccacctttttccagatagcggtctgaactttttgagctatgagtttccaacacattgcagaggttatgttaaccaatttctcccaaatcgctggatagtttttgtccttccgataagcaggtggggcagaatagacaaagtatccatttgttcgcaaaaggcgattcacttcttttagtagaataccatctgcacaaaatgaagaatgtctgtaaatactcgagattgctggggttcgaatgcattgattcataattggccttcaaatgcaaaatattttgtcgaatgccaaagcgaaatctaataatagataatccacaccaaccacatgacaacaaaatcacaaaccaaacaaaattaaattaattgataacattttaaaatcaaaagacaaaaaattgattacataccattctcatgccaatccacacggcatcttgaacagtgtaccatctcaaaagaactagaggggtacggaagttgttttgtggctatagcagaaatcattgcactaattcctcgctctaaagcaaactgaatttgattctcgtgaccatctttaggtgcaaatgacattgtctgtatatccaagggaagaagataagctgaaaagctagcaacaccgcatcccacatccaaaacttgagacacccctgcagactgtagattacctgtctcgtttgttatcatatctcccagcctgcagttcataaatcatcaaaaaattat

SEQ ID NO: 191675 - DNA, 1527 bp, Cannabis indica
ggagaaaaaaaattgaagggacacatatctagtaataattaaccatatgcctagattgagttgcaaattaggaaccatttcctaagtggatgtctagagaaataatttctttgtgcagacaaaggtgctgatatacctttggttatttattgtttgtgtgatcaggcttacgagaagaaaaccactccaaaatggcgatatgaccttggccggaagaagaattttgaacaggttggtgaattaagaatcttaattcttaaccattagatttcttaagcatccaatgctgccttctctgtagttgctgaaagatatttgacctccattttctaaagttataataacataaaaagcacagtagttattgtaacatataatcatcaacaatgttgtacttctagttgggccacctttttcaaaacaaaatgtttctgagttttatccaatcatgaatttacattgttttatgtacattagaaagagaaaaataaatgataggttcatagctctgagcatgacatgacatgtggttttgaacttttattatgaagattgaatcttattcttgtttcgctttaagaaaattgtgtttgtgtttggcatttgtttataggtgtttgggacagatcaacggtactggctcatcccaacatattccgaagaagatttgcggcgaatgcccgcacttcagggtcttgactatccatctaagcctgatttcgattgtcagtagttatgtgaagcgagaactattttatatgccaagacagcagaaaattttctttgtaaattagatatgggacccctgtacaagggtccctttacaccatcataattgatccaactacttaccatactcaagatgatcactcatcccacggccatattatagaaaatttaacagcttgtagagagagagtgaggctgaagggggcaacagagttgagaaggagcaagaatgcaagataagaaatagtggtttatgggtctaagaattgtaggagaaggcatccttgatgttttatttataattttctcgagaaagttggaagtgtaaaatacaaatgttaactcacctgttttttcttaatctatctaaattatatgtggcttaagttaattacggtagattttcttcatcagtagaatcaatgatgttaatcaatcattcaattgtttaatatttattctcggatgtacttcagggttttatgtcttatgttatggcatgtctctgttgttttggagtgaaaaaatgattgagaagtatcaagtaattttggattaccaatcggcagcccatagtaatatcgattatcttttcagataaaaaaaatgaaataattggattacaaccaaaaaaagaaaagggatagaagaaggtttgaaacctatctattgactatattcatttaaccaacttaaaaaacaaagttattgattcaatctttgcgatcttgatttttatcaatttatttttctacataattaatctacagctaattttttaagcataaaaaaataaca

SEQ ID NO: 191676 - DNA, 980 bp, Cannabis indica
ctgtcaagatattctagctcattcttctaattaattatttacaaagcataaatcactctaggcgatacatgcgatagcgtatttcccattcaagtcataaaacatttctcacatgtctcctaaatgaatgccatataacatttaccacccaagtctgtgtgagaactctttgctcacacatggggttatttggccactaagttggttcgatgagtgacacgtgtttggtcttacaaccttgtcttgatcaaatgtgactgaatgactatctgttcaatatctagggtatttagtgcctcgccttgaaatttagacttcaattggcacaacaacggttactgaataccgcgcacctatcgtatgtgctccccaaaatgtaatgattacacttttttatggggaaacccaaatttagaacatcagactcctaaattacctctttaacagcctatataaagggttaaaaattctttttcactcatttggctattttcatcctcaaagatatcagagcacatttcttttctcatctaaaatctttgaggatcccttcccttgaagcttgattttttaggaatcatccaagtacattcgagagcttcaaaaccgcgagggaaacctctttctcctttttcactttctttaaatatacacacttctattcttgaactactttttgtgaaatctgggttcttcaagttgttcttcgacgatttgagactaagaaaaatattcttgatttagacatgtagttatggtctataaattcccctagtttccaatggtctctcgttattttctctaccagatattcaaaattacttgtttgaagtttctcagaattttccaagttcatggcccctctttagttcttcaatttgggaatatcattgttggaatgaaattttatccttttttcttttaaatcggtctagtcgatacattagacatgtttggccctttccaaaaattcatacttt

SEQ ID NO: 191677 - DNA, 2239 bp, Cannabis indica
ggtgcattgtagaatcaccctatcatatttatatagatcaagaatacaatgtattagttacaactaacttgataataacaacctctaacacttataacaaactgttaaaactaacagaaagttaaccaacactaactacattaattgaattagtgtgttggttattttatagttttctattaaattagcattaaataaatacatgacatgcatataaatagagacaaagctatgtatatatattcactaacagcgaatatctcggtggtggttttggaaattgattgtgtgaattaaaagaccttattaatttactcaagagcgtgcaagaagaaagttggtacaagttcgagttcgactccatcattccctatattgtttcaattttgtttctgacttcatcaagagaatgattggtagaaaattgccaaattgaaaatgagttttccagtatgaagtcttgacaattattagcagaaaaaaaaaaggtggtccaactggtgcttatatattcaaactcttggatttggattcacaacttatatctatacaaatccactctttataattcaagcgcttgcacacgtccctgttaacataaaaaaagcctatggctgtagaagagacttgaaaatctaagctgcatgaaaagacctaaaattattttttggcaaatggcaacgcattatcggacaagattttcgctgtcagcaaagtaaccttcccttttatgtcttggtgtgaatatgtcttccttttttgtaattttgctcactgttttgtcctcgcacatttaggattgttccttatttgtttctattgaccacatttggagatgtagaaatgttatatgccataactcctctagtcctgatgtggtttctagcctctgaccaattcaacactctttactcctttcaaactcgagatgtgctacaatcaacatgctttttcaatctctttctgaattttcattagcattttttttttccaactttttttatggcttttcaaatccatcattaagaccgtcgtggggaaaattatctgctaggtcagtttgagcggtgtccaaactccagagcaagagctgccattgtctttagtttgatcttttaattgtgttggtaaggactacgtggagaactcctgggctcaaaacataactagtttttatttttatttttattttttttgatagaaaagaaataactggtccttcattaatggaagttatggggtaaaatccactctgctattttgttatccaatgaaagccgcctttgaaaaataaataaataaataaacggtttgaacaaggaagagtcaaaacttgactaattcttttctaccaagtttacacgataaaacattaacttaacgttaattcacgacttgtttgattttgactagtaaccgttggagaaaagtaacatttgaaaaagatggcacagcagagctttattacttttttctctttttgctgaatggagagctttattactgaaaagaatataatggcctcctttactttctttttccaattaaatgcacttaacaaggtcaattgctggtccaagggatttcaatgaaaatataactaggataaaataagaataaataagccaaaatatatcctacagttaatgatttacagaaaattcataacgtatagaatcttgatacgaaattagtttatatagagaattaaatgtgtcgaaatgaactattttaattattatccctaaatagaataataattataataagaatcacagagaaagaaacaatatattcttcgaatctaaatgattctcattctcggctgtagtggctggctgtaatgtaatgggacagattacatttcttgcttttcgtatacttttatgaagaaagaaacataattgggaaaagagagatgagagagggccctaatgttaaaagaagacaaaaaaaaagtgacaaaaagatacaaagagcaagaaataatgaatgaatttgataggaaggaaaactttgtacaggtacaccagaaggatgagatgtgatctttaaagctctctatagaatatacaaaatatatagatatgctatgactgcaaaacttgtgcctctctgttttggtctgagaaaagaagattctcaatatggcctacaccaccacccacccacccacctaccccccattatcatctcatgttgcagcattgaggtctcacctgtctttgcaatttgtccc

SEQ ID NO: 191678 - DNA, 2419 bp, Cannabis indica
tgtctattctaaatgcatgcaaagatgctctaggaaaactagacgataaagcttcaaagtctgtagttgtaaagcattcatcttgctttcttcattgcaccaaaagaatatttacaaattacataaatagaaatgaatcagtaacaaactttaaggaaagacatgaaaattacacacatgataaagttattttataaacataaataataattagaacttatctcatggaaatctctaagtctttagaacttatccagtttatttcttttgttacttaatttatcatggttttggttttacagtttatatgttatttcatgacaatttaacatggccctctttgctctttcatttctttataaattgcatagtttagcataccttattgtgccttttctccttcgaacagatctccgtgtcttaaatgaataccaacagatgcagtccttttctgcattcaacagcatcttcaataattccggtctatttggcatttatgctagcactgtaaggcttacattttagaattgtctttgtgaatctaggatgctatttgttgatgtattagtatgatcatgtggaatcagagacttagtgcagtttgcttcttaggctgatactttctttttcttccttttttttttaataatggaatagctacgactcattgagtggatgtccagcagattattattattattattaattttccttttctgataaaataaaaaacacagaaattagtcatggtgttaaggttgcatgtttgtccacaatgatgatctaaagcgttttagttggtgatggatgaggaatttttaactcattctgaatttgtatggcagaaaagttaagttgcactagtcatctcatcaacattagacctttgcattgacacagccattatgaactcaaaatagatcattagggtgtttcgtgatgtcgatccttattactagtgattacattattgtttcttttttcctaagactgaagatgttgaatattcggatgtagggatctgactttgcctcaaaagcagttgatattgctgtagcagaattacattcaattgcaacacctggacaaggttatctttccttccctttaatcttgtttccccttgtgtattttcttgggttctctttcttacttttatttcttataattcagttacccaagtgcagcttaatcgtgctaaagagtccacaaaatctgcagttttaatgaatctggaatctagagtattatttctttttctctctctctctctctatatatatatatatacatatcctgacatattttcatatagtttgataattttatcttcgagatgaaaattcatatatggctgcatatgatacgttaagtattcaatcattcatatctatttcttattgaattgttgcagatgattgcatctgaagatatcggtaggcaggttttgacatatggagagaggtaaaaacttgagttgattttttattttctcagttaggaaacccatgctttctagcattcttataattttttaatacttgcaggaaacctgtggagcatttcttaaagacagtggatgaaattactctgaaggacatcacaaacattgcccagaagattatttcttcgcctttaaccatggcatcatatggggacggtaattgttatttttaggaattacatagtattaaaatttactgattagatagcgctgaatattaacaaatgattttgtttttcctggcccagttattaatgtccccagctacgaatctgtgagctgcaagtttaattctcggtgagggcacttcggtcgcttcgccatcagccttaattatagagttcaaggttacttcttcccaaacattcttactaaggttcaatattgaaataaattttaatcttttgaaggaaaattatccacattgagtatacccggaatatttggctttcttttttgccatcttcctcgcttggaattttttagcgggtttttctttaagcaattcattatcaatgaaaattttgcatttgttataattttcttttcctacactttgttttcttttttctatttttttgtatggatatacacactatgatcaatcattcttgttgaataaatgataaaagcagtgagaggttgctattttgtcttgaccgaatattttggttgttggaaacaagtaaattaagcttcaaagagttaaaatgtaaatgattttatgcttcgtcttaagcatctaaaactggtaacattttgtaaatattattgatcttggagaggtttgttttggaaaaattggattgtgatctggttagagatggctgtttcaaattttcaatttcatttttgctttgactcctcttgtcagccgttgatggtggcttttattcatgctctctctctctctct

SEQ ID NO: 191679 - DNA, 2093 bp, Cannabis indica
aacattgcaaatacatacgctaaatattagcaaaataataatcgcaaaaagactagtaaaccagaagaaaaaaatagcaaaaacgaagagaagtttttttgaaatgtaaggcgaccgacaacactagctccggtgatggattgtccgactagtagagtgtgtgtgtgtgtggtgtgagtatcctagaagtatatttgtttagaagtatattttgcatgatccaaatatgctagcatatttttagttggataaataaattttaagcatataatatcaaatttttcttttttattattagttattgaattaaaatatatatatgaagtttaatattaattacatcaatataacgataagtgacttagttataatgttgaactgatgattctgtaattatatacaataacccatattctgattatttttaatatactttaatattattcatatatttattcatttggtatatgacagagggatatattattgagactatggaatgaggtaatccttttttactaaatttactttttattgttaaaaatgaaagcaaacaagagatgagaatagttatggattggtattgcagaataaaaaataaaagtaaaactttattaaatgaaagaaaatagaatactatttaaagaagatcagaaatcatagttaacaaacttaactaaccttcctaaaaaccttgaccatagtcagaaaacaacttaactaaagaccacttaacaacttaacagtaatgaacaacataacattaaaaaagtgttaggtctcgagtgtggatcaatgatctgaaaattaaaaaagtgtgtgtggtattctaattccacatcttaaaatatatattaattttaacattaatttaagctactctccatattggcctcatgccttgttggttcgacacttgttgtcaaatttttgtgtggtcaacaaagaaacattttgtaaatctaatctataataataataataaggaaaagaaaaaagaaaaatctatttccactcccttctagaaatattaaatattagtcaaatataactctcaaatacaagtcggcaaaatccattgtggacatgcaagaatttatcctttgaatacatagcaaccaaaattataatgatgataataataataataatctaaatttggagagtaaagagagatgttggtactatatatgaatatggtaaggatttgtaacttttgagatggttcaaagaaggtgctatgaaagcttttgtgatatgatatgaccctcctccaccatgcatatatatataatatatatattatttacaaattaacaaatggaggtagatgagattggtagtgtttcatgcccacaattttcaacaatgaaatcaaacaatgaaaaaaaagaagacaaatgcataaggtatatattctctgaaaaaaagtacaatgagtatgtattatgtattatgcaatatgaatagcaagtaccaccttttagggttcaccaagcaattatcatacatagtgacttatctcatgccatatagagcactttggttgatctcatttatatcgtattgaccactatgccccgtttgatttggagtaattacaataaaaagtacatgttatgtgtgttgatgccaaaaattagttcaataacaaattatattcaaactttgaattctttacactagattcagtttaatcaaaatataatctctaacagtttacacaatttttctcttaatttgtttggtgtgactgtttcttgagctcaaagggttcttgagaatgtattccaacagagttttgactagtttgatgtgagcaaaaattcatctgtttttttgaatgagggggtcttctattgataggcccggaggatcgttagcttccttcatttctcttattctaattggcccacgtggataacttctcttcgtgctttcctcttctcattttcagagctctttaagtgcttattattctttcctttcccgagccctgatccgaatcctttcatctatgagctctgcttctcttttctgtgtgcattttgctctgctctcttttaaatgaaacagtgtgtttctgttaaaga

SEQ ID NO: 191680 - DNA, 1007 bp, Cannabis indica
gatattgtctattcttagttgtaagtattattacgagtcaatatatactgaaaacataacagtactcaactaacattaagaagatttcatactgatgaagaatgtatttcattatgtattgcataatttaatatattaatttttgcataatttgattaaggtttaataaacactaaacctagtttgatatactttaatttttgttaattaacaatcgttaaatcaattaatccaacaatttgtccaaattttataaggatgaaccaaacacaccctcttaggaagcattattgagaaatatgcccccatatacatccaaatccaacattattgcaattgcattgtaccaagaaaagattttgtaaaagagtatagataaagttattatatataataaggtgtgtctaaggtggatgatggagagaagagaatagaaaagaagagataaaccaaaggagagggaggtgggaaatgaagaaacgtgcaaagtcacatggccaaggatgtgggaattatgagatggattatgatagttgtggactttgtagtgagtgagtgatatgtcctttggagaggtacaagttgatgtacaagtactgttattagctactagtggtactcactattaaggtaatgctttgtgaagcgataaaaattattagagtattgttatttaatatcttaagtgtctaatatcgtatcgatagtgatgtagtactctataattggttaacggtttcttatattatttattaagtaaaaatatgttgaatttgatattgaaatgctttaatagtgatatgtcattttttgtggtatttgataccttaagttatcctttagtatttctttaaagagtaattgtagtataaatacccatttcgagtttgtaataattggcccagtgatttttttagtgacttaaaaatgaactttcatccaatttcgttactacagactttgttataagtatcttaaacatgatatatgtaaagcctaaattttga

SEQ ID NO: 191681 - DNA, 1775 bp, Cannabis indica
caagattgttacaatatgaagaagcggctggtaaacttgaggtgctccgtctaacattgccactcttcttcagtctcacaccttctttttgccaatgacaaccttttattttgtcgagctacgaatagttctgctttggccattaaaagaacaattgacatttaccataaatcattgggccaattcctcaataataataaatcgatgatgtcttttccctcaacgcagatgcgatttaacaatatatacaccagctaaagtgtaatgccatatgagtcagtccttgtttgcaaagaaagccagaggaatcaccatgattcgatcaatatcaatagacttgaaataggtattcaacagagaaaaatcccattccctattgttagtgatgaaattagagacagtcatagatagaggtcctatataagtcagtggtgtaaactcattatgacatggaatccatggatctcatctgctatctatgtgaagaccattgccaacttcaaatttgagtcctttaatcaataattctttacccagtagatactttgccatgttgaagatggggagtgttcaagattaacatccaaaaaagatgagtttgagaaatacttatatttcagcaattgccttaatgaagaatctggcatttcaaaaatccgccaagcttgtttagtcaaaagagtgaaaatccataccacgttcaaatttaaatttgcacaaagatttttatcttttccaatgaattttagatctattttgattagcgccccaccaaaagtttgccatcatgctttcaagttgattacaaaaattcttggttagcttgaagcaactcagagcttaagttataattgattgaaccaccgccttcaaaaatacttccttccctccaattgagaaaagtttgtcattccaagcatcaagcaaattttaaactcgctctttaatattgttaaacaactcatttttatctcacccagaataagaaggcagtcctaagtaccattcatgacactcagtgatcgacattcctatagtttgagtgtaaaattttgagcaaccgtgtatatattgttaaatctggattccacttggcgacttcgttagaggaacaacatgtttcctctactttagacccacaacgtgattggtggaagtatttgtagtgcttgaatttgccctccaaagatcaaaatatttacttgaaaagttgtacaaaatgtgctcccagtggctgctgcactttataaaaaaaaattataaattcagctgcttgcttgttgtgcgcaactgcttgggaatcgattggagtggacatgccctgtttggttgcaaacatgctaaggcaatatggaagcacaacaaattttctattgattatggccaagctcaacatatgttaaatggtgattacttgttgcatctttcctctctacgtaattaagttgatttataattaatcatttgtattatgcgggctatttggagtgatagtcatagaagtagagtttttcatggtggggtcggtagggagagttcctcaattgctacttacgcaaacacctatctagacaatttccttaaggctaggaagtctcatctgccgcctgttgcaactatagtttatgctacctcaacacacagaaatgacatcctaaaagaagctgttccttgaaaactaccaaaccacaatgacctaaagttaaacattaatatgccgtgaattatgaagcaaaaatacttgatgtaggtgctatcattcgagatcatgatgg

SEQ ID NO: 191682 - DNA, 1249 bp, Cannabis indica
ttttttgaattttctctcacatactcggatctaggtctggggtcggggcttggggtctaatcgaggttggagtttaggtctagcgtctgggtaggatcgagagttcgggtccggagctcggggtatgttcgaggttgggagttaaggtctggcgtctagtcgtggttgagagttcgggtctgggattcagggtccatggtccaagattcaagtccctaatctaagtcaggtctaggttcgagttcaaggccgagtctgggtttgaggtttgggattcgggatctgagtccgggtctgggactgggtgcgagtttgggtttggagttcagggtatcgagtctgggtccgagactgggtgcgggtttggatttgaaggggtcagagtccgagttcgggactgggtgcgagtttgggtttggagttcgaggtctgagtccatggtttaggtcggatgtgggtctggatctaggtttgaagtctagagctcctaccaaggtaggggtaaggttgtgttcatgtcgtggtgtggaatattaaaatatttttttaataaaaaaaaatctaaaaacagtttttagaaaacattagccaaagaccaataaaatttttaaaatgacaaaaaattaatttttattctcaattttttttatagcattttctattctcatatttgaaaacacaattaataataaaattttctattatatttaaaatttacaggttagtgcttgatccaaattgtactttattatgtatagtgggtatgatagaatagcatcaaattaggttataaaatttaaaaaagaataagtgcacgtaataaattataaaacaacataagcaaaaaaagaaacgtaaaacaatataaataaaaaatttgtctcaattatttaaaatataattatataaagagatgaacatcgtgtagaattaagcgatattaattttcctttaacaaaataaacaaacaatactaagctttctttcattgcatatctatactaaattactcaattattcaacttttcattcaatattgattaattttttaatatttggtttagcttttcattcaattactcaattatatcgaaggaatacatcaatatataagaaaatttagcttaacatacttaaaagtcaaaatcttttattataccacctaattaaaaataggagtatttatactttcaatattttttcttccaaaaaatactcttacatttaaaaaaaaagtctctctctctct

SEQ ID NO: 191683 - DNA, 2714 bp, Cannabis indica
caattaggttagatgtgcgtacctgtggaaactccacaactaagtaaagtcattttcttgagatgaggagagaatttggagtcaattttgactaaacaagcagagttaagaacagagtactcagcaaaagttgatgtgtttaaaaaatggtaaatttgtttagtaccatctttactccaaaacctactccttccatctccaaccattactttcatatttggatcgactccaaatttactgcacttgttactactcaaatggttactacaacattcgcaatcaccgcattccccgttgaatatcggcaccacgtgatcccctttctcgaaatcactaaccccttctccaacacactcaacaactctgcaatatttaattattaattaattaactctaaatctaactatttagattaattaattaataatattatgcgagttaattaattacccggaagcttcatggcctagaattcgtgggaacgcgcgttgagattcattctaattataatgataatgataataattaattagttagagatctaattattaataaattgatattaattaactaattaatattatgtgtcctctccttcccaagcactgagatcagtatgacatattgaagtgaagaggatcttgattctgacctccattttttgaggtggttcaactaaaatctcttccaatacaaaaggctccccaggtccatgaacaaccgcagcttaattataatataattatataaatcagtaaatatatacataattaattgtataattatatggttactggttactagttactagttacctttacaagtgatgagctctcctttggttttgattaggtgcttattgacacaataaccattgccattgccattgataggttgatgatgatgattaccattctccattggttttagctccctttgatctaacttaaccaagttgtgttgtgttttatgtggcctctctatgtgattatatatatatatataacacaccaaatgtattcttctctctaaagtgggtatcatataaattgtgtttgtgtctatgtatatagtgatcatcaagaccctatgtgtggtggtggtggttaataaagaaccactccaatttttttcttattaatttgcatatgttatatctatttaggagcatttgtataatgataaaaataaagtttaaacagttacttatcactcgtataaaaaaataataaataggtgtgcaataaaatattcaaatcttattttcagtaatgtaaactacttgaatttttttgaaaatttacaggtaattttaataactataacgtacaagattttaaaaaaaaatattgaactaaaaaagttttttagatgttgaaacagataagaagtctactaatatgacgaactgatatattaaattacactaataacagtatgccaatttttttggttgacgccttagtatttatcttttatttaaagtgttatatttataattgatacaatttaatataaagttagtcatatatattttaatttaataattaattattatataaaaaaatattaagcatttataatgaagtgccaactcataataactaataacaatggagaacaagatatagtaggtttaacattaataaaatggcccaaaagtagaagaaaaatattttttttatttatttgtttattttaaagaaaagatatataatattataaatttaacatgtttagtagccgtcatcatatattaattataatttattttaaaaataaactagaataattttgtgaagaaaaaaaacaatcaaacgtataaaattagatgtgtattaaacatttaatttttttttggttgaagtgagatatatattaaatgttaatttgtaataatattatttagaataatatgcagttgtgttgcctcttgtatctgtaactgtaacactacatctcaacttgtctgaatgcatttaattagcacatgaatataaattataatattataatagaaataatgaataaatatacaaataaataaagagataagaagatgacatcaaggatttctatttcattcatcactttttttttttttttaattaaatcatcgcaatcagttaaaataataatatgtaatataattagaacatctttcctatagaaaacacgatcagaattataattaaaaaaataaatcaaataatcagccgcttaattttcagatcggttgacaaaaaaactaaaaataaaataagctaaatatcacaactaatcttaaaagcatatatattcagttttatctactgcttaaaaggcttaacagtaaaaactgttgcaacaggttcattcaacctcgtagcttgagcactcaataacacctctagtcacaataaacgtgttatatttctaaccactaacatcaatatgatggcgagtcattgaagaaccaacaataaaacaaaaaacaaaaataaaatcatgtcacacagacacgattaaaatactcaaaatcatattacagagataagactaatcgtagtaataaaaaatgaattgcaatagcaaactacaaccccaaccaaactgcacttatgcccaaaaaaaattgacaggtctgactaaagataaaaaaaaacctcagctataaatttaagaataaaaatcctaattttttaaactagttcacaactctttccgtttttttt

SEQ ID NO: 191684 - DNA, 1777 bp, Cannabis indica
acgtataatatatgtgttagggtgttcgatgtaatatacttataattagggctcatttagtacgccgtattatatcttattgtgttggattgtgctctattgtattatattgtattagtattatttaatataatacattattgatattaacttgtattaattgatcgtgtaaagttataatatattttcaatacactcaatctcaacaccaactacgtgtcggggtcttgggctctaagtctgggttcgggtttgggttggggtctcaggtcgaggtcgggtcctgagtcggggttcgagttcgggtatgggttcgggtcaaagtctcgggtccgggtccggatcctgagtcccgagtccgggtccaggtccaggtccgggtttgggttttgggttcggatctgggtcctaggtccgggttcggatccgggtgccggctccggctctgggtctaggttccggtccgggtcccggctccggctctgggtctaggttccggtccgggtcccggctccggctctgggtctgggttccggtccaggtttaggttccgggtctggatctgggtttggatcccaagttcgggttcagatcagagattggtgttgacctgaaatcctttgtaaatattataatacaagctaatacgaactatttatgtactaaataatacaacatacattgtattaaaattttggtcgttataattaatacaatacattactttatcaaaatataatgttatttattatttaatacaatacaattcttatacaacgtccaaataagtcgttgattattaatttcgtgaacccaaacaagaaacaacattatatatattaattattctacaaaataataactagttgatcaaaagtgttttctttttacatgaaaataacataaatatatgcagctacaattatctcacattttgtcaactgttgtacttatatatacataataattaaattttatataaaaaaaaactaatctaacagcgtggaagaaagctttcatttatataagaagtcgatctcaatatatataagagaaattaattattattaaaactaaggacatcgagaccatattatatataagaaaacgtccactcaaatccgcactcacatgctgactctatatacatattatatatacaagtagttatttgtcaaaatatgtgaattttttctaactgttaaatattcacaaatatagagaaacccctatatattatctctatatgagcatattataaataagtaggttaatttttactactaaatatatattatatcatgaagtgggaattttatgattggtttatacgtttcaaacttttatacatgaagtcttttcctacaaattcatgatttttatatatgaagtcttttaagtaggttaatttttactactaaatatatattcttacttgtacacttcctatttatcataagattactctaagcacgtttaactagaattctcaaatgatggaccaccaaaaacaagatatactttattcatatagatcgtatatatacctactaatttatttaaactcttttcaacagtgtaatcttatttatacacagttttagaatctttatgtttgatcttctctaagaaaatgtgaaattgcacaattacaaatcacaaaactactaacaattatagtaattttatatataataattatcaaattaaattatattattaaaatagtataacacacttaatagtggcgtaaggcataacactaaaggcctatcac

SEQ ID NO: 191685 - DNA, 1964 bp, Cannabis indica
tctcatattctgagattcaacattggatgtacaaccaaatttgcacattggctaataataggattgatcttaggtatataaggatgaatactttcttcactgaaataaaatcttttgggaagatgctcaaaaactaatgaggcgcccaaatcgaacaatatcacatctttataaataatttaatattcacatttttttgctcaccaatttatatttgaattactaaatctaaagctactgacttttatctcaattatgctcatgataccatataataagaatcacattccgtttgaaacttaattagtgattagtggagttcgtctatgttcatcattatttttgttgagataccatactctaatatatcaaaaaggaacagagtacataaataaaaaaagttaagtaatatatataagtaattaatgtgtaattaactaattaattaattattaccttaacttgtcccttaaaagtaactaccattgagtttatgtattggcgcaatgtggttttattacgcaaatctgcggaaccaaagtagctgaacacgtcattgcttccagtcacaattacaaagagggattttgagagatgttgattcaagccggaggctcctaactgtttgtttaaggcttcatgcacctttacaaagctacttacttgttttgttaagcataatgactggggttgaaaacacatcaacaatataaatccaatgttataatatttttgtggaaattttgtttgaaaaacaaattatataatttaacgtttttgttttgacttacatactgatgatttgtctgattaagaattccagaaccaccagaagcaaagtttacacctgttaggaaatttttacttctttgttctaacttgtatagtgtagacagatatggcggggaatatggtaagcccactttttcagctgcccaaaaattacattaaaatatcaaatacctttgtatgacagtcaatgttcctcattttccggacattagaatttatttattttttggcttgaaactcatatgaaaatgaaaatagtattggaaataatatattagttgaaatataagagatcacttaccaagaagatcaatagcattcttgccattacagaacctcccggttggttttttggtggggaagtctatgccattgtgtggaaaattggctttgactacagaaaagacgaggtaattgttgttgcccacatcggctaaggagtccccaaatgcataaatggccgggacaaggggatatgcaaatgaaaaactagtagtacttaactgacaaaaccataacaagaaggtgatcaagatcactaccaaaataatgttcttattagccattacaatggtctagccttctaggattacaattctgatctcttatttctttcttttgtcattacaatatgtacaatttcaaaaatcacaactacatacataaatactatttaattaatgttgtagatttgctagtgaggcatttaagggggtttggtatacgtcaacgagtggtgagtaaatgaggtgtagggttgagatttttaatgtagttcattttatatatttctgatctgttgccttgtagggtccaccaaaaatacattcgcattaaatatggtgttataagttttaattttgttagcatgtaaactgattatcacatatacccgttatatacatatatatatatagattaatatataaaaggtggttctatacggaaagatatctgtgagtggggtaaattaaccatcattatttggacacatatgatgagagaagatgataaagtaattattaattatcactaccaacatcatcaagtgccacccacattaaatattgttgcatcatcataaacattctataaggttctgaaggaaaagtcacgtttggacataagagcactcacatcaccttgtttattttattttttaatttttttaa

SEQ ID NO: 191686 - DNA, 2347 bp, Cannabis indica
tatatatatatatgtatatagcattgcttctcaatacataaggcatgggaatcgcgtatataacaaaggtcagagatctaaacttctaactagaaaatcaaagcaaaataatactgactagaatgggaagcaaggaggatttttaaaaagatgtttaggtaggaatttgaatccttggcaacaaatttacctctgttggataggatgtattccaggaaaactaattgttagtaactttaaatttgtagtagcattgatgatgaaagtatctgattaggaaatcggcaacgttcattagcaaaactgctaatgattccatttaggggtttctttgtgaagcttatcagtaaatccttagctccctctagagtttagtgtgtgtggttattagtatttgagcatcttaatgtttgttgctcactttagaaaagaaagtatatgcaagctttatcttctagatggtatgttttatacaaaaagattggtgaatccataaataatttatttttgcattgcattgtttcacttacggaacacaaatttgaaagagtttaaccacaattatagactattccataacactaaatcgaattgcaggttttgagataaagttttcctttagacaagacgattcaaactctttaggtgaagctggcatgactacctgctaaactatatggttccagaagaataagagaagttatgaagctttgaagacaatgtaaactgtgtttgggatagagttaaatttaattgcccttttgctaattaattaacgtaaagattttaaaggtgttttgtcctctaatctagtaagaaacttgagtgttatgttgtagtcttattttcctctggttttacagtgtgccagtgtggtttccttttccacacttaatacttttcaatgcctaatacaagtctagttacataaaataaataaacgtatacatacaaataaacattacaaagatcctaaagaagcatgcagataccagaaagggaaaagaaagagagggaaaaaagtaaacatatattagagaaagccaaatgatttccttcttcaatcacacatatcaatttcgttagcatgaatacgtgaaatgactaaggaaaagtagaaaactagtgaaacctgcatgatgattgatgctatgatttgaggaccaacaccaagctggaaaagggacaatttaagctctccagtaaaatcaccaagttcatctgcccgaaacaataacaatgactatcagtaagatactccccctccccgaagaaaataaaaggaatatgcattggtgtagttaggctacatggcattaccatatctcccctactatcaaatccatttcccgttcagactcagattcagaggctgataggtaggattgtattaaaatttcataaacacgttaaatggtggtacaatagttttacaaatagacaataaacatgtacaacagctcgttgtgcttatcagtaattacctgcagttccagaggcaaagctgaggtaatcttgaggtatcaaccttctatcaaacccaggtagaggaatgaaataaccaacacgactaataataattagtaatgctgtcacaaacaatctccgccgtatctcactcttgaagaatgattcagcagcattattgaggacagaactaaaacgcacaaaattcagaaaccgatttctaaacatgttaggtctggactgcagcttctcatagtcgcttatttgatgtgaactctgaacatttgcctcaccatttggcattggtgaaatagcctcaacatttagaaactgtgcagatgtgccatcaacattcatacagtccctgcggaattgattggagcacttgctagagaatcttttattcaattttgaaataaaaggtttgtctagaaacatgaattgtcttctgctcaattcaatagggtttgttctaatggcagaataagatagagaaaaacatggacaccagcattgaagatcagaacctgcaaacccaattgtcttttcttgagcataaaaaaatatcttcccgtagataatgaaacagactaaaacccaataaagactaaagttttgtaaaatagaactcagtcgaaaaacaaacaaaacctctcatcttggcaggctttctgagaacgggatggggaagaaaggaagtcgagctgaaaagtgtggcttccatggcgggattgcgaggaacagagaacagcagtacactgctactggagcatcaatataaaatgaggaaaaagaaagagaaaatagagggcttttctaatatttaggtaagacatataaattaaaaaaaaatacttatttaatttatattttggaaaat

SEQ ID NO: 191687 - DNA, 3629 bp, Cannabis indica
aaaaaaaaatgaaaatggtgtcaaattcgcgctatagtaccttctgtaggactataaatacgaacccattttttcactttcccatattcaaatcctcaattgcatactctccccataatcgtctttcgaaaccatcgtcaacttttggtactatttctttgttgtctgttggtttctaggaaaatctgaaagtaaatatcgttttctaacgagattttttgtttatttgtccatgttttggaaattccagatttaattcacgtcgagcattgtctgtttctgctttggaggttggtacagattagtaaatcattgagccctgtgtttttttttctttccaatttttttgctattttttacggaataattgtttggattgcaggaaaaagatctaacatttaccacagcacccaaaagaaagttcttcaggaaagaaaaagtaaaagaagaagttaaaaaaatgacgatcaaaccggcagttcggatcgtcgacgggaacttgatcgtgaagaaccggacaatcttgactggagtaccggataatgtgatatcaacgtccggttcggattctggtccggtcgagggtgtctttgtaggagccgtattcggttcagagaacagtagacaagtgattccattgggtactttacgagaggttcggttcatggcttgtttccggttcaagctatggtggatggctcagaagatgggtgacaaaggtagcgagattccactcgagacccaattcttattggtcgaaaccaaagaagggtctcatctagaaccggacggcagcgacggcgatggcgagaaccagatcgtctacaccgttttcctacccttagtcgaaggacccttcagggcttgtttacaaggcaaccaacaggaccaactcgagctctgtttagagagcggtgacgtggagaccaaagcggcttcgtttacacactcgctcttcatccatgccggaactgacccctttgccgccgtcagcgaagccgttaaggcagtcaaaattcacctcaagactttccgacaacggcacgagaagaaaatccccagaatcgttgactatttcggatggtgtacttgggatgctttctaccaagaagtgacccaagaaggtgtcgaagctgggattaagtctctatccgaaggtgggacacctccgaaatttgtgataatcgatgatgggtggcagtcggtcgccgaggacgtgaaaaacgagaatgaaaatgggtcaaacgacgtggaggagttgcctcgtttaactggaatcaaagaaaactccaaatttcagaacaaggatgatcccagtactgggatcaaggacatagttgaaatagctaagaagaaacatggggttaagtacgtttatgtatggcacgccattaccggttactggggtggcgttaagcctggtgtgaaggagatggaagggtatgattcagtcatgaagtacccaatggtgtcaaaaggggtcgtggagaatgaaccagtttggaaaactgataggatggctgttaagggtcttggacttgtgaaccccaaaaatgtttacaggttttacaacgaacttcatagctatttagcttcagctggtgttgatggtgttaaggtggatgttcagtgcatattggagacccttggagcaggattgggaggtcgagttgagcttactcgacagtaccatcaagctttggatgcttcggtggctcgaaactttcctgataatggcatcatcgcttgtatgagccacaacacagatgctctgtactggtaagtccaagtccaagtccaaaattgaacttttcccttttgagtttttctttagtttgttgtcattttttgatttgggaatgcatggaaaacagttcgaagcaaacggcaatagtgagagcctcagatgatttctttccacgagacccaatgtctcacaccattcacatagcggctgtgtcctataacagtgtcttcttgggtgagataatgcagcctgattgggacatgttccactcgctacatccagccggagactaccacgcctctgccagagccttaagtggtggccccatttatgttaggtaccataataaaatttgtagtcattatttttcatcatagttccttagtcgtttttttttcatataaaaaacttatcatattgtttgacataatttactacagtgatgcgcctgggaaacacaacttcgagcttttaaggaagcttgttttaccagatggatcaattctcaggccacttttgccaggccggccgaccagggactgcttgttttctgaccctgccagggacggagccaggtactaatattgtgaatttgacactttaactaattcagaggagaaatattttgcttattgggtttgttttgaaccaatttatcttttttgtcttcagcttgttgaaaatatggaacatgaacaagtataccggagtactcggggtttacaattgccaaggtgctgcatggagcagcgccgagagaaagaacgtgttccaccaaacaacatcagacgccatcactggctatgtccgaagccgagatgtccacttcattgctgatgctgcaactgagcctggctggaaaggcgaatgcgccatctattgcttcagctctggcgacctcatcgctcttccttacaatgctgccatgcccgtctctcttaaagtcctcgagcatgacatatttaccatcactcccatcaaagttttagctcctggagttagttttgctcctttgggacttgttaacatgtacaatgctggtggggccatcgaaggattgagatacgaagctaagagtgaggtgcagaatggtgaagaggttgtgggattagctcatattgaggtcaaagggtgtgggaagtttggagcttattcttccgctaagccgaggaggtgttttgtggactctcaggtggttgattttgtctatgattcatcttctggtttggtgactttaagcttagatagtatgccagaggaggatcgtagagttcatgatgttgaggttgagatataagtgattgttgtaatagtaggctggattactatataaggagagggtagtattgtgctaatctgatgtaatttttatatgatgaagatagaatctaataaataaaccttttattcttctcaatctcaaccccaatgttatctatcatgaatttacctaaatgttgaagatgagatataaacttatagagtattgatattatgcaccatatgatgccaatacaatactgatctggtgtattgcgattgattaacagttttttatatgggattcgagattaatttacaccaataatgatatatcaccttgttgtgcttggtaccataaagtgactcctgacatttctcaaacttgtatattttttttttttttgataagtcaaacttgtatatttgattaaaagattaaaggaacatttacatattaaaacgtaaagaagaaatctctagtcatatgatattgtccaaacatttttgtcacttaaacttgcaagaaaataacagttgaaggaaaaaaaaaaacaatacatgcagtcagtgctgctgattgctttctagtaaaagttggctatcaaagttttgactcccc

SEQ ID NO: 191688 - DNA, 1895 bp, Cannabis indica
cttgggaagagagggtccgatggtccgactgtgtggggtccgaatgggtcccgatgcgatgggtcagatgggtcttgatgcatgggtccgatggttctggatgcatgggtccgatgggcagtttttttgggaggttttgaagtcgggtccgatgggcccgatgccgtccgatgggtcctgatacatgggtccgatggtctcgatgcatgggtccgatgggcattttttttggggttttgaagtcaagtccgatggacccgatgcccgtccgataggcccatcggactcgaccataaaacccaaaaaaaattagtctttgtgcgcggcatcgtaccttcctcttctccggtggtgttcggccagtgtgcgtgcgtgggttcggtcgagatgggtatggatgggtgtgggttggttttcagcgtgggtggtgctcgccgtgcgtggccggtatgggttttggatcctgagaaatttgagagaaaaaagaggaagagagagggatggttgggaaaaatgggaggggtattttggggtttaggaaaaagttatcccatttaaaaaattatgcatagtattagtttaaaggggccaatttatgagtttttaagcatagaaattcaaatttccctatattattaggttaattaaaaaaattttgtccctcaaactttaacatgtattaaattgtactcctaaattttttatgttgttaaaaattttcttcgaactattaagattgttagatttaagaattttcattcaattttcttaaacgaatgtctaacgtagtgattgcgtattaaataatgtcttccgaattttcgtcaatattaggtgttcgttaatgaaaatgaaataaaagtttctcaaatccaacaatctcaataattttttaaaaaaaaaaacctaaaaaatttaaaggtaccatttagaacatatcaaaatttaaaggtaaaaattctaattattattattattattattattttggtgaataatatttgagcaagttgagtttatgaaagtgaagctccaaaatccaaacaagaataatcttattctatctatctattactcaaaaaaactagtcaaccataaagagaagcattaattaaagagtgagattattattattattattatatattagctcctcttgaaaaaccaaagctctttgcttaaaacacagaatttaatttactactaccgctggatctaaaacggcaccgtttctttccgctaaccaatccaaccggaaaactcatcagagaaccaagaccaccaccaccacggccggcaccggcgccggggaaagaagatcaatcaaacaatcaattctttgctttctttctttttgcattggtacgtaatcaaattctttattattatgctttcatttgattcatgtgacctatccaattcaaattcaatgttttgttcttcatttactaccatcggcggtgttggtggtgagattcataaattgttacaatgttcattcttgattaatttgtttgttctttaggagcaattggaagagttcatctcagttgtaaagcagattcaacagtgattcgtatatatatatatataatcgatcgatatacgatgaagctcgtcagttcttcagcaaccgacatactgaaaactccgacatttgtcaaaatctccgccattgttctaatctctctttctgtattcttcctcggtactcatttctactctaattcctactatcctctcgcctttaactttttctcccctgcttcttcctctgatgccggcggtgatggtgattttcgagcattcgcttcgtctgttgtttccccttcgcctatggattctccagcgtctccgcctctgccatcaccgccgctgatagtttcacctccgcc

SEQ ID NO: 191689 - DNA, 704 bp, Cannabis indica
ggaataacttctctttttctcaatatccaacaaaatggtttgggtgtggatttttatttttttttcgttttactaattaaaaaatggagattttgactccaaattacggatctcgtaccctccttttttattcagtaaaatgggttttgtgatttgtgaacaataatttgcagtccaatgagctgacatgtgggtaaacaataataaattaaagggtaaaaagaatcttccagggagaacgaaagaaccactcaccaaaaaataaatataatagtagccaaaaattgaaaagaaaataataataataaaagaagattgatagaattgttgtgcattgaaacattatttgagttgtacatctttgcattcctaggcagaaaactaaagggtgttgtgtacctattttcagccaaaggatatgtattggcacttacatttattgcttccacaaattgtatactttttgctgggcacaaccaatggtgagagagacaccaatatgcatcaatcgctatcaatattaagaagataaaacatgtgattacgcattttcttttttctctttctttactcactatcattgcaattcataatgtcatataggaaattgaaaagaaaacttgagtacctaatgttggaactacacactcacatatttacaataaaaatgtattatttttaaatgttaattagtaattatataa

SEQ ID NO: 191690 - DNA, 4936 bp, Cannabis indica
ttcatggggggctgcttgtcttccaaggccaaggtggatggctccataagtggcagtggctcaagcacacaatatggtaaaatttattcagtgattaagaattgttatattttcaatgaacgtttattgttttttgcctattttatgaactcatttttagtgtgtttttggtgcccatggaatggaggatgcattcatgctatattttggtttcattttcatgttttgatagccatttcatttcatgttatgctcatagctgatattgatctctatgttgttctttatgtaattctttggtttcagatatactctatgctgtagttatgctttaacactctttttttgttcccttcatatatctgcataagtttatattcctttgtccttgatagtgaatttttacttagtgtttaggtggtgtcaccattggcatggtttgttaatggttgcatgttttgtcatttttatcctaacaagtaatgctaaggaagaaggtttatgattcacagattataacttttggtcaagtaatggtaaggactcagcaattctggtccattacactggaatatgtagtatagataaagataaaacgtattagttggattctaagagtaaagaattaggttacaagttgaataattgagaagtacggaagtactcgcctattataattggcttgcaaggcttgtcgtcgctctccagttataagtactaacgtaggtgtgtacttgtttcaatttgcttggaacaatagccgtcacaagcatttaaagaataattgtttagattcggtgttttagtcaattccaaaagttttaaacctttgttgttttagtaatttggtcaatacttgttgtacacttgccatagttgcacacgtggtgacgctgatctagatagaaatactaagctttaatttcttcttcaaatgtgcaaagcaatgtgtgcgttacatttttttctctcgacatttctaacaactagaatttattgttattgtcgaatgtttttatgatttgctgttaaaaacctttggtataaacaagtatattctgttttcatgaaatcttggctaatcattgatccattaatatagaaaatttgtatgcaacagcctgttttgcacatttgcaaagtcaattaaagctgagttttttactggactgatgcgagtgtatgatgaagttaccaaatgaggaatgctctgatcacatgcatacttaggctttagtacattaaagtcttactcttgtgttgattacatggaaataaacctaccaaagggttgttttgcatggcttcccatgcagttaccttaaatgacaatgatgtaatgttgtccttttatatgatcccttgatgaattgaatagaactgttttcaatactaagtaacggatcgacaagtacttataatggacacgtgccctgttgtgtttcatagcaggaaatagtttgattctttatacgttacatgctatgcgttatgtgtaaatgtagatgagccataattcatttagggcttaggtgtttgtttctggcattgatgatgttaattgtgttcatgtccaaatcagcggaaagtaaatctacaaatgacaccagcaaagaccaaccagttgttccagtagtttcatcgtcaacaactactagctttgctgaaagtactccatcaactcccaaggtagctgaggaactgaaaatctcttctcagcttcgaaaattcaactttaatgagctgaaatctgcaacaagaggttttagatctgagagtcttttgggggagggtggatttggctgcgtctacaaaggttggataagcgaaagtggaactgctccagtgaaagctggcacggggattccagttgcagtaaagactctgaatcacgatggacttcagggtcacagagaatggctggtcagttaccttactatgacttaatttcagctagaacagttgaattactttttctttactatacaataaattaagcatagttgtgtgtgtttcgtttgttgcaggctgaagttaattatcttggtgatcttctgcacatgaatttagttaagttaattggctgttgcattgaggatgatcaaaggctacttgtttatgagttcatgccccgcggaagcctggaaaatcaccttttcagaagtatgtgacagtaaataaactttatgaaagttggtttagtttccatggcatcaagttcatgcttgctgatcagctaatcataatagttcttcttgcctttctgttaatatcgtggttttgttatgtctgattttttttctctttctgtttatttgggttggagaagcttgaaccatttcttttttacaatgcttaacataacatatgacaagttttttagtatgataacatagatagactatggcaatggttgtgataatatattattatggctttcaagaggtcttgtgctgaatgtacttgttttacattaggaatgtttggtatgcaaaagtgataaaacaagattaggataagttatatttctatcatttgagtttaatatggctcatgtaatggtggtaataaaaggtagctgtcttctttgcttttaagtttgcttataaggggagtgaaaaattattagtgacattgttgttttgattgaatgagcatttaaagtaatgatatacttgtacaattggcaattcaaggaattttgtatactataatagtatttttgaaggcctaatcaatgatttggttttatacatgtaggcaattcattttaaaggattttcttctccgttttcctattttcttttgtgtcaaagaatattgcagaattctaaccatatttattttgatttgactcatagggtctctgcctctttcttggtcaatcagaatgaaaatagctcttggtgctgcaaaaggtcttgcctttcttcacgaggaagctgaaaagcctgtgatctaccgagattttaaaacatctaacatcttattggatgcggtgtgtagtgttgtgtagcttatcacagtttacaatttagttgtacttgagacctatttgcttaactgtagacttaaaatttcaggattacaatgcaaaactttctgatttcgggttagctaaagatggtccagagggagataaaactcatgtatctacccgggtgatgggcacttatggctatgctgctcctgagtatgtgatgacaggttagtggatacaacttttctctcttttacttataaatggataaagaaaaatatgtagccagagattccttcttttatgttttacttaataattaaattgttaattattacttcattttggtatgtttgatcttatgtcaggacatcttacttcaaagagcgatgtttatagctttggagtggttctacttgaaatgttgactggccggagatccatggacaaaactcgaccaaatggagagcaaaatttggtggagtgggcacgaccacaccttggagaaaggcgaaggttctatcgactattagatcctcgacttgaaggtcgtttctcaatcaaaggtgctcagaaagcgcttcaattggccgctcattgcatcaaccgtgaccagaaagctaggcctttgatgagtgaagttgttgaagtgctaaaacctcttcctgagatgaaggacatggcgtcgtcctcatcttacttccaagctcttcatgtagagcgatctggctcggctactagaatgcaggcagggcttgctaggaatgggcaaccaacaagaagcctgtcagcatcaaatgctcagcaggcttctccgtatcacctcaatcagcgaaactggtcaccgaaaccaagagaacaatcttcttcgaagtgagtgctgattgaactttttgatgataggctgagagattgagtaactaatggtactccaatcttgatgaccctacttaaaggctaggaaattgtgttgaaaaagggtcaaagaatgatccagccttgtttttctttcattttaaaatggtacagaaaacacaatttaatctttttggatgcttgtttatggttgaagaaactttagtaaatatcatatatatatgtcaattatattgcttcacaatattggtgatttccccagatattatgatgcatataatgtgtttttccataaaatcatctatttttttttagtttagaacagaaaacaagcttcactttaaaggacattattattattatcattaatttaacttaaagggacatcagaatgatgagtttttgctgtttcaactttcaagaaaaataaactctattttcagaaagaaaaaaaaattgaattctagagtacattattattattttcattattttaacatatttaaaatttgatattttatctacatacatggatgtgttaaaaattgtttatctgaaattgttacacactggaataaaaaaaatgtaatttccttaagaaaataaaagaagtcgaatttaaaaggaaaataaaatcctctatttatttttaaattggaagattgaaaatgtagatagcattacaaattcaaaagtactagaacatggtgacaagtagcaagaaacatcattgggtttcatgaattgaaacaatgtcattttcaacatccaataaagtttctgctgggaacattagctgttcaagtgaaatattactaaaacgtttggctaacaatcttttgggagcaagaagttggtgagaaactagcttcattgttggtcgacaatttggtttggcatttaggcatgcaaacccaagtgtagcaataagaacaatatcaccttcaataagcctatttcttggtggtgatgggcgatggtctattatttcagtcaataacgtgtgttgaatagatgatgaagaagatgacaatttggacaaaagttctcgaggatatttacccattaatgtttctagta

SEQ ID NO: 191691 - DNA, 1912 bp, Cannabis indica
gagattaacaacagaaatggtatcatcaaataaaataagtttaatagatctgtgagccgactcataatagttaaggtgataaagaagtaaaaggaaaaatagaaccccatttatcaattttcattgtcaacacatcagctaagttattcaaaagtgtgcttgttattaacccaaaaaaaaaaactatcaccaatataacataaaggattcgagaaatgtatcataagaaagttattaaattcatttatagtagtataacaaggaggagcatcactatatttattatacgaagttaattaagcattaaaatcaccaataataacccaaagagcttgaggagcaaaatcaaaaattctatctaaaagtttccaagtataaacacaattattaagactaagagaactataaaaacaggtaaaatatcaaatatcatcaaatattagttaataatactaatatttacatcattttaatccaacttcggctgttcggccattaattcatattcacatgtgtcaagtgacaagtgccaagaaaatgaaagtgaatagaatttagttctctctctctctctaagaattgcctaaaagaacaggaaaattaattaaggcgaaactcatttttcatcttactttcttatttgttgtatattcagatttgtcttgcattgttgacatttacactcccacaaatatgaggaataaactcactaaataaacattcatatatacaaatatcaaaacctacgaagatcatttcctctttctatcttccttttctatctcaagaagaacaggggctgccggaatgctaaaccaccattcccgtaatctcctcatccatctctctgtgcttgccttccttggtggtgaataccttgtaaatgcctccaaaaacaggaacaaaataacgtacttacttggcagcaaggcaaaaaccaaagccactaacacaagcgctatcgcaaatttctcgctggcctgatcattaccaaaaacaagtctaacaaattaagaggctgaaatggaacaaatatcaacatgtaaagcatctcaatagtcactatcaatttcgtttgggtgatttatcttttctgctttgccttatttcagtatgtttcattcctgggttccgaagagcgtaataatatacaaatgaaaagtacaaggacatagaaaaggaaagaaggaagacctgagggaaaatcaccagcaacaaagcacgtagcttcaggaggactacgtttccatcctggatgaactcttccgcttgtgaaattgcattttggacggctaaaagctgctccactgtattcattggtgggggagctaacacctttacctcatcaacaggattctcttggctaaaaattcttgtcaacaccataaagatcgctgtaaagatgagcatcagtgcaacggtgtaacctagccactgcctgaaatgaacaatctaaataagactagtgtgcaaaaccagaatagtactataaacaacagatatccacaaacgcaatccggggcaacagtctcattcaccgtgcactaataaatcttaagttttttttttttttttttttttttttattaaatcaaagctctgtcattgtagtaatagtacaaatatggaaatacaaataagaggattatcatattactacatgtgtcaggtaatctaaagttttttggaaccacgtcactatttctactatgtctctaaactgccttctcttaaacaaggtacccctctcattactttggtacttactctgttcattcttaataattagaatgactcaagatgagacaaataaaaaatatttgttgtactaggttgttgatgtcacaattcagcctcatttcattagttacaccacaacaaatgcatcatgaaattaatgaatgagagtatc

SEQ ID NO: 191692 - DNA, 4384 bp, Cannabis indica
gtgctccttctcttatgtttgctagatgttttatttctttttttgttttcccagtttgacaattctaaattctaattgtgtcttgtatgtaggaaatttcccctgctgttattccccaagctaccaaaatttttgttaatggttgttgggttggtatacatcgtgatcctgacatgttggtgaaaacattacgacgtctgaggcgacgggtcagtttaattatttttattattttgaatgagacattatgacaaaagcaatcatacattttttttgacaagtcatgaaatttatgaacttcaggagttgactagaaactgtattaagttaatgttaatcagaacaaacttaacaacaatctcaccaacttaagagttggacagaattttatgaatctcaggaagaatagtttgttctgattaaaatggtgacagcatacttcaaaaatagccttacataacccaagaggagtaggtttagtggttatgccatgcatatatatccttgtacatgccgggtcaatctttgagctctgaatcgtgattatttaaaaacgatatttggttttttcggttgctattctgtttgtttagatagatgttaatgagtctgcttgaacaggttgatgttaatactgaggttggggttgttagagatattcgcttgaaagaactacgaatatatacggactacgggcggtgtagtcgaccattgttcattgtggagaaacagaggcttttgataaagaaaaaaagacatccatacattgcaactgagggtcagtcagctgaactcgacacacttatctctttgagtttttatttctttcatttgtttattgtttttttacatttgatgatttggcttttaatattttcaggaaaaccccgatgatgctggttggcatgatcttgtagccaagggattcatagagtacattgacacggaggaagaggaaaccactatgatttcaatgacaatcagtgttagtcaatattttttaatttcccgagtggaaatggaaattaagtaattgattcgcactatgagcatgtgaacggtttgtaaaaaatattgattgtcaattattgaaccaggatcttgtgcaagcaagacttaacccagaggaggcatattccgagacatacacgcactgtgaaatccatccatcacttattttgggtgtttgtgcttccattataccttttcctgatcataatcaagtaagtctatctatgatgtcaaataaactttacctattcaaaatatttactataattgttctatctaataaatttgttgcgtattaattagtcgccaagaaatacatatcaatctgctatgggcaagcaagccatgggaatatatgtcacaaactaccagtttcgaatggtatgttaaatctatttatttttctaccgtataatatgaaacatatgtattgatttagttatttttcatttactttttgaaccaaattagttgtgacttattattattattttattttaattattattaatttcaggatacactggcctatgttctgtactatcctcaaaagcctcttgtcactacaagagccatggaacatctccactttaggcaacttccagccggaattgtaaagatattaccttgctttttatttttttgtacaattaccaactttgggtgatgatttttgaaaggggtttctttcatttgttagaacgccattgttgctattgcttgctactcgggttataaccaggaagattctgtcattatgaatcagtcttctatagatcgtgggtttttccgatcacttttcttccgctcatataggtaagattgtttcacttagtcctttttcttttcattttgtctttgtgctcttttgcatcattaaatggtttattggttcttgtgagacagagatgaggaaaaaaagatgggcacactagtgaaagaggacttcggtcgtccagatagatctaatactatggtgaggaattagttagatacagctaatatttagtttgtggcttctcaatgtgttggatgttttattaaagtctgattttgcagggtatgagacatggttcttatgataaattggatgatgacggtcttgctcctcctgtaagcacccatgtccctgttttcttcttcttcggtcctaaagacttttttgtctaattgtctaactgtatcgaattgtataacagggaactagggtttcaggagaggatgttattataggaaagaccactcctcttgcccaagatgaagctcaaggacaagctgcttcacgttactcacgacgtgatcacagtataagcttacggcacagtgaaaatggtattgtggatcaagtaagttttataactgaatcttctttctgatcttaagtggtcattaatgatcttatgatttcttattctgtttttcttttcaattcgtgaacgtacttttaatcctttccaggttctactgacaacaaatgccgatgggttgaggtttgtcaaagtgcgagtaagatctgttagaatacctcaaattggagataagtttagtagtcgacatggtcagaagggaacagtcgggatgacttatacacaagaagatatgccatggactgtggaaggaatcacccccgatattattgtgaacccacatgctattccttctcgaatgacaatcggtcagcttattgagtgtatcatgggaaaagttgctgctcatatgggaaaggaaggggatgcaactccatttacagacgtaactgtgagtagacattaacttcgagttattctaatatatttatttatgcgagctaacgttatcttagaatctcatattctgataatttgcttttaattagtgttttaatataggtaatccaaattttaataatttaatatcgaacttcctttcgaacaacacaaccctaagctattaagtttactaatatcgttttagtaacaatttgctgtgtctaaacaacattaattcttctttacatgggtcctagaagttggttggcagtaatgaaactattttttgattcccagttgctatggaaaacgaaggatgaaatacaattgattcaaagtagtaaactcggttttgtaaagtatatgatgtgatatgctatgttgaaaattcctctcaattttcaggtggataatattagtaaagcacttcataaatgtggttatcaaatgcgtggattcgaaaccatgtacaacggtcacactggccggcgtcttcctgctatgatcttcctcggaccaacgtattaccaaagattgaagcatatggtggatgataagatccattcaaggggacgaggccccgtgcagattcttacaaggcagcctgctgaaggacgatctcgtgatggaggtcttcgctttggagaaatggaacgggattgtatgattgctcacggggcagctcactttctcaaagagagattgttcgatcagagtgatgcctatagagttcatgtctgtgagcgttgtgggttgatagcaattgcaaatcttaagaagaattctttcgagtgcagaggttgcaaaaacaaaaccgacattgtacaggtaaataaatacgattcgatcataggtctaaatctgatttatcttcctttctcttttaaccccgtaaatcatttatttatctatatccaggttcatattccttatgcctgtaagctgctattccaagagcttatggccatggccatagctccaagaatgctgacaaaggaagtaaaaccattgaaagaccaaaagaagaaaggaggctgagaaaaacccgccacaagacacttttcggctatatttttctttagagttgtgaagaagacaagttgtctaagaagttgaagttgtgaagatacgattcggttaagcaaaaccagtcaaaagagttggtatgagagagaaagaaagtagcaaagcaattatatggaagtccaaccaaccaatttgattttggtactaaaatcatttgagaacaaagaattgatttaaggattaagcaggtgttgtattatgaggttatactaagtaagtgctactgcatcagattttgagggactttataggagaagattcagattgtaatatattttgtttaatcatgttcatttatagtaattaagcatcaaaatcaatattgaatttatggtttagtcattgattgttctattttattttattgtagcaactctataattattgagaatttaaagtggaaaaaagaaagaaaaaggataaatatttctttgccattagtggcaacacttctctattcttattttattttaatttgttgggaatgttgaaaatatgtctatgaaaaggggactatatcttgagttttgttttctttt

SEQ ID NO: 191693 - DNA, 793 bp, Cannabis indica
atctgcaaagtgccaatctccattcttcggccattcttgaataagtagtaatttttccatttatgatccaaggcatactattcaggacctctaaacagtcttactcctaatcaaagaagaaaccccagacccatactttcataatcttgattctctaatggccattaagtttccagatcttgtccaaagtatccttaagttcggaccttcacacaccttttccgtaaaagaaaaactagcaagaactccagttttgactatctcatcattgagttcaaaatctggctcaagttctaaggtcatataatcaaaaaagcccctacgaaggaccttcagatccctatctttgctgctgtctgtccctcattattctggctgtccacaaatccctcctctgagagctctacattaatacccatatccatttggggttgttggaaggcattaatgttgccattcacggttgggtccctctccatcatggaattttttatttgagtttcacgtgcatgtcctaggttgtcccccgtaatgagaacctaaaaaaatcctaaagaaatgactaaaaaaggtaggaacttgaaagagttatgagggtcaaaaagaaaggaaaagcaagcaactccacttttcctgggactgatacaaataaaacgagaataattgatgtaaattctaagtaggctaatagaatgactttagaaacaagattaaaatagaatatctcattgctacaggcacaactaagtacccttaaaggtctaaagcgcattcttgtttctctctctctctc

SEQ ID NO: 191694 - DNA, 1153 bp, Cannabis indica
ggggggaacaagtcaaaagaaaagacaaccttttaatatgttttgttactgctatgactttgaattattaatataattattaaatataagtctactttggtttgcattaattccttcccaatttgaaggggaaaagatttgtttaattatatgagttgttacaaaataatcacacctagctataaatctacaatgaataatataaatccactcttcctaatttctcactattggttaattgttatctaggtcactttagttatgaatcaatgattttttttttaagtagaaccactcatatttttgaattatattgtattactatttcatagtttgtttttaatattatattaagatttataggattttgtaattatgtacaaattaacctaattaataataatatataagtaaaccaaaatacgttttgtctatattagaaattgtgctatatacgagtcacatgtataaaaattgtattatattaaataagaaaaatactatatttaaatataattaattttgcattgtattaattattagttacaatcataaatttaaaattatattatttgatacataaaaaaatgctatgtgttagcttgtatatattatctaaaaatggtctagagtttgggtttagagctaggaataggattcggggccatgcagggtctggagtctagggctagagtctgaagtccaggtttgagatcggggtctaaagccagggtcaaggtctagagtcggactctgggatcgacccttagggtaggggagccaggcatgcaccgggccctgaacgcttagggctctgaaatcttgaaaaaataaaataaaatattaaataataaaaaaatataacaaatattatttggtgtggtggtaaactgctaaaaggtcaaaggattttacacacctttacttttttatttttttttaaaaaatacttcatgtgtagctataaagaatttaatctaagagcttttaagagctttactattatactaaagcactaaaactatcattttgataataattaaactatatataagagttctaaatttaattttatcttagtcccatataccttattaggaccagtcctttgggttcgggtaggagtttggtatcaaggttcgaggttgagttt

SEQ ID NO: 191695 - DNA, 1521 bp, Cannabis indica
aaaaaaaaaaaaaaagtaagaatttaatctatttgttatatatataataatatattaatatgtgtagcagtcacattttgtatgacaaattatatgtaaagatgttttatctacaattagttttatctttataatggttagtctatatctgtctttgttggaactgcagtggttatttttacacgtcagcatattcgagttaatcgaggaagaattaactctagttagttggtcggtttctacgttagaccatttagggttactataaataattagattcttgattatagttaactttcatagactttgatggtgagagaaaactctcgccttggttttctttcttcaacttggttttttcttgtttatattcttgcaagttccttcattgttgaagtttcaagcttcagtggtaaagtggtaatagagacagtataatttgaaaggagtttagattcatagctaaaggaattttagcttatcaaaaggagagtttgtcttcacatctaaagggaattagatttgtattttggttggttaatccagattatagggtaaaatgtattaggaatctttgttgtatcgttgttcttttcttttgatttacaaattacatttgattcttagtggattacatttacctgattttctaaggaacctaaaggctagttagtttggaatatgttttcagtgctgatgaactttgtagttcttgtgtttatcttgattcactttctgcaattataatgattaggtaattgcaaattgttactgaaagattgaagaaaatgatataagtattatgtatagcactacttttaaaagtataatgagatattcattaaaaaataaaaaaattgtatgtaagagaataatattgtattttcaaactatattatattgtacatagatttttttagataaaaaatttactctaattattgttaaaatatactaacttcgtggtccatcacaaaaggaaaaaaaaaagaaatatgattatattttatcataacaaaaataaaatgaagatatattagaaaggtaacacctatccatccctataggaagggcccttttcctttttctttttcccaagtgttgttgtcatgaataacgtcaagactaaccacatttgaaaataaaacagttacacctatcgattacgtactggaatggatagcaagataagcctctttatttcatttgtcagttatgcctatgatgtagacttaatcccaaaacaatatctctttcatacagcgacctaaattaattgtatagtactttaattaatagtattgtattgtggtgaaaaagtgaaaagggcagtcatatttcgatacctggattctggagcatataattacagagagaaaaagtaatacaatgttattaaagaaaggacctaaaaacaaaagaggactaatatagatctagaagaaaggaattaacccaaccaagacgttatttattaaataataacagaaacactctttttaagtatggatcagtgagagt

SEQ ID NO: 191696 - DNA, 1034 bp, Cannabis indica
gatcaactaacagcactacactacactagactttactaactactcttaaactcgtacctatttttcctttccttttcttgttttaattgtaagcattctcccctttggaagactcaaaataaaaacttagacatcattatttgtcatatgtagaaatatgtcaaagatgaacttagaaggcaagaaaaagtagctaaaattagtctcttctaatccctaaactaaactaagattagtcagagataaataatgatctcacttctcaattctcatttggtttcagtggctgcctttttcttcgtggtggttgatctaacattacttcaggtacactcatttagatccaatcagttaacccatatgttagaatattttgagaaacctttggcaatcccaccacaacctctaaggtggaaatgatttaaagaataacaaaaactcaattattaaaagagactagagaggatagaaacagtaatgagccatgctttttttggctgaattaatgagccattgctattgttagtaacagttttaaaacacgagatggactctacttatgggcctttggctaggcccacttttaaattctggtaattgtgtactctacataatatgcccactccttttcttttttctttgaagggtgttatttgagctacctttatatgtcagttgatcacttttttcttgcttttctctttaaagatggcttagttgtaaattttttgtataaaagatataacaaatttacacaatttacgctacgcttatacattttagtacaatacttttaaatctttatgcacaatcaagtatattcttacaagtaatatacgtcccaaaagttatcaaagaaacgcatatagtttaaaaagtataattttaaactggaaatgcgtgtgtgtggacaactacaaggactgcatagggacaaattttaggtgaatttaggtatatagtataaatggaaatttgaaaaaaagttaccaattacactatggctatatatatatatatatatatatatatag

SEQ ID NO: 191697 - DNA, 2260 bp, Cannabis indica
aaaaaaaaaaaaactaaagaatctaatagtaataataactaagttacatgtaaattgttccaagtaacaattgaattcataaattgtctattaaatcaaatatcaccttagttttttttatacaattgtaacttggaaatattatgagaattcaaattgaatagacaaattatttgtttgtttgtgtttggtgtaggtttagggttttattgtttgtcatttggtcaaacaatttggctgcatgactggactgcagtgtttacttatactccaactcagcttctactccatctttatcttcattcattcatcactccaacttctcttcttcttcttcttctgtcacgttcatggcgaccgctattttctccaaccccaagttctcccccacaatcaccaccacctcctccaaaaaccattaccactgccaacgccgtacacatttactactccacgacaaagtccaagcttttcaagccgcctctcttaaactcaacccaaatcctcattacaagaaaccccagatcgtttcctgccagagctccggtagcgagtcaccggacacagagaaggtgcggcggccggagtacattccgaaccgtatctccgatccaaactatgtacgtatcttcgacactactctccgagacggtgagcagtcccctggggccgccctgacgtcaaaggagaagctggacattgccagacagctttccaagctcggcgttgacataatcgaggctggattccccgccgcctcgaaagatgacttcgaggccgtcaagattattgccaaagaggtcggtaacgccgttgacgccgacggctatgttcccgttatctgtggtctgtcgaggtgtaatgagaacgatattaggagggcttgggaggcggtcaagtacgccaaaaggcctaggattcatactttcattgctacaagtccaattcacatggagtacaagttgagaaagagtaaggagcaggtgattgagatcgctaggaacatggtgaagtttgctcggagtttggggtgtgatgatgttgagtttagccctgaagatgctggcaggtttgcattttgatgaatttgatgacattggccccgttcgggtcagcatttttagctttttacaaagaaagaactgaccaaaaaaacacaaaaaattcgaaagatttttcacaaaactttttacttattattttatgtttatagtcattatcttcttatgagtgacagaagaagaagaagaagaagctaatagggtctacctttctgcaccaggtctgagagggaattcttgtatcagattttgggagaagttataaaggctggagcaacaactctaaacatacctgacactgttggttacaacgtgccaaaagaatttggagaattgattgctgacattaaagccaatacccctggaattgagaatgttgtcatttctacacactgtcaaaatgatcttggactttctactgcaaacacgatatcggtatgccaatgccttggtcctgactgatatcatttgattttagatatgatgtgaactcctctcatttgattgttgttcagggggcatgcgcaggtgctagacaattagaagtaacaatcaacggcattggtgaaagagccgggaatgcatctctggaggaggtgattgtttctttttgatcttcaacatgggaaaatgtaatcatattgtgtttgaattgaattggccaagcttctctgacttaataatttgtataccatgtatgaaacgttgagtctccttccatttcaaaatattaaggaaccacaacaaatctaatctgctaatctacttttatctttaaacgaatggtcatttcttacccttataaaagtagtccatttatcatagtcgtcagctaacagaatttaataacatttgattcacgagcaagggaataagatcatagaccaagtcttagcatccttttgcttggcatatgaagaatgcttcaattcactggtatatcaattagcattaaccatttgctctataaattttacatggaattgaactacctcattcaagacaaattttttttatgtcaattttcttgcatgcgcacacaccctaggtatgttactcactatccaagtagctgatatacaaccagtatcatcatcttgcaaccagatttgtaatttatggtttttcatctctagtcaaattgctgatagccgatttagatcatttggcatattgggtaccaagtaactgatacaata

SEQ ID NO: 191698 - DNA, 2818 bp, Cannabis indica
ctactcttagtgctttatgagctttatggtttagccgtgtaactgctttttagcggattctcaccaatatgtttatcaaattaaaccttctactaattcattcttccttcatgcattcaggccaaccaaagaggcatctgctgactacaggttggagcgtctttgttagcactaaaagactctttgctggagattctgttctttttataaggtagcaagcgaatacattgtgaaatgatatttctagctagatacaatatattctcacactatatattgaaacaaatttgtttctgaagggacgaaaaatcacagttacttttgggtataaggcgtgctacaagacaacagcctgctctctcttcatcagtgatttccagtgatagcatgcatattggaattttagccgccgctgctcatgctgctgcaaacaacagcccatttacaatcttttacaaccccaggtaccaccaacagttcttattcatgattgtcatttggtatatgccatgcaggaaatgattctgacaaaaaaacaattgtttgactttaatagggcaagcccttctgagtttgtgataccattagcaaaatacaataaagcaatgtacacacaagtttcgcttggcatgcgattcagaatgatgtttgagaccgaagagtctggagtgcgcagatacatgggtactgtcactggtataagtgatttggactctcttcgatggaaatcttcacaatggcgaaatcttcaggtacggtaaatttatttttaaggttcatgggaatgtgtagagtgtagaccctataacctaagtaattgttatttttggatttctattaacaaagcaagaagttgtttgtgctttctcaaattgtgatttgatgaagatgttttaaagtgagatagttgtaggattttagagaattttgttaacaagtatttaaatcttggagttttatctatctacttgcctgcatttaaatttgatgtactagtcttcttggaagggaactagcctatctcctcatttctttattcagacataaaggcttggaagtttagtttgttatttcagtctgttctgaattttgaatcatctgaacagaattgcgtgtttctgacaaccgttcttttaataggttgggtgggatgagtcaacagccggtgaacggcctagcagagtttcactctgggaagttgaacctgttgtaactcctttctacatatgtccacctccatttttcagacccaagttcctcaaacaacctgggatgccaggtaaacaacattaatcttatgctagattctcaggagtcttgtgtcttcaaacttgatggtgattcgagagaatgtatttgcagatgatgaatctgagatggaaaatgctttaagagagctatgccttggctgggagatgactttggcatgaaggatacttcgagcacaatttttcctggcttgagtttagtgcaatggatgaacatgcagcaaaataatcagctttctgctgggcagtctggattttttccatcgatggtttcttcagctggcatgcaaaataacctcagtactgatgatccatccaagttacttagttttcaagcccctgtcatgtctggggccattaccccattgagtaaggcaactccatcaaaccaaatgcagcagtcaccagtttcatggccacagcagcaacagcaacagcaacaacagcagcagcagcaactacaacagcagcagcaacagcaactacaacaacagcaacagcaacagcaacagcaacaacagcagcaattgcatcaattattacagactcctgctaaccaacagcagccaaattactcccagcagcagctacagcagttattacagactcctccaaaccaacaactgcagaatcatgcacaacaccagcagttgccgcagcagcggcagcagcatcaagaacctccacagcatcaacagcttcagcaacagcagcagcagtcaaaccagcaacagatatgtcaaccacttgttagtaatggtgttggtgcaactagtcagattcctaatcaaaatttacagcaaccaactatgttctctcagcatcaacaacaacagttaggcacaggcaatgcccaatctcagcaaagtgggtactctagcaagaattcagttcagtcgacatcagttccaatggactcgcagtatcagcaacaaatggagttgcaatcaaatctctttcaaaagcaacagcagccgcaacagcctacacatttacaacaaaaccaacttcagtttttacagcataacctgcctcagaggacacagcagcagtcacaatcacaacaattgtcacaacagggactttcagaacagcagattcagttacagcttattcaaaaatttcagcaacagcaacagcagcagcagttactttctcctacaagttcacatatgcagcctcaactgctccaacatcaggggaaccagcaaaatcagcatttacaattgacgcctctttctcaacatcagcaaccattgaacagcaacagcttttcaacagaaaagcctttgaacatcaacaacttctccacttcaacactaacacaatcacaacagattccttctagccaacctcagagccagcataaacctctgctggcaatcagagccaactctggtcttacagacggagatgctccatcttgttcgacctctccatccactaataattgtcaaatttccccatcaaaccttttgaacagaaaccagcatggacaagccatgttggctggagatcctgtggcggaacctgctaacaatttgcttcaa

SEQ ID NO: 191699 - DNA, 3886 bp, Cannabis indica
atagaaaactatatagacattatttgctgaggaaaaagagttagtatatagatatatttgctttaaattatttaaaaaatattttttcattcgaatcaaagcattagagaatagaaacttttacgaattattatttattttcctattaaaagttaacttgcaaaaagaggattaacatggataaattcaccccttatcttaaaccccaaatatacccattagtacataatattatggagtaaaattatcctatctcgctagcctataatgactataatttataactttcacatgtgaaaccaacgataggctcgaccaaaatcgagttaaatcactctgatttttgtattttgtttaaaaattgaagacattatatgcatgaaaaggagaggacgttgtggctttgcttgtgctattatgtcttataaacatttttcttcctccgaaattaccaaatcaggaaagtttattaaagtaaagatcacaaaatggtaaaaaaaaaagagtttgactacgaactgaacattaatggccaaaactcagaagatgggatcatgcagacagagaaaggtaaattgtttgtagtagtatagcataagattatcacataataactcacattgattcacatacatatatattatggaagagatatagatgcatgatgacctgataagcctctggccccatgtagaagaatagaaaaagtaaagaaaaagcgttgacccacacccaaggctgtcttgggtcattgtcgtacagagctcctgatataaattttgagtagacccctcatcactacttaataaacccttttctctacaaaccacatatatcgatgtaacaacaccatcaatatccatatccaactcaaacaggagagttaaagaaagaggctttaactcggccagcaccagcagcactcccatctaggccatctcaaaagaagttataaatatatataactctctttctctctcttcatctgtcgaattagcttagttgttgtacttgtagtagtgagtgagtgagtgagtgagtgagtgagtgagtgagtgacttgggttcttattatttgttgttgtatattatattgtgaggtgtagagataaggttacagaaatcagtgaacttggttttaaccaatacttcttctccacctttcccaatcaaagtccggtcttttcactgcttttaaataatataaatatatctgtaacttctttatattgattgaattgagtgaatgaatgtataagtttaatatggtgtcatgccttacagtcttagcttaaaagatattaactttgttactatatgtggtaaacaataatgctctgaatttagacctggttactactacctttattatagtgcctcttctccccttcttcttccttgttatttttgtaccctttgttttgttctctttaattactttcatcactcttttctgtgggcttgttttatattttacataaaataacatttgaagaagaaaagagtataaaaattaaaaatcccacctttggtctgaccattacttgaagtttgacatggtgggaagtgagattctcataaaaacccatcattttgttaggctttttctttcaagtgtcaactgaaggaactaaaagttaaaaccccaaaattcatgcccaccagttttttccttgtctttttctctccttctctgttgtattcagggtactatttttgaaagccttgaaatttgtgatctttattttggagttattcattcaaggccaagagaaaaaagtaaactcttttctttctttttattatatttgaaaatttctgtttcttttttcatttgattcagcttctcatccttcctttcctttgttagttatataagaagtagttctggtcttaagcaccaagtaatagttagagagaaatctttgaaaaagtcttatcgccttttggaaggtattgaaacaaagccaaggtagattcctgatattattctctctgccaaacttttatgctttttgattcccaaggaaaataaaaataccatttttacaactctctctttcctctgatttatatccctatttaggttgtatatatctctttctcctttttaactttatttgggcttttaaatagataaaaaaaaccttccactgtttcaacagttttttcttttctttggtgatactaccaaagccaaaagccagaatggaaaactggaataatggtgtgatcaacaaaaggagtggaagatcattattgagagatattgatcaagaatttgaagaagaagagatatggggttcagttaaaaagactgatcaagattatttttcaactacaggaatgagaaagagcttagtctcttcttcttcctcctcctctgctccaagaatgattcccagaaagcccacaaacaataatgaagccaaagtagtagtaactcatcaatcctcagcacccatggaaatccctgattggtcaaagatttatgggaagaataatggcaccaccatgactaatggttatcatgatcatgatgtttattataatggtgatgaagataacaatgatgatgatgatggaatggtccctccacatgaatggatagccagaaagcttgcaaggaatcagatttcttcattctctgtttgtgaaggaataggaagaacactcaaaggaagagatcttagcaaggtgaggaatgctgtgttgacaaagactggttttttagaataacatatttcattattataattattattattttgttttgttgagttgagttgagttgagttgggtccctcttttacaacgtcatcaatagtggttttggattttggtatttggggcttcaaattaatgaagttaattacattatatttatatttggtatatgatattgcctctactagtgtagagtactcaatttcgggtcccatgttaatttaaggttcattattgtactaatataatattttattagtgtactagagtagaactagattatgtccattttaaaaagaaagaaaaaaaaaatgaaaggtagagtttggttcttggcttggtgttggtgatggtgctcttaaagaaatggcggcctctgcaattttgtctgctagtggattccattgcacttatttattgttctagttgttgtaaggtgtagtatggtttataattattaattattaaaaacaattaatttttaattactattataatattggctattattttacttttggttattattaattagagtgaaaaaaacaaaaacaaaaagcagagtagctttggtactcaatattaattaattatatattagtacatttcccttgtccacttgtcctacctaccttactcatggtactttttattttctaaattatagctttatgtttactggtggcaaatgaatttatatgacgaattataagtttttttcttaaataatttttgtagtattataataatgactaaaacaaggcccatttttgtggtttttggcaatatgctttttttccggtcacatgtatgatataggtatatgaagaagagccaaatggaactagatagatgcaattccaactcaatttttagttttattttaaaatttctatgttaaaccctaatacatttaaattaaaattcacacacatgtcatcttagagttataaatttacacacatgtcctcataatgtattactttttaaagaaaaaaaataaaataattgtaatattgtataagatattgagagtttttattgttggatgcatttaagagagtaattattttgggtgtgcgttgagagaattggtatcttgttttttcaaaataaataattcatgatttttccatttatgttattttatttttatttt

SEQ ID NO: 191700 - DNA, 974 bp, Cannabis indica
aatactcttaattaatacttgtagagtaactgcttagagctctactttttatatttatttagtttatttttaagcttaatatatattttttttgttttagaaaaattaagtggttgtagacttgtagttatacctaactaaatcaatgaataaataagggttgtttgtatcgtatatgattctattgtggtccgcttcttacacaagacaaaggccgtacaaataattaactaaaaaactatacgttaaaataatatcgaaaacacagccaatatgtaccacaaatttgattgcaatgcaatgaaagccactaatttatttactaatttttataaatcactatctactttaatactttaaagtaaattgatactcattgtgctcttaaccactaagaaaatatactttgatttcttgaatattaatttataattcccatttagtactaatatatcaacggtgattatattcaacttttttttgattaatttagaaagactacaatacaatcaattaaagatggtatttactttttcttactttatattaattaatgattgttaatggaaagattaccctagctagtgctattaataactacaaatcactaaagataatagtggtataagtaaattccaatattagattaaaaaaaagcctgacaaagaagtcatctgtactaataaaatatattaaagttgggtagaaaacaaaagaggaattctccacggcaccaacgagttttttcttgtttatttgattgtttttttacttttaagttgaaatgggtaagagaaaagagaaggcataaaatggagtgatgaaagcaatgaaaacacaaaagaaggatgagtgcgaaaaaaagtaattattgagttaaattatttgaaaactcatttattactttattatttttattttaaattaaaagaaaaaaaagtataaatactgtagtaaagaaattagaaatgtga

SEQ ID NO: 191701 - DNA, 1257 bp, Cannabis indica
ctgactatggcttcatcggatactaccctggtgaatgagatgattgaagaaactgagaactgctgtttggaggatttctctatccaggtggtgccggacctggaatcggctaaggacacgatagctaagacggtggtcggacgtcttttttctaaaaagatgatctctcatggtaccctgcgcaagaccttgaccggtatgtggaaacttcggcctgggtggcgacttcaatctccagaatccaaaatcctcgttttccgcctgaacagctcccgggaagtcaagtatgtcctggaaaatggcccttggaatccttgtggaggatttctcctagttaccagactgccggaggatggaagatgggaatctgctgatctaacgaaacttgatatttgggtcaaggctaagggagttccattaccttacttaacggatgattgtcttgctcagatggctaaccgaatgggcccccttctaaaagcgaaaaaggtgagaagaaatggtgtagtggtcaatgactacctccgtttccaagtccggctagacctcaaccggccccttcttgcaggagtctctctcccggagctaggccaaaagaaaatctggagctacttcaaatatgagcgcctttcccatattttgctacaaatgtggtgttataggtcatcttgaagatgactgttctggcctgaagaggttggtggcggccaacaatggccgttcgattcccctgtttggtccttggctgaaagatggttctcggctggaaaatggctttgccttattggaggtggaggaaatccaagatattaatagattggagaaagatgatacgtcggccggtgtgtctgacctccctggggcagcccctgccgctattcctgaagaggcggcgaaccctccccaagagaaaattcctggaaatatccaaaaccctgggggtgatgatgtggcagtgggccatgttggacgaaccagagtggaacaggtaggcatggagggagtcgtctctcagaagagggataatgagttcaacgtggcatacaatgactacgtggaaatggcccactttccttctaaacatgtgattcatgtggcaaatctcttcaaggaaaaactaggcccaattaagtttggggctaaccgtgaggaagtgggccttaatggttctaagtcaggcccttcaaacaagcttaagaagcccaggcttattgggccacgtggaattccaaggccctctctctttggaaggaaacc

SEQ ID NO: 191702 - DNA, 4998 bp, Cannabis indica
ggttctccccactcggttcgccgtacatggccgccccgacgtcacgctccgcccgatcagtgccgcttagagattcttcctccgagaagatggacggtgctggtagttgggacgccatcgaatggaccaagattgaggttttctttctttctttcgttgtttctgttctagggtttcctaatttatggaatttctaaatttctcgttcagtgcatttgtattctggttgaaagttgattgattacggtttttgtttattttgtttattttttttaatattttattgcagcctgtttcgcggtccatttcgcatacgaatttagagtttttgcttgaggaagagcaagtaattgtggaggtacttgatgaattttagcagattcttaagagttctgtagttgaattattttttttgcttttatgatcactctatcatatgtgaatattttaatgtattttgaggttgaaagttgattttataatgaacaattcaaggttctatttgaagataattgtggttgaatagcaagaattgaaagtggagcttgcttttattatagagttttgtatcaaaatcaaatatttgtaattatatattatcgttggcaatgacaagaatttgagagctggtagaaacacattacgagtaagatattatgctaaacttcttcttttattcttaggctgcttacagatatctttttctaattacactcttggcttttaagcccataagtaacaataattatggttgatttcatatatatctaaaacggctaaattggaagaaatggaaattctttttggtttgtggtctagctttgtagagataagttatgctaaatcaaaagttacgtactgaaaagctacatcttttggtacctaattacataattacttgggaattcattgcatggtagttgtgatagtattctttttacatgtaaaagtagcttagcttctgctttggggccggtgatagattcagtgatatatcaactatgatcactttattccggtatgcacttttaagtttaagtagtaacagttgaattcgtctccagggttatggtgttgttcttgtaaacactgatcaggcagggacattgttagtaaccaattatcgacttatatttctggtatgttcaacatttccttctgccttaatatctttgttgaatttaagtttggtgtgcacttatgcctgcttcagtttgactgaattctcaaacctctagttttgaggaataataattttctggccatatcaagtccttctcattgaataaatagtgcttccttttggtgcatgtttttcttttatctttatttatgttgagttgtttttctttcaagagtgaaggaactaggaatatcattgctcttggtactataccgctcatgacaattgagaagttcaacaaattggtaagttataatgatcgtactctgtttttcttctaattatttattttatgcacttcttatctgttaaatatcctcttttcatatttattctgttttcttttgttttggttgctgccatttttttaatcaaatgattgttattaatagagattgagtttcaattgttaggtttttcacactgaattaggttgagttagcaatcggtagcaggttttgggttggggaaagctagattgaaagatactttagttatttagcttaagctgtccacctcttagcatcatccacaagtttagttatttgcaacttctataggaacaagaacaatgctgtttacttcatttaatttccagttcattaataggaatttattttcctattattcctttttaaacccatttttctttaatgtttctcatgaattaaattttaaacattgtaatgatatgtgcatctagctcttcatcctgcatttgtggctagctggtttgcaacttattttatttatttatttctcgcatttcatttttggaactaaagtaacatggttttcatgttttgtttatgagattttaggttgtaaagacacaagcagctcctcgtcaatctgacaagagtccgtcacgtagacatctgcagattactggtaagctaattgaaatattgttttttccaccataaataatttctaggccagagatgcacatattttcaatttaaacatagcttcttatacataaaatgctggtaccgatgagaacacagtaactgttctcttaatgctggtaaagtcaatcctatccttatctatggcaatagtgcatctttggctagttgactatacagaccttcccactaatgttcttatgttacaatgtcaaacaatttttgtttggaactgcaatcattttttaaaatagagaaccatgttatgaacattttttatgaagcatgaaggtagtgacagtaaatgatgtttctatattttcaggcaaagacatgagaattattgtctttggatttcggcctcgaacaaagcaggtgaactttatcattcttcttcatcttttattttatttttcattttgaatcttataattatgtttcatcaacaacttcaaacttttttctatgtcaattagttttttttttctttttaatggtatttaaaaaaatatgtttctatgctcctattgtcattattattatttaaatgttaaaacaaaagatcagatatttatattgtagtgtataaaaataattcaacatggtattgaatgagaacactcaaaagcgtacaaggaaaatagagtatacataagatatttccgatctttagtcagaaagggacactcccttataaacattgctatagccataatgctacttagtgcttaattgtattccacaatatcctccaaatcttaaaaaactatcttatttcttttaatccacatcacccatcaaactgccattacagatacctttggtaggagttgcctagtcaaagaataaaattgtttagatgttacagtgaatgctttatctgatctaacttaaattattgtgggatgtgacagagacatgcaatttttgatgcattattaaggtgtaccaagccagcaaggatctgggatctttatgctttagtttgtggtccttccaaattcggaaatactaaccctcaggtgcggttattaaatgaatattttcggcttcttggcaaagggttcccccgagcatcaatgagcatgattgaagatgggtctttcacattgtccaatgatctgtggcgaataagtaatgtaaactccagctatgcactctgccagacttatccattcgctttgattgttccaaaaggcatttcgtaagattttaagatctgttcattgtattttttggctcttgaatgtctatttattattgatgaggtttacaattattctatgcttctaacattttaatttgtgaatggtagcgatgatgaagtgcatcaggcttccagctttcgtgcaagatgtcgattgcctgtagttacttggtgccatccgggtatgcaatgaatcttgattggcttttttctaaacatatgttgcttttagattaatcagtattgttatgtgtcgcttgtttcaggaactggagctgttcttgcacgatcatcccaaccattagttggtatcatgatgaacatgaggaggtaatcagtcaagaaaccttcaaccatgcctgagatcagctgtctgcttgtccctgtttcagaaaacatatattaattcacttgcccttcatttttctgcagcaatactgacgagaagcttgtggctgcactttgtactcaacttggtggaacaggggtaaaacggaggtaagcatatgatttgctagcttttttgttctcttcgtatgattgatttattttgaaagaatgtgaaggtataagaaaaatttataggctccataggattttattaattataaaacttgaaatggtgggactgataaaaaataacactaaaaaaataaattataaaacagatgaaactctatataaattgaaaacaatattttcttgtgtctccataattttgctgttttatcaatttagaaataactagccaatcaaatatttgaaaattcatcattttcaaatctaaaaattttcagactaatattttaaaatattgttttcaaattaaaaacaaatcaaccccttattgcttttcattttcatttttgttttaccatttttttttcggtaatacattctgctttgtggcattctcataatatgtgtttctctatataagaattttatttgtttgatttcatattcgcaagacttgacaaacagatgaaatgtcaagaaacagatatgatgtctctgaatcatgactcatagaactaagacattatctgtgttcattgaattcaaccatacatgctgcctcctataacaatctttgttaaagaaaaaaaaacaggagatatgtctccagtggaggttgttactcatttttgtagtacttgcccttatgttataaagagttgtaatagcataaagttgatcatgttttcagtttttattgttttcctcttgcttaatgtttcatgaaatcatcctttcttaattatgtgttttgacatgaatgtcttggctgttttcattgtccaggcaagaattgatatggtagtattagtttagctagcaagtcattttctctgtgttaattaattgttttgtcatctcacttaggaagctatatatagctgatgcaagacctagaaaaaatgctttagctaatggtgcaatgggaggtggatcggaatcatcttcaaattattttcattctgaggtttgagatttttatcgatgcttaattcagtgatgaatattggcatcatgctaatgttctgtttgttttctgttatatttgaccagattgttttcctttgggatagacaacattcatgcaatgcgagagagttttgctcggctgagagactacttagatacatatggtgcaacttcatcagatggaatgtcatcattcttggtcagttttg

SEQ ID NO: 191703 - DNA, 1745 bp, Cannabis indica
tttttatttttatttttttaatatactcaattttaagacaatttttaacatgaataaatacagtaaatataaccacttttgtcataacatcttaaataaaaaaatcagttcatggttctatttgtataattttaaaaaatacaagatccattttcatttaacaaaagaagatctaactaataacttttgtaaatagtggatctaaaataatcttttcccataatatataagataatataaaagttagttaaaaaaacatgatttatttattgaaggggtttcttttacagtgagactctctgatatgtggaaatttggtctagcaaatcttaaacagaaactgactgtttgtgacagcaggtaacattatctgataatgatggtacttactacaagactgattgatattaatgatataaaaattaatccaaaataagattagcatctcttaaatatatatattattattcactgcaataagcagagcttttgttcagttactgagttactgacttcaaatttaagttaagcttacgtatatgtattatatttttcaattacattaataaaattgtagtaattaattaattaagatagtgaaaattaataagtaggccctcaaaggcatctttctctaagtaactgtcactctcaatctcagtgtgttttgttttcttttaatgactgaatttgtcgggaaaactctcacttctaacactttttttttcttaatataatatattttttgctataaatattgttttcccaagatattcattattcactcatctactcactttttagtttttacatatatatttaagtaccaatttgtatatataaaaatacatatgatttacaggataagctaaagaatatatatacatataatattttttttctgcactatgattattaaagaattttatttttaaactttataatattgatttgcttgtttgaaaattctctctgcattccctttttaacatctttgcatattcatttctggttggaaggaacaaattcaaattttgattacttttgtcttttcttttatataaataataaatgttattgttataatcattagtgtcgagtacgttaacagtattttttaaaaattattttttaaaattaaataagacctgatacttaattattctcataataatatgataaggaagagaatattaagaaccaagagtgccttttatcaattgtctatcatgcgttattagtgtgttgtacttgtacaagtgaatggggacaacacagactattattctttaataaagaaatgattattatatgaaaatgataagttactgttagtaggtagatttatcttcaagctttatcttttcttttttggttggaatattcaatatatagtattgtaatatattcttttgttttgaacaataattatattgctaggaccagttcgagttgaacaaattaaaatgttgttctcatcatagttatattcatacatgtgccaaatcttagtctcttctgcttttttttatctctttattttaacaccaaagcaaagtaagattatttttgttttcactttttcttcttcgttaatttcagatattttttaaagctttatgctctactaaaattatcatcaacatatatacaatcatttcaatttaattgttttttttttcaacaaaagtaaataagtagaaagaaaaaagatatttttatttatattaataggtatatcacac

SEQ ID NO: 191704 - DNA, 615 bp, Cannabis indica
ggatgggtattaaaatagttaacagggatgggagtggggaagcattccccgcctattacctgcccaattttcatccctactcgtaacataaatatgtattcattaaaaagattttctactccgctatagactgagttacataaaagttctatacaaagaaaggaaggtttacaacattcaatatgtaatctttaactattttatgtttcaatttaaatggaaacagcttttaaaataaagaaaacctgaatacaggaagtccttgccactgtagctaaatcctttttccacgagtgttttactgccaaaataaaataaggaaattgtacaaaggtaaagaaaacaagtcatcgaaataaatgcccagcaaataaggtagcaaagagatctttagcaccttatatcctccaccttgtctgcatggccacttggttctccaaaggcactgccatagtggaacttgccacatgaaactccagctttacctccaagaagctctatcatcttgcctacagtcattcgactgatgacaacagaagaatattatttaccagacattttaagcttgtgatggttatacaaaatggttgaggaaatgaaaaaataaaaaaaaaa

SEQ ID NO: 191705 - DNA, 854 bp, Cannabis indica
gttaattaaaaggttcctcattattatgatcgagtcttttcatttctataactctcaccacataataaatacaattaattagcatataattaagcattattacaccattctataaataataaaccacaccagccaaataatttcactaatcacaactaaacacacaaaattaaaagttaaaaaaaaaaaaaaacaatggccaccacccaatattctctcaacaatacaactcttttggttttagctctagtgtttctggctctggctctgccaacatcaatggctcgggtcagaaatgatcatgacgatcataacgagctcatatttcggctgaaactagactcatcatcatcgtcgaataattgttgggactcgttgatcgagctgcaatcgtgtacaaccgaagtgataatgttttttctgaatggagagacttatttgggtccaagttgttgccaagccataaggatcattgggaagcaatgttggccagccatgtttggaaccattggttttactaatcaagaagttgatgttctccaagactattgtgatgatcaacaaactactactactaaaactcttcatgggaaattgtttccatgaattattatattttaagtttttttgttatgtgtttgatttgggttttttggtgtcagtttgtttggagttatagtactattgctgtttaactggttcaagtaaattatctatctatatatgtgtgtttacgtttttttcttttaatatatatggtatgaagtttgtgtttttcttatttaacattttgtgttttagttactcttaattgaatatatgttttggtgtattgatcctttaaatgaaaaatt

SEQ ID NO: 191706 - DNA, 796 bp, Cannabis indica
ctatttcaactcattttttttgtcagtacatgcagttatagtgacaagacctagtctattcaatgttgttaattcctatttgatttgggtaataagtaataacatagttgttgaaaatttaaaattttcaattcaatttttttttgtatgcgatgatcaaaatcacacaacaattcacaattgggctgcaaaattcttatcgcgagctatatgggacaaaattattcccaaaaatttaaacaataaatctatgacatcattaaatagcacttcaagctcgttaaagaattcctttgtcgataattgtttaaaaaatatgtgcacaaattaaatagctagggatcgaaatctttccatacaaaaacacaattggtttaccgaagatcatcatatcaatagttagattgatcagataaaattattaatcgttagaaacatagcaatatgtaaaaagatgactttagagcgcaagttacactcatgataggcgagcaattatgcacacatggttttggggtttgctatactctgtgatcttattcttttctaagacctgatgcttcatctgcttctttagcttagtaagatttttttcacgctattgcgtcaaatatttcccaactgaattgcaaaaaatgacccattttagatgcccaataaaggttggacagatttttttacccgaaagaaataaactcaaaacaaaattagtatataatagttattttaacatctaaaattatagaaaaatattaaaatttatggtgtttaacaacatctcaatgtgttgtataat

SEQ ID NO: 191707 - DNA, 1516 bp, Cannabis indica
aaatattttattcttatatattcctattcttatccctctctcaaattgtatcttactttcttttcaattgactattcctatgtaaaagttttcaatatattcagattaccttttttatatccagaaaatatatgagaggaaaccttcaatatggttttatatacatagaaccgattcagtgacatataattaattaatttagaaaatagaaatacaaattaaaccaataactttcctataaatcaactgaacttttctcaaataattaaataaataaaagcttgatttttaatttttttttttggtttttttaacgtttattacattttgagtctttttttttcttctatgtaagggggtcacgtatatctcaattgagtcaatcaatatatatttttatatttccttttctatttaattcctaataaatagaattacttttcatagtgatatcttgctttcattattttatgtatttatttcccttaaaatcccatgatctcatattctcatgtcatagtagatgggccaacgaacgaggtagatgagattatatattattgtgttattgtgtatatgtgtgtaatttaagtgtaccacagttattattcgtttttttttcttttaattatgccatcataacgttatatattaggcacccacttgatcataaccttgaaatgaatattatgatttttctaatatttttttaggatggagattattgggttgtgggagtgggaaacatgttatctatagttaactggtttagaaatcccctttttaattttgttttcaattttctgagggagtaatgtcattggctatagatggcttgggttttctttattattagtggatgtctcaatcatctatgctataggattcttcattgattgacactataacaactacaagacgtggcatttacttcataatattaaagaatagtttgaaaaaataaaaaataaatatgacatgtgacatcattacccatttataatgctttatttcccataaagtcttggatgattagtatttgggtgtctcaaaatataacataaagttagtggaaagtaaactaaacttgaagctcttgaattaaatattatatgacttctaatgtgaacaaactcaagttatagtgaattaaggtgtaacttgacaatgataattactcttttggtttggattttaagttacaaaactaaagtaatttgttacatacacaattacagtgtaatataagttcttatataaatttttgttttggttggggcagatcatttgctgtgaaggatgaaatattttgcttgttcgaaggagcacttgacaacttgggtagtctgagacagcaatatgggcttgccaagtctgcaaatgaagtggttttggtgattgaggcttacaaggcactgcgtgatcgagcaccataccctgctaaccatgtagttggccacttaaatggaaactttgctttcatagtttttgacaagtccacctccaccttgtttgt

SEQ ID NO: 191708 - DNA, 2131 bp, Cannabis indica
caatctatggaaaaggtttatggcatgactttataatcaaaatgaatgtggttccagatgttgtcgtttgaagaattttgttaagtacttgtaagttttatggaaatgtggccctatctgaagttgtcacaaagaagcttcttgaagtgtatctttgtgtagtgggtgttatgtttctttcatcaagtacttacgcagttattgatagatgggatgatattgaaaaggagacaattgttgaactcgaacaatctgcagaagccatttggctcccatcaaagtcaatggtctaacatcaaataaataactcataccatagcacatcaattgtgatattgtggttgaattgggtggaccaaaacatgttggcattgcccttgtagttattcaggtgagcacttaaagattaaacataaccttaatggcattgcccccaccagcactagtttcaaaagcagcattgatatctttctgtgagaacccaaatctgtgggttatcagtggcttaacatcaatcttaccagtcctcaacaactcaatgctgagtggccaggtattcctataacgaaatattccaatgatatcaacctccctgttacaaaatcaatataaaattagtgtttgtaaaaaaagagatcatgtttgatcaaagtccaaatagcttactcaccttgcagcagcaggggtaagaggagcagtcatctcactctgagctaacccaatgaggcaaactttcccacccgaacgagtagcattcaaagctgttgacatggtcttgttataaccaacacaatcaaagcttacatcaatgtcggaacccatggctttttggacttcccccacgtctacacttacatcctgtttaagatgataacttttagaaacctcttttcagcaaacatttgggttgaaaaagattcaaaggggagatcaaagaacctctatattagttgaaactaaaacaatcttatctgcaccaaggctcttggcaatcgacaatcgacaatcatcaacgtcagttatgacaattctaggagctccaaaagcacgagcagtcagcagagtaacaaggcctataggtccggctcccatgatcaatactttggtctccggacttacatttgctcggcgacaagcatgaacaccaacactcagaggttcgcacattgcaccttcctccaagcttacattttctggcaacttatagcacaagtctgctgggtgcaccacctagacaaagataatgaaaaagctcatatttttggagaatctggtttttattcttgtactgaattttctaataaaggccacaaagtaaagaaaataagacttaagaaagcttataagggtcatactttgtttgcaagagaaccattagttggtggagagccaaaaaatttcatttttgggcaaagattgtaacgaccacttttgcagagtgtgcattgacggcagctgattccaggctctaatgccacacgatcacccacatctagtgacttcacctcactccctacttcttcaattacacccgcacactcgtgtcctattaccattggcttttttactatgaaatttgcacatctcattgtcttttcaacacattagcaaaataaaaagaaaaatattaaaaaaataaaatataacgaaagctgccatgaggtatattaatttgaggtaaatgattagggttcttgttaccttaaagtggtgaatatcacttccacaaatacccagagcttttactcgaactttaacatcatggggtcctaagaagatacaagctttgttaacaaaagaattcactttaaatatgtgattgctttagttcaaagcctcaactcaaaaatcaaataggaatactacaagttaccatttatgggactttagccaacacaaattatattgttagccatccgatcatccatcatgattgaattaaatgatacatgaaaaatattggaggataaaggaaaacgttacccaaaggaggaagatggtatggttgaatcttaagcgttttaataccaagaagccaggcagccatattggtttcaccttctttgctttccatggcatgatcttccccgtcttgtgacatctctcgctcacttgctctctctctctctct

SEQ ID NO: 191709 - DNA, 2681 bp, Cannabis indica
acaaacacatggaatatggaatatatatatatatgtagccaaagcatttgacaacattagaagtgagccatagagagacatgttgaccgcatattgccctactgcaagcttaggattcaataatccaacaagagaatagaatttattaattaattaattaattaaactaatacatataacaaaactacaaagtttctcatttcccggagaatctagagcgcatcaggcgctgaccggggcttcgaaatctattaacaaatcattatcattttctagtcatcttgttgttgtttctgtaaattaattaataattgtaatttaaaagcatatgcatgggggtttgagctaggttaagaaaatgagaagtaagaataataattaagggatcactatatctgtaataagagatagctagacaaggtcacgtccatatatatatatttatatatatatgtgtgtcatcacgtgagcggaagccatgttgacgccgaggaatatggtctgattccacgcgcgggtgggtggggcattgggaatatttggacacggagagggaatattggagcccctccacattagacaaatgctaccctttcaaatttcacccacctcatcctactactctttacgcgccctcacctcacgcgctccatctaacccggcctcttaattaattactcacttctatatagtccacaattaagtgattaacacagtttataactaaaatatgtgacatatataactatatataactgactaagggaatttaatttaatatacgaatataattaataactatatatatttatattgacgctttctcaatgtttagggcactaattattttttcttcttatttttcaatctcaccaagctaatattatatcatatttttattactatggcttgaagagagaaaaatatctgctgagcatcgcacgtgtacagctcgaatagaattggccatatagttatcatggtgtaattaatcaaatagctaggatgagagtactgatcaaagtttcataaaataaaaaatattaggtcatcagagatgtcaatatttttatatattttaaataagtgcatgcatgatttaatttttaattttaatcaaatcctttttgaacaaaataattaatttttggcaggatttcatatcagagtttgaacgtgaaattaactttcagcacgaggaattaaaaagtattagatatttaccgttgagaaatgtacatatatgtatatatataagatgtcaccactcaccagtgtttttaattataagctgctttattagggttattatcttgttgagagttattattactatatatataaaaaattcagtaatataattcataagaagttacagtgctgtacgtaccataaaatgcctattctgaaacgaattaattaatgttaattgttatggaatgggagaaaattattgagtttgaaaattaatttgtaaatatagtaacgtgccacgtgtgcgagaaagaaaccaataaagggaggattaaacagggatattttggcctgccactcaatcctcgttcatgaaataaaatgggaatattctaattcatttttcagagtagccagctagctagattatatagctatatatactagagcttaattattattattattattaaagttttatatatataattatttcagaataaaatctcataacaaaaagaaaagatataataaatttaaatatataggtctgtcttgatccatcaacgtagggaaagggaaaggaaaaggaaattaaagaaagagactcaatccccattccaatattccattgaacaatgccctttttgttttctcgaattccaaccattcccttcagaaacctccattcattcactctctctctctctctctctcttaatattctccaccctaaagataaggggaaatcatttattaataaaccatacccattcttccctccctctttcttctccttattcttttattttatctctccgtggaaaagggtctctatctctctttctctctttctctttcttctgattattaaataccaattacttttcccttaaaaatcttttctcccaaaagaaaagaaagaaagaagtgagtctgttgctttctcctttttctggcaaaactatctgctatatacatttaatgtagttcttattaaatatttattattatcaatcaatcctactctatataattaaaaaagcaaagcctaagtatagttcccgtccacgtctatcgatctcttcatctcttcctcaacaccaatgcaaataaaatcataagccactcatgatttaatcaacaccatatctctctctctctagctacttctacttttcaactttctactttctactttctactttctactttttcttctttaagagatttttcatcacaaaaagttttttctttttctagatcccaatattccatatctctttctcctgcacacagtaataatgttccctaaccacaccactaaaatgatgagaagaactagtattactactgctactacttcatcatcatcatcgtcatcatcatcatcatctatgccagacctttcgttgcagattagcccaccttcgattccagattattatcatgccatcactactactgaagctaataataataagaat

SEQ ID NO: 191710 - DNA, 1645 bp, Cannabis indica
ttggttctctcacaagcgaatatgacatggatttggagttggatcctgtggagaatcaggctttgtcatgttcctctaaagaagatgaaattgataggagagacgacaatgatgccccgaaaaacactgaagtcttgacaacacttgaatctagtaggaaacgtggaagatttgctggcaaaagcatagataaaaggaaaccagtacctaagaaagctcgaagaacacgaccacatattggaaataagcctgctaaaatatctggtaatgaatcagatagtgtttctcatgaagaaaacatattgaaagaagagaacaaacaaatgatggaagatgatagaaaagttcacatattaataaagcaagagcaggacccaataaagttcgaagaacatgtgcacgcactggaaaaaggcctgctaaattatcttgcaatgaatcagatgatgatgtttctcatgaggtaaactcagtcaaagaggagagcaaacaaatggagcaaactcatgaactgattcataaaagtgagagggtagaaaagcctcaatcagcagttgaaccgaaagagattaagcaaggtgaagaaagttttagacatgaagagtggttcaacaaaagttcctgaatatgaaatgactgagaagtttagttgtgaaaacattccacagcagaagctggaagttctgactgatcctgttcatgccatgttgttggacatgattccaagtcttggaaagccgaaaagtgcaactactactactaatttaagaattgaagatgataaaccaccgatggacataaatgcagcaccgattactagtaaatcaaggattgaagatgataagcggccgatggatgtaaatgctgcaatgccgccagcagagcctaaaaggaagaaagttagctacagggatctagctagtgagctgcttaaggattgatagcttttacttttggcactcttttgttgtaacttgctttaaaaaattgaaaagattggcaaattaaggtttcataataaatattaaatccatgatttattttttagttaatctctccactcttgatattgttttttttttaaattaaaaaagtagtcctaaacagaggagaaaaggaacagaacaatcacaagagaggagatagaaagcacataggagaggaaagaaaggaagtgaagaacaaaaattatagatcttgtatttatgagcaaaccgaagagattaaactcaatattctttttggtcaattattcatgctaattaaaaaaaatgtaacacaattcttgtatttaatcgatctttgttcgtaatttgttaaatataagcctcattttctaactcagaaaagttttatatgttgaaccttattgcaagagtaacaatgacatgataatacgagaacaagccttcaaagcaactagagtctagaatagtgaccttcagttttcaaattgtactcatttttgtccaaccaatttgttatatccaatttttgtaaaaaaataaaatgactactcttgtacaaggacacacgacctaggagtacattcaaaacattcaagtcaaccttgcgacattgactaagacttacaaatgccaaacaagtaaagacatcttatttgagggtcccatgacacctcaag

SEQ ID NO: 191711 - DNA, 906 bp, Cannabis indica
caaatagtaaattgacaaagttattcccactttacgttttattcttatgtaaaaaagatattattatagttattttataagtgaaaattttctattttacagtgagagaaagttataacaaaaatactacaaagaaaagtaaactagtaataaacaagaatatatgaactcataaaaaactaatgagatttgagatgtactgggagacctttctcaggagtgggcatcatatcacctataatcttctcattagggtaaattagttgccaattgaaccttttaactacattgtggacaaaagtgagaatagctagcctagcgtactctttgcctggacacatgcggggaccacctccaaatgggactaatgtaaaaggtggaaatgcacacacatcatcgtatcgtgatgggtcgaatttctctggctctggaaaatattctgggcttttgtttgttgtactcactgtccagtatacctgcaaatttatataccaactttataatatatgttgaattgtaatacttgcaataaaaagaaaaaatacatagtgttattaacattaataattcagagttttccataaattgaaactaccatagttttatttattttttcttaataaaattaagaaaacgttatattagtattagaattaaatgaaatagagtaattctacaatatatcctttaaaaagttttttatacacttttatctattgacatttatggaaatttatagtcttttttttttaaaattgtagcgagtagttattttggtataaagaaaattttgaataatttattgtgaaaaaataaaattaaaatattttactgcaccactcattttttttaaatgtggatcatttagtcaattgtcataatagggtctcactctatagtgtgcac

SEQ ID NO: 191712 - DNA, 2037 bp, Cannabis indica
aaaaaaataataatatcttacagtaagaaagttgcccaaattaggaccctcagctctgtgatagttgttggagatcttttccttctgcccagaatcggtggtaatacttttgcgactctctggaggcttctctaaactgctggtttcgacgccatacggcggctcaactggcagcagcggcggcggaggcggcggcttttcctctgatgagctgaaaagatagcccaacgaactctgtccaccgccatagcttcctcctctactcatctccttcgatctctaattaatttcaattaagatcagtaatattttcgtttgaataattaatgaaggattaagagctatatatatagagggatgaatattatataatttagaggaagagaaccctagctatagccaatatataaatataaatataatagtatactgtgcatacttttggtgaatttcgggtatgcgtgttaacataaattgattaattgtatctttgaaatcttattaatggtcacccattgatcagatgatacgtagcaaattaaatgatcttagggttgtgattgaccatttttgtatattatacatataattatgcatatactttttttttgagtgtagtattacaatcaattaatagtaagatttgggtttcaatttgtgtcctttctttttactcatcactctctcaccactaaaccactaagctagccttagtggctttgagtatgcatagaagtgtggtgcaaattaattaaagtactaatacttcaaatattttgtcctttatatgaactatgattaataataattctcctacatactcggtcttcagctagtctatataattttgttgttgtatgtctaatgacctcccatattcgttgagatccatagttattaatttccatataacaataataataataataataataataataataataataataataataataataataataaacattgcagattgcttttattacatttacttaaattaatttggagtcgctgaatgtaaataattttaaatgtagacacatatttattgtttttttttatcaaatagacacattattgttctgcctgtatataagattacttaatctaaatccacataactctggcagaaatagttcccaagttccgacgccgccattagctgatatagctgatatatatatatatattatattatataactatttaatataaatcttacatattttagtttaatagcgttaaacactaatattaatacttaacagaaatataaataaatatataagtttggttcacatactaatgtagatacaaaaagattggtgtagtatgtgatgctataaattattatttgaatgaatatacaacatgcatagatatcaatgtatattaaattaatttctcaagaaagaaaagttaagagtaatatgtagaaacttaggtactccataaatgtttattattttgtaaatattataactgcaaaaaagtacaatactcaagaaaaagatcaatttaaggtttcagttttgaaaaattaaggtctggttgaacgtcaaaatcaggtttgctagctggatcatcagctaattagctttaattagtacagcactattatccataattttgagttagtggttgttaattacatttcacactacaaagtgaaaagttttagtaacttaatcaaacttataaaacattttcataataaaaaaagcctattaatcataagactttttttttttttttttttttttgaaggaaatcataagacttgtttaaaacaactttctattaaaattactttttactcatgatttgttctttatttttgtatctttttctattggttcttttttttaatgttgtgattatttaattaaaagtgcattgacaattatttcatattatatggtggaggttatgctatctcatcctttaattaaattaaggttcaaacttttgagtcagtacaaatttattaattattttagttatatttaattataagtgcattaaaac

SEQ ID NO: 191713 - DNA, 1252 bp, Cannabis indica
aaaagatacaaagtgaaaatttatattctatatcttctatatttttagttatagatatggccaagtctcttcatttatgcaattttctcttaatcaccatgcttgttcttattgcttcaagtaataatatctctctcactcttttatatatattttagaattattattagtaataatttggagtttgttatttaatgatgctattatgttatgatttttgtgtgaaggtaataataaggtggatggaaaaatatgcaagattgagatagattattgcctcaataaaggacatgatgatttatgtgaacaagaatgtactaagaatttccctcaaagcaagtcaatatgtgaagtagtacctcctccggctaaatatttagcttgcaaatgcatttatcaatgttaaattatgtattattatcaatttaataataagatttatttattattttacctaatatatatcaattaagtgccattatcaatatatattgagtgactatttaatggttacgtcaaatatataactacgatagttacgttaattttgaccattcaattattattaagagtgtgtttggaagtaactgtgtaattactaggtaaggtaattactagggtggtaattatacagtttagtaattacactatattttaaaatgaaaggtgtgtttggatatgatgtggtaattacatatgaattcctaatattgcaaaatagttagtaattacatgggaaaataatattttctagtgactaatgtttaatatggaaagtttttagtaattacacaatgtaattacttctaattctcatgggggctatgagaattggagagtgtaattggaactcctcaattacatctaattacacagttacagtgtaattacatgatcagacaaacatgccaaattgtgtaattacctccaattacacacaaatccaattatattgtggctttccaaacgcaccctaaatggttatgattaatatattacctataacctacctgaaactactattcatttcttattatattttattttcttataaaatgctaattaagattaatttattcaaaaattaaatttaattatattcactaattaaattttatgattaattattaattaaggttctcttagcaattaattttttaatttatttttttgcattcaaattattaatatatatttgcaacaaaacccagccccttgatacatcaaaaaatttggacatatgacctaaatt

SEQ ID NO: 191714 - DNA, 1882 bp, Cannabis indica
aggccgaatgcctatcacgttgatgctttgacacaatgttctgatactgtgaggagcccatagagtgctcctgctgcgaaagggtatccacttagtaatcgtctacaaaagagtaaaaatatttggttctcagaagcaaagcatctctactcacatgatcccagctacacgagaggccagaaataaattacgtatgattgagagagagaggaagagaggaagaaccgtgtgaatgctcgccacatcttgcacactttcctgaatgtcaaaacaaccatgcacaattggcaccctgcaaccaagctgatagaatgtgctagcatccaaatgcagtaacagtccttgcaaactctgttggtttccatagtgtacatcatgtgttggcatgggatgcaactgtccctgaaggaaatgaagatcagaaccaaggatagtttgggatatttaagaaatcatcaagatgagagtgattgtccaaacacaaccaaaagttgtgaacaacaaatattgtcccaccataccctgttgatgggtataaaaacattcgtggaaagtggaaatggattgagggcccaatttggcacagctttgatgtgataaaaaacagttgtagctgtgctgtgagaaaaaacaattgtatcaaaactgtagaaaaaagttaaatttatctaacgccactatcattgattatactaaatgctccctttaaaaaaaaaaaaaatcaatgtcacaccatattgttataacataaaaagaaaatttattataacaatattattttctacatttgcacttatatttatacaattacatatacatatacatagatacgacttctacaaacaaatattataattatgtataaactcgttttatttttttgttattatcatatatgtaaattatttttacaatactaattaatcaaaatactacaaattttaaacataacttattaatgccactaatatctctttctttagtgttattattgtcaagtatatttatacaaaataaattaaataatatatgtacttttaaaattaaaccctattttacatcgttacttctcaaataattcctttttgaaagctagccttggacactcaccttccatgacttggccaagtattcattagggacgagaactactccttgaagggttgcgttttaaaattggaattggtttcaatgtgttggcatgtgtggataaatagattccaggacataataacttcaaagcaattacctatatcggtcctcctacactcattgtggcacactttattacgaaaaaaaaagagaacggaatctgacactccttaaccaatttttcagccaattgatgttgagagaattgtcaccatactactgagcttttttccatcccaagattgtgtgatttggcaccacacaacaactgggatgtatacgccaaattctaggtttcacttggcgggaaatattgatgaaagtaatgaatcttcagtctccaacgctcaaacgggttggtgaaaatacttttggcaactaaacttgtcgtcaaaaataaaaatctttgcttggaaagtgatgcaaagtgctcttccagtggcaatagctcttagaaaaagaaagtcattacttcagcatcttgttccatgtgtacaaatgcttgggaatccattggatatgctttattcacttgccatagagcgaagtcgatttggaagcgaacaaagttcaccattgactatcgcagtgctcacaacatgtataatggtgactacttgatccacttatccactctacattccaatcagattttgaattgataatatacattatgtgggcgattttagaatagaagaaacaaggttctacatgggggagtttgaaaaag

SEQ ID NO: 191715 - DNA, 2134 bp, Cannabis indica
tatacaaatttcaatacaaatccctaatataatttggcaacctgcatttgaatgtattgtacctacaatgtcacattgattctagaactatacttttttttttgtaaaaagattatagaaaactatactagcacaaacaaaagtgaggaatattacacaatttaaatcttattcttcgtcaacttattggtttcctacataataaattaaggtagtgctattataatttatacgctttccatttttttgacaaatcatgtattaacttatatttttcactcattcaacacagttatcattaattatagaatcgaaccttaaaaactgtttttacaagtgtcaaagagttaagagtgtcacaatatatttatttgtgaaagaagtgtcactaaagtaacatatagagtatgttgtatcagtgtaatgagtggaatgcatagtagaagagaatatgattaggacttacaaggcaagttcgctttcatccaactgagtttctatctctaattcatataattgttttgaccataagatgagtcctagctagaagaaaaaagaaaataaaaacattaccactttgaacattatcatttcagatgtatagtaattcatagccaaaatagtaaaactgaagtatagtccacgcatgcatataataatggaatatttagagacactagtactagtgttatgcatgaattttaacctccgaggtttgtaaagttggatcataggataggagagactaacttgtactagaattttagaaaaatgaaaatgtacctggttgactggcaagaacaagcaggaaatcttttcctttcaatgcgaagggcaccaagaagatcagaagtcaaatttaatgaccaaatatcctgccaaaagtctgttccatttataagatatcagaaaatgaaaaggtgggagtcatagaagcaaggtatcacatgcattcatacttggccgggcaagtaaagtatgaaaatggggccaaagtcatgaaagataatgtcaaataaaaaagctctttatcaagtggctgattcttcttcttctgcttcctctttctcttttagactaattaaatatgaggtgatactaagccttttcttgaaacaagagcaagaataaaatgtacctagagtttctaatttccacaatgcagatgagttagagtggtcccccaacactaataaggtcatttacctagagtttccaagctggaaaagagctttaattacatagagtggagttgatgctactctgagatggtagtcgaaatcaaaatccttctacactttttattttaaagtttggttccaacatttccatataataagatgagaaaaaattacaactaatgtgcagaatcaaatcactaaaacttaatcaacaaaaaattagcaaaggcaagaataacaatccataaacacgaaatagagataaaatagggatgaacagagtatctaaaatcaaaaaggataaaagcaataaaacaataaaatcaacaccaagatatatactggttcaagttctatagatcgatgtctatggctctactctatttatggaacaccaccaaaaatcttcttgattgattgagcaagaacaaaatacaatatagtcgagagcaattctctattagattctctcaaagtgttcatctctcacactcttaccgaagaatcttcttcatctatagaatattcttcatacaacacccaaacccaatatttctattttctctatacctttctctctctcttcttctcaatcttcctctcttcaaaatcacctctcaaaaaactcatatgtgaatcataccccctgaaaaagataagtgttggtggtatttataggttcaggacatagatcctaaagtcggtgattgcaagtgctaagttgttaagttagttaagacttaacaaactcctcgttatagtatctccttatcaggttggtgacccacgtgtcccaggttgagtcccgactaggatcatttcgctcgttctcacgagggatttcctattccctggtttttggtcgccttatgttctcatttctgtgagaaggctctggttgatcatttggttgttcattctcagggacaccctcagtttcccaaggttgttct

SEQ ID NO: 191716 - DNA, 1248 bp, Cannabis indica
aacattttcctctgaaacttgatcgcaagaattatgtgctatggaagactatggtatctattggcatacgaggtcatcaactttatggctttcttaatggcactcgaccttgccctacaaaatttttcccaactccagctacaacaaaaggtgaacgttgtcttggagtaactatcaatccagattttaagcattggattgtaagtgaccaactattaatgggttagatagacagttcaatgacagaaagaattgcaacagaggtgatggaatgtgaatcagttgttgcattgtggaaagctctcataaatttgtatggagcacactcagagtcaaaaatggatgataatcaaactttaattcaaacaacacgcaagggctcaacctctatgaacgattacttgtagcagaaaaaggcctggtcaaatttactagcattagtaggtgaaccttatcctaaaaaccaactcatatcttatgtaaccttttccttagacattgagtatttaccaactgtaattgagtctaattttgataacaaaattgagcatcagcagaacttgagtctcaacagcaacaacaagtccactaatccccctgtttctcccaatgcaaatcaggcatacacccttaagatatacttattattgtgaggtacaattgatattacttacaaaattatcaactaatttatcccatctccatgtctatggaaatggattgggaattttctagagaaattattcatcaaacgacatacacccttcccaagaatctcaaatctcaaaatctcctcatcagaaagagtgaaagaccatcttcaccttgcgcatgaatgatcgatctatatcatgaacatctattattatattgtatcatgaataatatgtcattttacaactattattttttgaatttatgattcaattttctgggtagatattttaaatgttaacattatcacatcattcaagatactaattcaaaataatttgtaagatatatagcattgctctaattgatatttgagatgccctgcttcaagttcaactcttgatcatcttataaagctaatcattttataataaccaaaattctcgctcccactctctttgcttttttgtcaaaaatattaggccaactcttcctccaatgacaatgcttagatatatattaataattagtatttttgccttaaagggttcgacttatagattttttaatgaaaaataattaattttttttttt

SEQ ID NO: 191717 - DNA, 2993 bp, Cannabis indica
accatttttttacaaaaatactgcctaggcggttattttttagttttttacttgtagtttttttttataagtttcataccgcagtatactgtgttaagttttcactgataggtttttttagttgttttactgttgttttgagttgttctgttttgtgttctactggtgttttataaaaatacagtatttttgaaaaattttccatgtgacagtatttttgtaaaatttaacctaaattccagtatttttgtaagtttctcatatataatctataatattaaaaaaaaaatatattattcacaatctgtattttttttttttgttaggggactaaatttttaaggttagcacagtgattccaaaagaattaagatgcactgaccttaattcatagttaatgatgatcttaatacatctaatttagatgatcttatggtaatgatcttccaagagttttctaattttttcttgatggaggaatatatgagaatgaaatttctcaaatttcttggggactactaccaatatataacctcatagctaggttattaattttaagtattttcaatttagccccttaataaattaaaaatatcgtttaagatatctacaaacccctgacccataattactaaattgatcattttatttgggtcaaatttcaaatagtaatacatcaatacatatgaatctatattgagaattttaatcgaacaccatcataagcgagtattgaagagaattaatgatatttgcaggtcctttttgtggaaaggtgtagataatgcatcaggtccatgaaatattgctagaaaacagtttgtaagcctaagaaggctaatggtcttaggcatagagatattgaagaatagaacatggcaacagtgagcaagtatgtttgggatgttgcttcaaagaaagacaatattttgggttaagtggataaaatccatttacttaaaagattgtaattggtgggactacaaggccccacttaattcgagttggtattatagtgcaagttcatgtataagaagctcaaacatatctcgataatttaataaaatactaactcgggtatgtaaaaattctctctttttcacaaagacttgagtcctgaatttgagagggttttttttgggataaattggtgtggaatagacatgttgtatagaaacatagatttattggatatggaaggcttgcaactgtgtacataagaaaagctttgattgttaaacatgcaaaaagcattgtacaatgtatataataacataagcaaattattattgattggttttgagctttaaagccattgtattttttgtacagttgctttgcaagttggcctttgggttttttatttgtttttcctttgctttgtattgcttgttgataatattaatgaaactttcttaattacttacccaaaaaagaaaaaaaaaatagtgtttatcaccttataagtggggacctttaattgttttgtgtgttgtgttttgcatccaatacatagttggtgttccttatgagaaggactttgttcattgatcttatatttctaatggacgtggtttgtcatattttgaattggtttattgcaatgttttgttttggcttccctataaagttttgtcccattaaacctaattgaatgaatatttcaattccttttaaaagaatatatttattatatagagagaccaatccaaatagataaaaaaaaaacatccccaaattacgccatataccatgtaatctcttggtctccgacactcatccaatcatgattttcactctatttataattttcaaataaataatttagttattttttttagttccatgtatcgggggttatatctacaatatgaacaagttggacaagtagttagattatttatatatatggacatgattttgtctcgtaattgtacttttacgaaatttattccgtaatgtatggcggccgttagatgagagacttatttgatttgagggttgagattgatctaagggtaattagggttaaaaatagtaacgtaccctgacactcgtctaatgtaccgtaagatccatctaatataccacgaaatacattctgtaaaaatacatcacgggacaaaatcgtatccatatattatatattttatgtacattcgatcaaataaattttttgatgttaatatggttacaaaagtgtcacttacttacctttcatgtcggtggggtacactattttgactttctcttgattatttatatttctatatttggttgttaaatattttaattgaatattaataatattatatattactctcaaatatactcatgatcatttagggttaaacatatattatatattgaaatttaatcatgtcatgtcacaaattgataaaaataacataacacccacgtctctgtgtttgagagatatcatataatgatgatcgatacaattgaatatatatataaatacttttgttgatttttctcatactattaacccacaaatatattataaaaaagttaaaacctcacatcttaatgtcttatatatatagagtcaaaattctaatcagctttgttttctctctcttatgctttctaacctagctaggactagcttggaccttagtttttattttaatcttttgtagggttaaaagaaagtagatattcatcaaattaacctgtgtgatttgttttgtttaggctaaatatcattttagatcctgtattttataaaattattaattagaccttctattttgttaaatgacaaaatagaccatgtatttttaaattttacaataggcaattgaactgatttttgtctaaacaaatttaataatcatctgatctaaaaatattatgacaagactgattatattttctatatctgttcgtgttagaattatcttaaagttggttacattaaaaaataaaatagttgaaaaattgtagctcagggtacgtattttttacta

SEQ ID NO: 191718 - DNA, 1916 bp, Cannabis indica
ataaaattgtagaataagaaataatttgatgaatttacaactctttttcaatgagcaatcattttgagctaccaaaacacatgttttcaaacccaataagaaatgttactttccttgaacaaaataaaactgcacaacttgcattttatacaatgcactcactgtgctctccatacatcttatcatgtactcaccttcattctactttctaaacttcatttccacccgacttctacattcaaaaacgaaaatgaactatacaattcataattcaaataaccaaaacagcaaaatcactcaaactaattcccagtaagacaatcaaaaattcatcgcgaatacgaatctccccacacaatcaaattacattcacattttcaaaatatcaaatgtatgatttaacgtactgaaagtaagtaattaagtaacgcaatcatcaaaatatctacctgaatttcgcgcctaatcttagaaaaatcgtagaagagctttccaggcaaatgacgaaactcaccccactcagctccatcatcgccaggactcaccgaccgattctccagcacaagtagaagcggtctccgagtacatatatcacaaccacgaggaagaaaatcgcgtccgacgagcgcttcaagagcactggacttaccgctgctctgactccccacaaccgccaccagaggcagagaaatatttaacaaattactcccgaccgaagcaataacttcatggagcctattgatgatcggaacaagagacgaaccgatcgtcggaggagcttttgatcttgtattgtcttcttccaccattgacattgatcgagattctagtgagagagagcttagaagagtgtttggctatggaggtgtgatcattcacacgtgtgaactgtgatggaattcttagagaagaagaaagctaagtggtatttataggtgttgtgaggtttggattctgatcgttggatttttgatcggacggctgtgaatggaattgtgttgttttttccttttgaagaaggaggagactgagagaccacgcgccactgttgtattgacgattgtgatgacttgctattgtaaaaaacgacaatagatttttctgtcgtttatttgagaaaaggcgccaaaaaatttacctggcagttttctgtttatgcacccattgaaattatagctaaattaattttatatattcgactttagtttaaaaaaaaaaaaaaatcatataataattatactaaactaaaaaaaatatttatttagtttggataattattatatggttttttttaataaaaattatttttcaaaatatttgaatatcattaaaatttatgagtaaattaaaaattatataaattattttaatgttaaaaataatttctccaaagtctttttgggagaaagctacaaattctaaacttttttcaaaagaaaatttaaattaaaatggaacttttaattttttaattctaaaagctagaaaaaaacttattgaagctaaaccggataattttaaaaaaaaaaatactaactatttttttaaataataaataaataatatattctagtcacatgcctattttattttgaacacattttattgataatattttttaatttttaatcacggaataaaagtaaaaattttattttccaatttttttttacgaataaaaatatattttattatttttattttttaattttaaaaataaaaaataaaagtgttttctacaactatttttgttttaatttaatttaattttttttttatttaaatgagaaatgagaatttaagcaaagagaaaggaataagatcctgattatgcttatatttcataaatatacaaaaaaaaataataaaaaaaattacaaaaatacgattttataaaattttaaatatttttacct

SEQ ID NO: 191719 - DNA, 3490 bp, Cannabis indica
ccccaaaaaaaaaattaccaacggacaaaggcacagctttgtcagatagtaaaaacttttatccatttgtcgctaagtaaaaagaacacgtagtaaagtctttaaactaaaaataaattaaaaaaaaaatctatctacatgaactaaacataaaaaaaaaaaaaaaatctaccaaaatttctttaattaattgcgggtttgacttcgattatattacattaattaattaatacaagaccaagaacactaaaaaggcttctatcaaaaaagaaagaaaaaaaacactaaaagaggcaaattgcctttgcctataagaactaccctataataccaatacacaacttcgattgcaatggaagatttgattccataaaatcaaatgaatgaagaaaagtgcatcaactcacaaagactcgggacttgtcgatggtctgattcttgagggcatccgcaggtgttcattaaaccacccgcaaaccggttcttcggggtgatggacatttggttcagagcattgtcaaactcatcaatatcaaaatcttcgtgattcccttcaatctctgtattcacttccacttcttcatcgctgctatcttcttcttcgtcgttatatgtaggtctgaccatggaccagtatacgtagtttggtcggatgaagcttcatatggagaatgaagataaataatttcagaaaaccaataaaaatatgtttgaaatggaagttctaacaaaaaatatatatatacaatttagagtgaactcgtgttacttggggagcaagtatatgatatctcttatttcctatgagaaaataaaaaggaaaaaccactggattcaatcgaacaaaaggagaggatataaacctgtcacttcgttttagcaaacacgggtcaaatggaaagaacatatctagtctctccatccctccgaaagctttagagaattctgattctgattccaggtactcgtcaaaattgaatttctcagacgaggtaaacaaatcagctgcttttgattgtcttagaaactcagttacgatagaagggagacaaacctgatcaattagattgaaaaagagaatctattatcaaacacaatatatgccaagtataattttaaatttaaacttgtgtagaacaaacaaaaggctaaacagtcaagcctcggaagtaaaggatgtgaactcaaaattccttccttttcttttcttttcttgatttcctttttttcaagacaaaaggctactattattacaagaaaatttcacttcgtgcattgagattgcaacacaaaataaataggatgtaactaccaatatgccacatagatggcttcccattcaacatcacaagtttaatcgaaatttactaattttgtaagaagtaacaaattctattaaccaaaaaaaaaatctaaagggataatcgtctgaaaattaaaaaaaaaaaaaaaccatcgtgtattaataataaaaaccttgtgcaattaatcattagggtatgtttttcccgtttaatataagaaatgacataaataaagtaattaccttcaatggactcaaattatgcgacaatatcaggtttataggcacaagaagctgtgatttgaaccaaggaacacccaccaaagatctcatacgaaaacacaatacatacataatggcctgcgaagcaaaagaaaataatttagcagcataaaccagtaaacataagcattggttcacaaagtattgaagatcctgacacaatcactgttattgaattttcttgtgattacaaacatatatattaaaaaaataagaaatccattagaaaaatctttgaaaacaatgaaaaggtagaacttgtaataaagagccaatgtatatttagtcaacttagagccaatgtatgtacaaaacattttaatgcaaataaaaattaaaatcaaggccactcgtcatactttttactttttatgtttaatattttgcttgtcacttttaaaatagacgagggtcctcaactttgcaactctaacatcattgatattattaatagagtaaatctacaagtgaaaacaaaatggttttaaactgttttggcctcctttcatcatagtattaaaaccaatgtcaacataaaagtcaaaaaaggtataacactcatttggtaccatgtgttttagaggaatacatctttcataccctatattttcaatactcatttggtaccagtaacttgaaatcttacataatatgtaccctggactcaaatttgattattgtaatagtatgtgtattattaaaattttattaatcaaattgagtgtcaaatatgtaagatttcaaattgaggttaccagatgagtaccattgaaaacataggatactaaatctatatttcaataaaacacatggttatttacccaaagagagtgattcattgtctccagacaaagccatcaaagaaaacatatatctagaagcaggtataaaggtttgatgaaaagaatgctcagatgtgtacctgacatccagagtaaaaaatcctatgagcctttgggtttatttcaccttcatgcgaattgcagtaatccaagcaccattgaaccaaactgaaacaagattcgcacaccatatagtcagcaatataaagtgatattactcattattttctatcttatcttttagtttcagttgcaaccttttcaaggtttttgcaattgaagatgttgacaaaaactttccacgggacaaataactagcaagataagccacagcactcatcctgacaaaaaaaaatatacatgaattcagaatcgaactgttcttccctatataatataaatatattttaacaaccacttgctgataaaatcaagtgaaatgatgacaaataccacaaactgatatgcatactgcttctcatatttcataaacggtggattaattgaatatcataaatcttttatattaattgaataataataaatgtttaagattgagattattagaagttgtgggaattaaaagtgaaatatttattttcattatattggctttggagaatgaatatgtgcacataacaaaaattaaaaaaaaaaaatagaattttttaaacttaaaataattcgaatctgatttatcgcttttcttttactttttttttttgtaatgctttatattattttcccattgttcaaaagccatgttgccaaacaaaaaaaaattggggcaagtgttataaagaaaagctatgttcatatgtcaagctagccaactgttacaatcttaggacggaatgtaacataaagggggatttttcaatagtttccatagttcaggggtatttcatacaagtaaaaaaatcagaaagcaagagtcaatcagtttcataattcaagggagaaaaaccgatttatcctttaaataatattccacaaaactaacagccctataaaataaatcaaatacaatatagtatcaaagtaaataaaggcaccaactagc

SEQ ID NO: 191720 - DNA, 1371 bp, Cannabis indica
aaaaaaaaaaaaaagaactaaccagaacccacagaagggcccgtaaagctcatattatcccccaagaaaaaatagcactaaccaaaaagccgactgcactatctgagaagagtacagatcctgcaacaaaaacaacaacaaagtgcaaatgtagatttgttatctaaacaaacttttggaccaatcagagttcttgtaaaagaaggagttggttgtttaagcaacccagaaaagctaggagaccctctctagattaacccaacttgtgacaatagggagatgagcagagaaagatgcaaatatgtttagatgacatctctatttggggagttgggtaagtgaatagttcgttgttgatgcaaggaaatatgaaaatcaatttccacaatggctgttttggacagttggcaaacaaatacagcgaggataaaattttactcaaccaagatcacatttcccgcattctcttactacttctaaaaggaaacccaaaatgtaagtaatccaacaaagaacatacactaaatatgagaacaaaaaaacatccctttgggatttctctaacatgataacaccaagtccagacagtgttaaaagaaaatattgcaaagattattctttttttagtgtcgtgtaatggtattttacaatcaagttaatagcttcaacgtctagttcgaaacctctcctttttttcacatctccctcaccactaagctagccttactgactttattgtaaagattattcagttgggctggtaagaacattatccaatatacaaaaaaaaaaaaaaaaaaaaaaaaaaaaaaacccaaaataagaattacagcggcaaaatcccaaccctcgacgaaaaatccacagtattctctaccatctcacataattcacaaaacataccattaataataagaatacaaccaaactcattgaaaatcaaaaagcgacgtttctttctattccccttcacaaatttaggtccttgaataacaaaataagcaaaaaaaaaaaaaacaatgaaatcttaacgaaatcgaaacgttgtacttaagtagtaaagatgaataggaaaggggaaagttgaaacctggaattggagtcgagaggaagaaagatgtagagaaggccaaccccaaccccaacccaaacacaaccaaaaggttccctctattgtcgttgagttcacagttgttggaaatagaacagagcagaccttgtaaagttataagtttgtcgttttgtactgtttttgtttgttctgttcaccattcaaaagctgcatcacggcccacccagaacttatccattccaatgggcccttagatatccaaataagtacaactccaatctaaccatcttaaaaaaaaa

SEQ ID NO: 191721 - DNA, 785 bp, Cannabis indica
attatattatgaaatcaatgatctatttatgtatgtttcgtcatcattgtttggtgaaagaagtaatttgtttaaaggaactagccagggcaattatttacatatgcttaattatccacgaattgggtaattttgacaaagggttctatggatttgttagtttgttaatagagaaggaaaaagagcaggtgagcttaatcacttccaaagatgatggattagatagcagttgtagataaacaaagttagtagcaagcttttctaacccaccaaggtaaccttatataaaggagattggcctgaaaaatagtagcatagatttgtgaaatggcagagatagaatggggacagacttcagggaagaaggtaaggcaaccaccttcagttccatttctatgggaagtaaggccagggatgcctaaaaaggactggaaaccagaggttacttcacctacaccagtttccactcctccactcaagctcattgcctcagttcctttccagtgggaagaaaagccagggacaccactaccttctttttcacagccaccaaaagaatcactaactgcactttttccattaccaccaacatatggttacttctccaaggatgatgaaattgatgacaatgacaaagattacagcagcagtgataataatgatggagaatatgacaatcgaagtctgtttaaaatggagcttgaaacatttggttcggaaacagatgaatcatatcattctccttctgtcctagcaaactgcctggtgtcggctgcgacttctgc

SEQ ID NO: 191722 - DNA, 1188 bp, Cannabis indica
aaggtaatatattttattcactaatattttgatgccttaaatatgtggtatttttgataattattgagtataattgtcgtattatataatctttgattaatattgtagtgctcaattaatttttaacaattgataccaagactttggtcatctgatttactgctaaaacttattttttaactttatatttttacccatatattttgaatactcacggttggttttgggtaaaaccattttatttttatttttttagattttgcatttttatatgaaatttaaactttgaacattcttaggttgttggaataatttcattacaagtgttttaagtatgttaactgagaaattttttattttttgacaaacccataaatggtcatgtaatatatttttgagtttccagagtttctaggctaaaatgggtaccgaaaagggattgtgtacgaaaaatggtgaaattcctctcaaatggcgtcgaaaatggagcactggaggtcgtgttcagtcgattgaaaaatagggttcgaagtcgaatcgcatgacccgtgcgcccaactgaaagtttgggatgacctcaaacaacttcgtttctctctctattagaccaaacaacgtcttttttattgaaggggctgcattttttgtttctggcaaacgacatgtcgtttttagaaaacgacatgtcttatgattatcaagaaaaaaatattaaaattttaaaggtgcgtgcgtggcccaaattggaccaacttttcaatattttttttgccattttaattttttaaattaattgtgtgattatatgttgaatttagttaatttaaattattaattgacacatgattgcatataattagtttttctagcaaattttattttgtacattttattgaatgaaaacataatagtattgatatcataattatgttagtgaataagaaattgagtgaaaagatttctctctcatctttccctctctttcggtgatctcaccggagctatggaaaaaggaacgaaagttgctaggaagactaagccaaaagcaaagaaaaattgcctaacatcttcggatagagtcattaagaccagatctatggacgtaattttaggggtgaaggaattagagatactggatgcgaaggaaatagaggatcacaactgttaacccagattttcgttaactaa

SEQ ID NO: 191723 - DNA, 5105 bp, Cannabis indica
caattacagggaagagtacagctggatattcaagagaattctgttgagagaaaataggaaatacagttaggaattaactgtcacaactgacttaacaaagggtacatgtgcacagctggaactaacaactaaagatcttaatacccccccctcaagatggactgtatatatcgtatacagccattttgccaatatgagaagctaaatgttcgaagagagggtttagtaagagcatcagccagttgattgttgctgttgacatgaaccagacgtatcttggaatcacggattttgtcacggacgaaatgacaatccagctcgatgtgttttgttcgttcgtgaaatgtggggttatttgcgatgtggatagcggactggttgtcacagtagatgaaggcagggcttgtttgaggtatgtggaagtcgtggaggagatattgaagccaagttagttcgctgctggtggctgcaagtgcacggtattcagcttcagctgagctgcgagagatggtaggttgcttctttgtgcgccaggaaattagacagtctccaagaaagacacaaaaacctgtggtggatcttcgggtagtggggcaggcagcccaatctgaatcagaaaaagctcgaagatgaatagaggattgagtggagtagagaagtccttggccggggctacctttgaggtatctaagtaaatgatgagcggcttgtagatgtgatgttcttggagtggtcatgaattgacttagggtgttaacagcatatgttatatcgggccgtgaaagggttagatataacaattttccaaccaattgacgatattgagaggggttgtcgagaagatttccttgttcgttatcaagtttaatcttgggatccataggcgtcttggttggcttgctgcctatgaatccattttcttcaagtaatgtgatggtgtatttcctttgagataaaaccagtccttccttggcacgggcaatttcaaagccaaggaaatattttagaggtcctagagtcttcaaagaaaatctgctgtggagactttcttgtagctggtgtagaagggagaggtttggtccagctaagatgatgtcgtctacatagactaagagcacaatgaaggagtcattttcacctctagtgaacaaagtataatctgctttggattgaacaaaaccttcttgaaaaagagcatctgaaagtttgcgataccattgtcgtgaagattgcttcaacccgtatatggatttgttgagtttgcagacgagatgtgatcctttgtctatagaatcgggtaaagtgaggccatttggaatttccatataaacttcctcattgagatccccattgagaaaagcattgtcgacatctatttgcaaaatgttccactgtcttatagtagcgatggcgagcaagagcttaaaagtcaccatttttgccactggtgagaaagtgtcaaaaaaatccaaaccttcttgctgtgtgtatccttgagcgaccaaacgcgctttgcatcgttccacagatccgtcactattatatttaatcttatagacccatcgacagcctatggctcttttgtttcgaggaagttgaacataggtccatgttttgttcttgagaagggcgaacagttctcgctgcatagcctgattccaaactcgatattgcgtggcctgtttgtagttattaggctcgaaatgggctgtcaaagcaagaataaaagttttgtaagcaggagataaatgttcataggataaatgtttatctaaggaatgtggtgtagagcttttgtcctgaatgagggagtggcattcataatctttgagatatggaggaggccgtgtaattcttcggtgcgccttaattcagtgactggtgcatcttgttgtagagcagaatgtgagttttctgtattgaagtctgtagtagtttctgcaggaaggtcagtgtctccaggagggtcatgttgtatcgtttcagttgcttctggagggtcattttggtttgtatcatggtgttctgcattattgttatctgagaaaggaaagtcttcaacattggtgttagtaacatcattagatggaaaaacaaagttagaaaaaggatcagaatatggcttactgttatttagttttcgaaatggaaaaatattctcatggaaaacaacatttcttgatataaaaaactgtttgttatttatatcatataacctgtatccttttattccttgcgggtatcccatgaagacacatgttcgagttcttggttcaaacttagttctttgagcagtaagtgtggaagcaaaaactagacacccaaagttcctgagatgttcatatttaggagttttgtcaaacaatagttcataaggagaacaattatttagattaggtgttggtgttcgatttataagataagcactagtcgtgacacattcactccaaaatttaatgggtaaattagcttgaaacaataatgctcgggcaacattcaaaagatgttggtgttttctttctgcgacagcattttgttcaggagtttcgacacatgtgaaatcatgtaagatgccatgtttggcaaacaaatccttaaaaaccaactcaggagcgttatccgacctgaaacacttaaagatgcaattaaattgagtctgaatatacgatagaaattgaggaatgataaaagagacatcagatttttgcttcattaagtaaagccaagtaaatctagttttatcatccacaagagtaaggaaatatctataaccagaataggagggaatatgatagggcccccaaacatcacagtgaatcacatcgaatttattttcagcaaagttgttatttttaacaaaaggaagcttcttttgtttagctttaggacaaacgtaacagggttcatctttatgaacatttttcatattacattggattttattacacagaagagcaagtcttttactcgatggatgacccattctggtgtgccaaagatcagcagagacaacacagcagtgggctggagtaattgtcctttccagaatgtacagtccattgtgttctttacctcttccaatcactctcttgttgagagtttcctgaatataaaagtcattagtgctaaattttatatcaacaaggttgtcagtagaaatacaacttactgatataatattgaatttaaagttgggaacaaatagaacattcttaagtatgatatctttggaaagttcaatattgccactttgctgcaccactaaagaatcattattaggcaaaataagtttagtagcatgagtggtacatatgaattgaaacaatttagcattattacatatatgtctagttgcacccgaatcaactatccgggaatcactcatgatatcgttagaattgtaagtaagggccatacctgtgttacctgtggaagtgcttgcttcagaagtggtaacattttgctgctggttagccaatagattgaggagttgttgatattgagctgcattcaattgagggagaagagtgtgattttcttcagtattgctgctgccttcatgggaggtctggacctgattggccgtggcttctttttgcttattttgcttgttgaatcctggtggataaccatggatcttgtagcacctttcaatggtgtggccgtgaatattgcaatgagtacagaacggccttcctttcttgggaggataagtcttgcttccttgattgtcacttttattttgaacatttttatccttttgaaaggcaaatgccataccagaattgggatcattggtagcagcaagattccctttctggttttcctcttgagataccaagtgaaaaacccgattaatctcaggaagaggctccattaataggatgctactacgaacttgagtataggaatcagttaatcccattaagaaggatattatatattccatgtgatggaattcttgaagctttttcattcctccacatgtgcaaccattgcaagtgcatgtgggtttgtagttagatatttcttcccaaatggatttcaatttggtgaaatacattcctacagattgattgtcttgcttaaggttcattaaacctttcttaagattgtatatgtgaggtccgttcctctggtggaatcgaactttcagatcagcccatatagtggctgcggattcatcataaagaatgctggaggatatctcctttgaaacagagttcaaaatccaagatataacaatattgttgttacgaatccaggcgttgtataatatttgatcagtaacagggggttttggtatagatccatcaagaaaaccaagtttgtttttgacagaaattgataattgcatagctctactccatgaaacgtaattatcctgtccagtaagaagttgagagacaaggatattacctggattgtccccgtgatgtaaaaaataaggattggctggatcttccatgggattccttaagttgttcatctggagaatttgatttccttgttgacttgaagcttgaggcgtttcaagaattccagtggattgattatccgcttcggaatgtgttgaggtttgatcgtccatagccatggcgaaaacgaaaggagcaagaaaacagcgaagtgcagagaaaagaaaacagagtatcggatagacgcacgatactcgacgccggagaagaagaccggagaacaaaaaaaatcaggatcgatcggggaaagcacctctttcccgctctgataccataatgcggaaatggaaaagaatgaaaagaaaagctattatcttcattgaatgtaaaatgttacagagaagagtttatatatcaattacagggaagagtacagctggatattcaagagaattctgttgagagaaaataggaaatacagttaggaattaactgtcacaactgacttaacaaagggtacatgtgcacagctggaactaacaactaaagatcttaatattattttatttgtaatacaaatattaaaatattatattttaaattatatttggataacattagtttcctaacttatatatatttaaatttaaatttatgacagtaatttttgtttttcctttttttttt

SEQ ID NO: 191724 - DNA, 5149 bp, Cannabis indica
atttattattatttattttttcactcatataaataccttcatcgaaaaccagttccccaatctcaatgtcatcaggttattcaaccttcactcttcttcttcttcatcttcttcttcttcagctctgatccttatcttctttccctaagttgcagttcggagattaatggctactttatctagctcttcttcttctctatggaaaaacggtctttctcttcgctccactcaatctacctcaatcgttcgctctcctgctttgcttggatatagaagaaccttccgcagaagcttcgtcgtcgcatcttccagtttcgataacgataatcgagagtaagatatatatatagattgagtttttgaattggtgatttttcttttgtgtgtttgaattttagtgttttgtttcaggtttgttatcgttggtggaggaaatgctgctggttatgctgctaggactttcgtcgaacacggcatggccgatggtcgactctgtattgtctccaaagaggttttggaatttttttttctttcttttcaatccaattttagcaatgaaaatgcaaattttttgatttgtttattgaattattaggcgtatgcaccttatgagcgtcctgcattgacaaaagcttacttgtttcctctagacaagaagccagctcgtttacctgtaagatttttgtgatttcattactttacatttttattatagtgagttacaaatgtgtacatttgcaattgtcatttgtaattgtgtgttgtttagtgtttacactgttgctgtttgttattctgtgtagtgttttagttaatgtattagtatgattgtaggggtttcatacatgtgttggatctggtggggaaagacagacacctgagtggtatcaggagaaaggaattgaggtaatttgttgttgtgctgaaatgttttcttttctttctctgaggtctaaataagctttcagtttgtaattaccagagaaaggttacactttttcaatgcttggtgaaaaatgaaaacataactgaaaatgaagatggaaacttttagtattaaataagaatccgtgttgtaaaattgcctggctggagtcgtatcattttcttaatcgaataatataattgtatagatagatcatagtgcatcctgaaaagcttatcttgttctcagtcaatatgttttctatcattcctggtggatatttttttttttttggatagagttttgtagagaacgagatgaaaagatcaaggtatagattagattgtaatgaaccagaaaagttagaatggacaaccctaggaattcgagtgcctggactctccctgagctaaagctctacaaaattctctagacagtttagtcctcaaattcagctctcatgttctattccttctcagccataaccacaaactaccctccagacctctacacaatgtaacattagcaataataacatagcatgaaatcaacaaaaccgcaactcagctaaaagtcaaaaacaaaatacaacagcatcccaatctttgtccaatatggcagattcaccatgccgctctcctgttatcctaaatatgcctaacgtaagtaaatctgatgagatgcttatcaaaattgtcactaaattatattgaagtgatgtcaaattttattcagtctttttggtggtagaaaatagaaatgctgaacttgttgctgcttattcaatctcatttctagactatatataatgaaccagtgacaagcattgatatagaaaaacgtatgtaaatttgatgagaggcttatccaaattgtcactaaattaatggaagtgatgtcaaattttacagtctttttggtggttgaattgctaaaatttttgctgttttgtcaatctcgtttctagacgatctataatgaaccagtgacaagcattgatatagaaaagcataccttaacaacaaattctggaaagctgctcaagtatggatctctaatagttgccacagggtgtacagcttcaaggtgcgctttatttatctttggaaaataagatttcatattagatgatcttatctatcaactattgtgatttggttctggattagtgtcaacacactactatatgcatccatattaaaagctgtagccaatgttctttcttgactacaaatttacaggtttccagaaaaaattggaggaaacctgcctggtgttcactatatccgcgatgttgcagatgctgatgcgcttatatcatctttggtaaatcatttttaattatgtattatctgttgttttctactatgtgttagaaatttccatgctatggaatgaatagagaagatatcccccctccttccattaataagcaaactgggaatatgatactgaatttttacctgcattttctttgttcgggggaatcgaattcttttacctgcatagttacttaggggtgttttgagcttaatatgatctggtacataaaattaaagttcaaattattaataaacttgttgccgtaggactattgattttaaaagagtgtacatgctatattgttgaaattttgcatcttgttgattttgatactatttgggtgcttgaaacttttcagtagaaatttgtaataacagtgcctttgttttagtaaaccaaacttgagcttgagataatatctttgcgatattttttgcccatgtttcaaaagctttgctgcaaacaccaaacttacaaattctattcctttattgataaattatttggcctccaactccacaaacacaaacaacagaaagattaatgctgttttgttgcatgagcaatttgtactacaattcctttcagaatgtgggcttgttatgttaatcactggataactatatggaacttttgtgcttagcttttcctttcatacttttccgtttccttttctcccttttctaggagaaggcaaagaaggtagttattgttggtggtggttacattggtatggaagttgctgcagcagccgttgcttggaaacttgatactacggtatgaagaatcattccttcaattggctattattgactacataaggctagcacaacgagatatatagatatatttacgtaatgttatatctgaatcccgtattgctaccttagtcgttttgacatgttctattgctgactatgtgctggttcccttttttgttattaattcaaattccggcaaagtaggaagatatacagattattaaataaataaaacgggcatcaatattacctacaattgtattgcaacatacatatagtatgtaacagaacatcaatacttactattcattatttcagaaataaagaataaagtataattattttctcttgaaaaatctgaacaaacatttatcctttttttttcccttggaaaaaagattgtatttccagagaatcatctgttgcaaagactatttactccttcactcgctcagagatatgaagaactttacaaagaaaatggtgttaaattcttgaaggtgctctctctctctctctctctctctctatatatatatatataaaaatgtatatatataaatccttgtatataatgaaaaccccaaagaagatcctttattccttaattgttttgtagggtgccatgattaaaaacttggaagcaggtgctgatgggagtgtagctgctattaaacttgaggatgggtctacaattgaagcagacactgtaattttttacacttaaaaaatcgctttatcatgttgcaccaattttgtatacttacatattcaaacatgttttctccctttttctttttgtgtgcaggtgattataggcatcggagcaaaacctgctgtcggcccctttgaaagtgtgggtttgaataccactgttggtggcatacaggtacttgttatactaatggcactaattatttcagcattctgcatataaattcttgaaaagagcatctaagtacacactttgagtttattcctctatttacttaattctggtagctgacattacttatgtatatactttgagtttattcctctatttacttacaattaaaattacatctgcgctttcaaaacccaggttgatggtcagtttagaaccaatatacccggaatctttgcagttggagatgtagcagcattcccattgaaggcatgtttttcttcatttgacaaaaagatcactttacttgctctgaattctgtaatgaaacgtggtttaacaattggcagttgtatgatcgtattgcaagagttgaacatgtagaccatgctcgtcgatcagcacaacactgtgttaagggattgttgagtgcacaaactcacaagtaaattggactaatcttttttataaattatttcattgaatgtcaagcacaattatattggtgttgacttgttttactgtatgattttcagctacgactatcttccctacttctactcgagggtatttgagtacgaaggaagttccaggaaagtttggtggcaatttttcggggacaatggtaataatctgaaactcatactttttcattttccttttcctcttcagttgtttatcatcttcttaaaaccaccataaccaaaccttacactatactcattctctaacagttggagaagcaattgaagttggaaactttgatccaaagatcgcgacattctggatagaatctggtaccaaagtccatcaaaattactatctttctctacacataagtatgtatatatgcaattatgcatcatcatcttcggttcaaatctaacacaacatttaattcgctacaggtaaattgaaaggtgttcttctagagagcggaagccctgaggtacttctaattactcacataccgaatgacttccaaatgtactcttactattcctttgatgttactacatgaaaagaaagctgatattgatttgtttcgaatgaaggaatttcaacttcttcccgaactggcaaggagccagcccatagttgataaagacaagcttgagaatgcatcgtcggtagaggaggccttagatattgctcggtcatctttacaggttaaagcttcagtctagggacccgatgatggagccagcttttaatgtaatgctaatcacatccctatctcacttaccttttttt

SEQ ID NO: 191725 - DNA, 2059 bp, Cannabis indica
ttaaactgacactaaagaccactcgaactctttaatcctagtttataactgacacctataatgacttttagtgtcggttagtagaccgatactaaaaatataaccgagaccaaaacaaatttttttaaaaaatatacatacagaatgcgtgtctcgatttataactaacacggtctcgattataaatcaagattattaagctaagtaaagaaaaaagcacaaaaaaaatcctactaaatatacatattattctaaatcctacatttcaaaccatctctctctttttcttttgcctcacccaatctctctctcccccttctcttcttcatgcggcggtgccctcctccatccacctccgttgggttctctctctatttctcttgataacaaatacggctctctctctctctcagagtaacattctctctttctctctctttctctctccattctttgtagattgggacagagtttcgttggatttttttggttggaatgtttgttttggtggtcgaggtgagcgacgatgatggtggtcgtggtctggttgtcgagcagcggtgatagtggtcgcggtctggttgtggtcaagtggcggtgatggtgatgtggtcgtggtgactctaggataggaatgagaaaaacaaaaaaatttaagattttttatttaattattttatttgttttaaataaaattttatgtaatatatctatttattgtaatctatatattatattttatatttattagtatttgttgaaatgtacattatataatatgtatgtattgtaatgtaaattatgtaatatataatttgttgtgtaataataatttttaagtgtattattaaataaattaaaataataataaaattcaaatataatactcaatattctaattctataatttcaattattacaaaacattcttacaaaaaaaaaaaaaacttaagagaaaataaactaaaattatatatgaatttatttgttgaatgtaacttaaaaatttgggctggtggttcgatttagatgtaggactttggtagggtggtggtggcgtgaggaggggacgacggtggggtagtggagttgaagaagaagaagaagaagaagaaggaaaaatgaggaaaaagctttcgggcttaagtttaattcagaaacttttaccggcgcaatttgatgcaccagtaaaagtatccacaggtgttggggagaagggaataaagccctaaatattggaacacactgttttaattaaagttttgccagcgcaaatacaaaactcttccctcttaccaaaaaagttaggcggaaatattcccacctaaatataataccttttgccgacgcaaatatgcgctaataaaagtgaccaaagtattgaaatgagctcgcgtcaaatggcagttaaaatttttagtttcgtgaattgaatcggcataggatacttttgtcgacgcaatagtactgcaccggcaaaagtcttatgtgaatgctttggcctttcctttccttgggcctctttatgccgacgatttttgctagtgtatttggctaaatgtgccgacaaaaaggacgtttcttataaagataatagttctattatttttttttgtatgattgtttgtaaaatattattaataaattacataaaaagaattgaaactataaaaaaatatatataatttagtaattagctgattaattgtaaataaaatgtggaaaattagaacacgaactcgagctcatgctatttaggaaaaacgagtttagcccgaataaagcacaacaataaaatattaggattatggaccataccgattctctttaaaaatattagcacgacctattttttatataacacaacacgagacaatacatattttaaaatgtacaaaagaaaaatataagctaggccagcccacaccaacttatttacatacaacactagttcttgccacaaagttacaaccttccacataactttttttgttttttgcttcttagggataatgttttcgatatttgtcaaatagtgacaaatacctatatccatggt

SEQ ID NO: 191726 - DNA, 2232 bp, Cannabis indica
atcttatctatcatcaacttaattattttatgtcttaaacttaaagtactattaatagtaaaagccgaagtgaaatatcctaaaaaaaaaaaactcgtgtttaattagctctgaggttttttcacttcggttttcagggtgacatgtttaacacgtttataacatgtttaagggtgccattcatctttttaaataatttttttttaatataattataactatgtatatatattaattcagtggataggttttgtcctctcaacaacatcatctgctttgagtttggcaagttagcatacaagacattcttagttgttgtgggacttggtaagtaatacataattatatcaatacatatgacttaattaatgttaattatcatataatattaacatataataattatatatatgcaatggaaggatataggaggatagagaaattgagagaatataagttgaaacatagacttgcggttgaagtattagagaaagtattggaatgtacaacaatgtatgaatttgactctggcaacaccccaccagatcacaaccctaataatcatcatattcatgaggatgaggatctactacacaaaattggtgaaaaaggtaacaaaatatttagattgaaaagaaaaaacttattttactatatatatatactaaaaaatattttatttttagtcacaacaaaaacttgtaactaaaagtaaaaaaattagtgacttattatttgtatgttttagtcttaaataaaaattataatttttttaatcacaaaaaatttatattctaaccaagagattgtcactatatattatcatatagaatttaaaataggtgaagagaatgattcagcattactagttgctgctaagaatgggataatggaaatagttgagaaaatcttgcaacactttccggtggcgattcatgatacaaacaaagataagaagaacatatttttgttagcagtagagaatcgacgattgaatgtgctcaagttcttagcacaagaagaagagatctacacccgtaagcttttgtttcgaaaagtagataaggattggaattgtgccttacatttggcatctattagaaaccctaggccttggccaattcctggtgatgcacttcaaatgcaatgggagctcaattggtataaggtattataattataattaatatagtcatcttctccacttattaatatacatatatatacatgtaattatattttattattattatttgatgtagtatgttgaaaccttcatgccatccaacttctatctacgcaccaacatgaagaaccaaaccccacaagaagtcttcaccaaaaaccataaaatgcttgtgaaatccggaggtcagtggctaacgagcactgcaacggcttgctccgtcattgcagtgctcattgcaacagttgcattcgcaacctcaactgtaatccctggtgggaccaaggaaagcaatggcaaaccaaaactcgaaaattactttgcttttgatatgtttgctattttgtcactagttgcattgtgcttttccatcactgccttagtcatgttcctctccatcctcacatctcgatatgaagaaaatgatttcgcaaaagatttaccgacgaagctttttctagggttaacatcgttgtttgtgtcaatagcttccataattggctctttttgcgcagctcacttcttcgtacttgaagacaatcttagtaagcatgcaatctaccctgtgtacgccgtgacatgtttgcccataaccattttcgcctttgtccaatttcccttatatgttgatcttatacatgccacttttacgaatgttttcgagtagttttttatattatttattaaataattgtacgccaatacataataacaggaaagtatgttctatgattcaatattgtatttataaattggtcaattaaagaattgttaaatgaaccttattttctctgcggtactcttctttgattgatattaatatttaattgtacaccaatacatatagtggtcgttttgttcttgttattgccgtttaaagtctaaaatcaattagatttaagattgaactaagaaagagtgataatattgttttgttggtgtaggggaaagcaataaataacctacaaattaaatcaatatgacaattcttgtgtctcataatctttctcaacctttcctttccttttatattttcttttcttttc

SEQ ID NO: 191727 - DNA, 3097 bp, Cannabis indica
ctgtgttttgttgctcagtagaagagcatgcattagttttttattgtgacatttacatgaaattgttgtaaactgtgtgtggggaatgaaagaaagagccccaattgagttttctacttgaaacatgtaatttttatgcagccctacatacagagagatgatggaaactttgtctggttgtttgagattttcaggttattctctctgttttgtatggtgttctacattggcattttaggtcatacagggatacgctatagctattatgcaaattttctttttttttttttttttttactttttccctttctttttagttagttacctgtgtcataattagtttataatgtttagttctaagatttagaaattgtgtatgtgtagaccttattccgttctcttaaacgttaataagaatatgaaagtgtggtaataattataagagattttgttctaatccggatggttccaagattttgctctcaataagggccagggccaaaggaactttcataattttctgattttggttcaatgggattacaacctacagaaaaaaaaatcatgtttccttcacgtgaatcaaaataagcaatacttaattgaataattactaactaataacctgtttggagaagttttgaaccaaaatggacaatacacctttcaatagctaccaactaataacatgtttagagaagttgttaacgataatggttttttcatttgcttctcttcagcattgttattagtatttgacaggtttctgttaaagctaacagagttttctaaaagtaccttgtcaagccacaagaaattctgatagataggcatttattatgtaggtaagatatgtgtcattgtgagagctttgctttgtgcatcaaaaatggctgtgagcaagatgatttttttttgatggaataactttctttggtattaattcatttggtttaatctctagcaacagttcatttaatctttatcttggcctctttgttcctcttgttagaataaaatcagttaattatggttcactcaatcaaagtaaattaagacatggggtcttcacttcacgggttcgtgattcacgtagtcacgttttttttacgttaacaatttgcttgacagttactagttaatacttaatacgtgaacattatgtattaaaatatctatgttttgttttgcaaaaagaaaaagaatctgtcatattctcttgttctgattgtgcttgctgataatgttttacggttttgttaatttatttgtacacttctgattcttattttgcagaaaatgcctaaagtcaaaacaaaccgtgtcaattacccagaagggtgggaattgattgaacctactctcagtgagctacaagccaagatgagagaaggtacattcttaattgtatgtacttaattactttgttttgtttaaactttggtgaataaaaaactttggagtaagctcacattttgtgtattttgcactgggcagctgagaatgatcctcatgacggaaagagaaaatgtgaggctttgtggcctatattcaaaatagcgcaccagaaaagccgctacatttatgacctttaccatcggcgacaggagatatctaaagaattgtttgaattctgccttgaccaaggttatgctgaccgaaacctcatcgcgaagtggaagaaggtttgtctactgtatacattatttgaagattaaactgtttgcacttgctaagatcctaactggtaattatttaaagataactgttaatcatagagtagactacatatatatatatatgtatattaattagactatatatatgtatattaattattaaaacagtgtagggagagcaatgcagggaaaaagatcaagatacgtaagttgaatacttgattacactaagaatagaggcatggaaaacatatacacacaactctcgaatggatggttgaattgattggaaaattattaatcattaaaactttagaagtctaagtacatcaaattaaacctcgattacattaaatcttagtctaagtacataaaacaaagtttgtagtacataacgagatgtattttattttcttgcaaaaagatgataacttctattgcctatgactgcctctccttacttttgtgtttaaccgtagatgacatccttatctttgcatgagaaagtgtctagaggacaaaatgtagaacactgtaacttctgaattcttattatgagttcacatgagctgtgtcaattttatcagagtagggtagagaaagagacattgcgatgtagttttttttttctttttttttttgtgtttgtgtgaagattttataacaacgctaatcgaatttcatgggtttttggctataaattagaacttgtttgcctttttcttatttttgatttcaaaacttgatcatctttctctttgtaatgtcaaaactgtctgcatttcctttatttttttttttaaaatgcaggcaggttttgaagccggtttctcttctttggattaactagctcacatattaacttcaatggtttttgttgaattgcagcctggttatgaacgcctctgctgcttaaggtgcatgcagcctcgagatcataactttgcgactacgtgtgtttgtcgagtgccgaaacacctgagagaggagaaagtgatcgaatgcgtgcattgtggttgtaagggatgcgccagtggagattgatttgatcagcttcttcggactgttttatatatgcctcgatttcaatatctcgcaataggaatgaaaatttctaaagggtgaactccccgaaatagagaaggggattcatttgtgtagattgtggctaagatagtaggcactggtggaagaaatataatttttattttctaagcaatcgacatctgaaaaaagcatgtagcaaaaagacacttagtaaagtttcagggatcagttggtttatgcatatattgagataacatattaataataaatgcaaaatcaggtcttgtagatgaactgaaaatatgaaggttcccaacaatggttccatattctcactacaatatatccattctatataaaatgtagttata

SEQ ID NO: 191728 - DNA, 2629 bp, Cannabis indica
cacaaaatctaaaaatgtattaactcttatttttatcacttacaccctgtgtattggcttcctctgattaagaggtacttcgtcgttagcctctgtatattaatttcatctaactcggggtcttaagctatgtcaatatgcccatctttgggtgattggaaatgctaatttttcatatcaatagttgagaatactaaaaaaaaaaaaaaacagactatttgaagagtttttaaattcaatgatttaaaaacattaaaaaaacataaaattgttgtttttatttttagtctaaagctcaaaatcatagtcacaatttgttttcaaaaacaccctgtcaaattacctatccaagtatacttatatggaccctcctttagagttttcaaaaatataaaattgttttcaaatctaaccaatcaagctcgaagcttcttctccattcataatggtagcagtcagccaaatatcagtaaatattcacttaccattatggtgaggaagagatctcttctgttttcaaataagtttccaactttgcctacattcataatgatttctaagcccatgtagatccaaagcagtgacatagctgtcagataattcacagtgttatgttaagtaacacaattgcttctagaagaagagcttctacaaccagagttcttacagtactgttgtttttccccagcttcgttctttagacagatagaacacttatctgtagttttggactattacacaatgcttagtggcatcatttacaaagtcttggaatactgcaatgaacaccttacagtagtaaaattcttgataccaaatcaaaatcaaacaaagagaaaaaaaattatacaacagtgttcatttgtttacaaagtgacccaagaacaattagtaccttgacaccagtcagagcttatttaaaaagggtcacaggagtaaagaataaataaataaataaaaagatacatacatcaacgaaaataaataaataaaaactcatacttggaacaggtcattcttgtagcaaaaatcccattctgaatctgccgaagcaagcaagccccctccatcagtgcttatggattcagcacacgaatatgataacagaggagttttagaattgaagtagtcttgccctttttcatctattctttgttcagtatccaaaatttcagcagaccaacaatcagatttatctgaacattgattgtccatcatatttgcattgatatccaaacatccgccagataataattggtcctgactgcaaccattgacatcttcttcttcatctgaaagacatctgcacaatcaaattcatccatctcatgtatctggctcattaatccatctctccatgatatcctcatctgggattgtgaaacattctccagtgtagaacatgagttccaagaggcctgatcatcaagtatttgcttgaactgattaaaataaacagagctgcaagatgtactaacagaatcaaactgaaaactgaaatcaatgctgtccctatttggttcagtgttgttgggagacaagcttgtcttccgaagagactcaaccacagaattgagttcataatcaaatttacttttcatatgaccatccgtgcttaattgaattaagtcggaaaatctgtgcgagttcaaatccgatctcggggtaagtataacatttccacttcctagtgaatccatagagaatggagaattttcgccatcaaaataatatgggcattttctttcttcattcaaggtggaattcgcataatcatgcgtggtaagtggagaatgatgattcaagggctccagtaattctcgaaactcagctattccaccaggagagtttgtagaaatattcttcctgctatgatgaacaaatgctgtattataaacatctggatataactcctgactacttgagggcaaaaatggacaatggagactaatagaccctgaaggacttttagatcgacaagaacctatatccttcttgctcttatcctcctcactacatggtgataagagccaatgcattgaagcttcagaaggcaaagggatcaaaggagcatcagagtctgtacaaaccctctggacattttcttcttcatcatcatcataatcaaaactacctaaagctttacctttaccaaagcctgaatcgttctctccaacagcgagaagccctctaggccggcactttctcttatctgtgatcccagaaacaacatgaccagctccataacaagctggtgtatttgttgaaaccacagacgacgagccacattgtatttcgggagacacagaggcctgaataggaggagttttgcttttttctttactagaattcacttccgtagacatctcaactctacaatctgaacgagacccagatgctatcttattcaatggcgtcaaagtttcatcgttaggacatggttcaagttcaaccaggccctttacaactgacccagactccacttcattggcagaaactccacttgagttcgaaattgagcaagttctgggttgttgccctgctgtggatctaggtttcttcgtagactgccattggtagagacaagaggagttattcttccgaacttttgtggaaatggggttttggg

SEQ ID NO: 191729 - DNA, 5130 bp, Cannabis indica
agtactcagtacagtagcgatcactatccggtgtgtcgggtctctctcctcactcctctttctccatctctctctctctctcaattcaaattttgggttactgggtttttgagctcgaacttcatgatcacggtttatcactctgatcatcttatgcaacatactcactaacacttagaccaacgatctttttctgatctctcttcctcattgatattttattcactacttactggactaatgggcaccatggatgttactgaaaaggttcggttctattttttttttttgacatttgagcttgagttcactttcatggtggattttaatattttgctttttgatgatgatgatgatgataatgataatgatgatgaaacaggaatcattggctgatcaaacgaatgagtataagaaatgctgctctgattgtaggaccacaaggactcccctctggagaagtggcccagctggacccaaggtctgtccccccatcctctcctagcctcaaaccctcaaatgggtttatttattttttagtttttgtaaacaattttctacccaatttctctattatacaggaatttgatctgggtcatactcatttttgtctgatctgggttttttcatcttcttctattgtaatcatcacatcttttttgtttaagatgatttcaaatgggtttttcttgcttagctttgttctttgctctatcaacttattataagtgtttttttgttcaaaactctatctctttctcaatactcaaaacccttttggccttattcttttgcatattttgtattaatttttgtgtgtgttttttgttttcagtcactatgtaacgcatgtgggatcaggtacaggaagaaaatggcatctatgttgggattgaaaaaaggaacagaaaggaaaaaggagagaagccatagtactaataatcaacccaattcttcttctggtggaacaaccattaccacaacaacaacaacaagctctgtttcaaacactactaataataatgttaatggtgatcaaaacgacaagggtatgactcaaacgacattaaaagttcgtttaattgctttgggaaaagaagtgttgactcacaggttgtcttcttcttcttcttcttcaccatcagtagtgaagaaacagaggtgtcgtagtaagagaaaaaagttgggtgaagaagaacaagctgcttttttgttaatggctttgtcttgtggctctgtttttgcctaaaaatagtgctctatctaatggtggtgatggggtataaaaagtaaagaggaacactaaaaaatacatgtttgtttaatttgttgtgtgttcttttagaaaaggttcactatattatataaatatatattatacacccttatgttaatgttgttttggggtgcttatctaaatgatatgatagtgttttttgggagtaagttaatgaaaaagagggtcaaccaatagtgttttgtttttgagacttagagaaggtgacatacattccttattaatgtttttggtactatattaattgtaatggtatatatatatatacatattattattagaacactacaatgaatgattggtatatatgtgtaccaatctcaattgggttgtgctacatttattaattgatgacgacgtataattatagtttgatagttttgactatggaaaaataaaatatttagtttgaatttgttggtcgtcttcgacatctttatgtctttacttttttagctcctaaaatgggggtgggtggggtaagattggccgtcaaaataaattggtatgagcaagatatgataggagacttttttttagtgaaaataattataaaattagagctttataataagaataatttcttatgaggtctaggataatttgaggggtatgatttggtagatatctggggagcatggtttagtacataaacaatcactgaaattcaaagagaatttttaatggcaaaaaaagttcaagggcattatttgatacatgtgaaagttcaggaaaaaaaaattataattagtcttttttggagcattgttataaaacatcagtagcactacttattggtagtaatttatgattggttaataatattctataaaaattattatattaaattatacgaattttaatattaatacctaattggatggggaagtagccactattagtcccaatttaacatttttgatattttgaatgtcttttactttatatttttattatgaattaatgatgtcttaaagatcacattattgatatttttatttaaaggaaaatagaaatatgcacggacatggctcttatagagtataatcatctaaaaaacaaaagaaaagaaaaatctcttaatacctatctcaactaaaggtccaataaatgtaaagaaagtccaaggttattttaaagaggaaaaaggtcttaggcaagtagattcaatatcctttttgctatttgtgctaatcatgtaatatttcaatcctctacttattcatgcttcaaagtaaggattttcattttcaccatttatacaaataattgggtctattaatttatattttgatgatgatcttgttattttctgtaaggatcatccacagattgctcaacttcttcaacatgctttttttgagttttgcaaaacctcagggttgtctgccaacaagcagaaatctcaaatttatttttgaggagctagacaagagactaaaaggagcattcacgagtcattgtgggttatgagaaaggaagctttcctttgaaatacttgtggggtccgtttaagacctataagatgaagaacatcagattgtgggcctataatctctaaggtttagcatcgtttacataattaggctagtcgacactttttctttgcttgcaatgctcaacttattcattctatgctgcttggtattcgtttttattgaaagaatatttttctccttcctcaaagtgttataaaagagattgacaaattctgtaggaattttttgtggggtaccaaggataactgcaagctacactttacctcttgggagaaactgtgtcttccaaaataatatggagggattagttttttagaggggtcaaaatagaataaaggaatgatcatttaatacatttgggatattgcttctaaacctgatgctctttgggtcaaatggttgcaaagtatctacttgaaaggaaaaacctttttggcatcactcgacttgaggagatcctaattggcattggaagaaactccatgtgatatatttcctccaaatgtatagatctccaaaagatgtttgttttatagaaaaagatgtcatccgaaaggtcgttcacggaagtccaacttgtctttctccaaaaaggagttctagataactagttgttctctcttggaaaggagttctggatggctagctgttctctcgtagaaacgagttccagatggttaactgttccctcctggaagagaggtctggatagttgactgcagctatcactattcctatccacgaagtctcttcactatacgcttcggtctgtcttaaaaaaagcgtacgtctcattcggaaacactttaacttgaactgacgcagagatatttctatgaggagtttgttaagttgtaactaacttaacaacttagtatttgcatccatcgactttgggatccatatccctaatctttaaataccaccaagacttatcattttttagtttcgagaggtgacttcgagggtgaagatttagaacacagagagagagagagagagagagtggttcgaagaaaagagagagattgtgtttttagaattgtatgaagaattttctagagatgaaaaagattcttgagtaagaatgtgagagaaaaacactttaagagaattcaaatagagaatcaatctagagtgtattgtacctctattttaactcaatcaataaagacaatttcaatggtatttcagaattggagtagagccatacctctattttattattttattgccttaatcgtttctagttttaaatactaagttcatccttattttatattaatcttgtcattgctaattatttgatgattaagttttagattatttgatttagcacattagttgtaattttcccatactcctcaagcttagattgaccatatctgaatctatgataacatgttgcaggtgtaaatggaaggtttaagattagcaaattttacaactcgctctttgatgttgtggtgtagtcattgcaaatttatttttcggcagatggtgaactctcagttgatgaccagagagataaacatcaaaggttacaattctctattgcttctccttactgtcccatttgtaatgactttttttaaaagccaggatcacttgctctttttgcaccctttctctgttgcactactgtgcaagttccatggatgggtgagcttcataacttggcccattgtgtatttagattggagagattgaaatggacaattagggtctgatttacaatgtcagtaactgattggagagattggaatgaacaattagggtctgatttacattgtctaattgttgtattaagactttagctttagcttagtttgtagctcgtttattgtcttttagtttcggttatttatagttagattttattccctttttctctaactgttttaaccaattctttagcaaagttatagttgagttagtttctaaagtcaagtgaagttagttaagttggtttggattgtgttagttggtattttatgtcatgtgatataaatactttgttcccttctgtaaattcattcattcaattctaataaaatcatttcattctttttcaatttcgcaatatgttgttatagctgttgcatcctattttatttgatattgattaaatagggaataaagctggttttaattgtttaagtagaatgagaatgtcctcaaaaaataaaatcattgctaatattgagaatacttatagtggtcttagctttgtctatgtaggtgttgcttgatataactttgttgtttgatttaatgagaatacgtctcctctttgtttttttattgggaatattttacaaatatacaaaaata

SEQ ID NO: 191730 - DNA, 1120 bp, Cannabis indica
gcatcgggccccatcggacccgagcccttaaaagcccagaaaaatttcagagggggcggtcgggtcgtacgcggtggtgagggggtgatggcctgggtcgtacgcgggtgtgggtctccgtcggactggtctcagtcgaaagtggggctcgactcatggtgggcggtggggggttcggtttgtgcaaagtgggtagagagaatggtgagggttcggttgagagagaagctagagagatgaaggaagagagagagttggggtgttgttatgtgagggttattcttaggtttttgataaaagtgtcatatattttttattttgaaatgtattagtttaaggataaaatattaaagtttttaatgtataatttttcaaattttcctcataaaatagtaatcaaattgagaataaatatcaaataataataatgggaaaggctgagaagtagatgtgaaatgaattgaatgaactgtcaaaacaaaccaacctctcaattataataaggttaatgataaagggaagcacgactgtcatatgaagcctctactttccttttctctttttctttctttaatcaaatcaaatccatgaatgcaaacacacatatatatatatatatatatatatttatttatatagtaatattaagaattgactcccatttttaaaataagctggcgggtaaagttggctctggtctggttggcagatttattcacatgattcctcacttcatcatttgaacaaacaaatattatacatatatttataagtaatcaaaacaataaagtgggaagaagaagaaggatcaagcaactaaattgaaaatggcctaccctttatgcctttatcattaattatgatcttactttttggttgaaaaactttcccaatatttataaactaaattaagaaaaaaaaaaaacgctttcaaatagtatctggagtttagaagtgaagaatctattttctttttcttttttctttgtttattatttcacctctttctctttctctgtcttttttttttttccaatggaaatttctaggaaaaagaaggactctgcttaaggtcatcgtccttggagatagtgggtatgtttttccttttttttttttt

SEQ ID NO: 191731 - DNA, 4107 bp, Cannabis indica
gaggaaattgatcacgaatgactgcaaaatcttcccaggttgcttcagattctggaagatgctgccacttgataagagcttgggggctggttttgtgggtgccggggcggatggccagcagagaatcgggttccaagagccattccaagtcagccgtgaggccaggaggaagaagagatgcctgctggtgtggtcccaaggcggctcgcagtaaggaaacatggaaaacagggtggatggaggcatccggtggcagttggagacggtatgctgcgttacccacacgagctagcacggaaaaggggccaaagtaccgaggagagagcttctcattaggccgtttggccactgatcgctgtcggtaagggcgaagtttcacgtagaccatgtcgcctacttgatactggacatctctgcgcttgcgatccgcacgtgccttcatgctttgttgtgcgcggagcaggttttgtttcagtagctgaaggacatcgtcgcgggcctggagttcttgttcaactgcagaaactctggcacttgctggttccaaacgaaggaggggcggtgggtctcgattataaaccgctcgaaaaggagtcatgccaatggaggtatgatgcgaagtattataccaatactcagaccaaggtaaccatttaacccactggttgggtttggaactgacaaagcaacgtagatatgtctcaaggcagcggttcacgacctcagtttggccatcggattgcgggtgataggcggtactatgcttcaaggcagtcccctgcaaccgaaacaactccttccaaaacaagctgagaaatattttgtctctgtccgatactatcgaacgaggaatgccatgaagtttcaccacctcgcgaacaaacacctcagctactgttggtgcagaaaaaggatggcgaagcggtatgaagtgaccatatttagtgagacggtcaacgaccaccaatatggagtcgaatcccttagaccacggaagaccttcgataaaatccattgagatatcctcccaaattctctcgggaataggcaatggttgtaagagacccgcgggggattgagctaagtacttattctgttggcacacggagcattcagccacaaatttctcaacatcacgccgcatgccacgccaataaaaatcagccgccaagcgttggaaagtcttaaacaccccggagtgtcccccccatgttactattgtggtactcctgtaagagcaaagacacaaaaggagatgaggaaggtaacaccaatcggcctcgaaacttgagacacccgtggtccatcgagtaaccgccacaatcaaggcccttagagagttcatgcagcaccttacacaaggtggaatcggcggcaatctgggcctttaagtccggaattgagaggaggttcggggctgaaatggttgcaagagaagcagcaggctcaactcgcgagagagcatcagcggcacgattatcacccccgggtttgtatcgaatctcaaagtcgtatcccagaattttcgtaagccatttttgatgttccatagcaacaaggcgctgctccagaaggtattttaaactccgttgatccgtgtgaaccacaaacttacgacccaacaagtatggcctccatttttgaatagctaacacaattgccatcaattcccgttcatatacagatttcatgcgagctcgaggggataatacgcggctgaaatatgctagagggcgtccattttgcatcaatacagcccctagaccaacacccgaagcatcagcctccaacacaaaaggagtattaaaatcagggagtgccaagacaggcacagaacacattgcttgcttcaacagttcaaaaccaacttgagcttccatggaccaattgaaggcatcttttttgagttggtcagtgagagggcgggcgatacttccataatccctgacaaattttcggtaatagccagtgagtcccaaaaatccccgcaattccttgagcgtttggggaaccggccattgcaccatggcctcaattttaccagggtcggcagccactccgtctgccgaaatcacatgtcccagatactccacttgtggttgggcaaatatacatttcttccggttggcatatagcttgtgatcccggaggcgctgcaaaactaaacccaaatgagcaatgtgagtgtccaaggaaggactgtaaataagaatatcatcaaaaaaaaccagcacgcaatcccgtgaaaaatctttgaatacttcattcataagagcttgaaaagtggccggtgcatttgtgagaccgaacggcatcaccaagaattcgtaatgcccttcatgagtgcgaaaggccgttttttcaacatctcgggctgccatgcgaatctgatggtatcctgactttaaatctagcttggagaagtatttggcaccatggagttcatctaacaattcctcgatcacaggaatgggaaacttatccgccactgtttctcgattgagggcccgatagtcgacacagaagcgccagctaccatctttcttcttgaccaacaatacaggactcgaaaaaggacttgtactaggctgaatgatacccgctcgatacatgtcacggaccatctgttcaatcgcatccttttgaatgtgggcgtaccgatatgggcgaaccgagatgggtcccgtccccggtttcaaagtaatcgaatgttcccgagtacggacgggaggaagtcctgggggcatctcaaagacatcttcatattgttcgagcaattgagaaacccgtgtgggtaacggctgcgtattgacggcttcagtagcattcatttctcccaattggacccaatatccttcggctcccttttccacggctaacaccattgctttcaacgaaatcggtgacttacataggctgggatctccctgtagcgtcacccaagatccagccacttcaaatttcataaccattgtgcgccaattgacttgcatattaccaagggtctctagccacttaattcccaaaatcacgtctgccccgccaagttctaagggtagaaaatcagtcacaacccgaattgctcccaagtcaagttccacctgagtacagaccccttccgttctcacctttccgcccgttcccaacaacactccataacaagtggttgctgtgatgggaagtccaacaatattcacaatttccatagacacgaaattgtgggttgccccgctgtcaattaggactgttaccggtcgctgcccaatctgccctgctaacttcatggtgtgagctgaggtgattccgatgagcgagtttagagaaagagtggctaacgtttcttcggaggcaatggtttcacccgaatcgggtgaaggaggtgggttctcctctgttggctcaatgtcgtcgtcaggaatgaggacaatttggagaagtttttgttcgcattcgtgcccggggtggaatttcttgtcgcacctaaagcaaattcctctagtgcgtttatcctggtattccgtttctgacaatcggcggtaagaagaggtggcaggtgatcggctactgccggctttggaagccgtggatgacatggaaccggaggagaggctctgcgacttggtcggagttgcaggaggaaattgtcgacctgggaaagagctgaagcccgatcgtgatgggaaaatagggctcaaatttggtttaaagttattgggccttgttgttggactggtgttgaccaattggtatccttcctctactctttgggctgtttccatgatttgggccagcccatttggttgtaaaatgtgaagagtggccttgatgtcttccttcaaccctttgacgaaactcccttcgaggatgtggtctggtacatccggtacgcgtgaagcaagtatctcccaccggacccgatactctttgacggttcctgtttgcaccagcgatagtagttcttccgagagtgatcccaccggcaccgatcgaaagcggaggagtgccaattgtttaagcatggtccaagatgtaatgggtcgacgatggttctcccactgaaaccaggacaaggcgtctccgtcgagacccacgattgccgtgtccaac

SEQ ID NO: 191732 - DNA, 1531 bp, Cannabis indica
gatgatgatcatcatctctttcttattcaaattcaaattaagaaaacatatataacaataagatcatcttctctgtaatttacataaaactgctatttatatagagctaaaggaaaacttccagcaacactaacgataattaataacacttgctacctcgtttcatcatcaccataaatatataaatactatatattactccctcgatctctctctctttctttctctcccctctagaaattctttaaaaaaaaacatcaaatatatatataaagtactaataaaacatggaattttttattaatatttttgtttttgtttttcacacccctaaatagctagcgatcaataattgaaattacctattttttacggtaaagttttcaataagagggccgaggatgagaccaaggataagaatcatgggcagatcccaactgatgatgatgatgagctccattaggtatgagatttggaggaagattattgtaaacagggggcatagccgacggatcagccaatccctgagcttcccccatgtgtcctccaccaccaccattagtcatcccagtcggcgaatcctcagcgccacctcctccgccatgtcctccacttccagccgcctcctcttcatcttccaaaggcagtctctcatatgtagcattggcgaaagtggcagcaatcaccatcaccggcccagctgccaccagagaaccgaccacgctccctccaaccacctggccttgtcccccagacaggtaaacagtgagcccagtcgatccagggggagccggtccgggaaggaaagctccagttagagaaagaatctcaaagcggccgtgaagggctacgaccgcgctgccagctgaagagggttgtctgagggttacgttggccacggagccactgccgctaagcacgcaaacaccgcgttgacggcggcgggcgaactgggcgacgctctctgccacatcagcgcctccggctacctccatgacgtggctctttagggcgtttgggctgtcccttgttacgaagatgggaggctttggcttgtttttggaaccggggggacggcctctgggcctgcggtttccaacctcgacggctccctccctaggctcgtccctgtcgtcatcgtcaatgtcgttgtctcgttcttcttggtggttgtggtggtggaggatctctgatgatgatcgtttgttgtttgtagtacaggtgagttgtttgctgccagctccatggccggcagccccacctgattggtccaccacggattagccagactaccaattctgttgtatattaattcaagaacaagctacaacagctaaaacaaacagaatcaattcacttcaggaaaacctaataataagatcagctgagttttattaagcactctatatgcaactttatctatgaagaacgggaatcgaagagaaatatatatatatatgtttatgtgctgtgtatattagggtatacgaagaagatgatgaaactgagggactataattatgaaaacgaa

SEQ ID NO: 191733 - DNA, 1662 bp, Cannabis indica
agtggtaataaattcacactctttattaactcttttttgtctctccataaataatggaacaatcttaatttaattaacttagtacacaaaaatgttacatgttatttcctcaaaaatattgatcacaaaacactaacttaattatctccccacctcataatggtttccaagaaaagaataaatccattatttaatgaaaagtataaatatattatagttaaaagatctaaataataattaaataaatttaatttaatttaattaactctctctctctctaagcgcattaactctctcacatgtgccaaacccctataaaaggaccatcatcacaacccttcctgttcattcaaaaaccaaactcaaaaatcacaaaaatctcaaaaatcaaaaatttttcaatctcattcattctctttcccaattgaaaaatcaaacctttacactaaaatcccacttacacaaactcaaatagttgacccaaatggagaatttatttcgtcttgttgataaccaagatttcttcaacaatcgccggaatattctaatcaacggtccgatcatcatcggagccggaccttcgggtttagccacggcggcgtgtttaaaagaacaaggtgtaccctttgttgtactagaaagagccgattgtatagcttcattatggcaaagaagaacatacgataggctcaaacttcatcttccaaaacaattttgtcaattaccaaaaagacctttcccggaggaatttcccgaatacccatcaaagaaacaattcattcattaccttgaagattacgctaaccactttggaatcaaaccccagttcaatgaatgtgttcaatcagctaggtacgatgagacaagtggattttggcgcgtgaaaacaaccacaacaagtagtgagagtggtcggtcggaagttgagtacatttgccggtggttagttgttgccaccggagaaaatgcagagtgtgttgtaccggaaattaacggtctttctgacttttccggtgaagttgaacacgcttgtgagtataaatccggtgaaaaatataaaggcaagaaagttttggtcgttgggtgtggaaattccggcatggaactttctcttgatctctgtaatcacaatgcattgccatcaatggtggttcgaagctcggtaaagtaaaaaaaaaaaaaaaaaactcaatatttttgtaaaaagatggaatctttgatttgggtttttagtgttctaatcaaatttacaatctttttctcaggttcatatattaccaagagaaatttttggaaaatcaacgttcgagcttgctgtgttgttaatggcttggttaccactttggttagttgataactaatgttgttcttgtcatggttagtacttggaaacattgaaaatatggtcttaaaagaccaacaacaggaccattaacactcaaaacacagaaggaaagacaccagttttggatattggaacattggtacaaaatcaaatcaggtgatattacagttgtcgctggaatcaagagatttactagtaaccaagttgaacttgttgatggtgaaatcttgatattgattcagtcattttagcaactggttaccgaagcgtaatgttccttcttggcttcaggtgagaaaattgttctataaaaaatc

SEQ ID NO: 191734 - DNA, 3955 bp, Cannabis indica
ttttttgctagtatatatatgtaaatataaattgtgaggaaatatgttgacattttttatacatttattttgtaacaacttgattattaaacgcacactcttttcttaagcaagccatcttataaactcatatttatatacatggaagaagtcagaaaggagctatctctagattttaaaggagattaatatttttttttctttttaaataattggtcttacataaaaaaataaaaatagaaaatgttactaatcatttaacaaattttagaggggacttgagacctcatactcggtgctttacatggttctgtgtttgtttatacatagaatcattttttttttggttagaaatctttacaaaatacatcaaaaatttgaaaattaattacaaaactacataaacgtaatattttttttactttaactctttgaatttttttatttacaaaagcacatcttcaataaaaataataaatagttttttagttgttttataatttatgtctaattgtattaccgttgtcatgagattattttttgttgctttataatttatttatagctatcatagtgttgatttattattgattctttagttttcttatgttttgctgagaaagtatatgttagtaattttaaaaccttagaagagtatttttataaatactcttttaaacttatagataacataatttgtaattttaggtcgtaaaatcgtaaataaaacattaaaaaaaaattaaaaattcttctttttcttgcaaaaatttatattaataaaagagtgaatttttatttattttttattttttttgaggtatacgtttgcaaaatatgacttttgtgaaaaaaaaaattattttattggattttttttttttaaaaaaaataagatttaagtaatataatgtaataggttactcatccggttaccttaagggtacctggttactcttatttaggttttccatattttttttcaattttttttttttgaattttcccaataatataacttttttttgttgaaattaataaaataatttttttttgaaaaaagaaaaagaaaactatattttcgtacagatgatataaaaatccattaaatttgtaatttcatcttaataaaagttatatgggagttgagaatctctttgtttatcaagatttttagaaattgattatacaataaattaagcttaaagaagaaagaaagatttttacgtagttgagacgttaatggggtttagtttatgagtcaatattattgagctagaaaaacttcaaagtattcttacacaagtgttcttgccatagcttaagagcctaattcttagcctttgattgcggaaatgattttccaaccttttgcatgaaggaataacattctatttataggctagagtcgggtatggatgaacccagacccagtaggattttaatgtatcaacttggcccattgatgcagcaaaatacaatatatattgactttgggcctgttaggtgaggcccgattcacgagataacagtcattcatacgagtggggacagtttggtgatgacaggtatcatgcgcaaccatgttagtacaaagaatgtcagagaatatggcgatggacaaaaatatagtttccttttggtggtgcgcacattctctgggtctaacatatagaacaaactcctaacacggtgggaccctgtgtcaaattatttgatatttattgcatttaagaccacatttatgagttatgggtatttttgtaattttaacttgacaagagtaaaaatcgtaattttattatatattgtggtaatagaatatattattatatagtatgttcatttttgttttattgcatgtgatttttaataaatttatgcggtatagtcacaatcagatattttagcttgaatttggttcagggtccaaaatttatgagttacgtgcttaggaaaataacatgaaaagtttatttaattatatgatgatatgagtacgtatgtggatgtgaatttattaaatttcccataattgttatttgtattgatttttagcattaggggcaaaatgttcatttgatcaattttattaaaatgaattaagccattttgttgaatgatttagaaaaggaacagtcagggcattaaatgttcaatgacgtgcctcaaagttttgaaccgccgaaactcaaagcatgcaatttttcgaattaggtaaatacgattatacccttaggatcattgaaaaagttctttttaattaaaaaattacttttactgggcaattgttatacccgaaatttaggtatgtaccagaagctgacacgtaccctacaaaaggaatatgaatcagttcaaagagtatatattaattaaattgcattattaaatataatttaactaacttattctaattaattaaagttgataaaaatattcaaacttgttgactacataggcatatgcgagataagaataataactattagctcatttagtttatgagacaatatgtccaccacgggataaacagagtaataaagatgtacaaggcgagacacgaaaggtcttactagctgttgactcacatacacgagcagggtgaaaataactacactcaaccatctcgtgttctacacgacgtaatagtcatctcgcatcatcactacaataggagggtactgcgagatgaagcgtatctacacttactattttttttctctcaagatagataagaaagataactcaaattcgacgagaaacaaccttctttgtcagcatagtcgtttaaaggataaagataaggagcagttgagtagttattaaatattatcccatgtgcaaataaatgaaacgtggggaatgtccatgtttcatgagcagttgaaaatgaatcgatctcaataaaaataaatgccaacctatacacctataaataggaatagaatctatgggaaaaggaacgacaaaaaaaaaaaaagaagagaaaattcgattgtttatttttactaagattatactttgtatttaaataactatccctaataatatggactcgtggagtatataaattttaactacaaaaccacataaaatatctggtgtttattattattattattaaattctgtagtaaatttattacaaaacaagctatatatttgattaacgaaaatctgcgttaacaaccaaaaatatatacatgtctttctttattattttcttaaataaataaaaaaaaatgtatgatatttttcagaaaattaataattattatggttaatctaaaattttaattaacaacaaattttgaatattattattttttataaatagcatttaaattaaatatttttttaatgaaaaattatgttgtttattgaataacatctaaaaaaattaatcatattactaaaaatatacataacgaaaatactaactaagaataagtatacgtgcattgaacgtaatattaacctattcattataaaaacaatattttaaacggattaacccgaccaaaccaacaaaattattgggcgagtaaaactatttctaatttttaattaggtgggttacaattataaatttgtagcccaatatttatattggtttggtaaaaatataccataactccaccaaaccaattggtgtgcgctcctaatatgaatgacacatcagtcatatcagtattttgttagtcgcatgaaatataggatttattttaagttttatttcatgtagctaacaaaatactgaaatggttgatgtcattggcatgacggtaattaaaaaaaataatttatttttatttataaattgttaatgaggaaatgattttattctacaaaaaattacatatgtaacactgacatgataataatacattattcataatatttggtttgtgataaaacttaacaaagtcttataatttaatattgtaaatagt

SEQ ID NO: 191735 - DNA, 1609 bp, Cannabis indica
cgatctgatgaccgcattgagaagagttggaggaagcctgacacggaggaggatactggttcccaaaggtttgtattgtcagctatgtgaaaatatgctctagtttttactttttactttgtgaaattcagcaaggttgatactttgatcgtttccttgcatgatgaatgatgatatgaaaagttaaatagattgtttgctgataaaattcactgttgctagattatgttttagttcttaatatgaatattgattgttgatgacgtaaatcagattcattatcatgattcgcataggcaaatgctttactttttattggcttaacagaggttttggactttctgattttggtactccttcggctctagttttttcatctcccatacctttttattcaagttagaaaattttcttttgggaaagtttgttcattgttgagtttctcctctatcaccttctttgaagacttggcaggcattaatacttgttatgtttatgaactgttgcaatttaaattataacttaagcaaagaatcttgcaaagtaattattacacttttctatgtgttagtttgtggtactttctgagctttcttggcctcttccaaggaaagaaatgtggttgcttgttgttatgaatctaacccgacaggacccctctaccccctctcttgccttcaagagaatatacataaaacttttcatgtcttatgtctgtaagtagatacattattctgtttgtggattaaaaggtacaatcaaagtactataactttgtgtcactgaaagcttgcgatttgcaatgaaattcaggggattcatttggaagatatactgtagaattttatttgagatgagcccataaaattgttggttctattgttttggtttagaattgtgtgaatcatttaaagaaactaattgtttgtcttatgatttatacacgataaactaactttagttctctggggtgcagtgctgagaagagcgaggaggatggcccatcagctgaagataattgagggcattcgccaattgccagaaaaaaaaaaaggaaaaaaattgaagttattagatctgtggattccctgagactgctgtttatttgtttgttctctatatatttggctgtcacatataacattgaactggtatttgacaattttggtaggctgcttaattagttataggagttttgtctcgagggcttgctttgtactttgtgttggagctgataaaattgtggaattgagaaatacttgtcaccttaataatttatattggtgtcttcaaattatatgattttttgttaagagtgcatattagtgtgttttttgtatacttgaatgacatattccgaggtttgattcaccttttccattgttggacaaacccatgagtttatatgattttgattgatgaatgattgaggtttgcttttttgatttagagctgtcttggtcgacattcttattgtgttttgttagtgagattatcttttgaagtaactgagtcttttttcctttttctagactttgttaataaattttctcttgtgaacattgttttgttgatgtgacgagggataaacaattagagagcttaacat

SEQ ID NO: 191736 - DNA, 3208 bp, Cannabis indica
tattcgaatttcgcttcttcattacataatgatccgtcgttctaattgatattcgttattttggctgagaatcatcaatatatgcttcttctctggatatactagatcgataaagcagattattccaattcaaatgaagcagaattctgcaagtaaaatcacatttcatgagaatcagatttcaaaatttggatgaacaaagtcaacatcacaagtctttgacatgttagtttttgcttttatactattttcacatccttcctaaacatgaagaggtcataagaaacctattttaatatttgttttctctgttttccataagaaaccaagtcaatgtaaactaaccaatatgcatagtcaaagcaagcaaataaagaaatggttacttgttattttggtcagtccagcagagaggagggcagtgagtattgagtttgtgatccaatttaccagaatcaatgacctgcacatcctccaaaaggataacataatggttgagcacctcctgtgcgctcttctgccctccaatcatggcagccactagttcccagcgacgcgggtgttgttcgtcaacgacggccagagccagctcaaacaacttgttctcctcccaactccaacaaccctttggtatatcttccataattgagagaaaatccaagtaagaataatgacaaatattcatgaacactcggatctaggatccgaattccattgcaggctaagtcaatacaagaatcttttcaggtgggctttgtttgattctcttcggcagattctcagttggttttttcggagacaactcaagagtcaggtggtatctgttatgggcagactaacatttggctacacttataaacaacacgtttcaaaatatatatataaaatataaatagacagcataatttaaatctagtaaactacaatctccatttgttttggccaaaacaggaaactatttaccaaaacagtaagataataagagactcttcatttaccatttcttgcaacaccgaggatctctctctttttcaagttataaaataccccaattctgtcattggattccaactagtgttaataaccaaagtctacggcatgaatagacatgatatgatatgatatgattattattttattattatttttgtttttgggagaggaggctaagagatatcatattttatgaatcgtgtactgttatgttacttaaaccatgggattagattgtcatttcttttaaccaaccaataatggaaagggacctaaccattttgatccataattattcaacaaataataataaaatatcataatcacttacgtttcatgtttgcaaaaatagaaagagacttgggaagcccacgtaatacacacttaaggatatgattatttttaatgactttgattaggtgaaaggggtggaaaaggagatatgatatcaatgaaagaagggccacaaatgggtaggtaaaaccaaaattaacaattatttgtctattttagaaaatgaaataatataaatttaaatatttactatgttatggtggcgggtcaaaattaataagaccctacttcatctttttttaatagggtggtatagactgcggttatgttgatcgattttttgtttagataagtttatatgtccccttcagtccagacacgactggactctataagatttacacaatttcacttttggctagtcatcacacattttatatatgatttatactattactaatactcatatcctcacgcaatgcaatgccactgattttcttctggttactgcccttggatagtgttataataaaataggaatgatattatcgaatgaaatttttgggattgattcgcacactaggttgctctccttaagacgcttgcaacactgcccaagaatgtgcaaagtgcaaacaatggaaaaattttagtcgtccctaataaaacagcccaatcgaaataccactgtataggagctctactgcacgatagaaaaccgtcgaaacaccacacccaaaaattactgctcggactacttatataatgtaatcgtaaataataaacagtaaatgatttttctatgaaaaagatgtgtttctcctattagttttgatgcattatataggaaatgcacaaaaggtcataacaagaagaaaggcgttgagtgagatcgtgagaacgatgccgaaaataagaacacgtctcattttaccaattaatttaaacatgtttaaaaactgttgaaattaattaaataaaaataataattaaattttatccaaaaagtaaagtatcacaccacaccaactgacctagtcggacaatgcgcgtcgtgcgtgcaatgggtaagtgtgagtcctcacccatttgcacaaaattgggtaccctatggggccctatcccaagtggtagggaaggttttgatgcattatgtcctcacccgtaatgttttgatgcattatataaggaatgcacagaggtagtaatgggaagaaagacgttgagtaagatggctttagtatatctaaatagaaaaatcatagataagaaactatactagtgattgtggttcattcatctggccatagactagagccactttcaattcggtaatattttgttcattaattacgccaaattctttcatttccatgtaaagataatttccttcacgggtatgttcacctactccgccaaatatagatacgctcccataaactttggcaatgttgttgatcaattccataatgagtactacttggtttgtttggttgttggcctgaccaaatttgttgatggaaagtccttactgctttgtcatccagagcatgggtccccaagggtgttgattaataggctccaatagtcttattggaagaaaaatgtcctcccaaaataccatgcaagacagttgaataaagtgagtgaaaaaagttatacatttttaaaaatgaaaaatcgttttaccaattaatttaaacatgtttaaaaactgttttgattaattaaataaaaataatatattaaatttttttctaaaaaacaaagtagtcacaccacaccaaccggctcgtggtgggtcaagtatatatccacacccattcgcacaaaactaagtaccccttagagccctatcccaagtgtcaaaattacattttatatatacccttataaacaaaaactcatatccactcatgtc

SEQ ID NO: 191737 - DNA, 1153 bp, Cannabis indica
attaataaaaagtaacctagtacttattttagcattattaaagtaacataaaacagttacatacatacaaagaaaataacaaataataacctaatactttcaaacgtcataaaaggtcacatgtggcagagtcatgaaaatcaaaaagtcgttaccggatactttttaaaaaccataaccattacacatgtataatattgataaaaataaaaaaaaaaaaaaacccaaatgctttttaaagtagctcagaatatgagatattgaatttggttgagtatactaatggttttaatagagaaggtaacttgtttgaattgaaatttttatctatattaaaatctaaaatctatcctttttaaagtaacatgatacttgaaatattgaataatggttggacatgctacattatgattggttttaatgcataatgtaacatgtttaaattgaaaagtaacctgttatttttgttttgtattttagcctattttctctagtaatctagtaactggaatcttaaatttggtagagagtgctatattttgactattttaatgcaaaattagctttttttttttgcttttattctgctttctaatattttttttctaatattatattctgctttctaatataatttggtgcctagaatattaatttttttttttctggttttaatgccaaagtaacatgtttacacaaaataacgtgttaatttaaaagaaaaaaataacatagttgtgaaatttgaggctttatttttgcttcaaattgtaataacctagtacttttacctaagatttttatatagtttgttaaaaagttaatatggaataaaacaattcaaataataaattaaatatttattttttccaatctaagaaaaattaacataaaaatattgtaaaacacaaatatatatatatatatattaaattacaaactcaatattagtaattaagataaaataacaaattttcctagaaaaattatacaaatctccaccaaataagttaacaaataaagtatggctttatttcattacaatttaaaatatgaaaaaataattccacggaaatataattccacacaatttacttatattaaaaaaatatatggataaaactctcatttaaacgcatttttcaaaaaaaaa

SEQ ID NO: 191738 - DNA, 3333 bp, Cannabis indica
atcatgcattcggtcatctacaagttagaatggttgtggttctccctccttcaaaaatgtcatcatgtcgcccatttgaaccatgaagaactccttcaactttttctaattatccaagtatattcaacctttctaccactgctctatagtctagtgtattagttatagcagtcaaggctgatggctcgattagttcctaaggcaatggtggtggaactatattttccttactcatgacctcaacaatggttttggcttatgtttcaaacaccaaaccttcttgtgtaccactactgtccaccgtgtcatccatttccatctcaacacaaagaagggctttactatcgttgatggaactgtaatactccttctcagtagaccaagggcacaagcagtgatgtgtggttaacttccaaaaaaaaaagataaaaaaaaatataaaatttgttacaaatcccaaaatctcaaaaaacatattgtgaaatatgtcaaaacaagtcgccacacatcgttaaatgttgctaactatctactagcaagtgtcgctaaacatattggaccatgtcgcgctatgtcgctaaatatcaaatgttataactagtaaagtaaatcatcattaacttaattacaacatttcgcgaaaaatatcactaaataaccatcttcttaaataatgaacatagtcacttatatcgccaaatatatcgatatattttgctaaatatataaacacctaataattgatcaaccaacaaacaaatatcgagaaacatcgctaatataaaaaaatggccaaaaaaaataagaacttacacttgtattaaacatttctaggatgtcactcgccttgatgtcttgttttcactagccctcaagggttttcaaatttatcatcctaaggaaattgctcccactgcaatgaccatacttcttttgcactttctctgtggcttcaaatacccaatactgtatggaaggtgctagccatgtacggtgtactttgcctactgagaaaacttcttgcccttcttcttctcaacgtttttcttgcaatgctccatgtccttactcatagactacgtcaacttatgaaaagcatgcccgccccacgaataatggaagaagaactcgagttcatcaacaaatttcaacatttttggccaacacatggacattgctatctttcaaaatcaatactccctcaacaaaggctcatagttcgagcttgtagatatcatctacaatctcacatctctctacttggagcataagtgcctccaactgaccaccactcttcccttcaaaatacatcctcaggaagcggtcactgcacttggcttctatctcttcgtctgtaggggaactacctatacggaggctaataatcatttgaaactcagtgtgcctgaatctcatgtcatttttactcacataaaatcatatctcatcttccaaatctttattaacttttatttttttgcaacagtaggttgtgtaccaacgaaccagagaaagtcaaatctccagctacctagaatggcccaaaagagcatgctttaaccctctcagtcaactatgcttttcaaacttggccttaataagtttaaacctatctaagtctcgataagtaagacgacttgggaaaggcttgataactagaagtttaagcccaggagccatctgcaaaaattttaagaaaataaacagaaacgacatattaaaacccaaagtaaaaatatcacaaacatatttctaatgatatcgctaattatatcgttaaatttaaatctccaacgctaaacattgctaagtctattccctttatgtcgctaaacaaatcgttaaagatcgctgattatgtattctccttttatatagttgtcaatatcattatatattgctaaagatatcataacacatcgctaattagaagacatcaacaaaaaaccaacccaaacacaaaaaattaaacaaaaagcaaacataattcctttgttattgctacatgtcgataacaaattgctaaagatcaataatcgtgtattccttattttattgttgttaatatcattctatattactaacattattgctagagatcactaatcgtgtattccctattcatttgatatcgatatatatcgctaacgatattgcaacacattgataattatagaaaaatcctaaaaatgaacatacatcaacaaaaatcaaacccaagcacataatttaaaagtaaaatcaaacatattctttaagctcaagaataatccactaaacaaacccaaaatttaatttacaaaacctaatccatggaaaaatcacacaaaagtaaaaatccataccaaaatgtggtgagaatcgatggtgggtggcttaagtcttgttatccacattgacggaggtccttaaggtgatcaaaaaacctaatgtaggtggattacgagacttcagggtggttgagcacgtgcattttagtggtttgggttggctgagctcgtgaatttcaagatttttagggtggttgagctcgtggttttcgaggctttagggtggagacagcgagagttagagagagataatgagaaagggaggacggccagtcgtggatgggggttctacgttggagagtgagagagttagatagttagaaagagggagggttttttgaaatgtaagggtatttttgggagtatgagatattagaagtgtttatcgagatttttataaactaatttattatgtgaaagctaaagaaactgatcaaagataaagaaaataacaattagatttttacatggttagggtgttaacgagccttattccacgaatcaatattattacttgaaagctggaaaaaccttaaggtttacaagaatgtctgaactctaaatcttgcttgagcaattaaggagtgagtttctaactcctttgtatgaaagatttttcgtatatttatagtgtttagggttcttgctaattagcccttgtccactgataggatgattacaagtaacatattgacattggcttatctagtgaagttcagcccatgagacacacactgtatgttgatgtggctgccatatcacgttggcaatttccaaaaatcatgtcctatatctatggagaagaaagacttattatattattgattgctaattactatctcacatatttatgaagatatgatcttcgagcgtgatctttggaagttaattcttgatatctcaagatctcgtaatcaatgagaatgcttttgagctagacatctggatgctcattgtttacttctctggatgttttaatcgatgtctttcagatgtgcgttgt

SEQ ID NO: 191739 - DNA, 2595 bp, Cannabis indica
gatttgtttaattagatatattcctaaaactagaacaaataaatgtatcaaaactaccctttcaaagatcatgtactacaaaattacccattaatttataacatgtgatcttcatatgaaaccaaaaaaattgaatagtgatgataattaccctatattttatatatgcactttactcaatccaacaacataacttaacatcccttcaatattgcttgctcgaatctttctttctataccaactgccttcccttaaacattggacctttaaattaaaaataaacaaaaatggtccacagaattatcatatccctcacccacccaattaacactcgccacgtcagcataccaaaaacagttgaagaatccacagtgagtgaccgaccccattgggcagagtgatacccgaccacactggatcattctcacaagtccgtgcgaccgaggatatttgaattcatatttcattattaaatacataacataaatgctaaagggtaaccaataagagtgttagtattttgataaggtataatatcgttattggtacaatttaatattgagtcttaattattttactttaataaatatcataaaattgttaactaattatataaccagggccggccctaagcataggtgtgttaggactgcacttagagcccactaattttaggagctcaaataataaaaatatcatttaaaaaatatacatatttttttgagccgaccctttatataacgatattttattgtggtgcttgacactataagtaaaaatacaatatataaatataatattggaaagatcattgctattgctaagggatctataatttaaagtaagggtataaaagtaaacttaaaaagaaaaaaaatatgttattggtgggatttgaatctttaatttttaatatatatacaatctagcttaattattacaataaaactagtattatgtctataaatatcacattttattacaaatatatattgcacctagtttaaatatatatacattgttttctcgatttttttgaagggcaactgccctctcgcttcaatgtgggtccgcctatttgctaacttctacgagtggtttataatattatttagaggtaacactttgaaattagttagcaatattccttaaaagtgattacaattaattatatgagttcccatatttaactataacaatattacaataacaatataacactttagaaaatactaaatactactagtactttttaatattttttattggaacataataaaaatatacactatttagcgatatttttataaatctcttatgtgcatatatactttcaaaagttttttagtttaattttttatttttgaatattttatagtatcgaaaataatttttttatgtactatatatgatgtttagcctcacttaaattaattagcaatatattataaaaattattatattataaaagattgaatacttaattataccaattgccgtataataccaaagttaacttgtagattttttttgaaaaaaacaaaatataatttaaaatttttaaaaatgaacaccgctcagatctgtgtagagagagacccaacacaacaacacaacactacagaagaaacaacacacacagcaacctctttctctctctaaacctctctctttctctctcctcggagcttgaagaagataaacctctccctttctctctctataactacaatgccagctagtgagacagattttgatctcagagtaagacttgtttcattaccttctctctctttcaactttttccttttggtttgctgctaatcttgttctttatctgtttcttcatagccgtcttctcagtccgcctttggaatggggtcagttcttttctctatctctctgtactgtatatatgtttatatatatatatatatatatgtttgtagaaatgttacttcatttgtgatgcttttgtttagggttagaaactgtaattttgtgtggataaagtaggttttttgatcgcctttgcataatgtggatttttgtgttgaattttaaattatgtttcagagagtttacatttgctgatgttggtaacttggagcattgcatcaagtatttgaatcagactcttgttacgtttgggtttccggcttcgcttgatctctttgcaaatgatcctgtaagttcttgatcttctcggagttgattttgaattgtttggagggttttgaattaggaatatttattttggttgtgttttgtaggtttcagttgctcgtacttgcaattgtatgtatgctttaattcagcagaggcaacgtgatgttgaattcagggaatccgctaatgaacagagacaacggtataattttcgatattttttctgtgttgaatggatagttttactataaatatggatctaattgaacgtaaattgacacaatctctttagattttcggttttgcattcattgtttgggatcataatatcattgttgcatttccttttactagattgttgtctgcattacaagatttagaagctaaagttgagagacttgaagggcagatacaagttaaagata

SEQ ID NO: 191740 - DNA, 1902 bp, Cannabis indica
gcaaatagcagtatgcgacagaaatggttccatcaactacaaaggaaaaaatcaatacaataaaaacgccaaactgacatcagattttattttccaatcaaatgggagtttcaataaccacaacattatccaaaatttctaagttgatccgttactaaaaatggagtgctaaagggcaatttcgtatgaagcgaaagtaagcacttttcataaaatctaaagggaacattaagctaacaaactaaagagtctatatctgatatattagcagaaaatccaaatcctaagagtttcagataggaaccttcctaaaaaaaaagtcttcaatttgatcatttcagttcccatcaaaaggcgatctctcatgaaaacataaatacatagtagaaaaatgataagttctataagaaaatggaggaaaacaaaaagacttatacaaatccaagacgtaaaaaacttgtaattcaatactataatcatattgtacaccaaatcgcgacaaaattatgttcacaaagtatggatcttgagaaacttcccccaaaggctaattcctaactataattagcacacaatcataagaaaaaaaaacaaaacaaaaaagaaaatcgaaatggcatggcacaaaaatagatgcaaaagagaaatacccagatactaaaatgactacaaagtagagaaataatgacaaaaacatgggaagagagctggtccacgagtcttatatttatagtgttggcatttagtgaagagagcttacgaaaggaaagagagagagagagagagagaaaacactagcgagaaataaataaataaataaataaataaatgaaattgaaaagatgaaagaaatgacgtgttaaaagctgttagacaaatggaatggttattcagcttccagttcgatcatgtattcatattcactctatatattggttcttttacaagggaaagaaatcatatgacatttgactaaattctatatgagcactcaaaaacatggatttgtttagctttgatttaggataaaaagatttatgaattttgattcattacatacaaaatttagtattttaaagtgtaaatatttaaatttaatttttagttataagataaatatataaatttaatttttagttgtaataatatttaaattattttttaaaaaatttcgtgatatttttttattgagatatttaaatgaaattttaaataaaaaataaaaatttaataatattgatcaatcataaattatcaaatagttattgacttcacagttataaaagttccacaaatataattgaagtattgaaaattaaacttaaaatatttataattgaaagttaaatttaattttttttaaaaaaaaattaaatataattatttacactataaattactcaaaaaaatttcaaacatttgtgagaatttattctaatttatatattgtacaagaaacaataaacaaaaataatcccaagaaaaaaagtgaaaactatgtggcatttagttaggaggaataaaaatataaaaatgagaatgaaaatgagaataggcatagaaataaaaatagaatggaattaagtcaaattagaaataattttttttctcttttcttgttaattagaattttatccttgtctttggatggtaataaggcagaactttctttagtctttagtcttttagaataaaaattgctttttaatgagaatatattctgtattatatatactcttttttatattaattttttcttcttcctgcaaaaatttcaatcaaagtgaacatttttcattagagaaaaaagtcatattgaagaatagaatattagagtaacttgtaactcattatgtgactgagaattcgggaaaatgctaaaaaaaaaacatattattatta

SEQ ID NO: 191741 - DNA, 1432 bp, Cannabis indica
caaaagccggtatttttaagccaaaagcttatatgggaaagtcaaaatggtgtgatgaaactcaagaacccactactgttgcagaggctcttaaacacaaaggttggtcaagagccatggataatgagatgacagccttgaagaaaaatggaacgtggatacttgttcgaagagaagaatggatgaacattattggaaataaatgggtgtacaagatcaagctaaactcagatggaactgttgaaaggttgaaggcccgactagtggcaaagggattcaaccaaaggcctggcatcgattttgttgagaccttcagtcccgtgatcaagccttctacagtcagaattattctaactatagctgtctcaaaaggttgggatatacggcaacttgacgtgaacaatgcgtttctcaacggaaaactcgaagaagatgtttatatgagccaacctgagggctttatcgatcaaaccaaacctgattttgtctgcaaacttcagaagtctctttatgggttgagacaagcgccaagagcatggtacgataaactgaaaaatactctcatcacttggaagttcaaaaattccaaagccgattcgtcattgttcttctacaaatctcctactctagtcattatggtattaatctacgttgacgacataatagtgactggaaatgacagaaccaaagttcaagagttcaccaacaagctgaacagcaggttctctttgaaagatctgggatcactccattacttcttagggatagaagtacacagagatgacacagggatattcctaagtcaagccaaatacataagagaattactcacaaggacagaaatgttgcatctaaaaccttgcagcactcccatgacagtcgggaaaacattgtccaaaagtgatggagaactactgcagaatcccacagcctatcgcagcataataggtggacttcagtacctcactcacactagaccagacctcgcatttgcagtaaataagttgagtcaatatcttcaagccccaagaacatcacactagacagcatccaaaagaatactgagataccttaaaggcacaatccatcacggcctgcatatcaagttttcagaatctctgcccatcacaggttactcagatgcggattgggcctgttgtcgcgatgatagaagaagtgtggctggttattgtgtatacttgggagacacacttgtgtcatggtcatctaaaaagcaagctgtggtgtctcggtctagcacagaatcggaatatcgtgcactggctcacgttgcagctgaaatctcatggattcaagccttcttaatgaattcgaattccctgtccataccactccgatcagctggtgtgataaacatgggagccagtgctctcgcatccaatccggtgtaccacgcagaactaagcacatg

SEQ ID NO: 191742 - DNA, 956 bp, Cannabis indica
tatatatatttatgaaattaattgacgtttgagagtgagctgagcttggggacctcaactgtacatcatcttgtacaatattgattattattaatgttcacactctgaagagaggtttaatttggtttttgtgattttttttaatacctatatacagtaatgatgttttctctttgattaattagttgtaaccctaatggttattgtatgatttatttttttaatttattaaaatattctcccattatgagtcggccggttaattgtttggtgtcttttgtcaaagaaaagaaaaatgttggactttcttcttctttttatgaagaaaaaagttaacggcttaattaatcataataatgaaatctacaatttttttctgtccattatttatatgtacttatattaatattatatatatatataactggtggcatgcaaagcatcacggtcgatcgaaatgatttcagtactaattagcagaagattggaccaacgcaacaccaccatatatatccatatataatcgatttctgagaataaattattaataatttacatgtaaatggagggttggactgttagaaaaatatatatttcaatgaaataaatacatacgatcaacatataattgcaactttaattattgccagaaaaattgcaaagtcctaatatagcacgttacgtgttcgtgtaattgttatacctagttttcacaaaatatagttaaggataactttcaccaagacttaaaattaaaaccaaacggggttaagatttgatctacggactgtacatgatagtaccctatttgagtgccccatggtacactaagaaggccatgcgagcacgaccacgcttgcatcttaggatttcgaacctagggtttcatgaattcaaagtaaggtttttgctccgaaaccctaattaaatgagaagttcaacaagaactcaactca

SEQ ID NO: 191743 - DNA, 4235 bp, Cannabis indica
aaatttgtaaaatatcttaaattattataataaacacaacgtcttataaaaaattgaacttataagttttctcatgtcaaaacaagaaaaacaaagaaaagaaagcacacttacatcttttctaagtgtggtaatgaagaagtttctcctaaattaaaaaatatatatattaacataacattagtgattgaactgaaatgtactacaacaacaatgatactatttagtttcatacgcaataataaataaaatatcagcaattgttgaatcacgacttctcatatggactactaaatcatgcatcaacaaatgcatccactacaccaaattccaaccattggtaattactaatattagaaatagaattgtacttgattacagcttgtttttatgtaaatgttctttgttttttgtggtaaagactaggacataataccgttaaaacttgagttaacaaaaaaccatatttgggaccaaagaaaatgacagttatgggaagaacatgggtggctaatcgactgcccttccatcacatttcctgttattccgtttacctttttcctgaggctgtcatatgcagactccacattcttcaaaagaagaaaaagttggttcaaaatatatattaataaagtgaaggcctatatggaattggtcggttcactctcccaaaatatttatattttatataaaaaacaaccaaaacaaaacaaaataaatgtaaggtgtagataaaaagtttgaagtagcttccactaacagtgcctattatatatactctgattcagcctttgagaaattgcatgcattccaaagctaaacttagttaaaaaaacttcagcaacttctactaatactcactctcacactcacacacatactaaccttagctacttcccaaatatttggtcgtttgacacttaagaaactcttttccagttggcatagttttctgaaaatttcagtgacttgcagcacgctttagttttggtcccttttttgttgtctgtcttgaagttatagtatgaagtatactcgtttgtctttgtttctagtcttcatttttttcctttgcatagtcctttcgacacaggcaaggcggcaccataccaaacacaaacacactcaccaccaccacaaaggctcctacatttcacagcctccttcatgctcacctgcacctgtgcctgagcctgagcctgaacctgcacccgagcctgagcctgagcctgcgcctgcgcctgagcctgctgagccaccatatgaagatggtcatccaacaaattcaagtgatgtttttgatgtgcgaaaattcggtgctgtcggggatggaataacagatgatacagatgcattcaagatggcatgggacactgcctgtcagagtgactctgccactgttatccttgttcccaatggattatctttcatgatacaatccagtattttcactggtccttgtaaaactagcctagtatttcaggtaaatttatctggtttttcatttaagtcaattttacggaaaaatgacttagtaattaactaactagattaatggaaaaggttgatggaactctaatgcctcctgatggacctgaatcctggccaaagaagcagagtaggcaccaatggcttgtattttacagaataaatggaatgtcatttgtgggaggtggtgtaattgatggaagaggtcagaaatggtgggatctcccctgcaaaccccacagggtaatatagctatgtttgttcataaatattgtcaaaatgttcttgtaatataaacaatatttgctgaatttcatagggagcaaacggaactacattgtcaggaccatgtgatagccccattgtaagttgcatgattttgtattgtacttgtagtagttcatgatgctaagtgaaatcaattaaactaagcatcagatttaaattctgattgtctgtaggcaatcaggttcttcatgagctcaaacttgactgtacaaggacttaaaatcaagaacagtccacagttcaacttcagattcgatagttgtcaaaatgttcatatagattccatttcaattacagctcctgccctgagtcctaacactgatgggattcacattgaaaactctaatgacgttggaatatacaactcggtgatttcaaatggttagattaaactagctaattaagttctatatttcactttttcttttcttcattttcccttgaatgttttagcattgtactttataaaaaggctcagaagaattccaactgttggaaagcacggaagggtgaataattggagataaaaagaagatatttgggcataattttatcttggaaatatgttaaattagtgagttgttgctgtactacaggggatgactgtgtatcaattggatcagggtgccataatgtagacataagaaacatcacctgtggaccaggtcatggcatcaggtactactagtactcttttttaaatttatccgaaactaggctcccctttattcttactatatttggagataagaaaaaaagtcacgaatctcagaatttgacatgactgatcatttgagctaatattaagttttatttttattgtgcttccatctctagcatcgggagtctaggtaatcacaactcgaaagcatgcgtttcaaacatcacagtgaaagactcagtaatcaaagtgtcaaataatggagttaggatcaagacatggcaaggtggatcaggagcagtgtttggaataagattcatcaacattcacatggacaatgtaaggaatccaattataatagaccaattctactgccttagcaaaggttgcaacaccaaacctcagctgtgtttgtatcagacatattatatgaaaaatataaaaaggaacctatgatataaggagtccacctatgcattttggctgcagtgattcagtaccatgcactaatttgactctctctgaggttgagcttcttcctgcttttggtgacatagtttctgaccctttttgttggaatgcatatggagagctacaaactctcactattccaccagtttcttgcttaattgagggccttccttctcgatccacattgggcagtaatgacagcccttattgctgacattatatatataaatataataccagctttattagcttagcttcttttcaaaaagaaatatgcatttatgtatataattctaaaaaagggtcatggtaataagtccaattataagattatatttatgcagatgtttggtctttttttcttttttttttcttatatatgtatgtataagaagttatatcatttgaacgtaattgacttcaagatatgttcttgattctcttttctacttttaagtacattcttactgtaaagtaaaccagctaaaattacacttgacatagaataatggaattaaaatcctattataaatataaatatattattaagtcatgcatcaaagacaagttgatgagaatcataaaaaagtagattatatataacagaaaaaaaaagtacaatattccaaacttttatataagtagtaatgtttgttgtatctgtatgggagaaggagacaagaagttcacattaaaaagcaataataacaagaataattagcttttttagtccctgtacttatgacactatactatgatgccccttaatttataagtgtagttaaaaataccccctaaaatatatcagttggaatagtataatccttctatctaattctgttaaaattgactaaagttgactgttaaattaataatgtggcattatacatagatagtagttgaaaaattatataccattaggaaaataaattacaagtcataaaaattacaatcacaggaaaaaaaaatgaaaaataacatcccaaaaaatagaatatcattaccttaattttccaaaaatcccatgttctttctagtgatatccatctcttcaaatactgtagaatcctaattttacacctttttctaatttgaactgctaaaaaacgattggaattattttaataaaattatttttattaaattttttaaaaggttatgaaatcattttttaatcatctttcattgtcagttattatgccacctcatagtcaattttccctctaaaaagagatgaaattactactctatcctttgttataataccacatcatcaatacaaacggtatttttaaacaaaataaacagaaggactaaatgtatgcat

SEQ ID NO: 191744 - DNA, 1385 bp, Cannabis indica
agcatccatgggaaacttgcttagtattaaagtcattgatctttctaataatagcttagaaggaacattacctagcattggaaattgtctcacctagaagcatcggaccttagaaagaacaatttgtttggaactattcctaatgaattttggtaaactagtttttcttcaaaccttgcacctaagtcacaacaagttttgaggaaacatcccatcatcgacagattagtaggtgaaataccacattggtttgggaaaggctatttggagaatttaaggatacttaaattgagatcgaatgcatttttcttccatcgttgctatcaaatttaagcaaattacaactgctagatttagcagataatggattcaatggcagcatccctgctagttttagatatttcaaggctatgatacaagtccagagagaaaatcattatctattctatggccgtttcaatggtaagaactatgaagatagcttggttgtgaaagtaaaaggccaggatcaaaagtacaccaagattctttcccttgttgttagcttagatctttctgcaaataattaacaaatttgttgggtttggtgaatttgaatttgtccaacaatcattttagcggttcagttctagaggacatgtcaaagttgggacaattgtcatttcttgatctctcaaacaataagctctcaagtgtcatttctaatagcttgtcatcacttttgttcttgggacatctcaacttgtcaaacaataagttgtccagcaagattccttacaatggccacactgcaaccttagaggcatcttcttttgttggaaatctaggcctttgtggccaactccttgacacaaaatgttcagatgatgataatggtgatttggataaagagacaacacttgatgaggatgataataatgatgaagacaatttgattgataagtggttttatttgagtgttggattgggatttgcagcaggacttctagttcctttttttcatgttggcaatgagaaaatcttcgagcgaatcttattttggttttgtggatagtgtactagaaagaatgccattcttggaacataaaaggcctgggagaattcaatgctgaaaatgatggttgcaggtagctgtgttcttttctcactctttttcttatttagtgatatatttatttttattttgtttttcttcatcctcaactatgtaatgcttgtaaattggaattttaatattaataccaaactcttttcatgattaacacgagctcataattgtagagtaatgaaaaactgatcttgttgtgcaactgatgaatagtctttaagattaagaattcaaaaaattaaattgtaaaaaatacacaccacacacaaatcatgac

SEQ ID NO: 191745 - DNA, 1540 bp, Cannabis indica
ttcaaaaaaatataaataaaaattgataggaaatgatattgtgattcagattgcaagagagttacggctgagggacattggtggcattattgtggtagattttattgatatgacagatgaatgtaagttttctcctatccttctgttttgtgcatgaggggcatgtttgctcagctgctaatagttgcttttgtactcaatttcaactgaaccgactttatccattcaattttcctttcatacgaccatcgtttttcatttacttcttctctctttactatcgtcttctcagcaaataaaagactggtctatgaagaggttaagaaagctgttgaaagagacaggtcaatggttaaggtctcagaattgtcgaagcacggactaatggaaattacaagaaagagggtatggttctgaaatgcaattttcaaaatcatttttgctttatttagttccttggatttcagttatagcgcaacttaaattatagaaaaagaaattgtacttctccttgtccttcaattgtaccatatccaaactatttgggaccaactcaatttcagatagtccacaactgaggcaacaagaaattcttctggttagcataatgcttgattagtttaactataataattttctatttcatggcatgttttggacaggttcgacctagtgtgacatttatgattagtgaaccgtgcaattgttgtcacggtactgggagagtagaagctctggagacttcattctcgaaaattgagcaagaaatttctcggttattagtaagtattcacggcatttaacatttttcttgtgttatataatgtttaaagatgacacaacagaggaacatgctaaaaggaataacaaacggctctgtcttgtgattatgtttgttcagttacatgatacaatgcacatacccattttgaatgttttcctgtaagtaataagcttctaataatttcattaggtaacaaagaacaaaaaaacagaccccggaaaccccaaatcctggccaaaatttatcctgcgggtagaccaacacatgtgcgagtacttgacctctgggaggaggacacgacttgcgcacttgagtagttccctcaaagtttggatccttttgaaggtatgccatcataacaaattgtgtgatttgacatgatcatcatagcaaattgcttgaatgctttctgttctatccttgtactgattgtcagctataaacgtacaggttgctagaggcttcactcgaggtgcatttgaggtcaagccatttacagaggacaaggaaaatgaaaagaaacagcaagtcggtatttcagcactacgacctgctaaggccaaacataaccactccggcaaaaaagtaactgtgtttccaataaaaaagtggaagggtagtaagaaatgaatgtttccagaccggcatgtgttctcggtttctgtacaaaaagaggttacatttttttgggtgatcatcatattagaggaaaatgaagaacagaaggacaaaacagaggggggcttgtattcttac

SEQ ID NO: 191746 - DNA, 2932 bp, Cannabis indica
aaaattactaattaaccttaaaacaataagcatatgcatataagtgttttactagctaatgaaactaaatgaacaagagcatgcatatatatatatatataaatattttgaaaaaaaaaagggcttttctataaactaaagagacattttttttttcaaattgtctagaaaccccaccacactagaaaacactagtaaatattcttcttattctacaattgtttctttttctaaacatgcatagaaaggtttgcatgcgaaagctcctttaaccattcatacgttcggtgatgcgacatggcttgcttttgccgttgcttttgatctgcattattatgttgctgcaccttcttattactaccttttatctttgtagtcgacgacgtcgttttggattcttcatgagcttgttgttgtcccaaactatgcttcgcaacacttgtaccactacaattccccgcattaggagttgtacctttgctctttaccaagatgacgttgggcgctactactgcgtctgccgagcatttgcatccgcttaagaatttcatcctcttctgcttatccacgttcaaaacggcgccgttctccttctccccagttgtactataattattattaacgctgttatttcgactaacagaaggagaagaagaagaagaactacctttggtattaatcatattattcactcgactgttgctgcgaatgaaattaaccttattattcaattcttgaaattcaatatcgggtgtccgtaccaaacccaaccgaaaaaatcccacatcgaaaatttatgcttacgcggagtactattaatactaccgactcgctctaacctggcgctcgaagcgcggatctgaggctttggactcgggtggaagaagaaatggtttctgtttcccaaccttggctctgaagtgactcgagttatggctatggtggtcgagtgttgggtacttctactgctacagctactgctccgactgcttatgaattcggatcctgatccgagctttctggtcgtgtcgttccgaaccgggccagcatcggagcttacagaaagtctgagcggtagaatttggccgccgaagaataattcgtcggcggtgcacatttcggatgccgtggagagagagccaccaaacgcgaactcatcatcctgcgtttcgatgacactgctagtagtaacgacgtcgttttttgcatcgtacaagtcttcgacgagaagatcacaaagtgagacatcttcttcctcttgatgatcatcaaccccagaatttgaatgatcttttcccatagagaagaagaagaagaagaagaataagagtagtatttttgttccaatgagtcacatgtaataaagaccctgtataagttataactaaagacaaagacaaagaaggaatatatatataaaaacatataagagagagtgacgtagctatagatacataaaaatatatatatatatatttgaatatttgaaaagtgagagaagaatgtgtctctttattatctttgtttgggagctgagaaatttaaaactgtgcctagcttttaaagggggcaaccactgtgtcatacgttctctgcgctctcgttttcattgtttattgttctttttttacaacaccagaagaagtgggcctcttaatttctaatatctcccaaagttacatacataaataaatatatataatttaaattttatactttgaggtggtggattggtatacaaagttctaatttttccacatttttttttatatatattatacatgaaagaaattttttcgaaggctctatctattagtgaatgggcaatgaatacattttttgtttgttttttatttaaaaacgaaaaaaaaaaaaaataaagttacacttacacacatgggagtttagagctcagcggcgccgtacactataataatatatagtataaataagagaatttattagttggttttatattatgtaataattaattaacgttcttaattataatttcatgacagttataaatataagtaattatgtatagaattagaaagtagaaactagaaaccagaaagttactattatgagggtccattcattagttaaatgttcctctctcaaaagaagataaatattttggtcgataaattttacaaaggcattggtaccattgtttcaccgcagagaggcaaaccttcaaaactaattattatttggtcccctttttttgttaacttgtaaatttttacttttaaattaaattaaaagcaatcaattgattgcacaaaatccatacattaaaaccgactcaattattatgccctatatatatattattagatattcataacccatttagcttattaatcactatattaatttgtgtcataattattaaccattaattatttttagttttgctttccacaaagtatatttatataaaaatatattatgtacatatatgaactgtatccacatgtgaatgatttgatagtggggatttatctccaccaatattttgtagattagcaattatagtttgattaatagatactatatagctattctccgaatccgaggctcattttaatactataattgccattaatcttatgcatgctccaaaataactaatcatttttttgcctaacaatcatgtttcagcctttgtggagcaccactatttttttttttttttgaaaataagcactgctctagcctcttatcttcttcttctgttttattattattattattattattattattattattactctatcttcattcttcaaatagataaataattaaatttggaaaaaaaaaaaaaaaaaccggaaacaactaggcaagtagtctcgtaacaaaataaataattcttaaaaatactatgatttattgcttacttgttctacagttttttttt

SEQ ID NO: 191747 - DNA, 2315 bp, Cannabis indica
aagtaacagttttttgtagtgtgagacggtggcacggtcttcttggagtgaaagtgagagagttgacgaagagagaggcgtaggtgaggattccttttagattttagggttttatttctttttctttaatttgtttatttgaaataaaaatttgataataaaaaaaaagagaattatttatttttaattttaattattttttagattttaaaatgatttttataatattgaattatcaaaattatttggaccaataaaaacatactacatgtatacacgatgactatcccaactcacactcaacgatagaaatcgatagtcaccttaaatttgtaaatgaaagtaaagttaagggaatatacttcaaaaaaagaaaaagataaagggataaactgagtgggaatgggaataggaccttttaccttgacgggatccgtttaattttttatttattttataatattattttttattatttcacattaatctttatgtgtttttgtaatttattaataaatttttaaatatttttattttagtttagaaagtagtgtatattttagattattaacatctatataatttttaattttatataatttatcttttatatttataatttcttttgtttttaaataaataggtcttctatggatatactcactctcgatgggaatatgcgcggatgagtaataaaatagttaacgggaatggagacggggagcactccccgactattatcacccgctccatattcatccctaattaagtgtatataatttgaaatataagagagttttgccgttaattattctttttaaaataacgtttttctacgttgctgcaatataaaagcaacgcaaaaacaagttttctaaaaaattataaataaaaacctgtaaaaaaatccgtaaaaagattttaaaaaataagtgtaataagtattttgtttaaaatttcgtaaagttcccaataattaaaagtgtattggagactatgtatatgtgcaatttgagtgtgtacatctaaggttactcattatatatacctgtctctcactttgagtctaccactaagacaaccccgttgatccgaggaaggaaagtcctcggaagcgataaaattgtacggccaattttgtacttcgatcatcatctgattaatcataaacatgtataatgaaaaattaattatttaatcaggaaaccactatttctaaataaatataaaatggaaaataagtagtagagattatttattgttaaaattaaggtaaaacaaaatgttaagaggtcgatgatcttaatcattttgtatatagcttgcaaatataattttttcttttgaataatttgaggtgataatacttaaataataaggtttcaacttaaatacttattaaattaaatttttaaccttaataatacatttgattacacttttaaaatttgtgtaaatatctctggccgctaattaaactctaagtcagtgcctacaagtcacttttgattggttccagtttatttttttatttaaaaatttatttaaaattgtttaaaaatcatttttttttgtatggatataaaaattaagaataaaactttaatcaaatataattaaaataaatccaatatcctttcaaaaaagaaaattaataaatccaatattatgatgacaaaaaaaccaaaatccaatattaacaacaatacttatattataacaaattaagaacaaaatttgaaacctgaattttagcatcatcccaaaggtgaagtgtatcagttccattagggagggaattaagataaatgaaaacagggccaaaaactttcttccacggttcgttggattgaaatttcagaaccatatcctccccagcatagtgggcacttagaaacatctgtatgtatatataacgaatataataagaatatatttgggcacccaattcatataagtaatcgatcaaataataagtatataattaatattgccagcaataagtctaatttagtactatataaattaatattttttttttgaaagatataaattaatattttgataaggctattgatttttttcttactgtcgaattgttagcactaccaaaatttgctccgagtggaattattcataatgatgaaatataagaattatgttaaattttatcccatgactgattcattattactacattaatattatatgtgtaatttaaaatatataaaaaatattttttattaatatttaataaaaataaactaattttaaatttttgattaattattgacaagaaaaaaaaaattaaatta

SEQ ID NO: 191748 - DNA, 1628 bp, Cannabis indica
aaaaaaaaaaaaaaactagggtgagaaaacttacacgcttgcgtcctcgcgacccagaagcttcacgggggtacccgatctacggcgaaactaagcaactctcagataactcatcgagacccattattctaccgggccaccatgacccgtttctgcggcggacccaaaccaacccgcccaccgacgggtcaatgcccttgttactggtttcaccagcgcttcccatctcaaccaaaccctcctaccctaaaagaaaagcccaaaagaaatcgaaccctgattcacccaaacaaaaagccaatgttaaccctccattttcaaccgccccaaagtcccaaaaatctccccgagccaccgcctcgccttcacaaacaaatgcacatcccgtttcttcaatctgaagggaaccaaccaaaaaaaaaatcaaataccgatctcgcatacagcaaaactccaacaaaactaataaatataacagaaaaataaattgataaaaactttcagttcagtggaaagaggaatgaccttataagagggtttctagcatataaaatatgtattaaaacaggtacagaagatctggtatcttcttcccttgaaaccccaataattatttctttaatctgagcctttttctgattttaacgacttgatttcactctcttttttcctctgactattgtttatgttggagctgagcttcgttttgacagtgcacagagttgaggagagagaaagatagagagttttggggaagagagagaaagtgtgttgtgtttgtgattaagtgttctgagtttggatcaaaccgtacctttttggtatcttttatgcgccgagagggatttttcagggattgagagagcgagaagatgcaacagagtagaaaaccaagtgaaattaaaaaacaaaaacaaaaattaattatcaaaatatattttcttactaagaaataaatcaactataaaaaaatgataataaaaatcatcaaaaattaatgtagctcgtagcctacaacttcctaattttcgcatcgtctcagcataaaacgacaaatacacaaataattaaaagcaaaaaaaagatttaatgtacaagttcatccactttatgctcttataaaattaatcaaacttattttattttgataatgttgtattattctatcaaaaaaatgttttattaggataattatagacctgcatattataaattatatttaatgtagctcgtcagatttttaaactcatttttcttttaaagtttttttttaaatttattaattattctaaatatattttataattgttctagattttaacattctttattagtgaatatgaatatatattaatattatatatttacaattaattaaaatattgaaatttttaaaaaataaaattttagtggtgcatgtataaaaagtgagattttttttttttgaaagaaaaaattatttatatagtgatgtatagtataatataaaaatttgaaaaaaaataataaataaataaagtatattaacgacatttgaaagcataccattttaataaaataataaattgaattgtgataataagttaaaaaataaataaaatatatggtgtaattttggagatatatat

SEQ ID NO: 191749 - DNA, 2364 bp, Cannabis indica
aaaaaaaaaaaaaaagaaagattgatacaatagttacatatatttttaagtgggaatgattaattgtctgattaactaaaaattattatgtatatatgtcatttaattgtaatttgagtatgttgctataactaaagagagacaaattgaagtacaattcaaagtggagactagcgttgccttggttgaattatgcatgtgacgagacattggttctaaacccttttcgggggttttttaccactaaatgaatggctggagaaaaatcgcagaaacagaattaattgacttgtgagtggcttaaaaacctcatgtagtgcaccgttgaactttaggaaattggcttttccttactttggcagacccatttaagtatcccactaccaacataccacaaaaggccgtagccaataagcacaaaactcataaatatcggttccactctctcactcactcctaaacttgatcgttaagtaatactcttcataagctaaaaacaaatatcatcatttatacgagtagcataaccatcaatataaaaatttttaacactcaaatccaaataagtaaatgaaaacgctgaccaaataaaaaatacaaggtggaaaagaaccaaaaatagttggacacaagacaagaaatttacactttttttttttggttgagcctgcaatatacataggagacaaaacaaaaatagatcaaagatgatcagaattaatcgccatgcattatgtatcaaaactcatttagtttctttcccttttccctagactaacccccaatccattaattaaaatcaatgtttaggtcttgagacttgattctcatttttatggtcctaaaaataatactgatcaacgtcccatttacacgacctaaaatctccatccaaatcaaccaaaacagccccgaattcatcctcctccaccgctgagatttggcctggaacataatgaactccatcgtctaggaatagcgggggaggacattgttcatataaagaatcatcactcaagatatgcgaatccaaaaacgaaaaatcatcttcaaaacaccattctgaatcagcagagtcaagtcccacttggggttcagtacagtatatattgcttcggtccgtactattattcgtatcagtaggagtacaggtgtccgtacactcgggatttgactgatcgagtgggttttgaaatcttagaacagaggtgggagaagacagaggagcttgggattctttcccggaatcataaccaccaccaacaacttcttgatgatcatgatcatgatcctgatcctcaacaacaacgacaggattcgagggctcccgccgaggatcgagcccgaaattggtttgagcgccgggtcctttgagtcgaatcgcagcctcatcgtacatcaacgcagcctgctccgccgtatcgaacgtgccaagccaaactctcgtccgccgaaatgggtccctaatctctgcggcccatctcccccatggccgccgccgaactcccctgaatttgggaccattggggaagtactgctccgccacggcagctgttgatttgcacggtcgactcccgctacgattggccggcttaagcttagagtttcggacatccggtcgagtgttgggacagtactcctcgaacctaacctcactcacatgtcttttcactctcaacatagccgacgccgatgactctcggctctcttcatcttcaccgctggaagagtctgtagcttcgtcgtctgttacatatatccttacgactctcaagtcatgcttcctcgactgagatgacttaacaactgtcaccgttcgatgctctgagaacttaactgaatccatttcttaaggtatctttaaaatgaaccagagactaattttatcaatactgaaaaatggaccatcgacaccaaaagaaaaagctcagatagagagagggaaagactatggagaagagaagaagaaaaatgaaggtgaatagttggaatttcagttcacagaaaatggcaggaatcccgtttttataagactatctttggtatcctctttttaccttttcatatttctatttttttcctaatttgtttttttagtttgtgaattacgtggttttgttttagcattaggaggtttaaaaagattttaagtttgatgttacccgtagataccggcttagaccaacgattccttacgaatcgccgcatcttggtttaggcattcgattttgacgcgtgtccgtacggattaattgtgtgccattcgatgatgtttgggtcccaagaaagctggcagggcttccacgctccaatcactctaatttccatttcatttaccattttttttcccttttttttttgaaa

SEQ ID NO: 191750 - DNA, 2921 bp, Cannabis indica
ttcgcttcacttatgctaggagaagtaaaagtctcactagaagtaatttagagaagtaaaggtcttagtatatttattgagtgattattgttggctttggttaggcttggtgagtgtgtgtgagtgctatatatatgtgttttgagtggtgtagtgggtatgcttgatctggttgtttgtttcagcatcaataggagaggctcaggctctcgaaacctatggagttgtgattgtgtgaatcacatttcatcaagtttttccttcatcatccctttcaatactgaaacacatattattcctattactattatattatattatccctttcatcatcaaatcatatcatcgacagaatggatatcatatctcatttcgctttctaaaacatgaaatgtaaactaaagcaaataactaattccatgaatttattgatattgagaaatccaacaatacacatggaaaggtatatatagatagcattgtcaaaattacatacagcagatgatctcagctgagtatccgccatttcattgtcatctccaaacccctcagcaatcaatctcatcaagttatgtgccaccttaacattcacaagatctccggcatgctcaaagactttattcattgtctgcagagcaaatatcaggtaggcaaagaattacaatatgacaattaagaaaacaaattttgccctttgttgtgctttcataaatagtaaatcaagaatggcgaaagaaattacctgtataaaccaaatgttactaggtgcaaattgttccgcaagttcaacgcatctagatgctatataagttttgtaatgattatcattaatgcttatcatgtaatcaatcatacggtcaacaatcacttcaacattggaggacttggtcattttgtataatagtccaaacgttttccgctttagagtatcatccgggtcctgattgttcagatcgagattttattagagtgataataataagtatgaaaagcaaaaacaatcatcatgcatcaagcgttgctaacctctaagcaatcaattacagccagttgatgtggctcggctatatcgggactcatctttataagtcgaccgagagcgtcaatgcccatatatttgagattatgactatcgctctgtgaacaacaatagaaattttgaataaaagaaactgtaaaattggaaaataactattagatgcagtgcagtgcagtgccttacaaaaaaacaactaagaaacccattaagacaaaccttcaaaaatctggaaatgacttcggtggcatcccctaatagcttggtattaggatatatggaagaaacacagcaaatggactcgtaaagtacagcatttcctatattagtagatgaatcacatttgcggaatatgtctccaacaacagtgtacatcttttcgctagcttgcttatccccaattccaagcaacgctagaatcttgagcaacttaatctgcatgcacagctctctaagtaagtttataatgaacaagtaagtaccaacttgatcttgagacgaattggttttgcacctgaatgaagggggcgggcaaggcatggtagtcataagctttgggcagcctgcgctccgccacctgcttgagaatgctgacgaagctaactaccaagtccttgtaagagttgggatcggtgatgataagatcatagagcggacagagtgtagcacccataactccaggatcattgtcacagagtcgcttacggaaattggtgagaagatgggaaatggaagaaggggatttgtggtggaagcgatggagggccataattgccttcttcctgacggcctctttggggtgagcgaggaggtcgacgacctggggcaaaacggcggggatggtctcgtcattgatgagcttgcagacggcattgagagcggcacaaacaacaaggtaattatcggaacggagatccttctggatggtgttgacgatgagaatgatgaggtcgtgatcgtcggagaggaagagagtgacagcgagatagccagtgcgcttgagtagtagattgtcatcatgagtcatcttgactgcgtggatgtaagcgaaggaggcatcgtgaccaagcatctcgacatagacgagacggatgaggtactccttcatcttgcgcttggggatgtcaggctcggtgagacggcgcttgagtgtttcgatctcgtgaagaacgatgcgatcctcttcggccttggatcgagcttctccgatcgacttgacgaggtcgagaaactccttggattggccgaagccaccctgcgatcccatggccaactcccgccctatggtcttcaattgctccattacttactgtactatgagtttctagggttttacagattggaactggaatccaaaatcattccaacaattcaattgaatctcaaatatgtagatctgaattcttctttcgattctggaattgtaaatttagaataagtaggtatgttccacgttttatttgttttgtcctttgtgaaaaaagagagcaacaaaacgagttcacagttttttacttcgccttaccacactgtaattgttactacggcttttcttggttctttttagttcggttggacaaatgattttcttggctggtatttttttttttattaacaaaatttttatgaaagaacatcaaccaaatagctcaaaaaacaaggtctaagtgaaaacaacactaagatatctagcagtcctattcgcgaaagtatgagcatgagtgttatgtcttacacaagatgacagttgcactctgatcatcctcttcatcttgtttgattggcatcgtccaagaatcatgagagaagcgagtatcaatataaactttcgaacaagacattatcaggtcgactttacaaaggttctcagtagtaaataaagtcc

SEQ ID NO: 191751 - DNA, 1811 bp, Cannabis indica
ctcgtgattgaagtgctccacgcacgagccaaagaaaaagctgaggcaccatactctcaggctaggcttgcaagtatgtttgggaagtcatttgtcgccatatgaggtccatagcaaaatatatagagagatgtgtgatgaatactaatattattaagagagagttttgagatcaattctaataaaatgataatagaatgagagttctgtgaattatgtgattacttcttttcatcaaataatgaattataatagtgcatttatcaaaaatttacccataaaatgggattaaaggtcaaagaaatacatgattttgaaatcatatatatgaagttctgagaggcctactgtattataggactttagtttggtagttaattaagttgagggtataaatagactttcctatatagtacaaagggaaacctgatgagatctggccaagtgaggaaatgaatcataaggattaaattaataaactgaaatgctttagcgacactgtactgtacataacttccccaatgctcagactaaactagagacccagaagatgaatattcagaccaatacaagatccccttcttcttgttgctcttcctgttgtggttcgggcaactgtccttctcgataggggagaaggatgcgcttaatgtcctctgcactaagagtctcgtactctagcagtgcaattgccagtgcatgtaatgccttctcatgctaagaacatatcacaagaaattaacattttgtagtataaaaaaaaaagacacgatcttgtaaagggaagttttactattagtatatctagtatcagaacctagccatatgatctctaagagggaaaagtaatcagtatgcctattaaaagggctttcgaaaatatgagcagtggaagaacaaaccttctttaaaagggcttttacacgatcatatgcttctcttaacaacttcaccacctgcatccataaaaaatttaagtggccaaaacattttttacacacatcaaaagctaaaaagctcacaaataccaaaagcatacttcagcatcaacacgcgattgcatatctgaactcggtcgttcttttatatgaattggtccaataatatcgctcatcccgcaatttgataccttttaaaggaagatggaattgtcattagtgatcactggtcggcattcccagaaaggaattttcttgaattagagaaacaataaactcattaaacagaattttccaactattatgaaaatagaaatggcacagcctctgcccgttccacaatgccataagatagaagaaataccatataatgagcaagctctgtggcagtttgtagatcactgcttgcaccagttgttacatggtctcgaccaaaaataagttcctccgcaactcttcctcccatgcagacatctagacgggccagtaactgcttcttgctaattgatgtctcatcaccagatgggagctgagtaaccattcctagagcagacccacgtggcattattgtagccttgtgaattggatgagcaccctcagtgttgaatgcaacaattgcatgtccactttcatgatatgctgtaagctgaaagaagtatggttatgttagcaaattgtgatacaatttcaggtcccaagtattttttaagcaaaaattttattgcatttgtagagcagccacacaaataaaatgctaagtttctagcttcactaaggaattaaggattttcagtgatccttaaatactcatggctggaaaaagacagttaagtattgctctagttcatttatgctcaggtttgctttaatttg

SEQ ID NO: 191752 - DNA, 1493 bp, Cannabis indica
cttagacaggatcctccccgttaattttatccacaaaacttttaccaaccttaaacatgaaaatgaaactaatatctttagcaccaagtaggaaagtaccaaccttgagcatgaaaaaacaagacaaagattgaccggccattagacactgtgaaggaaattcagtatcagcagactgaagcagggagataacccatttttctcccacagatgataactgatggacctgaaaactctctgtactggttttgttaataatgtccatccgcacaaggaactcttgcaattttgacggacaaggactgacttggaatgagatgtctaatgatggcaatacctatattgacaaatttaaaatatcaccagctattaggtttgtattaatgtaagatgtccaccagaattagtaaagggaattcaaaagaataacaccacaagaatattaaatacccgttgataacaaattaattggaaccttctaagaagcagaccacacgtgaatcttcagaaaacacatgcataatgcagaccaaaaatgattgctagtttaaaatattcgccaatggtttacccaaggcataattctatttcaagtaccaatgtaaactaatgtggataatacaactttaattcaaagattttaggaataaaaatatgtttctgtttttcacaggtatttcaagttgcaaataaaaaataatgacttaatctttcaaatcctaatctttaattttttccttgctatatgcatccatgatttttagggatgttttttgtttaaaagagactagtgcactgccctgtgattttatgcatccaggatttttagagagtgttttttgtttaaaagagactagtgccctctgatgtaattaaataccctctagtattactgaagcctttgttcatttctatgtcctttttatggtatagcagcaacccatggtatactaggtggcaagacatagtgtagccacctcagaaacctcagatgcttcctccactgaaggaatagtcctatttccactagtaatggaaatttgaaaccctagttttgtcagtcaccaaccactagctaacaagaactacttacagtggtcacaatctggatgctattaatctgcagcaaaagaaatatggttatctcaccagaattgtgaaggcaccatcacatcaaaacaatcgaagttcagagcctggaaaactgagaacgccatgttgatgcctaggttacactctcttcctgaccaaatcgtgaagacatttttcttgaaaaagagaaagaggccacttgtcttagacaagcaaccaaatgtgggactctgtcaaggaagcatactccgacagcaaaaatacctcttgaactcttggaggtaaagggtctaggtgatctcaaacaaggagaattgactatcactcaatagttaaagaaactaaactggtactggcagcaaccaaatttctttggcagtaaaatccttttgtccaaagtg

SEQ ID NO: 191753 - DNA, 1602 bp, Cannabis indica
ctttttcatttcacttcacttggttttttacttgcttcaaagtcttccactcctttgctttatcttacacaaactccaaagctctaacagaacaacctcactttcctcatcaatcggaggaacctcaaccacaaccacaaccccatttcccatactcagatctaaacccatctcttcatccaaacaccatgagacaacaacatcaacaacgcggacgacgacaaagaggagttgaaagaggaggaggaggaggtaaatcatgtactcacttacttttcaaagctcttttagttgccatactcatcattcttctaccattgttcccttctcaagctcctgactttattagcgaatctgttatcaccaagttctgggagcttattcaccttctattcattggcattgccgtttcctatggcttatttagtcgaagaaataataatgttgaaattaggtttgatgagactgatctttcatcctcaaaggttgaaactttacattatgatatgtctaaaatgtttcagatttcatcgaattgtgatgatgggtttgttgatcccaatttgtctgttagtgaaaatggggtttgttttcagggttggaattcaaagtatttacagggtgaatcaatggttgttgtggctcaacccaattatggtgagaatagattggtagctgattataaacctttaggattgcctgtaaggagtttgaaatctagaattaggaaagggaaactgtagatgttgttaatgattatgagttaggttctggtttgggtttgagttcgagttcgagttctcagcagggttcattatctgagagttttgttaatgattcacaagagaagttctttggtgagttgtgttgtcctcaaaatgatggcattgagttcaataaattaggttcgggtttgggttcaggtttgagttcaagttctcagcagggttcattatctgagagttttgttaatgattcacaagagaagttctttggtgaattgtgttgtcctcaaaatgatgctattgagttcaataaattaggttcgggtttgagttcgagtttgggttctcagcagggctcattatctgagagttctgttaaaaatccacaagagaacttctttggggaaatgtgtcatcctcaaaatgaaggcattgagctcaataaattaggttcgggtttgggttcgagtgctcagagttcattatctgagagttatgttaaagattcacaagagaattactttggtgagttgtgttctcctcaaaatgaaggcattgagttcaatgaagctgttgttgtttcttcaccttcccctgttccatggcgtccgagatctggaaggaggaggagaatgagagaaagagtttgtagtgatcttcgtccttcttcacattttagaccactctcagttgatgaaactcaattcgaatctctcagaaaaacaggatcaccttcaaatgaatccccttcacattcggtttcttctgaagagatgaactcgaaaattgaggacgaatgtagcagcaatagtgctaagagctttcaagggtcttatgcttcttcgagttcaccatcaccaccctacttgaagaattc

SEQ ID NO: 191754 - DNA, 1999 bp, Cannabis indica
caaaactgcatgctgagggagctgtaggagtggatgaggaattagtatggaatagtacaatacgtcttatataagttgtaatgcgattaagataataataaatgcgataataataataataataataataataataataataaataatcattaataataattagcaaaatgataattcaaaaagttatatttattactttaacctgacagtgatttggaaagagaaaaaaaatcctaaattatacactacatcatagtggttataataacacaacaaaacacaaaattagaaaaagaaaatattgaagattttctattcacatatcagacaaaaacagaacaactgtgtctgaaccaacattagtgaactttaaaaaaaaaaaacatatatctctctgccccgtttcctatgtaggtgaagaaactcatcccatgcccccatttttctttgcaagctcactaatgttatgttgagtgaatggtgagataaggaaattttgtgatgacaataatcacttgagtaaaagtagaagttggaacggttactatacacactatttaagttctctaggctggagtttcttttcttattctaaattaaatcaactgagacaacaacatacataggtagacagagaaatgcaattagaaaaaggtgcggggtgaaatctatagggtaccctcttttctctttctttctttctttctttctatttgcttttccttttctaataaaaatcatgacaagagaacaatcacaagtaagaatcaagatactcgtatttatgccttctgttgtactgtagtaagcttgcataagtccggtcccagattcctatgtagagagactcatcgtctggacttagcgaaaccccagaaatctctccgaaaaaatctatctcttgacgttttttgtaatcagcacttgtgctatagacatgaacgaaatctgcaggttctgccaccaccatgaactgaccgtcggctgaaaagcgaatagaccgtgcagcacccaaattacctttcagaactgcaaccgacgacgataggtttcttatgtcccatactcggcaggttttgtcctgattcccagtagcaaaagtacgcccatcgggatgccacgccgtggcaaatgagtaatctcgatgaccaactactgaagcaacagtctgcaaacatcaaccaattgtgtaagccagatagcattgtagttcttttcttaaacaaaataaaataaaagaacataagaaaccctcaaatctcttactcgcaagactatagcattatacttctctaaagagaaaggaggtaaacaaacaaaatggagggtaaaaatacagttgttattgggattgaaaaaagttaatttatagaactcacctttccactctgggaatccacaagaagtccatctacatgatctccaacaatggcaataagcctgcggtcagggcttaccgatgtgtgctacataagaagaacaagtaattgtaagatagtgatccatacgagatatgaaaatatagaggtagagcaactatgtttgacacaaagcaatgaagttgaaattaagtgattcccccaacaccaacaaaaaggccccatttgttgtttagagcttaacagactatcagtaaagttacagcaactcacagccatttgaaattataaagtacttgtacaaactatctaattagtgaaaaaaaaaaaagagagagaagcacaaacgctaacaaaagaaagttgattcaaatatgatgcgcttaagagagctctcacatttacaggccaaggaaaacgtatgtgattcagaagctgaaacctctccatatcatactctcttacaccacaatcattattggatgccatgaaattagtcccacccctgccaaaaataaaaaataataagtttgtaaatgaaaccatcaagaaccattcaaacaatatacttataacatgattaaacaccagctcaacagttcaaaaatggcaatgatac

SEQ ID NO: 191755 - DNA, 597 bp, Cannabis indica
cagaagagtgtgtgtcttaaaggtgtcggtaaggatgaagataaggattcatttgtggaatcgaagaggagaatgggctaaagggaatgattgagtcacttgtggagtggagagagggatatcaatcaatttggtcacacaattggacttgttgccacgtggcaaactcaaactaggaggaaggcttaatatcagagcattgctattagcgacgtgcctagcactctaaaagttagtctattaaattatatgagattcgatatttagttgaaccaatagtaatattgacatataggagtgtactaggcactactagtatcctttaatatttctcttaatattattttatctccaaacactactaaaataagaattatttgtttcaataattattttttgagaaatgttgaaagtgggtataattaagcatgttatcattaattaattgtaaagtctcttgtaaggcttgttataattatctccaaggtaatgtttgttttggtgtaatagaaatgtaatagtaatggtaatacataatgtaatggaataggaattgtaatggtaattaaatacaatgtttggtttattgttggaatg

SEQ ID NO: 191756 - DNA, 1835 bp, Cannabis indica
tctttcatggtagcttgatttaattaagtcttggacaaggagattttctatggagattaatacttttgttttggtaccaggcaattgatgctgttgataatggcattaaccagtatgatacagatcagcctgctcggtacgtcaataatacacatttgtcttcaagagttggaagattaaatttggattggatcgatcctgaccaatctcctacaaaggagaatgaagcctttcagaaagctatggctctggcgggtggcgaatttttagatgtgagattctagacaatttaaagagtagacattaaaggctcctctaattgatgacatacttatttttcttctggtttatgcagagtcttcggtttcatgccaagtcatggttgcctgcaagatctattgtaatggagtgcctttctgcaagatgggatattgatcctactggagaaattatggtctggaccgattttgccctgtaagtatacgtatgcttaccttgcgatcaaagaaaaaattatcggtattataggaaatgttggagataattttgatatcgacggaaatttaagaaaattttaacaaatatgatgttttagaggtatatactgcttaaaaaaattgtgggaaaattgaccgaaaatattgatatttcattctgtgcatatattgacctcataaaactagtaaataccattttggaccttgtgttttataaaaaatattaaataaaaaattgtgatgaaagagctgagtctgggatttaggagaaaaagtcccacattgaagaaaaagaggagttgtttgaaaatatgagggtataaagggagtgtgttgaggaatgtaataagcatctttgcgcttggggcaatgacgcagctagtgaggttctaaccgaggcgcgtctattgctggttgaaaactatttccaaaccccctcttaggccttggttaaccctaggccttcgagaatttctggaagggctccctttggggtaaagtcctacaatcctagttcaatccttttttatagtggtaaaatcaacagttgaaggtcttattttgcaatattttaaaaaatacacagtctattttgtcatttaatataacagaatgtctattcggtaacttttatttgttagtttggtttagctcccaacaaataatgaatttggacttgtaatgaactaactaacagtggaagcttcacttatttgagcttgaggaggagttgaagattaacccttcaatcaaatatgttctttatcaggtacttaaaagaattgacattttgggatcaaatatgtgtttaatatgaatctatgcaaactcacttcagcattctaactttataggacgaaagggccaaacaatggcgagtgcaagcagtggcggtatctcccgatagattcgagagccgcaaggctcttgcatctcaatggcgaggtcttagagacgaagaactctcggaggcaacaggaatcccgggctgtgttttcgtccacatgagtggattcattggtggaaacaaaacttatgatggtgctttggccatggcaagagctagtttgaagctttgaatatgataggattattatggacccaaattatgttcctcattatcaattcaattactttatagcaaaatatatgtttactatattatcccaaatcagatttgatttttcctcttgaattgtatgaaagaaccgatcttttagtttttgacttaatccaaagaatggttgctgtttttcattcattcattctcagcctttgtgcacttaattactgttaaattactcatttaactaataaaacacagcccaggttcttatc

SEQ ID NO: 191757 - DNA, 988 bp, Cannabis indica
ggattcaaaggagtgtaagtgttacttaccctggctaattgctgaagtccagcagcacatgaagcataggctgcagctcctggataaatgcctctttcgccaccagctagtgaggtcaataacactatggaacctcctaacttgttatccctcatttttcttccaactgcatttaacagatgccatggagccatgaagtttatcttcactatcttttggaactcgctttcgggtaattctaaatggttctgtgcttttcctgtttcaaataatcagacagaagacagtgggaaaattctgtttagagggactttttaaatagttttatggttccatgtttctcttttcattactatacattttttttttcaccaaatatgaatacaaaatttcatcttggaagtgaactacaaatctcgatgttttttatgcatgtttttaaataaccatccctatgatatgactagtttatatactaatatatgcctaattctttaatctttagaaaaaacccaatgaatggaacaaagtaggatattgaaaatgagtcaaatgacagaagccccatgacttttttttttcttatttaaatttcctcaaaacttagaaacccaatgactgtgaaccactttgtaattgtgttaaaccaccactaattaaacaatattactcaaggtttttaagggaccaacttactgcatcttattatattctcttcaaatgagctttaaaagtcaacaatatcaagctcactaactaatcaaatcacttatatggactcattttataactagatttgtagatttgcacataactacaggacagtagcagaggctctcctagctttcagggtttaatagaaaaacaactcattaagacatcaatatgattaatgctagacaacccccttaaagggagttgatgtggcacttattaattggtcgacaacctgcaaaagaggactaaaatgaaggcagtgtggctgcta

SEQ ID NO: 191758 - DNA, 2402 bp, Cannabis indica
attaactaagaaattataatatatataaacttatttagggaataataaagaaagtgagaaagagacatatttggagactgaatattgaatatgaaagaaagggtcttctcttccatatacactgtcggcacatttattttaatatttttttattctattcatattctcatcactcatattttgtccttagcctatttagagtctatatttattttatattaaattttcatttgataaaacttctatttttaagatttttttattatatttttaaaaattaagaaatatattatataactatttttgttattcaatttttttaaaaaaaataaaatatgttctgtaaattttatttattgattttatttataagtcgattaggtctagagtcagatttttggggttagggtcgggtccaggtttgatgggtcgaggtttagatctgagtcagcatcgggatctgggtccaattaatctatttaagcccttttgatcaattgtgtagtcacatatttacacagtctcagaatcatcacacttcaccttgttcaggcaatgtgagattgcacaacttatctgatatttcccttgcgaatcatggaactactgtcacactgtattgggcgtgccctaataaaatttattgtatgatacgataccgttcatatttttttataacattagcacaacttgacctgttttaaaaaatcataaaaatatgagatgaactaacacaacacgtatttatagctatagctattagatcttataattaaccacactaaaaacataatgattctccatatgactagtggattttatatatgttagtattacaagaaatatatacatatatctatatttatagatactacatatccaaaaccgatttataacaaatcttttcaatgtatacaatattattaagcacaatttttaattgatgacaattataagtacttaatctaattattaattagttagtgtgagtgtcttgaatagagtattttttaatttaattaatgagccacatttaagttatataagctatcttcaaagaatgtaagactttatccaatatatcaatacatgttgactcatatttattaaattatcacattactacataaaattatttactcaaaaatatttctttaaacaattatgatcaaaaaaaacaagaagaggaaaaataagtaaatatataagatataaatttcatatgaattaagttaataaatgtatatattatatctacataaaagttacaaaagtaaaagaaaaaagaatttaaatacaaacattttagcttaataattaaaatgaaaaaatatttatatttttcatttattacatttttaattgaaatttaaatgtagaattaatatacatgtatgtatatataattatatatgtaatttgttggttaagtggttgtttttcataataaaaagagagaaaggcatataatcctaataattcaatttattattattattttctacaatagaaacccttttccaatcataaaaacgaatattgctcacatgactgcacattatggactttttaaattttagaactagttttgtatatattaccattaaattaaatgtatataatttaaatcgagcaatttttattaatataggcgtcttgaattttagttgtaagaattttgtataaaaagagcgttaagctcgattaaaactcaattataacgaaaaatggagatggaaccagattatttggtaacgcttacaaattattcaaaattcattacttatgttttcttcttttgaggttattatataagattgtcatacaatttctaataaaatttctttatttttttatcaaacgatgctaattaagagttgcacatagtcttattattagagcattttattctttttcaaatcagtgttcaacacaaataatatttctattaaagtacaattttatctatttgtcgatttgataaatgaataaaaattttatattaatatatataatactaatctatatgtgtcattagattttttttttttataaacatatgtcatataaaaaaaaattcctatgaattagataattttttttaatatatatttaaatgcaaatatacatatatggtcattaatttgacccaaactttaggtcatcatgcaaattataataaataaataaataataataataatgaagctatattgggaatttgggacccctcctaagagacaagtggtccaaaaagtcgtcaattcatatagactttagttatttgttcccttttttttaaaaaaaaaattcattaattcatttagaaaattataataatgtctaacaatttagaaaattataaccttgactgttagacaattttttattatttgtatatt

SEQ ID NO: 191759 - DNA, 3651 bp, Cannabis indica
attttgtaataaatttaatatttctattatgatttaatacttttttattttttagaattaatagaatattataaaagggtgaaaaatttgtatcagtcaaagttcaagtggtaaaaatactaatttttgacggtagaagaaatagaacctaacaaaaggggcataattatgtaactattatattttagggagaatttttaacaaacagtatatattaggagacaaaattaggtagtaccaaaagtttacaaaaatactaattattctaaaattaatttgtgtgcttcgtctctatatagttggggtaaagagattacgggcacatttaatcattgtattaaaagttataaggcataattgaagagattacataaaaatgcaatgtggcctcggttcaaaaatacaatgagattaagaagaaatttttaaagtgttagaccagcatgaaagcttttggaaacaacgggctaagtagttttggttatgagaaggcgatcaaaatagcagctattttcataaagtggccagtagaaggaaaaggaataatcaaattcagcatttgaaagatgaacaagagtcatgggtttcgtgggattctggtttacagccagtagttttgaactactttcaagggttgtttacaacttccagtactggttgtaatgaggttgtggaatgtgttccttcagtggcaccaagttggattaacaaagaattgtgctatccacttatatatgaagaagttaataaaactttatttcaaatgcatcctgacaagagtttggggcctgatggaatgactgcggccttttacaaaaagtgttgggaaattgtcaggagagatgtcattaggtgtgtgtgtcagttctttgaccaacgaacctttgagcaaggttgcagggaagctaacatcattctcatcccgaagaagaaaaatttagagcaaatgtctgatcttcgaccaatagtcttatgtaatgttatgtacaagatcatcactaagttataatcaatagaatgaaactgtttatggatactattgtctcaaagaatcaaagtgcgttcatcccaagaaggttgattttttataacgttttggtctcatttggaattctccactatttgaagaggaaaagaaaaggtaatgatggctacatggctctaaaattggacatgagcaaagcttatgattgtgttgagtgaaattttcttaaagttatgctccgtcaattgggctttgtagaagaatggatttgtcttattttaaagtgtgttacttctactagttaccaagttgttcatggaagtgatgaagttggtccaattattccgtctagaggtatccgccaagggagttccttattcccttacctctttatcttgtgtgtggaggccctctcaccgtttcttagaaaatatgactagagtggcttgcttcatggttgtaaagtggcaagtggtgctccaagaatttcccatacgctctttgttgatgatagctacttgaactgtaaatccaaaagaataaaggcagtttgaattcgaaaaattcttcataagtttgagttggcttcgggtcaaaaggttaatttttctaattcctctattttttcagttccaatactattgtttcactaaaagaaaaaacttagtaattttttgggcatggatgtggctactgatgaggttagtctttatttgggactccctagtactatgagtcgcaataaaactactgatttgggctacctaaaagaaaaaataagaaaaaggcttcaaggttagggtaccaaagtttctgtctcgagctaagaaggagattttaattaagatggtagcataagatcttccaaattatgtcatgagtgttttcttgctacctttcgagaccattagagagatcgatgaagagtttgtttcaaagttttggtggcaatcctctactagctctactaatggtattcattggatgtcttgaaagcatctatgtaagcataagacaaagggcaaaatgggttttcgtggcttgagaaattttaatctagctcttttggggaaacaaggttggtgtctactctctaaaccaaaatctttagtggctaggatattttaaagccagatattaccctcatggtgcttttctttcagctaccaatggatctaatctgagctttgtttggcatagtatttttggaggtcacaatagttagtatcaaagggggttttagtggactgttggagatggtaaaaacattgcagttttaggtgaacctgtctccctgataaactaaatcctacggatatctcctcacaccctagccttattggggctaaggttggtaatcttctgaacatgaatggtacagattgggatagtgaagttcgagctaacctttttgagcaaagagatcaagatttgatcttacaaattctagtgtaaaatcttccaggtcatgactgtcttaattggtcccatgaattgtatggtttgtacactataaaaattgcttattagcgattgcttaagagactcatggagtagttactctcgataatcccaccatggatcagctttggaagtcttttttggagattaaaactcctcccaaaaatgaaaaacttgctttggagagcgggaaaagggtgcctccctactatgactcaacttcgttcaaagcgtgtggaggtgagtactacttgtcctgtctattctttagatgacgaaacaatttttcatgccttgattatttgtctagttgctaaaagtgttgggatcgtgtgggcattgaaacaagtttgcaactgaattcaacatttacagactggtgtgttgtagtcttttttgtgcttgatctggatcagaagagattgttggtggctctctgctgggctgtctagaattctagaaacgactgagtgtggaaaataaagtggtgctcgtggagagcattataatgtcagctaagaattaccttaataaatggcttgtttgctcatcattttgttatggattattcgtggtctagttttatgtcagaggacagtgttgtgcaatgaaaggccccccaaggttctagcattaaggtgaatattgacgttgctttgtttagtgaggctcgtaagtatgggaccgattttgttgctcgaaatggtgatggtttacttgtagaaggttgcaccagattgttccatggctcggtgtccgcagaagttgttgaagctattagtattcgagaagctctaagctggataaaagagtaacaatggcctcaggtggtcctcgaaagagactgcctttctttagttcaagccttgcgtagctctatagttaggattttcatgtttggttaagtggttaacgactgtaaggctttacttagtattgtgagtattatttctatttattttgctcaacgatcagtaaatatggtgacttataactttgttagagcctccatatactactaattgtcgtttcagtttggagtatgttcaaactaacttgttatctgtttggtaactaagattgaaagttaataaaatttgatctttcattcaaaaaaataaaatgtattaataatataataaaattgtgatacaattatgataagattaaataattaacagtattaaattagtacataaatttat

SEQ ID NO: 191760 - DNA, 1399 bp, Cannabis indica
aatataatacacacattactaaatgcattattttgtatttcaattagaattaatttgtttatgtgggtgtgtaacaaaagtttcacattggctagaaatgaaaaagatcatagatatataaggatggataatatcttaagggtcttttgggaaggtgcccaaaaaattgaaactgtgtgagcttaagactaaaacagacaatatcatactaattcggtaattaaagtagaagaatagggcctaacagcttggagtaacaacttggaggtctaaagctcaaatcccaagatcactacaagaaaaatcacttttaccagcatagtttgctactacactaataaaaataattgttaccagcgcattttgcaaattgcgcgctggcaaaaatgtcaaagttttaccaatgcacatttacagtagctaaaatctaacttttaccaataaatttacgcactgggaaaaaagtcatttttgacagcgtttttcattttgtgctggtaaagttttaataccaacgttgatttgccaactcattttcaaaagtaaatttcattttaccagcgcaatatcaaacttttaccagtacgaaaatatactagcaaaagtgacatttcttgtagtgggttgcccaaaccattaactggtcacacattatcaattttgctttctaatgaaataataagtttattattttccaatttgtatgggaagctataggttagtacatcaatcgaatatcgattaggttaaacttgttaaacgttcattttgtttaaaaatgtagcataatttagactcgttgagcatttgatagggaacggcttatataattaacaatattaatttctgttaattaatttgaagaaattatatggttggttggtgtgtaatatatatatacaaattaatttattattattattattattattattacttcacatgcacaaacacaccgactaattgttttttgtattttaatgccgtaccaaaagctatatagcttttactatatatctcatcttttcatcaaactctcttttgactaaagaaaaattaatttcaaactaacttacgttccttacttcgatatgtatatatatatatagtaatatattatgccacgtacgtacgtacgtactttctattattatttcatatatatttatatatgaattggctcttggctttctcttataggtcttttatttgtaatttgtttgaggctcaaaatgtattatatatatacttgttagtttgtagtactttgaaagatagtgatcgatcaattaatgtatttgatcattttcgcatttgtttgttttgtaaaatatctataggtgaataattaagtaaaacttaaaagagattaagtgcattaatcatatgtatattaggt

SEQ ID NO: 191761 - DNA, 1240 bp, Cannabis indica
aaatatattgtagtgtatgttaattgtaatagcaaatacatgttaattttaaattagtttaaaccaacatatatatactatcaaagttaaaactttacaaaaaagaaaaaaaaaaactagtaatgtgtagctcaatttgtaactgtcctcttgaacctccatttaaataagtcatgaactcttgatcaaaaaaagtcatctcagaacctaacgaaaaagacgtctctatagctacgcatgtaatttaaacctatatttgtacaaacatttggaaaaataatataattaacaacttgtttgtaatcttatttttataacgaaaaatgttgaaaaggtattattggtatcaagcaccactgatgtttagtacattctttggtgtcatactgcaatagtataattaagtatcgagtcctatataatttaagaaaataacttttagtgtcgaatgtcgctcaacaatcataaaccgtcatctatagaagtgttaggcaccactgattcactagtacccaatatcaatactcttttttaacagctaattccttatttcctaataattttttctttacatgtgtatatattaaaaaaaatatctcaccaaataaggagaaagtttgtaagagggtcttatatatcaaatattttgcaacttttcaagttcaataatattcattattcaatgatgctatataaattatccataacaaaaaaaatgatgctatatatatttttttattaatttttcaaaatcttataaaacaaaagatattacagcagatttatatataatttcatcgtatgcctcaatccaagttgggatgcatgcatgttacacgaacgaaactacaataaaaagcttctaggagtgatgtaattaatgcatgaatcacgtatataatgtgttatatatataatataaagctcttgcattttgtatatttcttcttttcaattagtacgtaacgccagaaataatgtcagagccgtagattgcttatagataaagaataaattataataaatataatacatattgcatacatacatggcagaagagagaataatattacaaattaataagcaaacaaatctcattgatttggaaagcatttgaaaagagggaaaaaaataaaagagaaaagaaaagattttcttaaaaaatgaaaaatagaagaattcgtcatggcaatcttctcgtgagacaaaagaggagaaagtcccatacgtttgtgaattt

SEQ ID NO: 191762 - DNA, 1416 bp, Cannabis indica
tatacatctaaagtcaagataaaatcactttttagaaagattgtcattattttttcttataaagaagtgttcagactttgtcaagtttctactttactttggttagggtaacataaacataatactgtcataggttccaagtgaaaaaactactctttattgtatgtactagtttgttcattgaataatttattttcactaaattaattgagaggtaatgtccttcaggtactatgatttgaaggtcgggggtggaacaaaggcggtgaaaggatcccgggttgcagtacggttgtagtccagttaaatttcattattttcaactatacaacatgaacagataaccgtgtattttccaatatacttggattgagccccatgttaaacaatatgagcatatgatagactgcactgaaatgttgtgaaagaaaaactagttcgcaaattcttgttcttgctgaaaagtatttgaactaattcacttccaccggaatatttcttgtattcatgtgccaatttctgatatcgtagttgaagtctttcttgaataatccaggtataatgaatgtaagatgatcatgttgtaggttcactatgttgctaagtggagaggcatcacttttatgacaagcagacaaggacttggtgttgggggaggaactgtaagatcagagattcatttcttgtttctacaaaagagcttgttgattgattcttggcttttgtttttctgcagccatatggatttgatgttggtcaatctgaaaggggatcagtccttaaaggacttgatcttggcgttgaaggcatgcgggtaggaggccaggtgagaccaatagttcctagatgaagtttcttcatttgtctaaataaagctgctttttcagctaagtttagatttcatgatacttttattttcatgatcttttaatagaagttggtagcaaagatcacttggaactgtactaatggtatcaatttgagtccccgatagagaaccttttcttcttcttcttataagcttatgtaactgttattctccagagattattgattgtgcctccagagctagcttatggaaagaaaggagttcaagaaattcctccaaatgctacaattgaggtaatcatacagcacatgttttgcattttcgtctcaatccttttgaccattctgccaaagtttccaatgggttcatgtcattcttcatgatcactgagatgcataagctttgaatctgcagttagatgtcgaactacttgccatcaaacagagcccgttcgggtaagtaatgggtgcttgaatctatgaaattgtctgcattgttttttagtttatatgctctttgtgacagtttacttaatttactattctgttatgctagatctgctgtaaaaattgttgaaggctaacgaa

SEQ ID NO: 191763 - DNA, 3783 bp, Cannabis indica
cgaaaaaaaaaaaaaaaaaaaaaaagaaaaacgaaaaaatgttgatattatacattttcatgatttcatttttccaaatttaaatacagatttccataaatctttttcctttggatgaggaagattaagtcaaatccatgatcacgctccatttgaatacagatttccataaatctttttcctttgcagtagtggatgatactcacgccactcatttacttaaaatatcacactgatctattggaattagctgttatcacttgtaaattttacaacatgacgcatattctacttgaaagcaaacatatgcaaaacaaaaatggatttatcatgtatgacataagaaagggatttaactttataatatgtgatctgaatcacatgagagctattctactcataacgtttacacatttcaataaaaaaaaaattctttttttatgatgtatcttgtaactatgctgtttatttagatatcctagcctcttttctggtgcagattacattatatgctgcttcgtatatttaaattgcacttcataatcaccaaccatttactgcaaactgcagggacacagagctgagatatatgctgcccgtgttgcaaaatgcttaaccgctctagaagggcgtgaaaaagttactgttgatgacttgaagaaagctgttaagtattcttcagaaagatttgtctcgtgattttctttccatttatataatgtttatatatgtcatttgcattttacatttgaagatgtttcaataacttcatatatggagacacttctagtgtggtgcaaaatgcttatagtgttgtgcttcctgaaatcttgctgatccaactaagtttgtcatcaaatttaattaaggaattgagtgtgtagtttatttcacttttactttgcttgactttccttttacttgaatatatacctgtaaaaattttgttgtgacatattacatactccaggtagaacttgtcattcttccacgctcagtaattaaggaaaatccacccgaccagcaaaatcaacagcctcctccaccaccaccacctccacaaaatgaagagggtgggaaagaagaagaagaagaagaacagaatgaggaagaagacaaagaggtttgttaatattgatcaaatgttcaatttaacatacgatagtatctagatgattttcttttctcaagcaactataaatatagttggatgcatttgatagcttaattcctagctttcatacaccttaagatttcaaaggacttgctgttttacctatgatacaatatttctttataaccaggatgatgaggatgacaatgatgaagagaatgaacaacaagatcaaatacctgaagaatttatatttgatgccgaaggaggtttggtggatgagaaacttcttttctttgctcaacaagcacagagacgccgcgggaaggcagggagatcaaagaatgttatattttcagaagataggggaagatacatcaagccaatgctcccaaaggttggttcttcccatcatgtttcgtattgtctttgttctaaatcaccgattcaaaataggaattgcatctacgcctttgtgaacttatctctgcatattgattgtttgagctcttctcttccaaccattctgactttttcactttgctgtttggtccatttacgagtcccaaaatatccttatattaacaaacttgtgtattttcctcctgggttcacaagcttttctagactcttctctaatattgagtatgttgactttctctgtcaaagggaatttgcaattctcttccaagaacctcggaagtctcaaattgatacatctaataatgattttatttaccatataacagttctctaatcaaactttatttttaacagggtcctgtacagagattagctgttgatgcaacccttagagcagctgcaccatatcaaaaattgcgcaaggagaaggacactcagaagattaggaaagtttttgtggaaaaatctgatatgagggcgaagagaatggcacgaaaagcaggagcactggtatttgaagttcttaaccacgattttgtcacatggatttgtttccttttatatttatatatatatatatatatatatatatattttcaagaaacagaacatattattaaatcataggggtagtagaatatacaaagaaaaaaaaagcatgctatctttgaaacagagagcatgaactgaagaacagcaaaactgctgacaaacatgaagaaaacaaaacatacgccaaatccaatgaaattaaaatacaaaactaaatttggaaaataaaattccagtctcttagccaaactgaaaaatggatgtaaccaaagtgtttgacattatacagtgccaatttgatattagcctatctatgtctttctcttttgtcatgaaaaattcggttgttcctttctgactacaaaacccaaaaaacaacagctacagtggattgccacagcttttgcttgtgttggctctcccttatatggaacaaccaaagtctgagtgcaacatgctgaaacacaccaagataaactgaattcattgagaaccttaaatcacagattcaaggaaaatgagcactgtagaaatagttgatctattgactgggttcctcttccacacaaaacacaccaacttgaggataacagctgaaagtttttctattttgcattgccatatgaaaattcactttgttccacaacacttgccataaaatcttttgactttaggcggtgcctcaacattccaatgagaagctgcccacaaaatgctaacgtaaccttcatgcattcggagggactcaaattctgatttgcatggaaaaatctatgaaatatcccttttccaagctctccggtcttccagtatatcctgcagatgtatattctccaatctctgaattagcttaatgtaatactcaatcatttagatgtcgaagtaggtgaagattccaactaaatgctcatctaacttttgcaatttatatttgctttcgataaccttgtgccacaacaatgattttttgcttgggaacctccatagccattttgtaagtagggatttgcttttcatggatagcttccctatgctcaaacctccagagttcttgggtatacaaactgttccccatgaaattaaatgctcccctctccctaaatcccctccctcctagaggatgtccctcatttgtctctctattgtttccaccgacataggagctttgaattttaaaaggtaataagaaataggcaacgaagatagcactgattataggtcaaccttctcgcctttggacaaatagtcatttttccatccttctagtcttttggaaacttttcttatgattggctcccaaaatcttacttgttagggttgtctctcaaaggcaatcctaaatatttccctgcccaatttcccacagcacattcagccccattaaattaatttgagtcttattaatattgaaacctgacaaagcgctaaaagcttgtttaagtaattttcctaatgattggagcaaccaataggcagcgtctaatggactagtatctctcataccctgataatatagtcctctctacaatttttactgctcctccatcaatggaagctgttaacataaacaccttatgtacagtcttaaaactccaatatctcttactattttgtccataactagcgggttatggagatcttctacaccatgtacaccatgaccagtggaatcatgtcatcttctctctctctct

SEQ ID NO: 191764 - DNA, 2503 bp, Cannabis indica
gtctatgccgctccctacccatagaattgggtctacgtgggtgcatgcctagaggcagtaggtctgtagatagtcggagtatattgggttcccaaaagtttaactactggaactagagttgaaaaatcagaacttgacgttaatactggtggagtaggtgttggagggattccaaaggcttttaaataagcatcttcaaagttaataattcactgtgccttaaacatgaactcgaccagagtctcaaacctctttctttttactcgctccataagaaggagcctactattaatccagactagagagccacaatgtcatcactgaccttcgtctttgcagctgcttccatcattcgtaggatgaagttcttcaggctttctcctagctgttgtttaaggttagtcaatgacctgacctctctatcatagtgtctggtagctacaaactttttctggaaggcagactgcaactccttccagccatgaactaattcgagagataatctcttccaccaaacttcaacagactttgtcaatgtagtgaaaacaaaggcacttggcgtcatcacttactcttgccacttgcatcatccggttgtatttaaataggtgggtctcggagtccgtccgaccatcgtacaactctatttgtagcattttgaagttgtttggtggtggggctttgatgattagtctgatgcacgactcttgctcttcgtcttccgagtctgagagggcctactttgcttctagaccaacttggtaagggtagcaatctattcttctagtcttttggtgtcactgtcaagaaggtcccatccgagaaccttattgtttaaatggctccttaggtcattcccttagggtcttacattcacactaggcctttttttttagcataaactttccctgtagagcagaagggtgtccaagtgcgaaggcgttggtggcgttctgcatttgtaagggctgattggtcgtgttcacttttttcataggaggtaacggggactatttggtctgaggctcgcccactttcgtcttcccttgtcctttgaaagagctgaggctctagtgttggttgggtttgccctattttcttcgtcgacaagttcctccgaagcatccactttagagtcttcatctacgtccccaagtttttcttgaaggcaagccatcattttctccatcctttgggagaacttttcctgacactcttaacttttgttgggtttcaattagcttgttggacacttataacaggtcagggtcctgttcgtagtagtatccatctttgtagcagttgtctttgatttctccatcgtcttcctcctccttgtctctaacataagggtcttcaaccataaactattcacaacgtaaggctagatcgtccactctacccccagctttagatgcttccccatttctcacatggctttactgggtgtgtgctggagggagtggagtaacatcgtcaatggcgacatcgggatctacccgagggggtttttttaccacagttttgtgcgtagccaccattgttcagtagtttcaagcttctttcaactttcaatgaaagcacaaaaatgtttaccgaaattttcagaaactaagtaagtgctttaagaaataaaataatctttaagtaaaggagatggaagatttttatgtagtttgggcgttaattatacccagtccatgagtcaatatattagccttttaggctttgaagtgtattacaagtaggttttacaatgaagaacccttatttcccactttctctatggcttcgtatgcccaatatgtatggccggtacatagccatgtatgctatactttgcatcctgagcaaccttcctattcttcttcttatcaacattctccttgtaacgcgtcatgtccttactcatagaccaaattaacttatgaaaagcatgctcactccatagatacttgaataaaaatttgagctcctcaataaatttcaacatctctagccaaacttggacattgccttcttttgtaaccaatacaccatcaataaaagggataagaccaagcttgtacacgtcatctactacattgcatttctccaattggagcaatagtgtatccaactgcacaccactccttccttcaaaatacgtcctcactaaatggtcactggacttggcttttatctcttcatcagtagggccattacccataggtaagctagtaatctatccaaactcaagtctcctgaatcttatgtccattttaccaacataaaaccatatctcgtcttacttctcattttcaacttttatcttctgcaggagtaggctgtggcccaatgtgcctgagaaagtcgattctctagcttcctagaatggtccaaaagggctggccttaaccctctcagtcaaatttatcacttcaaacttggccttaatatctttaaacctatctgagtcccgataggtaagacgacatgtgaaatgctcgaaaactagtagttt

SEQ ID NO: 191765 - DNA, 3219 bp, Cannabis indica
tctaattaagtctaaaaatgaaacactcaaagcttagtcttgtacacccaagactgttagaaaaggaatattaaggaatcaataaaaccaattcatccccaaaaatgggctaggtattacctgggtatatctggatcagagaaactacgatatctctcttcaaacacctgtaaaatgtaaatcattcaccattaagatattttaattaacttaaagagtccgtgaactcctttgaaggggaccctttccagtatatttcttcaggatggtgtgttttgtgtctaaaaataactaaaagagtgagacaataattgttgataaattgaaggtttccattttcttcgtggcataggatcttaaccgagaacggagcaatcctgaaaatttacaggattagtgtccatggatatttcaggcaggaaaacaaaaaggttggtagtagctgttatggaagtttggtggtctatccggagtgaaagggttttggaggataaagaaactgatgcggagtttctctaggataaaattaaacattgtgtgctattacaatttgaaaataaaaataaaacaaacctcaaaccgttttgaatccaatgctccaactggctttgagagatcccggaaggttgatgatttgttaaaatcaagaatttctgaagagtaatcagctaagatccaggggaaaacaggatattgtgttagatcattataagatcttcctgccagtgtattgagaatcattagatattcaaagtttgttatatccctttttctccatctttctctcgcaatatctgccatcaccagtgctacacgtctatcaacaaatgaaataacaccactcttgtccctaccacttccctttgggaacaaatattcatttctagtggcaactatcaaggttccaacatcttttgcgtccttaagtgatgcaaaattaaaaaatacgggagcaactgaatcactgaagaatatttctatagcagtgtatcttagcaagtaccgagtccagtgaacagcttttatcttcgaacagtcataagaacacatgccacaaaaagaaaaatgcaaaacatcagacaatatacaagatttacagtggtaaaagtaagtgttcaattccctaccttgctaatgttccatctcctatgtcgctttatgttttttagttgtttctttctaagctcattttcatgtatgtcttcaacgttatcagcagaggtacccttctcagaatatagatccagatctattggcattctcagagatttttgcttttgatcaggcttggttgtgtcagaactgcttgaagcatggaagcctttaaaaactgataatcctccagtaccttcaaccaaaatttcaccaaagaaatgcaatacacttttcttaactgctaatcgtccagctaattttctttttgtagttataagtacgcaaggaactgatgtaagaacctgaaacataaatccactatctattagcaaaaccaaaaacatgtacataaatgtccttccatataatcaatcccacgtatacctcactactttctgcctctagtgaaatcaaagaagaatcttttctctcttgcacccaatcactggagtctttgactagctcagggaacggactgtctaagagatccttggcaattgaggccttctgccaagagtgttcagtatcgctttcattagattctgaaatcacctcatcggttatcctacgaactcctttcagcaaaaactgcttcatctgttcaggaagattcccagctaacccagatttactgtcattcatgggaactgtaacctcatcgctagtcactgaggatggaggatgacaaagcctttcatcaaaatgataattctgccttagctttagtctccttctccaagtatcttcttccttgtcaagtttccaatgtttttcagatttatctggaatttggttagcagaccatggacctctttcatcaatcaatgcacgaaacatgtgtatccatttttcctgttaaagaaacattttagtattgcagtgtgacaggatgtcctgagccatatgaagtgtaccaaaaaaaacactaaacagtaagataaaagggcattctttaaaacacagaaaatggcacagaaatcacatacaactatgttttgttgctcttcctcatgagtaagttggaatgcacctcttctgctctcatctgaagctagaatggagttaaggctgctttctaaatcatcttcaaatgctttcctattatttgattctgcagatgaattttcatccattcttgtgctgaggtcatgcaactgtctgatgcgatcagtatttagtgtttttacataacttgtctcatcagcaacctgaaaattaaactagcgagttaatgcccagacaacattattacggaaaatagtgaatgaaacagcactactcgtattattgataaaaaaagtaatacagcacacggggttcaaaagcaaaaccagcccagaagacaaaattcctaagcagcaaaacactaggaacattcttacagaaaacacaaacactgttagtattacacaaaatactatcattttctacaaagatccgaaaagggaacatcattgaactcttaagtgttgaacagtgatatatggctacctaatgtcttgctttattccaagtagcttctacacattcttcagaatcttcaaatatcctttaaggtttattttaattgctttgattgctgtaaatatcagtctcaactctctttatttagctggttttgtttcctatacaaaaaggccagatctcatccatttctctgtataaatacctggttgtgtgtcaataaaacataagaaactattctcgaaaatgtttcaagtttcacaattcctacttcaattttccttctctcctattctaggcaccaaagtactactgtatcacagtacaagggacttatttatgattttcttataaaaaaaatgattccaaacggtattggacactatccacgcaaccatctaacacactttacaccagcttctattgtgcatagaaaatttcctcgattttgagaggcttcctaccatctttgggtcttaatccaagaaattacatactatgggaactccttttcttgctctgggcagctaaaacgacatgttcattctcgcttctgttacaccttatggatgcgtttagttgggggtagtggaagggaat

SEQ ID NO: 191766 - DNA, 3866 bp, Cannabis indica
tactggttagtgtaatcattcccacaagtatctcacaccaaaagaagttttggatcctaatttctgaaatactagaggaaaagaaatcctggaagtgggagggttttgcaaaagttataccatggaagaaggtgttctatcaccatctaccattttgggagctccatctgagtatccaatggatttagatttcatggatgaattgtttttagaaggatgctggttggaaaccagagatggatctgaatatattagccagacttctagttctaatcccctttttgatcctttattctggcctactttggagactaacggtgacttgaacgcaaacccatctcagaggagtaaccaagaagggagacagaaatcaattttcaacgaatctgtgggagtaagtgttctccgagctttgcctccttctcagaccataaacaatgctcccaataatcctggagtttcagaaggtttgataaccgaaaatgatgaaatgagaagaaagaattggattggaaccaaggaaagtcaaggtccttcatcttttgtaatggagaaattatgcagggcacttatgtacatcaaagatgttataagagataaagatatccttgttcaaatatggattcctgtagataaagaaggtaggcgtgttcttacaactagagatcttccttttgcgcttgatgatagctgtccaaagcttgcacggtacagagatatatctgtaaagtatcagtttccagctgaagaggattctaagggtttgataatgggattgcctggaagggtgttctctggtaaggttccagagtggacgcctgatgttcgatactttaggaatgatgagtatccacggctgatgcatgcttatcaatatgacgtacgtgggactcttgcccttcctatttttgagcaaggtagtaggatttgcttaggtgtggtggaggttatcatgactactcagaaaatcaagtatcgccctgagcttgaaagtgtttgcaaggcacttgaggtatgttatcatgacaaacaatagcttgactacgttacatatctaggttcttggtttaattcagccaaggatcatgtttttctttcatggataggataaatcatgcatattccaattgtgagtttatggtgcttattgacaacaatccatgtgtttttttttcctcttcaatcggggcgaatttgcaggctgtcaatcttaagagttctgaagttttgagcactcataatgtgagggtaactattaaaattgtgttgaaagaaaacaaatttatccaaattccaaaggttattttttttttcattacctcacaagtaagtctatttttttccaggtattcaacaagtactaccaagctgcattacctgagattcagcaagtcttgaaatctgcttgtgatacacataggttacccttagctcaaacttgggtaccatgtatataccaagctaaagaggggtgccgtcactctgatgaaaactatgtccagtgtgtttcgacagtggatcatgcctgttatgttgctgatccccacatccaaggtttccatgaggcttgctcagagcatcacctgcttagaggccaaggagttgttggtggagcattcatgacaaaccaaccatgcttctcagctgacataactttatatcccaagacagagtatcctctgtctcaccatgccatgttgtttgaattgcatgctgctgtggcaattcgacttcgcagcattcatactggtgcagctgattttgtcttggaatttttcttgcccaaagattgcacagatcccgaagaacaaaagaaaatgctaacttcactctccttaatcatccaacaatgttgccagagcttaagagttgtcacagagaaagagctagaggaggaaggtgattttcaagccaataaagttttgacaccttccattgacagacctgatacggaaatttgtttccaggaggtgcaacagaatgaaactgatctctcattgttcacagtggaaaaaacaagtgatggaagacactcaaagtcaagtcaaaatcaaagaggttcaagcttgaaaccaagtgatgagtatgtagaagagtgttctactgttggtgaaggtagtttttcaaacttgggtggtgttaaaacgggtgaacgaagacgaaccaaggcagagaaaaccataaccttacaagtgcttcgacaatattttgctggtagccttaaagatgctgcaaagagtattggaggtaacaaaataatatacattttgatgatgttaatctgttgtcaccagtaaatgtagaagcttaaaccacgcaggcaatgaccttatcattgttcgagttctttacataaccactttcgtttcctttttcagtatgttcaacgacattgaagagaatatgcagacaacatgggataaaacgttggccttctcgtaaaatcaagaaggttggccactccctacagaagttacaactagtaatcgattcagtccaaggtgcttctggtgctttccaaatcgattcgttctactccaacttccctgagctagcatctccaaatgtttcaggcaccagcccgttttcaacatcaaaggcaaacgaccatccaacaccatcatgcctgcagcagcctggagaaggcagtggcggaatgtatagcgcacaagccaccactgcggctgctgctgcaacatcgaaatcttcatcgacctacagtcagagttcgagctcgagccaatgttgttccagcaggtcacagcaacatccacaaacgtggaacaacatggttacatccagcgaagatgcaaatggcggggaaaactctggggacgacgtggttctgaagagagtcaggagtgaagcagagcttttcgcaagtcatgaagtagataacaataatctactgccaagatctcaaagccacatctctcttatggagcaccgcaagagcttgaagagtggctttcctcctagctcggttaaaaacgagcggcggttaactcaacaagaaggtgagcttcagagagtgaaagtgacttatggagaggaaaaaactcgtttccggatacacaacaactggggtttcacagatttacagcaagaagttgggagaagatttggtattcaagacatgacaacattcactatcaagtacttggatgatgactccgagtgggttttgttaacttgtgatgcggacttggaggagtgcttcgaggtctggccagcttctcaaaactctaccattaaactctctctacaactatctcgggtttcataggtggcaatgactcccccctttatgacacgtggcacaactgtatttggtaagttgtttctatggtccacgtggcacagacagaagtggtgaaggaatgaaatgaacgaactttgggggagattcagaatcacagtatgctggaatcaatttgtgatcacctcacctcacttcacctttctttttgttttttcctttttaaaatatgtcatttgctactttagattttgtttttgggaactaccctttagattgtttatacagtagcctctgtattttactagaataatgttcaagttaaaagaaaattgaacatttagagagaaaagcaaaaatttgttgtttgtaagttttttcttagagttgttgataagcttttaagttttattggacatagcttttatttttaataatcattttgttacgtaatgcgataaatgtagatagactaatgttactaatccaaactgtactgtactgaaagttggcaccggaaggctctcttgatttaacgttatggctttgttgttaaatcgattatatttgataaatgagcagaatgataagattttaaccaaatcac

SEQ ID NO: 191767 - DNA, 3944 bp, Cannabis indica
taggcaaagatgtagtgaagactgttcaaaagttctttactacaggtgaattcgaagcaggttgtggggatgctaacattgtattaattcccaagactagaaagcctgaggatatgactcaactgcccaattgcttatgtaatgttttatacaaaatcataacaaaagtagtggtcaaccgtatgaagccttttatgaacaaaattgttgctgaaaaccaaagtgcttttatccctggaaggcttatatctgataacgttttgatttcttttgaggtgttacactatctaaaaagaaagagaaaaggcaaagaaggtttcatggcactcaagcttgacatgagcaaggcttacgacagaatagaatggacttttcttgagtctatacttcgaaaattgggctttgaggattggtggactcgactactgctgaaatgtgtttcctctgcttgttatacgatagtccacgggagtcatgaggtgggaccaattgtgccttcccggggcataagacagggagacccgttgtccccttatttgttcatactgtgtgctgaggggctatccgctttacttcggaagtatgaaaacagaggtcttttacatggttgcaaagtggctaacggagcgccgaggatttctcacatgctatttgctgatgatagctatctttactgtaaagctacacggactgaggcaacaagaattcaggaattgctgagcaagtttgaattggcttcaggacagaaggtgaattactccaaatcctcaatctttttcagcacaaatacaacttcgatgattcgggaggatataagtaatttgcttggtatgactatagcgggagccaatagtttgtacctgggtttgcctagcaccatgtctcgtaataagtcggctgttctgggctatctgaaagaaagagttcgaaaacggattcaagggtgggaaactaaattcttgtcaagggcagggaaagagatactaatcaaaacagttgctcaatcacttccaagttatgcaatgagcgtttttttactaccacttgacatcacaagagaaatggagaagatcatgacaaagttttggtggcaatcatcggacaagtcgagtaaaggtattcattggctatcttgggatagattatgtaagcacaagaagaagggaggcatgggctttcggcatttgcgagattttaacttggcacttctcggaaaacaaggctggagactaatatctcaacccgactcactggttgcaaaaatctttaaggcaagatacttcccaaacaattcctatctcaattcggcactaggtaataatcctagttttgtatggcgtagtgtttgggaagcaaagcagctagtcaacaaaggtgttcgatggtgcgtagggaatggcaaagatattagtgttcttgaagaaccgtggctgcctagtactgagaatccttttgtcacttcgtatcacccaaatctggttcatgccaacgtgcataacttgatgaacatagatggaacaggctgggatttagagatcttgagagacttttttgatgatagggaagtaaatctgattaaaagtattcctttgcaacctacagtagctacggatacactaatatgggctgctgaaacttcaggtaactactcggtaaaaagtgcctataatctactccaacaacaaaatggtagctgggataacaatgaagatgatgtctctaagttctggtcttcactgtggaaactcaaaattcccccaaagatcaaaaatgtcatgtggagggctgcaaaaaattgtctccctactctctgtcaacttcaaacaaagaaggtaaatgtgtcttctctctgtcctgtttgtagccttgacgaagagacaattcttcatgctttagtgacctgctccaagattaaaatggtatgggaccgggtaggaattggtacaaacaactggtcgaataccagtacttttttggactggtgcgttcatgttttttctggtgcggatacaaacaaaaggggtctgatttcaggcttttgttgggctatatggcaagcccgaaatgattatgtttggcaaaagaaggtggtcggggttgaaggaattgttgtgttagctaaaggttatcttgatcaatggacaaatgctcaaaattctcgtgttgagacatcatggtctggacttcagacgggtgatggggttgagcaatggtccgctcctgatgaaaatagtatcaagatcaatgttgacgcggctctttttgaaggtggaagcagttatggaataggattggttgcacgtgatcaccatggtttcttactagaaggccgaactgatttttttatgggggctactacaccagaaattgcagaggcaattggagtccgggaagccttgagttggataaaacagaaaaattggcaaaaggcgattgttgaaactgattgtttgacggtggttcaagccattcgaagttcaatcaatatgatatccttatttggccaaatcattactgaatgtaaacaactctatcaagagttaagaaatgtgtctgttatttttatcaagcgatcagctaatgtggtagctcataactttgcaagagcttctatattatttcctggttgtcgtttcggtatggagtctgttcctaccgacttgttaccttgtttggtaactgattttgttggttaataaaattattttccattcaaaaaaaaaaagagagtaggtcattacccggtaactaagagggccaaacctctataaaaatttctgtctctttttactttctagttataattgtatagcacgtggcaagcatcaatttaatatgacttcgctgtcggttggccactttttgaggtcaacagtttggtgctttcattaagagaaaattgatatcatatttgatcaaatgtcatggttaacatgagaagaactcccgttgcaccatctgcatctttgggtcttcctcaagacccacagactgcagatcctaatgttcatgttccagtcacgattggaattcccatggacactgcagatgtggtcaatcctgctaccacgtcaggtactacaaatctgacatctacagttggcaagagtgacacgaacattccggtggatctgaacaacaggcctttgcctccgagggaggaccttccactgacgcctcccactgaaggaaggacccttggggaatagtctcaggaacaacaaccggacctcgtccccgatactatgcaggagacacgggaccaggagttggcaagctcaaaatttctaaatcttatttcaaaatttcaagtgataagctcaaaatttcgcgttcttaaacttctgttatgctacaaactttaatgcacaaattagtagtagttgtctgtaaatactacaagaaaattatcttatctcaatgattcaaaacccacgagatagacctatctcagcagttatcaactgtcgaggatctgatcgtcaagatagaggtaatgaccaatctcggcacttaggaactgccgagatagggtaccctatctcagtagttttaccttgaatcgccgagataggttttccatcatctcacaattttgggcaatctcgatacttagaactgccaagataggtagcagtctcagcagtcaccttttgaaccgctgagattgctacctttctcgacactaaaaaaccattgagataagttaattacgacggatttttaacaaccccgtaattaattttagtagggataaaaatgattttaatatttaaaaactttttcctgcatcgatattcacagttatgcaaagatatgttgtagtaaaatattatccaataaaattcataatatatcactttccataggttttgtaaatggttataagtatgacaactacaattaattctaactataaacctagctaagattatacttgctag

SEQ ID NO: 191768 - DNA, 1286 bp, Cannabis indica
aaaaatacacattaatatgctgaaatttaataataccatggaaaaaattaatttatatacattagaagctgtcaaattgatgttccagtttggtaatttattattgacattaattgcataactttgaataaaaatattagaacattggctatatttgaattttgtccacagataaaggcagtactcattaaattaaattgtgtaggagtgaagaccaagcactattaaaatttgttaaaatatacctcaagcgcccttcttcatcaatgggaggaggagtaatgagtataatacgagttgtaggccatcgtttctgcaagtattaattaaaacacgctgtttaatataaattgaatcttaaagcctgaaatctaatataacacagttacgtatgatttctctttgtggtagaagattattagctttcgcttatttcatatcacggtaacaaatcttatacttattcatatgaatcaaatgaaagtgagagtatcatttgaagtcaattagtgatcttcctattgttgccatgatgaaaaagttttctagagaaacagttaactatgtcccaatgccatacattttaaatttgtggtggtaaatctacttttcacttcaatcaatttaatcatcaactatgttaacaaaataaagtaaaaaacttgatcaaatattttgagaggatccatcacaataactaagccacgcctttttattagaaacgtaataatcatggcacactaacgctaatgaaatgttagtggtcaataatgactagttgaatatactgatgcatattcggatttagagaatacaaatcattaaagtatactgtatacctctctgttccattccaaattaatttatttaaactatattcattagtatcatatagatttacaaagggttataaaaatctagttcagcaatgaagaacggagccacagaaggccccgctgcaggctcaacttgaaacagataagcaaaatagattagaaactcttcttatcaattctcacctattgcaaattttgtcactatatatagtctatacttgtttgcttctaattaaaatagaattacttctttctatacatatgaaatatgtatatatgattttatatttatatccaaaattcaattcttcatccttaagtaaccctttgaagatatgactgatatagaaagtagaatgagaaaaagcaatctcggaagcagagccgcagatccccacactggccacagcctttacttccgtatctgaactatctatgttgtttattaag

SEQ ID NO: 191769 - DNA, 1827 bp, Cannabis indica
ttttgttatcatggtatatatatgttaactatggtatataatttggttagtatagtatacatatatatattaataatatatatttttttattattgctatcccaaattttgtctacatgacgttgcatgtccacataagctaagacagaggacatgtggaatacagccttgccaatagcaaaagaaagtctctttacaaggtatgacaaaatcgtcaagcaacaagcaaatagagttaagcaagccgtcaaggagctgtaccaccatgtctggccggccaaggagagtttataggttggctacttgtatggccaaccaggatatgagcaacaaccaaatagagttaaccctcaagcttttggagctttctgagatctaggagcttgtaacctttccttggaactaactgctaacacatactgattattacagtcgcagacacattttttgtgtgagttgtaatccgtcaagggtagatgaaatgttaaagcatgctaacgtggaaatcatgtggcacattaaaagccctaattgattcattaggcgcatgctgaggcgcgtctgtcagaaaaaggcgtaactgacggttgagtgatttgatgggacctatctttatggcttggcagacccgaggcgaatcattctagccatttttactccctaactgttggatctgatgagagattggaccattaattttgaaaagctagttttcttgaagtataaattaacatcaatgacattccattcactttttccacaacagactctaagtttcctcctgtaaatttctaccttgtcaccattttcatggcatgcaagaagagtgtgaaagtttgattcaataattactcaatctctgtgcaaagcttttctcaaaagttgaacccctacaagtcgactagctagattatctgccagacgaagtgttcgactttcaggctagctgtgatcgttgcatcacctgggttcgaagctttcagacgagtcccctcagcatcaacttctactcttcccactcgacaagtaagtatgcttacactctgattaaacatttatcatttcgtatcttggatagaaattttctgctcatgctagggctaggattatttatatgtcaaatagtaaggtagaatatgcagaagaaattttgcaacgttaagggaaagtttgagatttaatgagcgcccatacatttgttgacggtgaaattagatcgattggggtattagtctggaggttattttccttttaaccgtcagttacttcatgaagcttactttctcttcgttattgtgctagtagtaatggacctgaactaggatctccaagcaagtgttgtaggaaccattgagaatatgtccatcaattttgttgagggaactccggtgggaagtgatcaggctattgttcctgttgtgataccttggtcagaggtgactttggaaaccattcttgaggatgatgcagttgctggggaaggttccctcaccaaggccataagtaaaaggacggccaagacacccctaaccattcaagactatagtgactctatttggaaaatggatcagaaagccaactaatttcgatcctgcaggatattataggcttatgccaatggcgctggcctccgcaacgtccctggattgatgtggcgtaggctatctaccacgggagattctgcttctgctagtacaaagggtttagtccatggagctggtcccacatctccaatagtgctcatctccctttgaggacctacttcgcaagcctgattgcaaaaattaggatcgcccctttccaactaatcccttcatcatataggct

SEQ ID NO: 191770 - DNA, 2295 bp, Cannabis indica
gagagaaaattatcaaaatagaataaagtagaaacaaccttgtactccaataataggtatttaattgaagcattattaaggtattagcctaagaaaaaggatttcaaaaagtatttttgctactaactttagttaatgttgcaccaaattgaggagaaaaattccattatgttttgtcccttataaacaattaaagttataaagtttattattactcattaattcttttttttcctttttaataaagtgctaggttaatgtgcactattggagacaatcttgagctctacacattaaatttctttaatttgtagtgctttttgaattattttatcttcaatactaataaaaccaacaaaataagttaaatagggaagtttaactatttaaaaaatgtagtatgtatactttgctaataagggcattgaaattaatgaatatttagggtatagaatatatagatttaaaaaagtagtaacaataataaaaacaaaactaattctgtgatgaatcataaaaagaattaaaaaaggcaaacattgagagaagagtagggatctgggtgggaaattgtgaaagcaaagcaaggacaaaagctacactaacactatctatctataatagtggaaatggatttttttttaaggtaaatattattttttaccttatattgttgtaaaagttactaattagacactttattttgttaaataataaaatagattttgtattttttaaaattgtacaaataaaaccctaaattgattatttgtcaaaataaaacttaataataatctaatttagaaatgttacgacaaaattaattatatttttttatatctgtgttcgtgttagaaattgtcttaaaattgttcatattaaaaattaaaattgttaaaaattaagctcaatgtctattttggaaaatatagggtctattttaccatttaacaatatagagggtcaaattaataatttttgtaaaacacagagtctaaaatagtacttacccttttttcattattactattagatattagtagtatattttttataggtggtgcttcacaaatgattagcatattttttaaaaattattctttaaaattatataagatctgatacttaattacactaatagtagtatgataccagaagaagggtgctagacactaataacatcttttaagaattcttatttttatttggggctttttttaatgatcatctgtgatgtcaccctacctttgttactgtacatctctcacctgatttcaagtgtcatggtctcccattcctttctattaatatctattatcactattcactagtctactctacaatatcagccattggatttggatgggctccaaacatgtcccccctattggattctgttcatttttgttttcttttcaagttttggttttgggaaaagaatagaaataacaaaataaaaaatgatgtttttatgataagtaacattgaaatttttagactttgatatgaaaaatatgtaatgcaagtcttttgttagtattgtcaaatctctagtactatatggagattgtttgttatgatgattacatctaattttagtttggttgtaattattttaaaaatttattaaaaattacttgtaatttaatactaatttaattttatttttttaaataaaaaaattattttataaaaatttattaaatattttaattaaaaattaatttattttaagtatataattaatttaaatttaaaataaaaaatttatctataataactataataattatatttttattgtaactattaaatataaatattaatttttaaaaagattttattgctatatatttgaatataaataatttattaaattatccttgaaaaaaatctagcaataatgaccgttttgtagaagggtaggggcaaatttctattttccttttctttatacatatataaatttgaaaaaatatatgtagtacacattacataacattctccatctacaaattttttttaacgatcttgtactttgtaattatttaatattattaaaaattttaaaaaatttataataccgaaaataaaatttaaatatataatgtgtataaaataataaataattacaacatgtacaattataaaaaaaatttactaaaaatttttttgaataccaaaaataaataagtgatataacataagactttaggtaagtctttacgtacggcccctaaaagagtgtttcgatcatttcgacatctatgagaactttttaattcaatttttttt

SEQ ID NO: 191771 - DNA, 2078 bp, Cannabis indica
taaatttgattttatttttatcaactgcacttgggtgatctccatggtgattgcagcattttgcataattaaataacacaatataactttatatactgtagtttgcctgatgaattgctccataaatttcatgagagttcagtttgaaatgtttgtgcatttctgctcctttttcttgtttccattacatttttgttaaagaagtatgtacttgtcctcgtgtctaaacatgggttcttctttttcttacctctatcaaacaggagatgaaatgacccgagttttttggaaatcaattaaagacaaggtatatctatttcttgtgatgatcttagttcttaatttatcgacatcctataatgttccacagcttggtgttctgcacatttgatattgttacagcttagtagtgattccctcttttcttgtttcatagcttatttctccttttgtggagttggatatcaagtactttgaccttggtctcccaaaccgagatgccaccaatgataaagtcacggtcgaaagtgctgaagctactcttaagtaagttctgtatcttggtcttctaggtttctatcttaatctcaaacattctgaatgagtaaaatgtaatccaacctggtatgaatattttgcttctttcttatgaactacagtttttctttcttctgaagtttattttctgtaactagcaacaaataataattgcattgcattttgctattttctatgtttgttgaactaacaatatacttattttgacatgtccttcattgtctgatgcaaatacagaattctttttgttgttatcttattgtgctacgaaatcgttttgtcttgcttatgctctttctgtctggcgtaatttttaatcatttcatctctgtaggtacaatgtagcaattaagtgtgcaactattactccaggtggctttcctaacctaactagaatcatgaatgtagattacttgaacttaaaactgtttgaaattcttgactaaaggtacgcaaatggcattttgatatgacagatgaaggacgtatgaaggagtttaacttgaaacaaatgtggagaagtccaaatgggacaatacgaaacattttaaatggtcactaaaattaccctgatgcctgattgttatatgttttgcatgaattttctgggaattgaactgattgtgcctagtatgtgcatttgttgtgtacaacaggtactgtatttagagaaccaatcatttgcagaaacattcctcgccttgtctctggtatggtgatgtgtgttcttctcatttcagctcagttctcatcatacaacgagagctgatttctttttctctttattgtctgattctcaggatggaacaaaccaatttgcattggaagacatgcttttggtgatcagtacagggctactgatatcattattaaaggacctggaaaagtaaaattggtttatggtaatttccactttttattggacttgcaaacttgtgtcaaaagagataatatgcttctgtttttgttcaggttcctaataattttatctatcatttgttactaattatcaattgcaatcacaaaaattatagaacctagtaatggaatcgaagtgaagaaagagatggaagttttcaactttactggtgcaggaggtgtagcattagccatgtataataccgatgaggttcaaactaactctttttcacctttacttcaagagggtgtgtcggttaataatttacaagatttattaaatattaattattttcatgtttccaaatgataaacagtctatccatgcttttgctgaggcttcaatgaacactgcctaccaaaagaaatggcccctttaccttagcactaagaataccattcttaagaaatatgatggaaggtcagctaattgttactacaagtacactatgaatctatgatacattgtcaacctcttactcttttttgcctctcctacttttgtgaagatttaaggacattttccaggaagtatatgaaaatgactggagatccaagtttgaagctgcaggaatatggtgatgtacccttgcaagcatcct

SEQ ID NO: 191772 - DNA, 1181 bp, Cannabis indica
ttttaagacacatctcctatatagcctcctatatacactagtttgatgcacatattggaggtcatattggctgcaccaaaatgattgttttattttaaaagaaagagttggagaagccgtaagcaatggactcctttcctctaacgtatttatttatttattctccttccattcttgttttcttctctaagatacataatatgttattatataatataataatattattaattatatgatatatattgtggggtatacacgtaacacatcgatttcataacacatttttgagtagttgtcccaagcaaatcctataagaatagtattgatcattattgttgttgtttcatgcgatgatcagttaattaattcattttttatataatgtacaaaatctgatcttaattgtttgtctcaccataaaccaattaattaattaaaggagaaaaagtgaaaaataaatataaatataaatataagattaaataagatttttgtccccgaatttgaacatgtactaaatcatgcttttgaacttttaaagtcattaaaaatactttatgaactattgagattgttgaatttaaggacttttgttcaattttagtatttaaaatctaacatggataaaggttcaagagatatgatttagtaattgtcaaaatttgaggggcatgatttgatagatttgggaagcattagtaaaattaaatgaaatcagacaaaagtctttaaatttaacaacttaatagttcaatgagaatttttaatggccaaaaaaattcaaaatataattttatacatgttaaaatttaacagttaaaaattttaattaacttaaataaaattaattaattaggtatataataaattaagaagagaaaggtagatatataaggagagtcgaagaagtcattttcgattttaaaagccaagaagaattataattatggtaaatcattattggtacataggcacactccaaaagaggggtagggccagaaccccatgagagagagagagagagtttcaatttggtccacgaccgaacccacatttgtgtttgccacgtggattacagcaactgcatgatatcagcatgaagtgtgatgatggcccatataataaatattccatttattggttttaaggaagaaataaaaaaaatagagaaatagtaa

SEQ ID NO: 191773 - DNA, 1552 bp, Cannabis indica
cggttgtgaaactaaatttgacatcctcactttcgatttcccgagtagataccaataaaattaatgtcatagacaagagtagcattgccaggtatattgcagtcacctatatgaacaaagcatattagatgtcactatctcttttgttttccttttttgctgaaaaatgtcactatttcaataagttcataagtaacagcatatgctctttcctttctcctcttgaagcacatggaatgaattaaatcaatcttcactatgaagttataggaaacagaaagtttctggtcttccacttgctataggtttagtttaaaaattattccaagtttatacttttcacctcataaaagaaaaaggtgtttagagacttctaataatgaggctatgcattctaatcaacaaaccaaaaagaaagagggtagagttcgaaatgtaattagaatgcacctgaaaagcatcctgcaggctctggaccatatgctaactctggaggaatgtaaagctttcgtcttcctcctgtgtaagtgtaataatggtggggtgaaaatccttctgcgagaaggagaaacatataaaacaagaaccagaagtagatggtttgtgccgaattcatacctactaacataggaggaactccctcaccccctaagattccctgatccagtcccttaaggacctgaagatcaagaaaataaagtccagacaaaagcaattattagtaccgctgtgttgtagcatgtcaattgtgcttgtctttttatcaagagcaatcgctcaaaataagagataacaaatcagagggaatatgaccctcatgaaactgacgatcagcaaaacatcgagattgcctagctaaactatgagcaacacgattagcggactgtttaacaaaatataaagacacattactcagagaacccaatataatctgacagtcctgaactataagaccaaagagggaaaacattttaacattactacgaatggcattgtaatgtagatcaaaattttgtcattttacagttcctctggactaataacaataattatgataaacactttgccttaatgagaaatcaaatccaacaagctttaattgtttcacaaggcaagcaaacttgtgagatggcatgttagaagatgttgacgacaaagaagtaaaatgagattttaaagtaatgcagatcaaaaatttgtcattatacagttcctctggactaataacaataattatgataagcattttgcctttatgagaaatcaaatcgaacaagctttaattgttttataaggcaggcaaacttagtttctatgtgaagacaagctaatctctctactagataacatatacaaaagatcgattggatgtaatcatggagtgaataaaaaataagtgattatctaaccaaatttagtgatcacaaaaacacaatctcagtggtgtgaagtgtgaacccatagttaacacatcttataagtggataaacaaaaatgccatcaccattggaagtaaacagaaaaaaaaatggcaaacacatgcatattgata

SEQ ID NO: 191774 - DNA, 1829 bp, Cannabis indica
tgtttcagcaaatgctttagtgcgaaatgatgattgtcaaaccccacttgatgttgctagactaaatggccataccgaagttgttcggacacttgaggtatgctcacaatcactgtcctcattctttattttatcagtactaggttgttacaacttacatgaccaaagtttgcttttgttaatgctttcagaatcatatatgctatttctccggatgggttcgggagatttatggtccaggtttccttggagcactagctccacatctgttatcaagaaaaatgtatgtatattgctttctttcttgcttattagttcttttgattgtattcatctgttatctatagatgcataattggttcatcaagcgagaaaccgttgttctgtttttatgatactatagttcacatgtaagttcattcttatgtcaattgcagttgggctgtagtcattcctcttggccccaataatcctgcaaagcctctaaagttggagcttgttgtatattctactttaaaggtaaaattgtgtgtttaaatgggtgttattgctttgagtattatgatttgaactgcttgtattgtatgtgcatgcacttttattcaccgtaccgattctgtacacaaccttcatgatataatttggtttttgagctgtatgcttacgtctactttgtttgcatagtcaaattttatggtattctgtgcttaattaattcgccgtctctctccaatttgtgcagaaattggactatgttcataccatttcgcttttctttcaatttttttttttttcttttctttcaattttcactgtaaattaattttgtttgtagcagtgtttttgggcaatgttctgttcaaacaataatctgtaacccctttcgactaggagaaatttgttgttatttcttaaccaacatcttgatttttaggatatcaagaaaagttcatgtatctgccattactactccttcatactattactcttaagctatatcatatgattctgcattaatttttttcaaacctcctttgtagctatgttgctgctttctcttccatggtaattacttgtttgtaatcacaaattgaaactatgaaaatgttgccactaggcaatactaaagtcagtcttgctattgccttgtacccttcataactagaatcttgtgcattattctattcattttgcatgatgcaactattgatctgttgacaggatgcccagccttccatggtcatttctctctggaagtcccgaatcgagaaacccaatctgaatcaatcagatccaacactcactatatctgatggttctataagtaatttcttagtgctcaaactcatttcttgatttctattttgctaagtctacactccattattgctgtcttttgtcattactagttgaaatgatttgaaaaggtttctatattcagtatttgctaaagcttcttggctagaattctatagtcatttgaggtgcattttgtggatttgaaaagaattattagatggtcttaaaaaaaggaaaatcatgctaccgagctacattcttctattgttcttttgtgcattaattttgtttgagggggcttcttcttcttttaatcttatgttttattatcagaatctcggcttaaaacttgcatcggctattcagggtgataagcaacaaaattcagtcattatatgccgcttgtcaaggaacttctcaggtaccatcaaacctggatatattttatcttttgatgtttgcaaaacaaattttaagaaaaatatatttgttgataattatttttggatatggaaaggatttgtttgtat

SEQ ID NO: 191775 - DNA, 2138 bp, Cannabis indica
aaaaagttgatacaaattaatagggaaatgtgatattttatttttagaaatcgtacaaagaatatgctcaatttttattaaagaccattccttgaatcgttttcactataattgccaatagtgatagccttctcttatataaaagaaaaaagaaaatacccttcgataccctctctataaggaccgctcaatatgtatgggagtttctgagacaataattaataacgggtgctactttaatgtagtagtagaacagataaaagagccactcaacacgtgcgtttttcttctttgtattaattacccatgttacaattttcacataataacattgtcttttcttgtaaagaaaaataatctattgtgggggttcgtaatacgttttgattttattttggttaataaaatgcaaattagtattttttactgattcataatatatatatatatatgtatatattttttttttccgctcaaaaacgaaagttgatttctttcacccattttttatcttacaattcttcattattattaattaaaatactttttattttctatttcaaatcaatcctttctgttatttaaacgaaaagagaaagaaaattatgaaaaagggtggacatattgtaagaacctcagtagaaaatttaataaaagattggaatgggtatagttttgggtaaaggcgtccaccggaaatattgaagaggtttataaaaaatgactgatccctggttttccaccctgcttttgggcagtgtaggaaatctacaactcactcacttcttaattccttcatctcttcaatatttcaaattaattcatactactagttagttggcactggaccactaaaactagactactctattcatttctttcttttatatgattgactactctattcatttacttagccatttttatcttacccacctcacccaaaagtaaaatgcaaataattacaatagctttgattttgtctcattcaccattaaaatttcagttagtagaacagacaggggggaagggaattgctacagctagcttgataatgccaaaccgtgaagtatggaggaagattctcttaattacttcttcatagcatacaaaaaaaaaatgaaaattagaatcgaaactccacatcacattttttatgcttctttccattagggattaatattaagttgaaatagttgatgtgtgattaaaaagagaaatgcaaaaaaaattaaaaaattaaacattcatatatgaacgtctttttagaaaaattgtaaaacaaagaagcctaaatagtaagtaattaaggcttgaattacatgctttctaattctgtaacatcaacacaaatagatacagacaacaaagaaacaaaaaaatgacataaaataagaagtagctataactagtgagaaaacaaaaaaacagaccattaattaattctactcatttttggttcaaaattgatatgtttaacagaaaaagccaaaattgccatcgtcgaaattgagtgcataacttaaagggtcgtagttgaagctgaaactcttcttatggagctttgagctacggcgactgtagttgacgtgtctcttgatctgggctctcaccctccgaaatagtttcctcaaccttcttttaccgtacaccataaccccattcggatcaaagcacagctccaacataagattcacacccattttattattctaggctagcttgtttcctggaaagtagaaaaagaacagacaaagaaagaaggaaacgaaaaaggaaaggaggggtgggtatatatagagggagagggagagggtgagagagtgagtgaaaagagaagagaagagaatagaaaaggttgggttggagagaaaggctaagaaagattgggtgtggtttttatggggctttgtgaagctgaaaggctgagtatgttgctctgcgaaagtctacgccgcgcagactgggggtctgtgcgtgtcaaagccctgaaaaaggatagctaagccgaggaaagtaagatgggccgggtagttcaaaactcaaaagtacacatatgcaatatgcattacattagtgaaaaatttcatccacctagcaattagtataagactaattaaaactgaaaaaaaaaaaaa

SEQ ID NO: 191776 - DNA, 1570 bp, Cannabis indica
aaaaaaaaagattcgaccgttaggcgtgttggtgccgggtcgacccaccccatttacatccctaaggagcattgcatcagcaggcaaagcaagttatgaagggcaaaggacattagaagagacaacaatatgattacacagccaataaattgacaacactacgtatgtatagcaaagcatacagataaggaaaataaattcatatgtaaatatatattgcatattatattttctatccacaaccacttgattgagctcatttccaaaaactagtcctaatatctctaatcattcaaacaccaaatatgaaccttttcactatgcatgttagtatgacttgaaataagtgtgttctaaaccatcatcttacatttgttgcctcgtggtcgggtttcccatgcttcaatgtgaaagggaactttcctttcaatatatagctgccatgcagaaaacagtgatcagtaaggtctacgtcaagggaggaaaggaaaattatacagatttcattagcaagcatgattagcatcatagatagagatcatactgttcaatagcacttattgcaaggccaggaacgagtccgtattcaaatgcctgaaacatgaaatatgtaagtgatgagtaagtacattgaaactgaaaagcaccaaaccacacacctaaaataggaatataattttgtgcatctgaaacttgtcaaacaggtgttgaccacagttgcttgaaacccgggccaaagcatgtgaaactcagtatctctattctatcaaagattgacatgccttttttattttaataaatatcagtatataagctaatgtttgataaatgtatactttccatttaggaaagtatacctttttagaatgataaatgtaaataaaatgtttgatgaatttagatcctttatgactgaatctacttgaaggtcaccacaccatgaagttatcaatacccaaaaagcttcacacttgcaaggatgaaagagccattgtagaaataaagaacaataaagcccatatcaaattaacaaataagacattagagtaaagatactaactggccggtagttacgagcttcatatagctctttccatatccatgaattctttaaattatcccaatatgtttccatgttcaagccttcatgaagtacattaaatgcagcttctgcggccagcattcctgtgagccacaagtagtgaaataagtaatacattgtatggatgagatcaggaaatccctaaaattacaatgacactaacacctcaacacaaacaatctacaatttagttaacattcaggaatgcattttcttgaagtttatgatggaaatgttagcaccatgggatgagaaacagaaaccagatgcagttatccaccaacatactataattttcactgcatcggtaagataagatatctcaaagtaattgatattaaacttttgaggcaacttacactggtacattaactaagccatattagtgggggaatgtttgaaataaggtggcgtttggttagaggtaataaaatggaatgggaaagaaaggagacaatctccattcca

SEQ ID NO: 191777 - DNA, 2010 bp, Cannabis indica
attaattcggtgacccatgtgttggatctatattgttgactttaatgtgaagagtttttgacaagccagtctgtgtgtgataatgtagctaactgggttctccttgattgagaaacttattatcttttccttttgtgattggagtaaaggatattttagttagacatactttgtatatttatgagagtctacctagtacttattttgcattttgagattttattttttgaaaataaaacgtttggacaattagacctcaagggcatttcatagaatgtttaccagtgtggaggagacctcaatcataccagttaggttcagggcagaggtctaattagccacattatgggcagcaaaaatactttgtctacaaatcttaataaaattacaacccaaacaatttagaaaaactaatacaattactaatatagttctcagtttcccaaagacctctaagagcacttataacactctgattcactctcttgcatcacaaaattgtggcctctagctactgcagtgtccaggaagtgcagcttgtcaatgagggggtctgaaaatgggagtcttttgacagccttaatttaaggcttaacaactcaacttaaaagttttctaagttaaagctaactaaatttgccattcaaaagcttatatcagtctatacaacggtcattcttatcatttttcagtcatttgtgcaggatttcactctgtacatttgcagggtggcttttgctttttgtccctattaatctaattgctagtagtagtgtcgtcaattttatcactattcctccctccctctctttccccctaaatgtatggaataactttctgttaaacttcatacaattactagtaaaggattcaatccatgcaatttatacacacaaattcattaaatttacaagagatactgcgtccctatatttcctgtatgcactagaaagaagagacagaaagggttattggattgactgtataatgacagcagtaaaaaatttcagcagctttcaatttcaacccaagtaagaagagcactgtgtgtgggtgtgggtgctttaaaaacctttaaataatataagttgtctgcaattgttaaaattttccactatggtatgcccacaaaagaggtaatggttaaatacttcctattcagggtgaatgcagaaactcgtaggaaaaaaaaatcccaagtcgactcgtaatattggcacagttacatttacatgcaaaaattgtactttttatgttaataaataattgcagtagaaaggtcagagtcggacccaataattgaggggtccacaaaattaattgccatggtgaagagttgggaagcatgatttattgattttttggggaccatattgaaaggacttgattacgtttacacaggttgaaactctgaattggaaaacggattctttcgtgttgagcccactatttcctttggtgggggaccctttttatgtcctggacctgacccatttactatggctgacttattcaacccaaggtctttgtgcttctttgtgggctctctctctctctctctcactctctctcattaaagaatcatcaatccaacctctcattggtcatatctacatttctaatgcttgacggtgaatgcttattggttaatgttttatgcagtggattttgggttccattgataagctggattagatactagatggtttttggtgggctaagaaacatgttatctgtatatttctattgttatttataagctcaagtttgagtgaaaattactatgctttggctgatttctgtatgttttgaatgaaaagacggtgttaaactcaagtttgtgaatagtaagtctcaaacgtattaaacaatttagaaagcaacacaccctaacgttttaattaaatgtcataagaccaggccatgatgttaaactcatccgagacttttggaaaatattcattgatagtgaattataatattgtaataatttactcttctttttttttt

SEQ ID NO: 191778 - DNA, 3083 bp, Cannabis indica
gtcattaaaaaacaagccacaaagcatgatacagagttggcataagaaaaagaaatgaataggagaattcaagaggcgttggtcaccatgcagcaggccatggcccaggcgggcctcaatgttgatcccgctaatgttcccccaatacgtggtgacaatggagaaggtccctcacgacctcaagaaaaatgaaaggaaaaagtgcttagtcctatccgatacccttttgaagaccctcctgtctcaaaggataaccgttcacaaatacccaagggaaacaaaacccatcaggacccacgcaaggttcattctaatttcctaccagggaaacgtctgcagggagatgtgtttccccaaaggaagcacaaatcccaggatagtaaggagagtcgcagcgtctctatgaaccaagggcaaaggagaaaatgtgattaaagtaagagagatttaccagtagacttgtgagaaaaaaaattcatgccaaacaagggggaccttagagatcatatcaattccttaaagaatgactcagctaatgttaaggaaattttgaatgaggacgtcctggccgaactagctatcctcaaaagtgatattgctaaagtacctgaagataaaaaagagacgactccaaatctgactatgaggataaagagtcgtgtgctaggaatttcctagaagcagagctccttaagagctttaaaattccagagatgattccgtacacaggggacatggatcccagtgatcatttgtctagattcaatagagtaatgacaacattacgagtaagcaatgatacaaaatgtttgtgcttcccactaaccttgggaggatctgtagaagaatggtttgaaaaattggaaccaggttctgtaagctgttggaacaaactacagactaacttttgaaggcaattcatagtcccccagaaaataaacctcaaagtcagtgccctaaccaatatcaaacagttgactacgaagaccttgaagaccttcataaagagagttaaggaagaagcatccaaaactaagaaagtaaatgacaaaaataagctagcattgttacaagatggcatcaaggtgggaactcttttttggaatgagcttcaacaagaaggtgcaaccagcttctaaaatttctaaaagatggcccaaaaatacattaatcttgaggaagctctgatcacagcatttgggggatactacccaacttgagggccaaattacgcatacatggtgtaatatctagggggtacctaccagatccttggcacctcctagagtggtacctgctcaaaatgtccaattctaagttctccatattattcatagaatccagtcacaacatcagcttattttgagtgcggagctcttatagtggtaagcatggctcttggagcttgtgtacgacactcgactcccatggcagcaccagccataaccatcacaccaacaacacaaagcaagagatctgtaaatagtagtatgtgggctaaaaataagaaaggaaatagattagctgggtaccaaaaataatatacccagtatactaagctgaaagacacccaagaacgagtgtatttggccactcgtcaaaatgtgccataccaaaacccccacctatgttctaggatcgctctaaaagagacccgagtaaaaggtgtgaattccatgacaatgtagggcatgatatgagtatgtgcaaatgcatcaaagatgagatcaaaaacttagtacagttaggacaccttcatgattgggtgcaaaactaattgttgcacatgcaagagaggcatgttaagggtcggatacctcccagaggtagacctcaatctcccaaagtataagtgcttctatctgcacagaaccctgttcagctaggggtccctctcaaacatccacctcaacccaataagagagtggcgatgatatttggagggcctcatatcagaggaacaacctgcaatgagttgaaacgatatgcacatgagttggatcatcataatgaaatatgagaagtaacttaactacccacataaaggtagagacttatggatctacccatcacctttatcgaggaagaggctaagatagtgtgtttcccacatcatggtctgttagttatcgaagcacctattgccaacaaggtagtagcacacgtcctgatagataatggaatcttcacgaacataccatttcaagaagcattccttgccattggacttacgaattaagacatcgctcccactgttctcccatcattgggttcaatggagattcgttgatccccatgggaaaaatttgatttccaatcaccttgtgtcctgatactccacaaagtaccttcaaagtattgtacctttgttactattggttgcctgaatgcctacaatgctattttgggacgaccaacgttggtggagtttggggccataacctcaatctggtacctatgtctcaagttcccaactcaatcgggaggggtaggaacaatgtgtacaaaccaagctgaagccagaaaatgttatagcatagcctcaaagcagccaaacctggtagttaggaaccacccaatcgaggaagacgaattggatccacgtgtaggggcgggaaaggtactagagccaatagagaaaatagaagaaattcaaatctacgacacaaacccggtgaagcttatttgtataggaagaaacctcgatcttgaggaataaatatttttggcctatcatgaggaaagactgattgaatacatccaaaagtgcgatgcttgctagagaatttacaaatatccctaaaagccccgccaaaatgacattactctaatgactagtgcctggccctttgcattatcagggattaatctcattgggtcgtctttcgtacacgggtaggcaaaaggtcaaaccgacgccgactgtagtcagtggactaagactgagcccatgaactctatcaccgcaaagaaagccttagactttataatcatgaacattgtttgctgatatggattgcccctcacataaagggaaccattttgatagtgaccactttacaaaattctgggaaaaacatgga

SEQ ID NO: 191779 - DNA, 3039 bp, Cannabis indica
gattgcagtaggcgaccaccaccacagggttcattttctactagaatctccccccaacacgctaactttgacaaataaaaaaggaaaaaactaatactaaaactcaacagataaatcgtacttcaacttacttgattcacgatctaatagttgccttcctagtaaactttcctgatatttgcaacagttttagttcattcaaaggcaacccatagttcttgaggtcaaaataaaaagaatatgctcctgcagctgtagctagattaaaaccatttcatcatcattaaaataagctcttgatttaatcaagcatcaacttctgtagctatatcagatttagtctctgcaagggtaattataataggttgccatcctgaatggtgatgattaatccattttttcacaccaattatcaaattcaagacctggagtgattcgcccaaggaaagctcttccaagcatgattttctaagaattaaagctgcttcatatctgtaaagaaagcaagatgacataatttttatggccagacttattactcttagtaacttaaatacctacactctaaatgaatgctaagaaagcaaccaaattttataattccacttacttgcattgagaagccagtacggcagaacgtccacttgaggatgttataaacttctgtatccgatcccatgtggttttagggtaaagattaagatttccccctatagtatttacacacttccataatttctcatttttgccaacatacaactgcacagcacctaagttctgcttcactaccatatgttgttctattgcacagtccaaagccttccttacatcagtattgcggtgttttggatccccaaatcgaatgcaatcagtaatgtttacttcagtaggcataattttctcgagtttcaaactattcagggcaagtaaaataacgccaataagaccttgaacatattctgaaggtggtgcacatccttgagttccccaaacaccattattagcaacattttttgcaccaaatggagctggggaaggtgaaaattcagagctgcgaggatacctattgttcattgcatcatgatgaaacgcttggccactttggaaattatggcccttctgcggtgcattaaaactatttggattctgtgactcagtagaggaaggtttaaagtcttctccagttcgattttggacattaggtggattctgtgcataaatgttgttctgattgatacctaacttaccaatatcaggcacattaagtggagcgggcctgggaggagctgaagaaaatctaggaccatcgggcctgggaggaggtggccgaaaatggggattaggatgaaaccggttatcggatccgaaagggggaggttgcatatggggattgtttgagtttggcatccttggggaagggtagtgatttgggggattgcttatattatggtttccattactgcctccaccaccaccaaagtattcatgtggtgctttcttaaagttttttccctgcgattgttctggctgaaaggggtagtcattgttcttaatctcatgcatgcttgttggcacacttgaggctcttgatacagtgggctggcttggatttttcttgctgtttcttcccttagtttttgggtcaacaccccttccaacgttggaaggcttctggtttggaattggtagagtttcttggtaaccttggtaacccatcggttgactagtctggtgcatttcagcaggcgctgagaattgagaagcctcgggcttaaatggttggctaacttggctcccgttaacaagctgacatgattcaccagtggtaagtggagatcctccagatgagaggctcgtccaaagccatacactcttggctgcagcaatgagagcagcagaagctttttgcggctgtgctagaagaatattatacctcctcatccgtaactgatgaagagcattagaaaaatccctatctccggaaataagtaagtaatttgcaggcgccggattatccacggcccaaaacagcatatccactaagattttcttatcactagcatctttcacacctgcccaacaccttaacaatgttaatcaaatattttctttaggaaaacaaaaacaaccaccagtcacccaaaagcatgaattcattcaaaacagtcaactttcagtaaacccctgaaaaacatgatcaggatttcccttcatattcatcgttatcttaaacatctcatatgaaattaatcttgcaaggaaaatgagggttaatcatgatcagactaaacaattttttcgatggaagggtttatcatgatcagactaaacaatttgaatagagtaaaaaaatatatagtaaaaagtacaaaccctaaaaagcaaggtagagaaagaataccggcaggaacatgattaagggctatgccagtgctagaaagggcttgctggacagaagaggggatgttatgagtgtcgccataggcggagatggagacggggccacagtaattaatcttgacgagggcagaactaatgttctgggctatggcgtgagggtcacaacttttagggacctgacaattctctatatcccaccacaccgaagtcttggccccgacgtactgcggctccgcgaaggtgagttgtcccagtctcatcatgctaccaccgccgccgttgctattgccgttgccgctgccgctgccactgctgctacatctgcttccgctgccgctcacatctccacccatggcttagatcggatacctcaaaatatctctaatcacagtttaggcaaaaatcaaaaaacctatagggctcgattccagtcttcttcttcgtcttctacgtctggttacatagtattatatacagaaatcattgtagtaatcgtagaaagggatagaggagaagggaagttatccctcttcgatggttttaagcttcgaatttgattctgtgatgaaataagaagaaggaaccactgattctattcttctaactatcggagacgaaggtattttaacgaaattacga

SEQ ID NO: 191780 - DNA, 1043 bp, Cannabis indica
gatgctcatgtacgagagcttgatgcatcctccagcagtgacgaagcgggtatctcggattttaccaaatttgaccttcttatgttagagacaagagcggtgatatcgaggtatgtttactaaaccttgtccaagaacttaataataggatgatgatagttgtgtggcttttctttcttgttattttaattgtcaaatatttttgttttgttctgattgacatgattgttgtgctctaaatctaagtgagaattacctattcaaatctagtggccttcaattttcattagtattttcttttcaacattaagagcaaataagcaatttcagggactgaaaagtagtataggatttagaaagcaattacttagaagtacgttttgtgtaacaacctgataagaaccgaaaactctaaactcaagaacacagtaaaacagtagcaaaatagtaagaattgtacattgaatatatgagatagttacaactgatgggagcccttaggctcctttgatgtaaatagtgactactcaatacattgcataccctttctaattcccttacacaaccatatacagtaaatcgcctctcaaactagcctcccacacaaagactcatatacccttattatttactgtatgttagcataccatactaatcctagggcctaacacaacctttccaatctgatagaaaaggatcctatgattttgagccgatcttatctggaccgcaatcccaggtttgtctatgaaaacagatctaattatattagtgtatataattaatttctttggtgtgatactaatcgataaggtctcactggtatatgctacaagatctcatagcattctcttgattttcgatttttttgattacgatcaagacaaggcagcgggttttgtctccatttttgtgaaaagtagaatttgttgttgactttgcttaatgtatttagatgttattaatttttttcgagtatcaataatcgtctgattaatccaatcattgatttgaccgttgtgagttcccgaaattagaataaa

SEQ ID NO: 191781 - DNA, 1585 bp, Cannabis indica
tcagggtctccggctaattttcaggtgtacaccgcattgctaaaacctcatgagagaatcatggcacttgatctcctcatggtggacatctttctcatgggtaccaggtacttatacaattctggctgacggtgtgcctttaaaaaaacttttgaagtctacgtttatttattttttttagcaatttattactgaacgtggttcagtatggagaccgttcaaatacattttgaatttgtttttgtcttaatctggatgtcgggaattattctctattatcaaagaatcaattccggtcattcggtctggttggttatattaagagaatgacaccacctctttaactacttgatgtgtgcagactgataccaaaaagatatctgctgtgtctattttctttgagacaatgccgtatagattggatgagagcactggatatatcgactatgaccaggtacctttggtgtcctccattaagtgccatactacttttttcctctttcggtgaaaattgacagtgcttgattaaatttaaaacacaaaatcctcatttctctgatttatattctagatttctagttgaaaaacaggacacagaaaaagagaagatagctaactctttgttggactatatgacattaataactatgatttgtagatggagaaaagtgccacattattcaggccaaaattaatagttgctggtgctagtgcttatgcacgtctgtatgactatgaccgtatccgcaaggtaactttctttaaacttacttatccatgttataaaacttatgtaaattttagtaagtacttatgaatcgttttatggtgaaaagtccagtcataattttcttactatttgatagatctgcaacaaacaaaaagccataatgttggcagatatggcacacatcagtggattggttgctgctggtgtcatcccatcaccttttgactatgcagatgtagtaaccaccacaactcacaagtcacttcgtggtcctcggggagccatgattttcttcaggaagggagtgaaagagatcaacaaacagggaaaagaggtgaattgttgtaattgctttttgaaattgtaaactctttattgtatatctgcaattagctcacttaagatttttattgaatcaaaccgttgctgcttcatattttctcttgaaggtgttgtatgactttgaagacaagatcaatcaggctgtctttcctggacttcaaggtggtccacacaaccacacaattactggtttggcagtagcattgaaacaggtaaaatttggacagacaaatcctataactactgctcaatgacttttttgtggagttaaaagatttgttttgcatttcttatcttgggacctgggcaggaatttagccttttttgcataatagttttttttttggtatatacttctttgtactgcatttttatttgtgctgattaaatgattagtatggcttttgtgattagagctcatcacccattctttgattctgataaatagaaaaatcagatgttcgaaagattgaatgattactatggcttgattcaattttgagaagaaataat

SEQ ID NO: 191782 - DNA, 1556 bp, Cannabis indica
ttcgggtaatttcgctttgctggaggtaagaatagaaaaccactccaaattagttttctaagattgagcctctagtgtattaaaccctaattttgtaagagtagggtgaaagaagaaaattggaaattttccaattttttgagtttctacagctgtgataccatgtagcaatgtagaaaaatatacacttgagttatttttattactattggaaaaaacctttagatagactgagtacaattttagacattaaatacacctggattaacagttactaacacctcaactaagcagcctcttaaattctgattatttctacatatgatgtaatacaaattagtggcgaagctgtgaacatcggaaaacatgaaatgattttttgtctaaaattttcttgaaattagtttgaatcaaattaatgatatttatgacttttaaagaacaaagataatgtgatacttgagggtgaaataaatgtcctaatgaaatttcttacacttttgttgcccaagttgggaagaaaaatggatttagtgcaacatagaacctgttctttcaattgtattacactttagaattaaatagtcttcataaataatttttagtggaactttgcagaagagctctttaaggacaaataaatagtggtagaaggtcaaaatcttggtggcttcataggtttataaaacaaaagtttttggttatttgcctttccaagagatcagtagagtgtggggatgtatcttgtcccaagatactatacatttggtttagggagtttgaggtttaatagttttattttgagcattgctacttgatactagtggtttctagcactttctagacgtgtcaccttataattgattagtaatattatctaaatgttatgacattaaattatatgggacctgatactttattgcactaatagcgatattaacacgtaagaaggttctaagtatcatagttgccgtttaacatttctcttttattttatgcaattgaagtcctaagtcttatttgttataggatgtgaggctccctaataattatggaaggaggtcaatttaagacatttgacctcggtaccttttacgacaataataatataaattgtgcctagtgccatgtgagaaactagttaaaccccatcattctcttagatctgtgtttgaagaattgtgcctagcgccatgtgagacaaaacttgtgtttctatgatttccatagagatgtattatttttatttcattacaaataagtaacagagatgtatatgtatgaagaaaaaagataaccaaaatcatcttcttttacttttttttgttaggatgaccgaccgaaatcttctggttacatctttagtgataaaacttgtaatcgtagggtgctttttaggatttagctttatagtatattttggtgggtgagaaatgtagaaataaagcaataaacagataaatgaaatgcacagctcaatcaattgaggctggctaaagttctttctatatgcattttatatcatcacgattcatgagtatattgcacatcattat

SEQ ID NO: 191783 - DNA, 1739 bp, Cannabis indica
gaagctgtatctgaatttatttattctcgtattggttctttcctatgaaactgtgattaaatggagaatgatactcatttataatttttagtaacttcactgcataacttggtgatatcttacttactacagggaatgcttcctcagttgaagaccccagcaaaatggaactaaataatggaggaaaatatagcaggcatagttcagcatgttgtgcacgacttggaggttttatttgttgttgtattgtgctagaagactgccgaaaagatgatgttccacaacaatctggagaggatgcattgttctgcacattatgcaatgctgaggtataatatcttagtggtaatgtttgtgccaatgtggaacaatctggtttccttcagtaactacaaccctttgttctgtaggtacgcaaattcagcaaacactgtagaagttgcgataaatgtgttgatgggtttgatcatcattgtcgagtaagtctaaagagttgtagacattcacctttttactatggcatcatctaagtactgctactgtattctgtatatcatcattgtcaatgatagcaagcatgtcttgtcttttgtcttctttctatgctttctagttgacgatgcacttaactagtctccatttgcagttcgctctatttatcattgtgatgctgtaaaacaccatcttaatttattataccaggaatgactaagtcatctactctttattggtgcagtggttaaataattgtgtagggaggaagaactatattacatttgtatgcctcatggcagcaagccttgcttgggtaacctttaagtttcagttcacttagattgtgctattcattcttttcttcactgcttgaaattaaatttagtttattctttcctttgtctatcttctttcagcttattgtcgaatgtggggttggcattgctgtttttgttcgttgctttgttgatagaaagggtatgaatcatcagatagctgaaaaacttggagttggattctcacagatcccctttgctattgtggtggtaggtttgaggactttttagctttgtattttcttaaaaaaatttgcgtaatttactttcctattttttaacatttatttttcatttgaaatttattgggtgagatgatagtgtggtgtaataacaatgatttttgtgatgtatctagggcttgtgtactattatatcatttctggctatcgttcctctgggagaattgttctttttccacataattttgattcgaaaggtatgctccttggacttctcactcctctctctatctccttgtttttctagatcaaggtaattttaatatgctctatcttccagggcatcacgacatatgaatatgttgttgccatgagagcacagagcgaaccacgtggaccatctgtagatggggacgatcatcaaagtcttccttcatcacctactagttcagctgtgactgcaattagtgggagaagctctcttggtatgagtttgcaatataagggtgcttggtgtacccctcccagaatatttatggaccatcaggtactcccaactgtatgtgttatatggccatagagtgtaggagtcattgtttttaatatagagcatattagcatttatggtccaaatattgactatcataacctaactaccctaagtttggcatatggtaatggtatgtccacaaagtctgaagttcgagtgattcttgagaacctacat

SEQ ID NO: 191784 - DNA, 922 bp, Cannabis indica
agaaatctgattcttacttttcaggtttatgaattcagagatttcactctttgagatgtagggaagggactttttagattttagggtttttcgttgtaaagactcaaaagttatatgacaatttaacaacagagaaattggaatgaacaaaaggattttggtgatatagaataaaagcactcaaaacagaattctgaagaaggaaaaccaatatcatatgatgagtaatttgaccaaattttttgtgaatgatttttgggggagaaagaaaagaagtattgaaattggtttttgttgatctgttgtgtttatctgaaaaggaaggagtagaagaggagagtgaagatgcaaaagaaactctttaccttgtcctgcgagagcttttgatgcttctgcaaagggtggcagaggttggtcagagaggggattataaatctttggtcatctcatcagccccacaaaccacaatataacaaaccaaaaagaaaagaaaaagaaaagaaaaaaaccaagtcacaagttagaacctaaacctcataccaagtcatatttctttctaaccaaactatggctaccactagtgagctagtcttaactagtaaacttttcttccctttataattataacacccacagtggtagatttattaattaactttgttaaatccccataattataaatgtataacaattacttataattaaagccataaagatgatagagaggtgagtctcaatagccacctcttcctacacccactatttttgagttttgaaggctttgataatgatatctaacagctttttgagggtttttcatttcattttatttttaatatagctatggacctatagctgctttggtttgttttctttcctttaattttattgtacagactgtttattttaactttggggatga

SEQ ID NO: 191785 - DNA, 2102 bp, Cannabis indica
cgcaaagataataagataaacatatataatagatataggaacttggtccccaattttcttttttttttttttttttttttttttttttttttaaaaaattttttcgaataaaacttgtatgtatatatatgactgagactgagatccatagatttgtttattttcatcttttaagagaagaaacaaactaatattagaatcacatttacgtcaagcggttttatgcttagaaatcaaataaggtccatttattacctaaccttataaatgcttttaaaatattatagatatatttattttatattaaatgtgattatttaatataacctataaattattggtttaatattttttttaattttaattttttcgttaaattaaccattaaaactaatatcattaaattaattaattaattattatttttaaaatttttaaatttttaaatttaatttaaaaatatcaacaaaattaaataataattattattttatataaattttaattttaattaattaattatactttataacaaattttactaacacctaatatataaatatatatatatttatttatttgtaggattcctgaaattggaagtaaaaacttactaatcaacgttggccacacagctacataaaaatatatatgtcacaaagggccttttcatgaagctgatggctcaacaataaaaagttaaatagacttattgagaggtcaatttctagaatttctattataattataggttttttttaacagtaatcgttaatctcatgcttgattttgtcattaactgaaacttaatttgtttttttttttgttaatattattataaattataagtttagtacacagtccacctcatgtgttagtgtggtacgtacgtatggataaaagagtcccaacaaattattagtttccaacaaaaaaaaacaaatatttaagataccttaaaataaaaacttgtataatatatctgacttatttgttcggtaacaattttaattaaaaactaagaagaaaattttgtcaaacaaaattacagaaaacaaaaaacaaaatttgttatttggtaactcctaatcatcatcataaccaaacaaaagactattttgataaaaacgtacctaaaataaaactattcacttttttaaccaatttgtctttatatattacgaaagaaatagcctacgtgaaattaccttatatacatattaaacgaataatgacacaaattagcattaggagttaattatattaacaaagaattaatacaaatggtgaccattgaccttattttacaaggttcgttttatttttttactctctgtttgaaccaacgtggattcaaagccacgaagaaaccgtagaattgtcttcttggtctcccttattaaatttcacacactctctctctctcaacaatataaagtctcaataataaatctcttttctctctcaattcatttcattacaaaccccaaacccccccctccaaaaaagaaaaaagaaaaatggggattaaatttaaatctccaatctcatcaccgtcgacccatctcctcatttttcttttagccgccgccgccgtcgcagccgtagccgccgccgctgcccccaatggcggcgttctacggtttaaagaagctcccaaattctacaactctccgaattgtccaaaaaatgtcacgtgctcctcctacaacgatgtcacgtgctcggacaattcagtacacgtggcgatgaccctcgacgcagcttatctccggggatcaatggctgcgattctctccgtactccaacactcttcttgtccggaaaacattcaattccacttcgtcacttcttcctccgccgattcagattctctccgctcagccctctcaggttctttcccttacttgaaattccaaatctaccctttcagcgatgactccgtagtcgccggactaatctccacctccattcgctccgccctcgattgcccactaaaactcgctcgaaaactcctcgccgaactccttcccaccaccgtacggcgcgtggtttacctcgattccgatctcgtcctagtcgcgacatcgccaagctcgccg

SEQ ID NO: 191786 - DNA, 4162 bp, Cannabis indica
tcttctccttgtcttttcaaattttatgtcatgatcatttcccttgaaaattgcacatttggagattgtgttcgacggttatacgtttcccaagtggttttttttagggaaaaatccaatcattttaaatttaattctcagaaaacaaatccccacattttcattttttttataaatactctaaaggaaacatcatttagaacatttgcatttatgaaatcccaaaacaaaaaaggggagtgttcttcgagttcttgagcttcttctctcaaattgatcattgcgcgaactaattcttcagggatctcttcttcaaacattaggttgaatagtgagtaagttctctattcctttctttacatgaaatttcgtataaaattgaatatgtgttttacaaaaatattttaatgttcttcgttcttgaattgttgaatctacattttccttggctatagtgttataacgatctgttagggaatagcccaacttggttcttgtttgcacttagtttctagaaaacgttttatcaatttgaaccactctaggaattttgagtttttaaaaaaaccctaaaatcctttttccattcgaagctttatcaagaagatgaagtcttcttgtttttatttgaatcgttacgctggtcggagtactagagatgttattccatgaaaggcactttccagttgttcaatgcctcacctctctgtccttctttgttagatgaacccagatgatttttgaggaggtgatcaccttgtaaacaatgacctgctcgaatcgctttttgaggacaaccaaacactcagagcaagaagctcatcttcatcttcgagtgaaactttgttttttttcaatatcttccaaggaaggattttcaagtgactctttggagtctaccttccaacaccatccctataccgaccatgtgagtagtgatagttacgaccgtcatatctaggagctaaattgaggttggaggtagttccttctagcctcgtggacatacatagtctgaccagacatccaggacactttgcctgctagacatcctactcttcttagacgacaaatctcccatgcaaacttagccatttatgttgcaaagcatactccgaagcctactccacctctaaggcacaaattgactcaaactaaatataccaccccagcagtagcagtccctgcttcagaccctcacattgggcggcttatggcaggctcaagctacaagaagcttacgaggaggaagttgaagtatagatggaggaagaatttgaagctaaagtggaagaagtaacagaggaggtcaaacctcggaacattgatgggggttacaactctaataatgaacctacagtgccttctagatggtgttaaaggctggtgtggattacgctgagaaataacctaccaacgctcgacccttatggggtctactttgtccatacttatgtcgaagagattgaacaatctctgcgctactggccctttcgaccaggccgtaatttttctcccgcacaaggaaaattgacacactacccaagacctgacctctgtgcatgatacaagccacatgccgactagagtgccaacctatctctccatccttctttttcagaggatgtccaattattatggtatctgctcgatgtagctaagcccaaaagggttgaagtacttgtctgcgttgtacgtggtgtacgcccatcaagatcggtggctacgcctgagactatttcattgtgcgggatgtggatgcaaaccaccattctttccaattagttgggccattatactgcccactgattactctagggttgaggagcagagcctaccagatcctgagattgtcaaaggatgagagggatgttggggttttatatcctaattaaaactcaattttactatagtcttatatactttcaatatcagaaatcatatcttgaccttgtcattattcagatgttttatacatggttatatgtttaatatataagttttatgaaatctcaaaaatatagttattaacaattacaacaatatcatcatagtggaaagtaattatgattatatgctttaaattatttagtcccacaatttatctatgtattggatttacactaacgtgataatcagtgataaagttacttacacttagataagtgatattcttttcgagggcattagtaaagtaaaccaggatcggatgtatcagctatacattgaattggacctatattggcagtgaaaaagacatcataaacttactgttatatcttttctaagtcaatgtcacttagttgatcatagatcatttgatctcaatcttaagatggttaaactctagcttaaatgtattgcacgagttctttgacttgttcattacaagcttaccgtagaactagctcaatacttacatcttaggaattcagtagtgcaattgagtgtgagtgttaatcgtagatatagacatctatagcatatatgtctactagaagtgaaataatagtttccttagagcttggcttaacgcggtaaatgataaagcactcatttcattaattatattagtgttccaaaatatcatttactagtagctaagtgttttaagaataaaatacattgaagcgtaaaatagtaattttgtccctactcaatgtaaaccgtctatagaggatcaatgattattgtaattgaaataatggataattcatagcgtatctacatatgatatatatagcattctatgaaatcaggagcgcaattctgaatctatagtggagacaggagaaattaataaaataagaaatttactcgataaattttggatctacttattaggagcttggttacatagatccacggtccccacgttatttggaataatatcatcttgtagactcaattaaatgtattaataaatcaattcgaaattaaaaatagactatgtcttgtttgagaattatcaccaagttttgggcaattttgagtagaaaatataagtaggagtttatttgttaattagtaaactttgtgggtctaactaataaatatatttaaattatattttatttaataattattaaaattaagttgatatttaaataataagatgagataagtggtaaaataggaaaagacacattattttcatttaaatgaaataaagtggcaaaaatctaactctaaggcccattgtatatttaggccctatagttgattaaagcccaagtcttctatttcagcccattttatataacctaaccctaagtgaatgcctatataaaaaagtgatgagaagatagatctaattttaacctaattcaatgttagacaactttcttctttctttcttctatatttcaaaattcactaagaaaaactctttcaaatattgttcaaaggtgtttgagtatcagcccacactattcatggtgatactcggctgatactcaggcctttgtagaagactgtgatgaacacaatcaaatgagaggaagatcttgattcagatcttgagtatactctattatagacatgaattaagggttagagatatgaatagaatgagtcataatattttgttgtaaccaatgcaaggttttttacaacctttatatgtttatattattgttttaaacttttccatattaagatgttagattatagtcataatttaacatacatgagtagtaaattaagattttggtaaaagagaaaagtgttcaaggacaagtcctctactaactaggtagtggaaaataaagaaaaggttgtttaaagagaacccatacctcctactcatccaagttgttcaaccataagaataaatgagcctatggttgaggctgcctgctcccttatgcccgttgtcaagggaaaaaggaagaaaatggtggagaaagagcccacccatgacacttcgaatgatgaatgacctaccgtcattctctatgatgacactcctcagatcatcgagggagtgaatagtatgaatttttagtctctcttactttaccatatatgtatgctgaacttagcctatcttttctcttttgtactaagtgtttgtttattgtgcagctatatcgtccaagattttcaactggctcagcaagaggaaggaagataactcttctgctcgggagtttcctgccaa

SEQ ID NO: 191787 - DNA, 4194 bp, Cannabis indica
aacttcaatccaactacagcctgattctttgctaagtttcaaatcattcataacagttctaacatctgcagcctcatccaacattcctcctccagcaaacatattcgaaacaagtatgtatgaccctgcctcttctggtttcaaatcaagcaaacattttgatgctaacataccaaattccatttcaccatgtaacttgcatacattcactaaagttctccaaagcagaattgagtctgtaaaagggctacttttgatgaaatccacggcttctgggaatcgtcctgcacgacccaaaagatcaaccatacaagcaaagtgttcaactactggcctaatcccatactttggctccatttcactaaacaaggatagcccagtttccaataatccagagtaactgcaagcttgaagaatagccaatgttgttatctgatcagggtagaatccttctctcttcatatccttgaaaagagaaactgctcttttgccatgtccatgaagagcatatgcagaaattatggcattccaagatatagaatccatgcttatcatactgctaaacgttttatgcgcttcttcaatgctaccgcattttgcatacatggtaattagagcattacttacagtcaaatcggcttcatatcccgttttaatggtgtaagcatggaggctcttccccactagtaagcttgcttggtcagctgataaacttagaagccgcgaaaaagtaatgaaatctggctgaagaccttcgaatcttagttgactgaataagaccattggatcaacttcatcatccctatatgattccatgaatccaactagaattgcattgaataaggcagtagttctatttgaaagtttactaaaaagctttttggctgactgaaggtcaccacacttggcatacatatcagttaaagcagtccctattttgacatcagataagtaaccaaacttaattaccaacccatggatttgggccccaaactcaaggcttctccattctgagcagccatcaagcataatagacagagaaacagaatcacaagctaaaccaagggcaagtgtttccgagaaaacatcaagcgccttatctgcattgccatttctaagatgtgctgtcaaaattgcagtccaagaaatcaaattcctgtcatccattgtgacaaacatcctctcaaactcttcaaccattccatgttttccatacatggttattagtgcatttccaattggactttcacccacaacaccatacttaacagaaagtccatgtaactgcttgccttcatttgcaccaatatctccactgcaagcacttattatattagcatatgtatactcacttggaaccaaaccagaactcaaaagatggataaacacccacattgccttttctccacatcccaacttcccatattccaaaatcatatagtttaaacacctaacatctttgttatctatgccattaaacactttctcagcatcactcaagcagccaccttttgagtacatagaaatcaaagaggttcccacagtaacattcccatcaagcccactttttatggcgaaacagtggacctgttccccatttttccggccctcaggcgaattacacgcctgtaaaatcaccgagcaagtatgctcattgaacttctctccagaacaaaacatgtcatttgcaatccgaaaaacagattcggtatcgccaccttccgagtaccccttcattagagaagtccaagtaatgatatttctaacagacatttcatcaaacactctctgtgcatcatccaatctcttcaatttcgagtacatgttcactagattattcccttcaaaggtgtcattttgggtaccctttttcaccaagaatccatgaatcgtccgacccagatagagattcttagacccaattgaggactgaataagctgaggccagtcattgataagaagggtctcacaatcttcaacttcctcaaccttcaaagtcttgccatttatcactttattcgaagagaaaagtctagaactgcaactgggtattcttgatttcaatggagggaaaggttgttgaggtacagtaatggcgggaacccataaggcactggtggaacaaacggtaaccattgatgagttcccagtttttctttatcaaaaattcttctttaatacttcaaaaaggttcgatttttattttcactatggcccaccaagtggactcgtctctatacaactacgtggagataagaggaccttccaaggaataaaccccccaaatacatgcctatatttgttgcttagagagagctctaatacgagcctcatttgccaaatccattgtctctccctcttttatctctctatctatattttctctcagtttcagcaactctgagagagtgagtggagctatggaaatggcgattggcttcaacagttgctcttgttcctccttctctattcccaaccctaatactagaaccatttcttcttcttcttctgctgttccactctccaagcaactctttggtctcagcttatcttcttctaatagctcagtccctcattcattttcaaccgccaaaactgctcttaaatttcgttctgggaattcaatcagcagaaaaccaatcaagtgttcggtttctgaagctactgaagcagccactggtaattccgccaactttttttgttggtcaaattctgatactaatattttgttaaaataattttcctgtaatgggtatttggttgtttcagagaagaagagtcagttgaagagaagaagtgatataagaaacatagcaattgttgctcatgttgatcatggaaagacaactttggttgatgctatgttgaaacaatcaaaggttagtcaaataatatgttgtgtttatgaaagtcatcacattcattggataagatgatgagattaatcttattaagttcctattctgtgtttttgcaggtgtttcgtgataaccaatttgtgcaagaaaggataatggactcaaatgatatagagagggaaaggggaattacaattcttagcaaaaatacttctattatgtataaagatacaaaaattaatatcattgatactcctggacactctgattttggaggtgaagtggagcgtattcttaatatggtggaagggattcttctagtggtaaatcaatctctatttgaactatttcatttccttcattattataaagagtgatgacaaatgcattagtaaatgatagcttctttgttatagacactaatctgttgttgacacagcctcaagtttaattctcttttagaattttgtatgtactgctaatgtgctccaattccaatatgtatcttcttatgaacgagttggtttatttgatggtctaatgttaaagtacaaatgtgcttttcctttttgtaggtagattctgtggagggtccaatgccacagacaagatttgttttgaagaaagctttagagtttggtcatgctgttgttgttgttgtcaacaagattgataggccttcagctcgaccggattttgtcattaattccacttttgaacttttcattgaacttaatgcaacagatgaacaggtaaaaatatcctttttcctttcaaatattctgagttcccaataaatttgatgcatgctgagtgatctttcatttgaggataatttgccaaaagggtaacacattttgtttatttactacatactgtaaagataaaccatgtattaagaaaaatggtgtaaattcctgagaagcattagcagctaaaatggacactttcaccacagatttataataattgtgttcatcctttgaagttctgtgattcctctatgtcatcaatttcctatttcatgttaatgtgcagtgtgattttcaagcaatttatgcaagtggcattaaaggaaaagcaggtttgtctcctgaaaatttggctgaagatctggggccacttttcgagactataataagatgcatccctggaccgcgtattgaagatggtgccctgcaaatgcttgtaagactttacccttctatatcttttgaatctttgcctaaataattttttaagtgcaagctctgatttactaacaaagattattagcaacaaactattactactgattagtacgagaaacaaaacaatgaagcattagtttttgata

SEQ ID NO: 191788 - DNA, 1681 bp, Cannabis indica
aaaaaagaaaagcaagtgctttagagagtgttcccgcgctttcttcttggtcgctaaccctcgttccggtcgaccagtcgtcagttactgataaaaatctccaaaccaaagcagcttcataggagaactgaagatgttgaaggcgaagacgttttacggagccaacgttttcatgtcgcccaaactcgtgcctcctgaaatcttcgatgctcttcacgatgctctcaagaacaatggtgccgaggtcttcctttcctccgatctttctcgttccggccctgacgattttcacatcatctcttctcccgatcatgttaagaagcttcctaacttttacctccaaatttcgtttctttttgccttttttttttgctctctgatttctctcttggaattaatattttgcaggagaagtttgaagatctcagagccaaaggttataatttaatcggtaaggtttcgaaatttgtttgtgctcactctttgtttactttatttatttccttaaatgcttatcttattttgaagcagtgactggctttccaatttgagtgttttggatcatatagccatgttgtgtgactttatacttgaaatgacatagtaatagagctacatgagtttgttctattcaatctttgatactcattgtctaggaggtcaagattatttatcagtttatttttctaattgtattgttgggcaggtccgcaatgtgtattttcgtgtgcggaagagcatagagctcttccgaaacaagggttcacctgttgccttgcaatggatggtgtcaaagttctcgcctctggttttgacgcgaatgaaaaggtaaagatatgcttgttttaacatctaaaccgctccctacaagatggtgtaaatatatttcagttttcattacttttgcattgacctaagttattgtttatagttgtgaatacatgtgagttttctgttacatttcccatccttcattatctgagaggttgttattacctgaaattataattacaacagatgtgcataagcatacagcgtaatattttaatccaagagtataggttcttagggattttatattacttactcaaccttctttatttattctgctgtttaataacttttcattgcagggtaagatggaaaagttggtaacagcaatggggggagtattccattctaaagcatctttggacgttagctttgtcattgcaaagaatgttctggcttcgaaatacaaggttggttaactttaagtgcatgtttttctttaagaagtttacaatgttcctggttaacatttataccataacaatatactgttgtgtaaggctctaagaaatttgtttcataatagaattacaaggtaggaaatattttcttgcttttcttgtagttcattttagactttgtagttgagaataaattgcttactctataaatttgttcatgttagaaaatattcaaaagacgattagccaatgcaagtcttttatatccttttgcattataaataattggacatcgaagaggaagctagtatgaggcaaccatttttgaggtggttggtgagttttatatttgtgttacatgtttttcattatgaaatggaaacgatgaacatcttgaagtttgttgattagtgaacatttaaaattcatatgaaagaaaagataaagca

SEQ ID NO: 191789 - DNA, 2079 bp, Cannabis indica
ttgaactctaatggctttgaaatacaagtagtctcaaaaattgaggaacaatgacctgacaatatacgtagggatcagttgggttaagggagggtagtggaggttgtgttcgttcgggtgtcagcctgaattgaaaacttggttgccttcactacttgtacacgttgtaccttcttgtacaaccactttctctcatcgggctttgggagaggtgtgattgccctaaaggactagtgtttgctttcacgtttaaactctttgcattccttgtttaacacataggactattgcttgggatttttaataagcgttgggaagttcaaatcgtaagaaatatgtacttaatgttagagagagaggggtctaggagtagcatggaggtcttgcaattgagatgggcttatgaggagctcttggaaggatgaaggttgatactggattggcttggtttggcttggggcagttgagcttgggacgggatgctgtcctcgactagggcgagtaaggctagtcatgccttcattttatgctattattcaaatgtaaacccctcattatgtggtaaaatacaattaattaattgtaggactttgctaatctaacctgtgtgaactttcgcctataaatggagtgaaacgtctatttacgcctataaataaagtttcactctattgtaaaaaggctctctcttttcagttctcaagcacaaacgttactgagataaagaattcgccattgttataagcttccagaacaacccctaatacaaagacttgtgcactaaaattttttaacacccgaaccatataaaatattttatccttctttatttctgaagttctcaacattactatttcttttatatttgtttagttgcagaaaaattctgtcaaaacagctaaaaatatttttacccatctattagtaaagcaagagagacgttgcaccaatcaactttgatggattcaaatagaagggaaagaatatctactccccattatttacgtatacatatttttcaaccaaattaaagagaaataaaagaagaaaagttagatgcatgtcattttatatgcttccaagttatgtggttctggatccttgtaactgcctacgaacaagtgcagtgtaaaggccatcatctctactgagaagttcgtcatgagtgccactttctgcaatctgaccgtctgatatgaccgcgacactgtctgcagtttttacagttgaaagcctgtgcgctataacaagaacagttctgcccctcatcaaagaatccatggcatcctgtaaaaacacatcaccattattactaatatcacaattctctcttttacttccacaaacatgaaatggtaactaagaagctaataactataagtttatatcattttctgaagcaatatatgtattaccaatcggtcttgtttggatagcgaggttgaatacgattggattggattagaaaatacaaagttgtaacttttttaattaccaaagaactgcataaagatgaggattggataggaaaaattatctaaatttttgaatggtttaagttaaatcctaaaataggtgaattatgtagggttgctggatttaatttttcaatttctctctaatttgataacaaaattacattgtaaaaactatccaatcatatctagtctaatactctccaaaagtaaccttaggattatagcagatgatcaatcatagtctccagttattacacagcagtgggattcaagcctaagtgtattattacttgtactgtataatatatcaattttatattatctttggtatattgacttgtatgtgcatataaatgtaaaacataaacaataaaaagcaatttaaagtaaggatgtctatttacctgaacaggaattcactctcggcatccagagcgcttgtggcttcatcaagtagcaaaaactctgggttcgattatagtgctcttgcaatttgctatctctgttttttggtcctcctgacagcctcaatccacgttctcccacaaccagttttgatattttctggaaaatttgtcaatgaagttcatgtgcattttag

SEQ ID NO: 191790 - DNA, 1966 bp, Cannabis indica
cttcttcttcttcttctttcgttaagggttggttgatcaagattgaagagtttgaaagaggaaagtttcgacttttagactcactctcatgtcgtcgaatcaaggatatcacttcaggttgtgaaaatctcttcgatatatctcaattgagtttgacaaagctaactacggcttatgcccttaaatacgttaagggttcttcttcttcagtacttggtgtgaacaaagtggttctttctcccaatgactgctcaatctttgtaatttacgataatgggaaactgggttttgctcagaaaggtgaggaggatattacccttgttgattatcggattttggattacaatgatctcactctttttagaggtcaaccttatgtcgttgaccgatggggtacggtttcttggattgattcttcattgagagttgttcaatactcacctcctttgtttggatttggtgatagaaaacatttggttgtgtcaaaaagtgagctttttgtggttgataggtactttgatgagaagagtaatacttctactactccatacccagatgagaacagtatcaatgttgttgaagaaggtggtgtgaatttcaacttgtttaggcgccaccctaatcgtcgtggtagacacgatttcaatcatcccaaaacagtggatttcaaggtgtttaagcttgatgaagaatgggggaaatggattgaggttaagagtttgggaaatgatgtgtcttttgttttgacttatgactgttgtttctctatttcagcttctgagtttgaagggtttagagagaattgcatttactttactgaacaatttgatatggatttagctcttagaaagttaggtagacttggtggatgtgttttcagcttagaggatcataccattgatgatcttcccaccacacctggctactcccaaatcttttggccatcacctattccaacaaggctttgcacaccccaaatgtgagtactaattactaaggtttttgaatgatgttggtgatgactagtagtgtttgttatgtttacttatgtctatggtttttttgaatcattccaatttggttgattgaatcattccaactgaggagcttttgaattagtgttttctccaaaatcttagaatctgaacaaaaagtattaggcagttttgcatagtttatggaacccatgtacttgtatattattatgaatattttacatagatatcaatgattttttgcatagtgaggcagtttagtttgcagctaaagactattacttgtcaaaccatgtgtgaggaaagagttattatgtgttatttatcatgttcttattggttgtataatatcatataattgacaggtgaagaggagtcaaataaggaaggcttgaaatttggagagaatctgtttcttccatcaatgacttcacaattatatatgtatataatctagctgtagtagggggtctgttcttgattgtaatgatgttatttgattttgattgaatgaatatgagcaattgggagagactggcccatgtacatgttatatatgaccccataagaaatgtgttggaagaaggaggttatgtatgatttgtattgcacaactccaagaagataaggggggattttcctcgaacacacttggtaattttctcatgtagtactatgatttggtttacttcttataatacattttctttgggatcattgctataattgcactatgatatttttgtaaatccatttgaattattactttagttcttgcaattaatcttttaatttaattcaaaaaaatagttataaacatagtttaataaaaacccaatatatatttttcttataaaagtgatgggaatatttttttttttttttttagtaaagtttaaataaaatgcagtttcaaaatttaaacttttgactagtatagcctatttttctgccaacagataagataacac

SEQ ID NO: 191791 - DNA, 1184 bp, Cannabis indica
ttaaaatttcgtacaattgtattcttatattattttatttttgtgtattttttaaataatcccattaattaatcaagaaaaaaattaaatttatgtagcaattatttcatactttttgagttcaacagtttcttcaattggaaatatttgatcatgatccccccataccaacaacacttcctgcaaatttcccacacatatatataattagtatatttatacataaatatataaaaattgataaaaatgaaataatgtcacaccttatttaaatcaacaacatgtgcttgattatctcgtccaatagttaatccatcaaaaagttctgacttctcctccctattatcaaagaacaatttctgcaatagtataaaaatatataaaagttgtaaagttaatttacacatttacataaatgacatatactaattttactttgcaatattatcaacttttctagataatgaatgtaagagaatgattacttggagcatatcgtcgagtaatgagtacggtacaaactcgaaaaaattatacacagtgagactgagcagagtccttaattgtgctacagtggtcggaagaaaaagatcttgaatcttctccactttcgccctttttagcaactctacaccgtctctcaacctcatatttgtagcagaacttgcaattaccactttatcaactctatttgcccacctttttgctacattgtatgcaacgaatccaccgtaacttgtccccaccacgctgtatttcttcacgccaatcttctccattagtttggcaacaatgtctgcttgaaattgctcagaacggccagccaaacgagttgtggattggccgaagaatatcaattcaggaacatagacgttgaatttaggggcaaagtatgtgacttgatttcgccactgccacgtgggcacggggccaaagccgtgtattagaaccaatgatggcttggtcgtgttaatggaattcggtccccaaaagtggacagtggtatcaccattatcaaggttgattaactgagaagtgagcccagcaacaacgaagcataaacgaaggtaatttccgtaccaataaattggactaagaaatgatgacaccattgtgtaattgatagatacgataaagagagaatgaatgaacgaaagagagaaaagaatgatagaagaaaaaaa

SEQ ID NO: 191792 - DNA, 1266 bp, Cannabis indica
attactgtcgcgatatagagagtcaactactacaaatcgttgtgtccctcttatttatacttaacttataatacattctcgtcaatctaatcaacgagtgtgaccagatatttgtgtccagatttctgcgtcaataggtatttagacatataatgagatgtttggatgtgttaagtaagagtgtgataaggtggtaagggattggataagagatgctctccataaactctcacatactcgattaagctaatatttatttatctataattttaccttttaattaataatgaatttatttatttataaatatatgatatgagatgagtcaaggactacttactattttttttaagaggttatggctactaatcaagccaacgtggaggatcaaaccaacccttttgggtgggttttttccacgttttgatggcaaacctatttgataaaaacaatagttacataattcaaattgacataatttgttggttagctaaagaaaagaaataagttgatgtaatgtaatatttggttgttacattaaattattgtttgagatccaatatataaataaataaattgaattctatttatcaaaatgccaacacaacacttgtattattacattactattcttctatatcaaactacgtcagcttaatagcgactcaaggcacaattatttacataaatccacccaaaaaaaaagaagacacgaaatgagcgtgatataaattttattttcggtacatttgaagaatttttttatgtgtgaataaaaaaaaaacaaaagtgcacttttattaaataaaaagaacaagaagctgcagaagaaaaaaaaggataaagattagatttttaataaaacgacattgaaatgaaaaaaaaacagagggagattaaataacactctttgaacccgtgattctctgaaatcatttctattttccgtgccttattacataaggaaggaagaaaagaactcgtattttgggttctttccatcttcgtatgtgttagtatttgtatgtttgtgtaagataaatcataaatttctaacgaactctttaaaccacagttccatgaccgccaccaccttcatcgaccgcccggttatatgtcggcggtgttgaacactcaagcttcgacaagcatcaatcatcttaggcttgacaacggtcagatttcttattcttggttgtttttaaatttttctgggtttcctccgggatatcatctgagctgtgtaagaccgtgtcgaacgccatg

SEQ ID NO: 191793 - DNA, 2016 bp, Cannabis indica
  modified_base (1916)..(1916): a, c, t, g, unknown or other
ctaatatttcttcgatgcacataaatatatatgattaaaatggagtcacattggacgattgagaattatgtcttcttttgttccgagtcatctctttcctttagttgctgtaatttcgtgcatgtcagtagaacttgtaattttgtggcttataatgtggttaattgggcctttattaagaagttgtatggtactatttcgacctcctcagtttcggaggacctattatgtaattaccgcaaggtctaaccctatttatttaatggaatgactacgcttattttacaaaaaaaaaaaaaaatggaggtgaagctcttatatgatatgtgtaataataaaggagaagtaattgatgaagaagatcagaaagtttgacaaaatcatcataaacatttttcattctttttcttagtcatcatcatcctaattacagtgatcagataattgtaaagaattgcttcgacaatcatggttgagttaaatttttagaaaagcaatatgtgaaaaatctcagctcaatgaagagagactgagtagctggtatttatagatagttttcaaaccagagaattacagaggaaagccaaaggatctcaaaattacagctgtaaacaaaatcctaacagaaaagggaatctcccgtacacactatgatttcccaatcattgcaattacaacggtacaatctacctagggattgatgtcaataacggcctgtagatgtgagccacctgtccagtgaaggatcaaataaaaagggcatgtgcaaggcatggcagaaggttcatttcttcacatcccctctcaaatgtaggggtgaattcattaccccaagtttgtcaattaagaaatggaaccttgaacttgatagtctttttgttaggcagtcagcaacttgatcggatgagggtatgtatcttatgtccagctccttgttcaagactttgtcgcgaatgaagtggatgtcaatttcaatgtgcttatttcttgcgtggaaaacagggttggaagccaaggcatttgctcccatgttatcacaccaagtaacagcagtaggagtttgcaagccaagctctttcagaagggattcaatccaagaaatttctgctgcaacgtgcgccagagcacggtattcagattccgtactcgaccttgcaacaacaggttgcttcttcgaggaccacaacaccaaagtgttaccaaagtaaacacaataaccagctatagatttcctatcatccggacagcaagcccaatcggcatcagaatagccagtgatgtgcagtggctgatcagctgatgtgaagacccttatgaatggttcctttcaagtatctcaagactgtttttgcaccactccaatgtacactcgtgggagcctttaaaaactggctgagcttgttaacggcataggagatatctggtctagtgtgggataagtattgcagaccaccaattatgcttctgtatcccgatggatttggcagaaactcaccatcagataatgacattggttttcctgcagtagcaggtgttggacaaggttttatgttggtgaagttagttctttgaagaaggtcttcaatgtactttgtttgtgtcaagtagagtcttgtatcgtctctgtaagcttctaatcccaagaagtagtgtagtgagctaagatccttgagtgcaaatttcttgttcaattctgtaatggagctcttcaatctgttgttgttgttgcctgttactataatatcatcaacatatattaatgtaatgataatatcagcaccttgtttgtaaaagaataaagatgaatcagattttgaatttttaaaatcccagccgagtaaggttgacttcagcttgtcaaaccaggcccttggggcctgttttaagccatacaaagcttatttaacttgcaaacntagtgttctttccctgttcttcaaaccttgaggttgcaccatgaacacttcctcttcaagcgtcccatttaagaagaattattgatgtctaattgtttga

SEQ ID NO: 191794 - DNA, 1361 bp, Cannabis indica
ttgttatttaacaaaacaaaatatataatcaatcatttttacaagattcaaaatgatatttacaccattttttcctatacttttataaatagtcgtaatataaagagaacccatcttttcgagaaatccactttttttctaatgctaagtagttgaaaaactgacccaaaagatcgagtggaataaaattcataattgactgaaaatcagatttaaaataaataataaaaaaatattaattactttaatagagtgaaatgagtggtcagttgaatttactcgtgttgtagtggtattagttagataataaagggtttacgcgtgtgtatgtatcgatacctaattcaccactatactactgctatttaaaacattcataatatatcacactaaaaacatctaacagaaacaaatatatatatatatatttatataattgaaagctaataaaaaggtactcttttatatataattaagaacctgcaatacaatactacatatattaattgttaaacccatcatattcaaatgaaaggattgctatatataattaatattgtttatgatataaaatactcaaacacaaataatatatattttattttccgtaagcagtattgaagaggagtgaacaagtgtcttatttataataataatggaagggatgatgttcacgactagtagtggatcaacatttgggtaaggaaacaccacacttggcagcaacatttctagcattaggagagttgacatactggcgaagattagggtccttgagatacccacagaggcaaggcttctgttccttgagcttggcgcagcattgactcgacggcggagatccactagtgatggccgacaggcatgagctcatctgcagtgggctgcacgtcactgcctctgcactcggcgcttccgacaacagcactgctgcggctaccatcgccaccacacacactgttacaaaggacgtgttcttcatcttaattttttctgtttggtaaatagatgaaagaaggggtacacagatagaatgagaaagaatttttggtaagcagtgaggaatttggggtctttttgcacggtatttatagatgaatttctcgtgatgaaatgggggaaacacgtataatgttgagaagtcagatattattaattattactattattattttatatttatttatttttttttggtaaagcagtatgactaagtcaagcttaacttaactcaattttgtgacaaatgcgaaacaatgtcttctacttacgctacttataaaatgttaagaatgtgaatgagaagaaaaaacaatgagaaattgtagcaattgacacaaaaatatactatttttattttt

SEQ ID NO: 191795 - DNA, 4907 bp, Cannabis indica
tttgacatagtgtagattggcattgatgatcgcaccgttttaattagagtcagtctcccggcataagacaaaagacgcatcttacaaccctctaactttcgaagcatgctctctttcaacttctaaaaaactctcgttttacccttcgtttttaaagactaaagggattacctagatgtctttcttctccatctgattgcttgatggtgagtcttcccaaaacttcttttttctttcggtttcccaaattgtttgagaaaagcacacttgacttagctttgccgcaaacttggcctgaccaactctcatacaaattaaggcactgcattaagtttgatgcctcttccttgttagctcttgcaaataaaattgtgtcatctgcaaacatgagatgggagattggtatagcagctcttgcaatctttactccatggatctttcctcttctttcttgacttaggataatcttcgaaaggacttcttgacacaaaaggaatatgtaaggggataaggggtctccttgtctaagacccctttgaggcttaaatttcttcagaggagaaccatttagaataaccgagtaggacacttcccttatacacgacattaagagaccacaaacccattcatcaaaactgtttgcttgaagaacccgtcgaacaaaattccattccattctatcatatgccttgtgcatatccaatttgatcgccattaaccctcccaatcctcttttttccttattgtatgcactagctcttgagttaaaattgatgactcagcgatccagcgacccggaataaaagctgattggaaaggagagattaaactttccatataaggcctcatcctattagctaggatctttgcaatgatcttataaggaaagttacataaactgattggcctaaattgctccatttttgttggatgatttacctttggaatgagacaaatgaaggtataattcagtttcggatgaacttctcctgatataaacgcttcttgaacagccgcacatacgttgtctccaaccacatcccaatactttctaaagaaacaacccgggagaccatctgggccaggagattttagagggtgtatactgaaaacagtctctctaatttcttcataagatggaatcttagatagttcctggtttttttcctcatccactttctgatcaaacaattcttccaaggccagagatatttggggatgatccgatttgaaaagatctttaaaatactcattaataataactgatacttctcgatgattatctttcatctgcccatctttgccttgaaggtgccacacttgatttcttctccttctaactgatgcagtcgcatgaaaaaaccttgtgcttctatcacctagctttagccaaagctctcgagatttttgccgccacatagaatccttcttttgccaagtctcttgaagttgaacttgaatgtgagactcttccttgctaagctcatcagaaatctgttgttgttgaatccactgaatccttttttccaaatttctgatactttggtctagatctcccacattctcttttttccaaagctgcaaagctcttctaatattactgaaattccttaaaaggcttgatgtaccctcatgatactcctgccgccacaccttgcatatttcttcacgacaagattcctccttagaccaggattcataaaaccgaaaaggaatgtatcccttacacttaaacatgaaggtgtcaagcataattggagcatgatctgatatcgtaattggaaaatttaaaacccccgctgctgggaattctgtagtccaatcaaccaaaccaacacaacgatccaatctttcaagaataagcccgcccttaaatcttttgttctgcctagtaaattggcaacctttgaagcttaagtcgactcctccagtattctgaagaaattcctctagccaatgagtatctcttgaagaaactttcttgcctcccatcttttcttcgttattaagtaagcaattgagatctcccatgactacccagggatcactacaattcctcactttttgagtcaacctttcccaacaaaactttttgtctttatcatagggcgggccgtaagttgcaaaacatctccaagtaatattacgttgaacatcataaattgctacatcaaaaatattattttcctggtccaaaaccatgacctgcgcatcacttttccagaggaaacaaaaacccccagccaagccaattgtaggaattaccaccgcctcatcaaatcccaaacttctagccatccaatccatctttcctctatccaccttagtctccatgaggaaaacacactctagattgtgtctcctcacccaagctcttaaagcttggtttgtcgggtcccttgcgaggccccgacagttccacgaaaggaacctcattttgatgttgggggcttgataagggtcgcctcctcgcccgtcacaatgttttgttcactatctacatgaacttcaatcaaattcagagtttcttcgagattctttgtagtttcctcattcaggcttctctccttctttggtggattctttgatcttgttcttggagttgattttgaccctgttcctctccttcttttagtgacaccccgagaagttgatgaggttgaagcccccgaacccattttgaaaggggtctctatcggtcctggagcaaactcaggtaaattaggaatttcctgagaaaattccatgatgttgtcttccgttctttgaacatatgggaccagtgttaagcctgccttcctcttcctctgttgtgggcattcatggattaagttcaatacatctaatgggtcatggaagagagtgggtgtaggctcaaatttgtctattggagccgggcccattagttctttagcaagcccaatttcttctgcataaacgggccaaggaaagtgtgtgggctcagggtgcttatgtgggtttcttgacttgcaaagttccttgtgtggtttatctatcatctcttcataagtgggccccatgtggcccattattgttgctaaaactctctcatcccgttctgttgggggggggggtctcgaagagtatttcttcaagatatctatgtctgtttcttctgcagctaagtttcctttggagtgcttcctcattgctcgaagcgagactgatcttgttcgtctttccctattgagagcctcaggtatagcttttcttttatccagatcatgaatcttatacctgctgatctcttggggttattgtccaccactttcaaatttttcccataacagcccctggagttttcttctgtactctgataaccttccttttgagtttgccattctcattggctctttgaagctgccttgggatgtcatccatggcctgtccttttcctttttcttgccctttgtgccccttcaccggagttgtagctctgttcatcggcggtcgaagggttctagtatcctccctgaaaaaattcagctggtttcttgtattgaaacagctgatgaccgctgactccgctcttatccacggcccataagcttgtactgcatcaccctccggaggaaaggcataggcagtttccctgaaacaatcattcttatcgtgacctatgaagccacatttgtaacagaatttaggaagtcggaagtattggaactgaatccattctttcctccccctatagatgtctaaaaagaaacccggtgataattgatgttttgtagacaactccacttggaacttcaaaaaaccccttcttgctaaagctctttgatccactatgtcacagcccctgtattctcctgcttttgctgcaatcttaggcgtattcatggcattgagatacggcgtagggagacccgtcgcctttacccaaaaaattgccttgcttaaatccacgttcatccagtcaccctgctccggccattcgtgtattatcaagagtttgccattaatcaaccatggtctattttccaaaatggacacacagtcctcctccttgtcaaagaagatcccccacactcttggttgtaacgttttgaatctccagtggccatttagtttccacttttgctccaatatacctttcagtcgagttcgtgaaactcctttcccttcaaagaaacttgccagtattcccgttcttgctatttctgcattaatttcaaaatctggttccaagtccaaagtcatggactctaggaagttttgtcagaggtctcatttctttgtccttttgctgctacatcagttgcttctgaacatggaatatcatttaatgccacatcctcttcaactacttgggtagtttgttggttactctccacagtagttgcattcattaagtcgttattattctcttcttgtcccacactttgattcccctcaacctccatctttgagtactggtacagagtaggcagaggagtaaatgctcttcaaacaccaataaaacttgcgagtgaatcacccttagaacctttgaaccaaagtagaatagtgaaactatttgactttccaactagtcgccaatgaacactagatgaatctctagattcaaacaaatactctgtcaattggaaactccaatcctctcattgagagagctcactatgtctcactcgatcatcacacactatgtcttgggtattgtgacttaagaggtaccatacttttgtgtgagaggaaggagacacactatgtctcactcgatcatcacatacaagcgcgctgctggccatccaacgaactctgctagtttgtatggtttggtactttattttttctatggaatatttgattaatttattaataatacgttttaagtttaataagaagaagtaaacctagctaaagactatttcactcttgatttt

SEQ ID NO: 191796 - DNA, 1477 bp, Cannabis indica
attgcaagatgtgccataatttcaagccactgagctaaaagcatctctagcagttttactcaaggtttaaatagtcatacccagtgaatgctctctctgttcccttttgacgagtaacgtagaattgctccccacttagcttcttcttccattcttgatcacttaaagatttatagtcaattgctcctgctgcctctgcaatcaaattataaaattgagcaaggattgcaacgttagctcttgagttgtctgcactatgtttaatctatgtgataccattgtcaaaacacataattgaatacacaagataaataggtgtaattcatccatagacaagaaataaccaattttcttatctgggtatttgctttcaatcaagtttacattaacaaggagagagagagctaccatgggtaaattcaccaggaaatatatcaaatgaactctatgaattcactcaaagtagggaaaagaaagatgagaccttgaatgttgctgtcagattttggggaagaagaagatgaacccatggcacgaacagagaagcaaggctttctaattttcgctaaagagtgagagcccagagcgaaaagcttggatttcgacccgaattcggtagggttttggaagaaatgaaagcagttgtggtttgtaagctcaaacaatgtaaagaagccatcttttagctatgaaaaggaactatagaatgaaaattattacctaattttccaaaaaagaaaaaataatcagctggggaagacttctttgatgggcatgctggaaacacctgatcatatttgtttacacgtggcagtttgtctggtgattaagatagaggctaacttgttgccacgttgagggactgttttaactcatcaatgtagtttggacgggttaataatgttaaaaaatagagtaattggacattaaacttttattttatgagtgggaaggtctcttattttgtttgcaaatttattgtgcttgctaatatctttttatttccgctaattgtttgttaaatatatttaaatgataatttagggctggtcatcaaagcatcacattgtaaaaattgttcccactgtataaaaattgcagtttgaaattcagtataattatagttagtatttttttaaatcatgtagtacagtacaatttacagttttaaatcattaaaaaacgaattgaattgcacacacatattataaaatataccagttttttaaatttatggtacattttattttattttattgttttgattcataatttgcagtgtgagcagtgtgagtttcgggtatgaaaacaataaataaataaataatttattaaagaaatgccaactagaaactttttttttctgggtatgcaaactagatgtactattgtgtttccatgattttggaaaaacgaaacgatacccattcagggaaacgacataatttcgctacaacgacattattccggagagtat

SEQ ID NO: 191797 - DNA, 3119 bp, Cannabis indica
aaaaaacattacacataacaaagttgaggagtacatatagcatcatatcacatttttaagttcatctaagaaacttaaattgtagtagaaaaacaaatttggatttccttttggttgattttttacaagttcatttatcactagcattttttttgtaactaacttgactcaaaggagttatgtaaccttttcaatttgaacattgtagattagtgaacaataatatattaactaaggtccattcttattttatgtgaattctaccgtatatcagttttactagtttttgttggtgtcaactgttacaaccacttgtgtagaaatcactactaaaaaactagtgcatatgagaagtgggtgcccaggtgataaatcaccaaccagtggcatacttaattgagatgaaatcttaacaatacacccatttttggaacctatgtcctctatggttgttcaatctatgccaacctactctttctagtttctagtatcaacccttctacaatgtgggtcgcatgtgtaggctttgataccatttgttgcacccatttgagtataatagtagcttatgaaagaatggtgctcaagtggttctaaactaccaactaaacacattttgtgaaaaagttattatttaacttctctgatatttctttgatacaaatacatgggggttaagtttgacttgcggcagaatgtcagatctggcatattactattgtgaaataactaactttttgcaaatatgcttaaaactgactgatctattacctgttatttggtagcccttgctggaaactatgtcaactttggtgtctttgaactctatggtgatagagcactggctgatgtactagatattgcactaaagatgacattgtcaattccattggctgatgtactggcattccgaaaggttagcaaaatttactattgtaagcttctttggaacagtttcagctatcttaatgaattttctatatatggaacacttctaaatgggcaatacccattgatagttactaatagtttttttgaatattgacgagtcaaaaatcttgcttgtctatttggtagaattactttatgcaacaaacctttggggagggagggagggacagagttctaagaattattaatagcatacaattgagagtggagggaaaagaaattaagtttctcctttactaaatcatgtctaaaatatatcatcattgtttgattagttctttcaaagatatttttgttgacatgattatgattttgatttacttcatattgtttttattagttgaagtttttgctttgacctaaaatatgtacgttttttttctttttcctgcagctaaccaaggcatactttgcattcctggaggttttgttcaattgccatataacttttgttttaaatttggatacaagcaccttcatgcacatagttgggtcccttgaatctggccttaaaggtctggatacaaatatctcatcacaggtttgccaattatcttatgatatcaattctaaactctcggcctccttcattgctgcttctgtataagtatgtaattgagcatttattcagtatactcattcaagtgcaacattatcttatgcttcagtgtgcatccgctgttgatactctggctgctttctactttaacaatgtaacgatgggagaagcacccacatctcccaccgcaattaatcttgctcgtcacattgcagattgccccaatttgtttccagaagtaagaaagactgcatctacatcatttttttttttggaaaagagaaaaagaaactgcatgctacaccaccgcttactatattattgaatattctatgttttgctttcttctgaaagaagatgccatttcttaaattgagtgattattatgcctttttgtttttagagtgattttttttgtgttgctagcttaaaacatttatcatatatttgttaattactacaacctagtattatttcaactttgattacaacctactataatatctcatatatattattttcatttgttgctttattttcatctttagttttctgagcgacaatgtttctctttcatgtgttcagatattgaagaccctgtttgaaattgttttgtttgaggattgtggtaaccagtggagtctgagcagaccaatgcttagcttgatccttattagcgagcaggtattttcaatctttagatgtcatgtatgttattctccagcattttgtaatctgtattggagacgattttgttttaacagtgaaaaaaagtgttatcccttggtccaagtctttcatatgcatacttggccaaaaaaaaaagtctttcatgtgcatgttttaaagattctgacgtatgcagtgcaaaccttgtttgttccattagagcatctctaatgggggcaacacttatagtcgtcaaaagtgcacacatcatcttaaaatatatattttttttattttctttctcatccacataagatttgactacttttcatacaaaaatcactccaatagttgacaactccaaaagttgcacaccatggtctcacatgccactattttaaatggttaaattttattaaatactgtaaaataataccataaagtattttttcttttttaaaaaagaaaaagataaagtaatgccacatggatgttgctaaatatagacaatgatgttgataaaattgcattgaaaatgatgatcgcattgcacatgtggcaaaaacaactccatgggcaacccccattggagatgctcttaatgtgattttttacttgagaaaccttttaagtcgcaaagaatttttattatgtttaatcttttagcatttttgtgactggataaggaagtcaattgtgcagagattttctgaaatgattttactctgaacagttttttaactggaagtgaatgttgtgatgtggcaatcaaaggattcaagtgcttaaatttaggttacgtttggttgggaggtatgaaaacatagtaatgagaataagaatggaatagaataaactttaaaatgtttaaaaaatttgacaaaaaaattgttattagttttttctcatcttgcatggaatgtttctttttttttttttt

SEQ ID NO: 191798 - DNA, 1453 bp, Cannabis indica
aatttattagatatgctttaatttttctttttaagaattagatataattttgtgtcccaactattatttgataaaatgtagactaagataacaatttttgaaaatagtatggaagaaatgaagtttagttgaacatttaaatgatgaaaatttcaaataacacgtgtattaaacataataaatgataattttcgaatcagtaaacaaaacaatttatgtgaaaaaatttatactcgcaggcatgccatgttatgaacatgctacctactattttaaatgcattttaaaagaaattaaaacatgggaatctctaaaaatatatgtaatgtcaattagtttatacatataatatgtaagataaattttgaatttgaattgatcatattgtataggattggcaatttgtaacatcataccatagatgatacaacttaaaaacaacacgaaataataaataaaatgagtaatatatttaatttttgtatcaaaattgtattgacatgtttattaaacatgtcatattaatttattttttgaacccgtcatattatttttcggtcaatgcatataatccaaaactaaacacgtataaattaatataaagtttttatatcgtgtgaagtaaaaaaaaaggaaaaaagaaaaatctaaaaaaccctaagcataaaaagaaaagaaaattaaaaaaaaacaaatccttaaaaccttctttatgtctcattctctctgttaaaaaaagaaaaatgacataaaatcttaccagtttgtgtatatataatcatattatatgttaaacatgtcaattttggatttgtgttatatgatatattattgtatagtaggacttgttaaaaaattatgttcatgtttaatatcgtgacatgattaataatgatatgctcatattcaatgaggaagggaagaattagaaaatggggggcaaattgtaagcaaattaataataactatgtataatttttttacatacaatacattgtcaatgagtagctcctcactgttcatgttcacctcatgtcgcaaacatatcaattggtttggtacacaattagatataaaacgaattgcctgcttgacagcaaatttagtatgatgaagacttgttattgtatttcctaaaataaatgggggctcatgtcatgtagtcaaatttactttatttgagtgacttagacatcaaccacaagataggggtaatatcaaattaaattataaagtaatttacatatgattaaacaccaatttaagtagccatattttgtttgtgttgtgtacaagcaaaaacaaccgaagaagtcttctccaataacaaaagcaaattatcccgagtaccaaagatgaacacatgtaaagtaaagtagagcaatttgaattaaggtttggggttggggcaaactcggaatttgtgcctaaataccaacgtttacattggaaa

SEQ ID NO: 191799 - DNA, 3669 bp, Cannabis indica
atatatatatatatatatagagtctggcgggggttgcaacatgtaatggctctggatggcatggctttcacgtgaaatctggaccaatttaattacgtctccatttcacaacccccaaactcaaactcaaagtggttggaattggaggccgggtcatgcacaactctactactactctacatattttgcatgtactaccgttatacttttgtatttatttgtatatataatatatatttaaaaaaacatgtgtctaacagatattttaggcttgactcttgagtaatgtatgaactattttatacaactacaatggtcataacaaaaaaaaaatcataattttttatgtgctgaaatgaaaaagaaaatcatcctaactttcgaaagattttcctttcagctatcggtagaagttagtagttattcaacagaaaatgttaatgtgcacttaagcaccacacaagatcttattttgagttttacacattttaatttaattaataaataataaaatgattcgctaactaattactggcaaaaatttcaataatgacaacaaaacttgtctgcttaacttctaaaaacgaattaaaacaaagttgtagtgatctctctgtagcgtaattattgcgtacgtacgtacggtatatctattatatatgtatcaatatgtatgcatacatataatatgatcagtactagctactagttatcgtaactaattaataacgtacgttgcatgtatttaaaaccttatttttaatttttgaacgatatatgtgtacagcaaataatttaggggaaaacagtagtagtcggcagctatatatatattgccaaattaaaggaattaattaattaaattttaatattaaattaggaaggcgttaaggatgatatatatatgagatggtgatggatcggggaagaaattattaggaggccatcttttaattattcgatttgtattgtggtcctcagatcaaaaggattttactccaacttgatacaataaataaaatcctcagatgctcattagtctctctcagatagtgttatacatatcaaactttcaagagttttggtcataatatacaatcgctttatatatatatatatgtatgtttatataatatatatctgtgtatatgtatgtgtgctacaccatccggtcggactaaaacccacaaaaaacaagtttttaaacttttataaatatccctcctgataatcatgataagttgcatcaacattaattattgctatatgtatactcggaaatatatataattaaataaaataaactatatatattattgaatacataattttcatgtgctacagtctatatttcttcaatttcagttactatatgttttaatcatattctagtttcaaattacttaaagggaagaagaagtgttttgtttgtcatattaattataattatataataattgggtataatatttgatctctcctttatttttaataatggatatatcttacgcctactttaggaaattcttttcaggattcatttcattatgatagagtacatttttcagattaaaatactgttacaccaattatgtttccattttattagaaccaaaaagttcattatatcgtttttttcagaacactttatatgtatttatgtttgtatatatctcacgctccatatgttttagtatgcttttttaatatggaagttataataacggattgtggagttggacactactactgatgatgataataatattttggatgatataattaagattttgtccccttcatgtattttttttttgaacatattaattcctttaattatattatattaaaataaataagtaaagaattcaaggaggtcatgttgttcgtacaaataaactcaatgaaatgatatatatgaagttttaagttccatatatatatatataaatatatgacttcatgcttcacccattaaaatgtcataaatgtttttagaccccaatcaaagaattgacgggaatccttactagatgtggcgtagattgtaaggagtactcccaagaaaataatggtggtccggactagtaatagatgaggatagaaagatgtgtggtaaagccagtgagatgtgaacaaattgtgtatctgaaaaatagccttatatatatataagagtgatggaataatattaacaatgtaattcctgctggaagacttatatatatatatatatatatacacacacacatagatatagaatagaaacgaacctgatgatggccactttcacattcatgggaccttaataagatgccataaagaatttttcatttcttatatattacgtttttcatctccctttacatatatacaaaaaggtggtccctaactatgccatattttgaatgtttctgcatctgatatatacacataaattgtagtgaaaaatatgaacttgttttatctctaatatttatacaacatcaacaacaataacaatatataatatcataaaacaatttagtttgctggactccacgtacccaccaacaccacactatttataaatacacaaaaaacgctatactattacgaaaatttcaaagcaaacaaaataataattaaaacaaaagaggaaaggaattaagaagcccactcactaacactttcctactaatatatagaaatatatgatgacaatgtacaagataatacaactcactaactaattaaaacaacctatgtatacgtacaactacgtacgtaccccggcagttagtaaaaaccatattgcccccactaaataataataaatgtaatttcatcctaattatactattcattcttcaaaaaaaaaaaaaaaaaaaaaagctctggtacccatctcggggaagattaatatcaaaagggaccatatacatatatgggaaaaaattgtgataatatatatatatagagagagctataggaaggtgtggtagctggctgggtatatagctagttgatgtgtggtggtgtcggtggtgtgggatgattattagtagatgagtagtatattataggattggaattaaagggcacagaattatgtgtatcggagtgattatgataatgatgaggattccagcaattgtcgtagatgtcttgtgcgattctggttgcatccgccgatgccccaagcagcccacgctgagtaaaccccactgcatacagtcccaactcccctttccacccatttggggtaccttttctaggcattccatttttctcattgaacattttcgtctcctgcatcgaaccattcatccccatcaaaatactatatacttttatattttatataccgacaatatccgatcatgactcgtgtaataaaatattatacaattaatattggaattgttgcgtagtagtagtgtcttattataataattaataaattaaaaatgccacaccaatattatgtgggtgaggcaaatgatcatatcgccttatataatgcggtatttaattatcaatttacatagtttttgtgggacctaatttgcttcatttttaacatgtgatgatacattaccactgataataataattatgatatagtacattaatattcttctaaaaattaggttttgttttattttgtctttatatatcaatataata

SEQ ID NO: 191800 - DNA, 3087 bp, Cannabis indica
ttgttttttattgcaggtatccttgttgctccaatcttctacctctcatgtagattttgcaagcactaatggaggaaaaaatgaaaaccatcttgaaatttcaggtgaaatctgtaaatggttagcgattttgtgggaacgaggactccaacatgataatccacaaggtaatgttgacttttaagttcgtctacgcatgcatgttgttattattatgctaaaaaactttttagatgatgtcttttgttgtattcgcatctaatggttatatgcagttaggtgcttgatcatgcagtcaattttaagcattaaatggagggataatggaaattctgcaaactcagtgcctgaaacttttattcttggctcattcctacaagcattgaatgatcctgtgcaccacaaggagtttggtatgccttttaaaatttagtctggcaactcttcaagattatttagttgtgtcgttaataaatagaatagtattttactaaggaaaggatgtcagatatttaatatctctagtgctatgaatattggaacatggttgttcatgtgtctaaacttactttatgtaggtggtagaaatttgagtgctggcaacgatattattataagaattatattttgcatgcactgttattgtataaatgcctgcaattagattgtctataagtaatgcaagtaggatgcacttagttgctgattgttatagtgaatgcacttgtcattaatgttatttcttatgtcttaaaaaagaaatacttgctaagcattccttaataatcatatttgttggggaggggggcttctgttccactttttttttcctcgtgtttcaattcgtctagtgatatacatatatatatatattattctttttagaaagaaactaaatttgtattgatgatgaagaacactaaaaatgaaaaatctacaatgtttatatatatataatttttcagctgattggaaaataataagaacaataattatttaaaggtgaaagaaaaaaaaaatatagtacttgacaaaagagttatgtctagaaactaatttatttctttctccgatctctctaagataaaaacacttatagaaaaatctaaaaaggactcctgaaaaaagtcatcactcgtcattttattttgtgccaaacaaaatttataagtattccgctatgttggcttgttgcttttagccctccctatgtcttcccctatgttgatggttgagtgttgccttaatgtttctctaataggtgtaaaaggagtgtactcatcaaagacaatggaaggtgctgctgagttcttaagccaatatgctagctgccttagttcaaggtacagctttgtgtgcttttccccttgcattttcaagttatgttaatattaattgtttttatttggaattcatattcctaatgtctaagctattgttgctaatatgccttgtgcttatttggcaatgaaactaatctaaaattaatccagaatttgtttttgaatgctcttctaacccttgtcccttgccagttaaaaaaagttgtcttcacatgatcaaggaaaatgcatttctgttgaattgataaaagacaattgttattctttttttatttatttttctaaaaaaaaaagacaatggttattggttgcagaaagagaatgatatgtagtaattatttgacatggtaacaggaaatggattgttttcctgatcaatttagcatctgcgacaaagcagcagtcatttagtagagctgggttgatgggccttgctgaatgcattgctgcagttgctagcagagttacacatgataatgaaagtgaagcagaaagagatgatatgtttgctgaaatggcacatctggaatgtaactcggagagttttcttcaaaatgacaaaattgttttactgaatgctttgcggtttaccattgaaagcagcaaacaacacttcaatcctaattatcgccttcgaggtctcaaatcattgattgatggattatagttctcgtttgcagctcagtattctcattataaattaaaaccaagagaactaacaatatatcttctttcttataactccagtttgtgagaaagtccttgaagccggtgcttctgttgtgtgtacatttgacgtgcctcttgaaatactattgcactttatttcaactgtgccacgagattttactgattatggtggtaagtctgatgttatagcaacttaattttcaccttcccatttcgatatccacagttcctggcatgtgtttatatataagtatatgctgatatcgctcacttttacttgtgggtacttcaaacattattcaatgaaacagaaatgagccaaactgaacattattcaatgaaatagttaggataatacgtcattggaacttttttgttgaaaatctaggctcatctcatgtaatgttctggtttagactaggagattagttcacatctcattgctctgcattttgaaccaaatatagattttagatttgtttaatgcgagatcaggctctaatgtatcaatacatcacagtttttcataaaaaaatgttatatcattctttagcttgtccatctgttttctggttactctacctgtctctactctacgaaaagaaatgaaacatttcctgttatggtatttgaggcaagttcttgtcaaaaaagaaaaaagaaaagaaatgaaacaatataacatagaagaacatgggcgatttttccttcatattaacagtagttagagaaaatggtaattattccaggatattgtgtttgaatgtttatatgattattgctctgtgcaatgtcaacaaagttccaatcttactctttggacttcacaaggtatgactctataaaatggtggccatagacttatcatatcatcttccatattacatgtgttggatgttctcctcccctgctttttcgggggtgtctaatacatctactcatgttatcagtaaataacactgttatagaggcaaaaattcttattgagggttaggcagggagtctagtttcaaaaaaaaaaaaatctttatttcccccatcacttgtctgtgcc

SEQ ID NO: 191801 - DNA, 1653 bp, Cannabis indica
aaagaagcactttgaatttatatggttgttgtaaagtcatgctttccaaacttattgttaaagataccacattacagccaataatagaatgaacttaaaaatgttaatttgatataaaaaaaaataataacaaatctcttcttttgcttctaattaactgggtttaaattccaattaaacagcagaagagacagcctaaggttcttctctttagattcaattaaattgcaaaaattaacccaaagaaaagcactaaaccgatgctgataattacacagccatctgccactatatatacaatcaaaatagcagacagcaaaatatctcaactcaaggatttacaaactgaaaagacagcaaaaattaaaaataaaaatcctcgagaaattccaagaaaaaacaccaaaaaaataggatgcttttggtggccaaagtgcctactactgtgccttctcaacctcagattgctgttgttcttgggtagagttctgttctggggtagaaaactgttccgaggaattgttctgttccggggtagaaaactgttctggggtagattgttgttcaggggtggtttgccggtcccggttccctccaggttttcgaaaatactttccattaaaagcttctgagatgtctggatacttgctcttaactaagttttcgaggcatttccggtacgaaaaatcttctttgtgtccatcggttaagacaacataaaagcacctggtgtcctggaaacggaaatgcttgctcacctgcaatatcattaattttatgttttgaaaaaagttgattggattagaaacaataaaaacttcatttcaaattatacaagtttatgtgttttctgattatattcattctatactacacaacataatttatttaggagagaattagaacataccatgatgtaatcgattccacaccccattttgctgtctttatccgggtgattagcaaagacattgtcaactatatacgtttgatcttcagatgccagtggatcgccatcattgtacctatggaaaccatgtaataatgtcaaaataaattaatacaaatcggaatctaagaaaaaatgaactgttagaattgtacccgtccttatgcatgatccttctgatggcaagcatgatcggttccacaagagagaggggatcttgttcctcagttgtgaaaagatctaatctttgtcctgttgcagttctttgtacaattacggttgagttttcattaccccaaggtttatttggacggttcttctttatcttccatccttcatctgagccccatccacctttcctgaatgactccccaccttgctttccccattgattgggttgtttttcatcactccctccccattgattgggttgtttttcatcactgcctccccactggctaggttgcttttcatcactgcctccccattggctaggttgcttttcatcactgcctccccattggctaggttgtgtttcatcaatgggttgtttttcatctgaaccccaacctccagagctgcctttcttgaatgactccccacctttctttccccattgactggagtgtttttcgtcattgcctccccattgactaggttgattttcatcagtgggttgtttttcatctgaaccccaaccccca

SEQ ID NO: 191802 - DNA, 2052 bp, Cannabis indica
aatgtaaaaatatacaaatgaaaaaacaccacccatcaaaaaattgctattttagagattttgaaaacaagaatcttgtatttgagaccactttgtgcaaaagattagatcacgatgatgtacaacacatcttgttcttttcagggacaacttgtgcagggcccggcacgatgatcttcttgccagtaagggatgcagggttaccatttccttggttttcatcagccgcaaggttcttcttgttcacaatgttgaaaatctctgtgagcacggtcaagaaggcgttctcgacattagttgattccagtgctgaagtctccaaaaagaaaagcccttctttctgggcaaattctttggcgtcttcagtggggactgcacgctggttctctaaatcagttttgtttccgatcagaatgatgactatgttcttgtcagcatggttacgtagctcttccagccaacgtggtatgtgatcgaaggtctggcgtttggttatatcataaacaagcattgccccaacagctcccctatagtatgcactcgtcaccgctctgtatctgctcaaacatcatacgaaaagatatgttatgtgaacaaattcattgttggcagaagttagagaatttgttctttcaaagggcttctttagcatacagtaaaatggtaatataacacatattgatgagatatgtgtaaataactagacatgttaagtgcgtctaaataacaaataccactataacactttgatgagatggagatgaacatctcatctgatgacctatgttgagataaattacaaccggtaattttgtaaggaagctaatgagccatgctaaacatgatcacccaatactccatacaatatttaaatttaaacacgaattttcatgataagaaatctttaaaagtgaaatctctaacttctaaaatcttctatagaagaccttgtgaaagaccctattatttattctatttctaaaaaagagagactcctttaagttccacaaggataaacaccagagaaaatatctctaatggttccaaattaaataatgatcctagaaagaccgataattccaaattaaattaaataatctaatgtaaaagaaatttaattaaataatgatccaaattaaaataaaaccaatggttccaagaaagacaaatcaaactgaaccagaaaattaagaccatattataattaatttcatgttttaaattcaaaaaagaagaaaaataaaaaagagcaaaactatcaataaattgcatggctatgcatcgcaaaggcaattttataaaataatgtatttctaactatgaaagccaattttataaaataatgtatttctaactatgaaagccaataaggtaaggtaagaatcacaattatatctaataactaatacctaaaagttcgatttggagataaatatatattttctaagatcacggatgacatctgtagatgataaccacaaaaatttcctttttcctactaataaaaaccaccaaaaataaaataaaataaaataaaagattcaagcgaaactgattatgcggcactttctcctccattgaggcttaaacaaaacataaaccttaatcttaggccttgccaaaatcactgcaacttttagcgcgataatatcaatcaaagaagctaaaatcagaaatataatatacacacacaattctaaactagatcaattcatttcaaaattaatcctaccaaaacagctaataatgagataaatgccagaagtaaatcagcgaaagaggagagagtttgttaccgttcctggcctgcagtatcccagatctgagccttaacactcttgtgttcgatgacgagagtcctagtctggaactcaacgccgatggtggctttcgagtccaagctgaactcattcctagcaaaccgagccagaatctgtgacttccccaccgccgaatctccgatcaacacaaccttgaacacgtaatctatcttctggctcgtatcgccgtagcctccaccgctcgccattttcacacttcacctttctctct

SEQ ID NO: 191803 - DNA, 3271 bp, Cannabis indica
tgttatggtggcactttattagtctttggggttgggtattccacttagcactgttgaatcgaactgtttagttatcgtgtctgctttttgtagaagatttttttttaatgatgtaggatctgttttggatgttatttatagtttactatcaattttggtggggcatccccaattcatgttcttcgcttgtctaatatgatcgcacgcatgaattggctgtgcatactcaagtaaataatgagctagcttggatggatagatgtactcaactctcatgtgtattaataaaatgttgattgttttaaaaaaaataggttatatttagaaatttttaggtaaactttataggtaaattattaaattttatttgagttccataccaccacccaaccaccattgtcaggcagaaaaagaatcgagaatgataaatatttcctagtattttgttctttagtttgggttttcactctctctctctcttcacttctgatctagctgctagggtttttctctctcttaaaacacactgaaaaagtcactctttcacatctatatttacacagtaaaattttgatggagttaagacacactgaaaaagtttcactctttcagatctatatttacacagtaaaattttgatagggttgtttttaagctagggttgcgtggtcgcccttcactgtgagattctcttctcagcgattttttggtttttttgttcttttcggttgttgagctttttcttagtattcgggaatggcgactgcaaacccctttgatttgttgggggattacgatgttgaggacccatcacagttgatggctattcagatgcagttggctgcggctgcttctgctattggtacggctactgctgctgtgtcaaggctccgggattgtcctcctctgcagaataaggcagctaatatgccttccaagcctcttcctcctgctcaggctgtgagagagtccaagaatgaacctggtcgcggtggccgtggttatggccgtggtcgtggcggcagtggtgggttcaatcgtggattttcgaacagtgaacaaagccctgctggtcagggtgctgttgaggagggagactctgggagagaaaggcgtggctatggaggacctcgtggtgatttcagtaatggagaaggtggtgagggagaacgctctcacaggccatttgagcgccgtagtggaactgggcgaggtagtgaatttaaacgtgaagaagccgtcaatgagactgagaagaacttcggggacgagaatcctaaaggagaaggtggtgctgctgcagatggaaacaaggaggcccctcctactgaacaagaagaaaaagagcatgaggataaggagatgactctggaggagtaccaaaaggtgctggaggaaaagaggaaggccctgcagacactaaaggctgaagagagaaaggtggatactaaagaatttgcatccatgcaacagatttcaagcaagaaagagaatcaggacatctttatcaaattgggttccgagaaggacaagaagaagcaggctgctgaaagggatgaaagggcgaagaaatctgttagcatcaatgagttcttaaagcctgctgagggaaaaggtacttcactccaggtggtcgaggccgaggcaggggccgtggtggttcaaggggaggagggtttgctggaaactaccagagcagcaatgtgtctgctccttccattgaagatcctgggcacttcccaaccttgggtggaaagtgagacccttgagaatgagaaccctaatttacataatgctctagtttagattttgggttcttttctttaatttaaagcaggaaattgacatgaataattggattttgtttccattaatagttttttctaaaacaaaacaccattgtgaggcttgagaagaaccataagcaccttggaagaactggccaaaatctctgttctgccctggattttgtgagaaataccaggtggaaacttcttggattcttgatgttattgagctaaattttctgaaccataagctgaaattacttcccgttggtccttttcaattcgttgttctagtcatcatctctgcaactggtcttgtaagaaggggtaatccattcaaaattgcagttatatgatcattgactgacacacattgaccaactgaatcaagctgatccacaacagattttatcttatgcaaaaactcataaatggacataaagagtttctttgtactcagtaactgcatttgagaagcaaaatactcattaaagtgctcaccaaacctgtccagaagtttcacaacccacaactgatttagctgttcccagtccaagaattcttgactaacttttccttgatcatgagcagcttcatcaacatacatcaatggcggacttgcagaatctgaaacgaagtaatgtagattatgatcacgaattgcagcttggacttgctgacgccacatcaagaaattgagaatataaagcttcattgacaacaaccaatgagtggggactacaggtacaaactttgaaccagctgccatggaagaatctgcaccaggattcatagtaggctcaactccagtaccatattatgaaaactgagagagaagtgaatcaagaaagaaaatggaactgttattcattaaagtaagctgtgcatatgggagaatgaagaccaccataacagcaatccattacagttgtaataaccgttgacctaacagtcttaattttctatactactgactaacatgttaatttcagtatgtttattttagttttgttttttaagccttgggagctcaaatttcttcaatttggttacttaagttcaaatggcaaaagaagagaaaaaagcttgtaaatcaatgaagtggatctttttattgatcaaatgaatttaaatttgattcttttcagaatgataaactatttagtttgatttatatttatttatttaattcatgttgtaataccaattctctcttacgtaatacatattttggcagcaactaataatttcttggtattcactttttttttaaaaagcatttgatgatattttaattaatttaaatattaactaaaaatcattaaagatctaaaaattaaactgaaaattcagaatttttaaacttaaaataataaaaaaattaatcaagaaagttaaaaatataagtttagaaattatatttacattaattctttttttggttttcaagattagatgttatatacatatattttttttttttc

SEQ ID NO: 191804 - DNA, 2414 bp, Cannabis indica
gaggctcttgtgtactatagttacatctttattctaaaagtccaattaattaacttattaagttacttttaaaatcaaaggataaaaagttaccaactaaaagcacaacattatttatagtaattaattaattaactatatatgttggttgatgactatgtataaagataaaaagcaaaagcaaaagcaaaaacttattagaaggggtgtttttactttatcttttttgtaatgtaaggtactatactgtccttctcaatacgaggagaagagatatattgaaaaagtttcaaaagactttgtgttataatcatcatgccatacagccaagcatatatatataaatatatattatatataattaattatatatagagcttgaagccaatgatcatgttatgtgattaattgagtgatttttcaacaacaaatcttctaacccattatgtggtctaatacacaaacattttccaatatcatatatatgatggtggatgatagctagcaagctagctagctacaaaatgattaataataaattgcataaattagtagactaattaattatgaagaatatatcccattatcaatgactaattaatcaaataattattaattaataactaataaattttttggcaaaatggaaaatgacaccttaaattgagcatttgattgagccttgtttgaagctatcattgcaaatagattagattactacttagcctattttggacctgatctctttatttatatatagtgtcttggttcatgtaacaatatgaactagtctagtctagtctagtcacatatatatatttatacacatctgtataataatgataataaagtgaaagtgcctatgtgtgtagtggtagggttacttttaaagtgtcatccttttttcgtttggatcaagggttcgaaatctaaagaaagacctgatttttactggaagtggtgtatctgtgtgataagaattttcgagatgactaccgatgacccaattaagataggctggggtataaggctcttatagttaacacgtggttctcgaaattgtcaaaaattactaaaaaaaaataagaaaaaaatctacaccacgtatttttttttcaaaaaaaaaaagtgaaagtgcctatacttttttaagtcaagattggtagtagtatataatccaattaaattcaaacttgtcactaaatgtacaaatgtaccagtcacaaaaccaattgctatctttttttctcttcacttttttaaagcacatgatcgatgaaaataacctccatttatatatatacgtaagtacatatataatgaatcaaatttcaatttgtcaaagcaactgccaataagagaaattagcttatttggttatttgatctttctttataaatatatcaattaatccatcactttcttcttattacgtggatattcatagatattttgtatttgccacatcaaattttagaaaaattatacatatacatcctataaataattaattaattagagttaattaatcgtgtacgtcatatgatctccaaaaattatctatattatacatatatattatacatatttatatattacgtcgtacgttgaaaatagaaacgaattcatgcatgggaatgaataaatgtttagagatatatatacgtatacatttataatatattttctataaaatagctgcctgtgtgttgtaaataattattagctatatatatatatttatatgtatagttcatcgtgcatgcattttcctgaaacatataataattattaattaataatgtataaacctctttctcaaattaatcatcactaataataaagttaattattcgaaatatataatgagttgttgacaaactcaataattagttggcactttatataatacgtatactataattacatacaaaatattttaattatttattcaacaaagtttggtgggaattgtacgtatgttaatgaattaaaaaataattatatgtagaagtgaaatactagctaattatgtattaattaatcatatcaaacagtattgtgtatagttgattttgtcatcttttgattgttaattttaatattaattaaccactattaaaaaacaaaatagttagattacaatttacaaaggtactaatagaaaacatacggtatatatatatacacatatttattattgtttgtatataataaataatagtatttttaaacctaagcaatctatatatatataggtagtctatactatacccatgtgcatgttttggactgttctataagatatataaactaaaatattaaaagtgcttaattaattgattaactctactttttacattgtttatgtatatatatatagttgaaactaacttagctcttaatcataataa

SEQ ID NO: 191805 - DNA, 1408 bp, Cannabis indica
taagatcatgttagctattttttctggtaaagagttaaagtgtggggttactttatactgttttagcataattggtccatggccctagttttgtctagtgctttcaaaatgccttttgtatcttctttgctggaaattccctattcaagtaaagattttttttttatcaaatgaacatgtcacataatgatttcatgacatcatagtcttcctctggtgcttgatttttttttaatgctaattatcatgtttacaactaatttgactctcttaagttggaaaaaaaaaacagaggttagtgctctgagttggcaacattcaagataaatcactaggtgcattttcattgttagtttactaacaaagaaaaaaccaacagtaattttggatataaaattaaaatgcaagaacaagacatgttgtcccactaattgattagaatttattttaaactacagcctaaccgtaccagcctggcaacgacatcttaaattggttttcaaatgaaataattaaccaaacaacattgtagatgtatagccacaaaatgggctagaaaccattaaagaatgttctataaatggtatttttgagttttgtgtaaatttgccatgttttctcctggaaaaataaataaataaattgaaagcaaaatctagctcaacatggtggatttgtttctttgctcaaatttgattcaaaagaacattcattttattgtatatgtagtctctttcaaagtgagtaattatgaagcttgaaagttagagctcctcaataagttggctttagtattatggtccctccagtccagtggtgatatgtatatatatatatatatttatatatatatagtcctttcaaagtgcatgactagccagatttaggtgtttttgaaggacacagctgtagttggtgaaaatgattggtgggtgcccggaataaattggttgcaccattttattatgtaatgatgtatcttcgttctgttaatgggacttttgcagtggagttgccatggactaattcactggcccttacccaaatttagtaaagaataaaagtttaaaacaaaaggaaataagtgagaatatgattggacaaacattatcacatttaatgatgttttaatttgagagtgaattgattattttgtttcgtgcttgaagaagaagatgagattatatgaaatccttttaaaaaaaaaagccatgagaatttgatttttgttccaaattccaatatgctacttttattttatttcataagcactcttagtttctctattttatcttataaaatataacactaaattttttttcaaattttaatatattttatttatttaaataatgaacattaatatttaaacatatcaccatataaaaaaaatcttcaaataattaat

SEQ ID NO: 191806 - DNA, 2954 bp, Cannabis indica
gagagatttcaaaaacctctcagggccttttgggggggcaccaaaaacgctcatagacaagagcgtctcaatgagaaacgacgtcgttggattgaagctcatggaccttatgggccccaccgctattctccgtataattcagtcactacttttcctggcttctatggatcttataataatagatcttttgcgcttgctaatatccctaataataataataattcttactcatctttgcccgctggccctaccactgagtacccattttttgggacccataattttggtagcggccgcggcattgaccatattggtagtggggcatggtcaaggcagccctttgggtcgaaccctagaagagtaccctctcctaatagcggtggtgattttggtgttatgaataatttaaacaatgcttcggttcctaattcttcagaaaatgatgatttgtctcttcaactttaattaattaattagttttattgttgtttatattgtgttttgatgtaatttagatgaattaatcaatccttaaacacatatatagatcatgtttaaggattgagtgcattagttttttatttgtgtttggattttattatcaatttcgtttgtacttgtaataatcatatacatatatgtgatttgtttttcccaaaattttaaaaaatagatgtattaatttgttttctaatattttagtcatgatcaaataattcatatattcgccacattaattatagttttcattagataataaagtgttcaattatagttatcggacatgggtgaacccacatagaagcgatgaaagacaatcaatatataaatatattaataattagctaacaagttgatatatatgtatgtatttattgcaaataacattgaaggtgcgcaaaaaaaaaaaaacacatttcactatttaaaataatttaaaaataaccgttaatttaatctctttaaatggaagtcttgcgatcaaatataacgtaaaagaattaataacgaagaatgaactaacctaattaattatagacttcttcttgctttacgatctacatgcattaattaatattaatatttcgatgtcttatgagtactcaatttgtttttcaataaatctaataagattatgtttaaaattagaaatcaatgatttagtctctcaaagtgaaaatttatagtgatgatcaaactataaattaaaatagtacattaagaattactaatcaaaatacttatatttttaaatcattagattttttttatagctttttgccctacattttttagtaactttacttaatctataaatatatttatagcaagctagctagtcattatatatgtatacatttattgcaaataatagtatgacgcacaaaaagcgcgtgtcactacttaaaactatttaaaaattaaaaaccgttaatttggtctctttttttgaagtcttgtgatcaaataagacgtaaaagaattaatgacgaagaatgatataacctagttagacttctttactttgctcttatgatctacattaattaattaattataatatcttgatgtcttatgattcttaatttgcttttcaaaatcttatagatttatgttttaaattcgatatcgattatttagtctcttaaatatatatatagtgacaatcaaactatatactaaaattacttatcggaatatgatgcttatacttagatttttaaatatctaattattgttagaattttctatatctttttgctctacattctcagtaatttttagttgttcattattttttaattttttttaggatgtaaaaccaagattttataataacttatataaataaaattaggtagttcaatttgatttgaattatcagtgaggcttctaaatttgtggccgagccaaagaataataaacggtctagattcactggaacattgatactaaattcatttggtctcaaatagttgttttgattggttgagtttaaaatcgcaaatttcgaattgtatggactgccttaatctcttttatatatataaaatcaaaataactaaagttcaactatataactaatattttaaagtacttcactctgtacttaattataatatgttaaatctgtatgtttagattctatacacgtgtccttatgtctttagtcaattagttaggtagttagtagttaacaggttcaacagttaagtttgttaactcctcagtcttaactcgagtgtgtaagtattttgttagtagaggtttttagcctatgaacacctttaacttcttaaccgtaaagtaattgagtcatcattgtaaatactcagtataataaagatataattctatcaaaaaggttttaccttgtgtgtatgcttatgttctataagttgtgagtgttctcagattgttcttgtagtcattcctgacatgtgggattgagctcgaattataacaggtgatatccgagcttgcagatcgtagaggaatcttgttttggcttgaaggttcaagattttggtgatcaagcaagaaaatgggaaatgcgaagtttgatcttgaaaagtttacagggaagaataattttggtttgtgccttgctagttcaacaaggtctacaattagctgtgttgggagagaagggtatgcctgaaggtctcacctagaaatagaaaataaagattctcgagaaagcacatagcgctataactctaagtcttggtgataaagttctaagggaagtgtctaaggaagactcgactgcagggatatggttgaaacaggaaagtctttacatgataaaattgttagcaaacagagtttttcttaaaaagaaaatgtactcttttaagatgatgctaggataggaaattgaagatcatcttgatgatttcaataaggtgatccttgaacttggagaatattggaattaaagttgaggatga

SEQ ID NO: 191807 - DNA, 4461 bp, Cannabis indica
cagaacttgaagaaactattccagcattcagttaaccagacaaaatgtcctccctgcacttccagatgggccttcacctcttaaacgagcaaggtttttcatatccttctgaaaataataacaatgcaagttacaaatcacaagagtaagttgaaaaagaatgtggaactttacaatagaacaaaatcgcatggttcaaaatcattgataaaacatttagtaaaactgttttttcacatccacattcaaatatgaatatttctggagaagctcacacacaaaacataaagacgggtttagtttagcaaatatatttcttaaccaggaaaaaaaagggaccgaaaaagaaatccacaacaacagtgtactctcacccaaaattaagattatgaaaaaactaattatcgtacctgcttcacgctcgaaaacctctttcttttcactgtagacatctgtaagaaggtaagtaaattcaataaacaaccaaggaagagaaaaataaagaccaagttctactccttcaaaattagtgaccattagaaaaaccgtaacagctttctactataaccattgtaaacagcataaatgcactttttttctcctatgagatttaatgcaactataaaatcatgtccattttgagatttgaaaattttaattctaaactacaaaattttccaatatatgcgtatatgtatgtaatgtatgaaaattcttaggtagaaaaatcaatttttctcccactgtggaaccattttttttgtttttgacatctatagaaattataactttttatttattttttatttttttaatatgataatgtatattataaagaagcatttcgggaaatttcaaaaagagatttcaaacagctaatctcatgcatgattattttttttagacacatgaaattgattattttgaactttgctttcaacattgaaaattattaataatttcttgaaaactgatgggatgcctgctatgaccacaatctacatcaccatataaaaataattgagttataatttgtctacaatagggacaaaagtaatgtcagagcaaaagtaatgctgctaggggcaaaattgatgccactatctaagaagctccctatatgtgtataaaatttcataaagttcacataataaagtatgaaactgtgtttgtgtttccattcagcaacaaacatagacgaaaattaacaaactaccgtattctccattctccaacaacttcatggcatcttcagtcagctggtcaaatatggcctttgtttctggcgacattttatcctttttgttatttgaagttcctttcaatctcctcaaagcttgcaaaacctatcacgtgaaacaacattactctatacttagtcaatcatacaaaactaaaagttcaagtgttgttctcgttcccatctaaagaaaagcatatagaatacaatatagggtatttaatgatgttacccactacagaaaacaaataatagactgagagaaaatgttgcagacaggtaaaagatgtgtttcatgaaaacaagaatgtaaaatttaagaagagcaacgtattgtgcaaaaaacataaataaaactagattaccgtttcgcctggctcaagtgcatctgctatgcgtcttttcatctttccaatatcacgagacgtaagctcttgaatatcgtcatcattttttattactactttaccagcatattttggttccacttcaacactatcaagccaagcatcctgcaagaattaacatgatgaacaagtataaatatacttttcactaaactatacatataatgaacaaggatgtaactgcaattcgtaaaaatgagctggccccagttcttatctaaatagtaaaactcaatagtattagtgtacacataattcttcatgaaagtaaagtaacagcaatgcacaaattgaattaaatggcggaaaaacaagaataatattaaccaagtttgtataaatttagcattatgtttaatcaagtactaacgatagttaatctcttttggctacattgttacattaatttagtcaagcttgcacacacacttttttggctcaaaaggcctacatccagagtatgaatatgtatgtatacggtatgttcgttcattcaacacagctcagttccagaaatgtttaccttgatttcattttcattgacatattccacaaaatttccgtcagcatcaaaataaccttcttccctctctttctctaagttgaaaggttcaatttgaatgccatcatccacaaaatcctcgttttcctgtcaaaagacactccgcatcacaggctaccctttatatttccattgatcccaataaagaagaatctggccaaatcatcttgaatcgaaaagaaaaagaaaacagcaacaaagctacaccaattcagtaaggaaacatacaaaaaatctcaaacgacctccatttctacagataaagagcttgaaactcacctcataagttacttcagctatagagatatcgttgataatacctctgttatcttcactcaaaagctccgtagtcatttgactacgacgctttgagcgttccgtagccgcctgacgagggtctgtcagcggagcgggctgaggttgaacctcgtctattactaatttcttcaccgccgcttcatctccttccttcactttcttccccttgggaaatctaaccctttttttcctgcaacaacaataaagaaaaccatcaacaaaagagaaattaaccaagaaagatgccatctctgtgaacacaaacttacatttgaggtttggttgattcttcatcgtcgtctgggaaagggcgcttgaggttaggtcgagaggaattcgccgccattaacaaattgaactgagctttcttttcaattttcaccgttcggtttggctgtgtctgtgtctgtgtctgtttctgtgcactaatttcattaaacaaggaaattggtaaactcctgttctttgtagaagaaagacaatgcagggcccactatgtcggagagtagcccattaacatcgtaatgggccttatttcatattggatccgtaacttgggcaagggaaatttattcgaaattttacacatatttttcttaattttgttttctactattttttgtttattaaaacttcaaaaaagatttttttttcaaaatgacatataaaatgcactcctaaaatgaaccaattgttagataatagtcctctttgagactggacaaatcttctaaaatacactcttcgagtcagtgtcaaactctaattgaaccaaagttctattttcttattccatatcctacaatagcctcacaattacatatttatagtgattcacactctttagaaattactattaagccctacactatttcatagtgtaacacattcctacccttcaaaatcaccttgtctttatggtggtagaaataaaaaaaaaatacaactaaaaacaagcacaaatataaaagataaaactaattacagcccaattattcttttaatattcagcccatttctttctaatttcctactaaattctcagcccaagtccaagcccaggattagggcaaagagagtctcatgtcactaataatgcgttgctcttctacttctccttcatcttctttggttttttttttgaaaccaacaaccactatctttggagtcgtgacccccatgtattctcaacaaattgaagcttcatccacactctaaaccatatatatttacagaacttaacccataaaatatgtatatatatttcttctgcaaaccagtgatgttgaaggccaagtcaatgccctttgctccaatggtcctctgcgatcctaagagaccatgctaccctccggtcagcagtgactactctcctccgttcatcaccgcacttagtgaatcaccagacagcttcaattttttctattcgttctttctgttatgatgttccaatcgaccaactcgaccagatccatgccaggtctggttagcatcacgaacggtgaagattcgaccggtgctagtgtcagccaatggtgctaagactatttcttccggtgttagcgttctccgaaccgctttcatcgatgcagaaagagcaggaaaccgttgcgatctacagaaattgacaacacgatttggaggtggcaaaatcactggatctaaaacctccaacgaagccagaggtgtcttctttgacttcagtgatcttcgaactgtcatcatcaccgtagattgaaccagaattgattgcgatcttcctggatcggatccattagaaatgttaccgcagacgagatcaagtggcttcttcaatgacttcgtattgatcactgattcaacagggccatctatgtagtcctcgaccttcggcgaagtaggtgacacctgagatgtcagatccgaaggtgcctccgttgatgtgagataactct

SEQ ID NO: 191808 - DNA, 2914 bp, Cannabis indica
ggtaattaacaaagtttaagaataatctgacctttagaagtttcggggttatcaaatgtgttcaatcagcttaagaaagagaaaaagggtgagaagaaaaacgatattaaacactcaaacggctatttaatataattcaaatttagattctattaggagtaggattaatatgggccgttggattttgtcggttgattggcattgctttgaattaattttgatttttcattgtaaggtcatttttacccctttcacgtttttttattttattttattcccaccttcttctcaaccaactggttacaaatggcgaattcatctactccttccaacgattccttcagtttcttttccgttcctatgttcaaatacttcattaatatccacaaacagatatggcgactggattatacactgtggagataagataaaacgtaccattttgatgtcatctgtaacgcttctttagtcgggtgtctttgctaccattaaaactgtttgttgaagcttcttcttcttcttcctcccagaaatcatgataaatgaactatcttagaacaaataacaaaacccaattacctttcttagcatcgttcaatattttctctcaacccaaacatcaaatccattttctctccacttatttcaaagtaaagaatggtggaggtgccatttttccaaccaaactggtttaccccaattacgtgaacaagaaaatcacaactgttcagttgaatcaatctccatcgttggctcatttgggttctggtgatgtagtctcgtcaaataagttaatcacgaattatattcgattcggggatttgggttctgctcttaatgtgtttgagagaatgcccgtgaggactacagttacttggaattcaatcttatctggatttgcgaagaagcctgggaaaatgaaagaagcccatgaactgtttgatagaattcctgaaccggatactgtttcgtataacactatgttggcttgttatctgcacaattctggcgttgaatccgccatggggttctttaacaagatgcctttcagggattctgcgtcttggaatacgatgatatcgggttttatccgaaatgggaagatggagagggctcgtgaattgtttcttgaaatgccagagcagaacagtgtttcttggagtgctatgatttcagggtacgtggagtttggggatttggactctgcaattgagttttttgagttagcgcctgttaagagcgttgtggcttggactgccatggttactggttatatgaagtttgggaagattgaattagcagagaaaatgtttcatcatatgccagtgaagaatgtagtgagctggaatactatgatctcgggttatgttgaaaatggtcgagcagaggaaagtttgaagctttttcgggcaatgattcaatccggtattaagtcgaattcatcgactttgagcagtgttctattggcttgcagtaacctatcgaccctgcagatgggaaagcaagtacaccagttgatttataaatctctcttgtatgatgacacaactgcagggacttcattaatcagcatgtattgtaaatgtggagatttgaaggatgctttgaaattgtttcatgaaattcctagaaaagatgttgtttcatggaatgcaatgattactggttatgctcaacatggagcaggtcatgaagctcttaatctgttcaatgaaatgaaaagagaaggagcaaagccagattggatcacttttgtagctgtcttatcagcttgcaaccattcgggattagttgatatcggtatgcaatattttgacacaatgattagggactatggagttgaacttaagccagagcactatacttgcatggttgatctccttgggagagctggtaggctcattgaagctgtggatttgataaagaaaatgccattcaaaccccacctagccattttcgggacccttttgggtgcttgtaggatccacaagaacttagaactggcagagtatgctgcgaaaaacctcctttctcttgatccatcaagcgcagctggctacgttcaactcgctaatgtttatgctgtgacaaaaagatgggattgtgtttcaaaagtttggcgatcgatgaaagaaaataatgtagttaagacacccgggtatagttggattgaggtgaaaggtgagattcacgagttcagatcaggagatagggttcatcctgaacttgtctgtatacacaaaaaactagtcgaattggataagaaaatgaggttggcaggctatgttcctgatcttgaatttgcactacatgatgtgggaaagaagcaaaaagagcagcttctgttgtggcacagcgaaaagctagcaattgctttcggcctcctcagattgcccgaagggattccaattcgagtatttaagaacttgagagtctgtggggattgtcaccgggccaccatgttcatctcagccttagaaaaacgggaaatcattgttagagatactactcgatttcaccatttcaagaatggggtttgctcttgtagtggatattggtgattactgattcatctaaattttaactgaataatgttttgttgatactatcaagattaccaatttacctagaaccagttacagagactcatttagaaataaagactaaaagctagttaatctccacaaggaaacaaaagcaagacctcattatatttattgattaattcatgggtgaaaatagactttttaataaactcattttggagaatagttttcaaaaatttatcaaacaagattattgtgtaaaatatctctgacaaggtcttggtaggattttaaattactttctcacggagtaaactaattttatacttaattagcatttttagacataaaaaaaaaaaacaaaaaca

SEQ ID NO: 191809 - DNA, 1555 bp, Cannabis indica
tattgcagtactgtatattgggttcttgcagaataatttattttgatataatatattttatataaatttatatgaagaaacaatttatttaaactttatttctgatttaataaattattgagaataatgtgaaaatttgcaatgttctaaacaactacgagactaacttaagatgtgtgtcatgaaaagagaagatgaagaatattgatgcacatttatttatttactttttgagaatgtaccataattatatattttattattattattatttgagtgttaatgaaaaacaaaaaataaataaagacactaatgaatttacgatgaattaagaaaatagtgtaataataattttcattttcaatatatctctctatcaaactattaattaatagtaggcgcgtaatcatagtagattgtgtggttgtattagtataaattaacgtggttttgtatcgaccacgtacaagatcgagtttttaccattattaattaatgatgttctgttacttattatgtttgttgtgaattgtgaattatgattattgtgtgtgaaaagtatagatataagctagggtgatgggctgagtttggcacaagggcaaaaagtaagtagtactaataatattatcatgagacgtgaacttaacggcggtcttcatttcatatatatacaactattattattattattattattgaaaattaatagcatcaattatacatgaaagaaagccattaactttttattttatttcttataactacctacttagaaacataaaagggatgattagcaatataattgttactcataaatatatatatataagtttagagcattgatggtaattagtattctagtactatctatctagagatatcgtattacgattagttttcaataatttttaaaagttatcttatgaaattatataaaatttaatatttaattacaccaataataatataatacaagaaaaaatgttagacattaaattagtgtatttagcatttctcataaatttatcaagttagagaagcttacttattagttcattgcctaagccacaaggcttcttttaccattttaacttgatcttaattaattctgatataatcttcatgacatgcaaccaagattgaagcttgaaattcgatcccattggtaaacatgtttgaagttgtttaagtatagataaaaaatgtatgtctattattgacaaatgaagtctacagtactaaaacttacaaagaaaattagaacaatcacttttataacaaggttattctctatataaatattttagcaagaaataagatacgatttttagttcacaacatcacgtggggtgcagatatattagctactcattttctttttgtttattcattttttgaaattcatgtaaattacatgtacttatagctataatatagtacgtacattattacatgtcttcaggtaacaatatcaatcaccttagaaataataagtatcgaatcttgctataatgagaagagaataacagtccgctacccaattgtggaatat

SEQ ID NO: 191810 - DNA, 1693 bp, Cannabis indica
acagcaacctccacttttattacggggatatctgtttccagatttacaaacaagaacaaaagctagagaaatatctgtagaaactgatttcttacacccaggcacccccccaatttttcctataatgccctttccaaatcttaaaatacaattagagcatctgttttgacaaagatacacatttcccactaaattttcagggaaaccttggtctgtaagtacatattctcacagtatcttttgtacgagtcttcatgattttatcatggaaagctactcatgaaacacaattggaccgtcaaaatttccagttgccttccaaaagagccatataagaaaaggagaaaagcctcggacatgtgcttaacataaagtaagaagcttgtgtcagattctttgattaaactatccattgatatggtttacgtgccctgtttgggtcaatatccaaaggatccttaaagtcaaagcagagatgaaaagatcaccttttgccacagagctcaacagtgcatccgacattgacggccgttcatgctctttagcttagtgagttctttccttctcttccttgcctcggctgcggcaactgcctccactgatttcttacatgagtagatgattggttcacaactttttcctggtggagctgatagtgtatgacaaacatcagcagatgttttattagtagtaaaattccgttgaatctctttctcgtgcttggcagtagaaaccaccataggtttacttccacttccgtggaatcctgtttcctgatcaattgtttcttgcgaaacatctgctgggtgttcattaagatcatttgttctggcttccagtgcgccacaaccagaaggttctgttttcaccttgacaggcagaaaggaatgttgattctcaatatggtgaatggcttttgaggatgtagcattgcactgattagtaatataactttcctcttgtccaattttctgaggaaaagatggctgagatcggactgcaattccctgatcaggatgaggataaaaccaaggacatggcaaaacataaaaaggggttctcggtccattagtatggaggtcttctagttcacaagaatcatgcctaccctccactggaaatgtgatgtttgaaggcataacaattgcattttgtgacatatgagatggttgaacaaaattttcagattgagaagtgggaggccagaaaagtggtgtaaatggtggatggttatacaagaataatgagctgtttggtggtgaagttgaaggtggatttaactgatgacaagcaggtttatgacgacttggagtattctccatgtttttcttctccacattagccacctgttgtaagcgaagcacaacaattatatagaatttccttggaaaataagtaatttatcaattactaaattacttacctgatcttttaattgtttatttgtgatttccaatgactggtactctttcaatgccatctccatatcctgatacataaaaaccgctcaatgtcaatggtgttaatgattcggtgcttattaagttgttcaactcaactcaaaaaaaaaaaagaaagagaaagcatagtattatttaattgggaaaatgtaaaatgaagttgttagtacaaaaatttcaagtgtaaactgatgtgttagtgtgtgctatgaaaaaactgaaggaaaaggaga

SEQ ID NO: 191811 - DNA, 1087 bp, Cannabis indica
aagtatggtagggatgagatctctgtctttagcccttcttcccaacagaccagatatgagtaaacttaagctttagttagcttatgaaatggagtttgtaacgtagttgttttttgttttggttgaagaaaaaagagtttgtaagaaataataaaaggtaagtctcacgtggtgaagtttatatctctaataataaatatatattagtgagaataataataacaatatggttttttttttgccttcttaattatcttcttgttttttgataagaaaaaattatcaacctttgttttggtaaagaatgataatgaaagctatgggcttatagcactagctagctacagctcaaaacagagttagaatatcacttgttataaattgatgtattgttggttttttgaatggaatccgattaacttcattgttaaaaacaaactccacatttaagcaaatatcagagaaagtcacaaagtttaaacctcgtttttcaaggttgtcgtgcaaatagtcacgtgttcagaaaaatctgagcctaaatataatatgagcgatctaagtttgtaaatatttaataattttagttttttttttcttttttcgaaatgtagttttttttttattaacacaagagaatcaagtagtgtagatttcttcaccacttcttaggattacatattagccatagtaattttatacttcaatctgtgttaattgggtcctcaataaattactttaacagtttccatcaaataaagatggcatcacctacactaaattaccttttagccttcatatgggttcataatctcttttcaagaggagctatagtgagtttcaaatccttgagtaaagacctgtccctaatactacactacacaacaaaagactttgtcagttttatgtaccataccatagtaagaaaaaaagaaaaaatgtttttaaaaaaatataattcattaaaaaaataaaaaaaaacgtaccaaatataatttgagattatatctttgcatacaccttataaagtaataaagcttcaccatatatatagctggaaatatatatatatatttttggtgtactattc

SEQ ID NO: 191812 - DNA, 2032 bp, Cannabis indica
acaaaagtttgacattaattcattttatgcaacagtaagcggacatcttaatgaaacagacagcaaagaatccaatgcattgaccgtataaccctccaacatagaatgaaaatttagttataatgaaatataattatatatatctatcaactttagccattatagaaaagaagcaaataaatgtacaatattaagcttgatccctaatctgtagataaggcaactcagctaccaataatatgcctactaacacttctaccaaagaaacaccacaatatgcagcgcaaaaggttaacaattcaagttataggtaactattgatgatttacttgtactataggaaaaagttatattataaatgcaactacaaaagtacctgagcacattgtttcaattgattgatgaattgtcacaagtttgcatttttatgataaaatataagtgtaacagaaagaactaattggcatagaaaaagaatgtaatgtactaattagaacagcaagacaatgaaaaatatccaagttatttaactattatatcagtcaagctgcacttttaacactgaaactaatagacaatagtgcgaaactcaatccagcattgatgcattaagattaatctatatcatatttgaagataaaaggcttggaaaatactcacgtttcaagtatgcatcaaaaagattcccagtaactccctcaatggaatcatcaatgggaagaatgtgcacacgttttccatacttgacatcagcacactggtgcacggaaacaacatctccaagcctgactcttaagttgctcctaacaaccttgttcatccttatctttggttcatcgcaggtatcatcagcaagagcaatgcagacagtgtccttccttttctttccctgaacaccagatgcaatgaagcaaacccataagaaactcaaagatacaatacaaagacctcacagtacactacaacacgtagtgaaacataaaataaagcttaagcaaatacattaagccctaattttgaccaaggcaacctatgtacgaccataaatatcagagaatcagagaaaataacaccagtcgtatcatctatccacacatgtttccaacatttaaatccatgaaatcattggtgcaatcgggctatgtattctcagatcctaagtgagataacaaaatcccaccgacccatataaaattgaggcatcaaatccccacccaaagcctaatttcccattaaccctaaccagaaccacaaaatcatcactaccgagaaaacataaaaaagcacaattcttgataaaccgacttcaaaaatttatcaataaaaagaggaattaaccaaacctttatcaaaatcgtatcgccacggaaaagctggagtttctccagggtgtccgggtgaagagagacgacagagttgtcatcgttgatagcctcatctacaacaagccgattagcagctttcttccgctcaagaatagcggtactgaagtcccttttcgttcccttactgccaagatagaaaaacccacaaaggaaaattagaatcggaaaacagtataccaaaaagtaaaatccaatcaaaactcaaatcgggcacataatcaaaataaaaaatagatctgaaagcttacgcgtctgaagattcagcttgatcagccatgttcgagaccagtaactaagacgaaaagagattaaagtttggtgcagagcgaagaagacgaagagaatgtgtgcgagtatgggcaatattgggatctgatattgatatttatagacaaagaagctacttttcttgtttccaaagaaaacttcgaattgaaaaaaaaaaaggtaagttactcactccatatctttatatattaaaagtgtctatctaacggcaattcttggtttaacagaatatgctttacaaataaaagaatattcggttaaatttaacctaaaaaagaatcgtccaccattaatcgttttctcactcaccattaatagttttctcacgcataatgttataatgacgaaaggggcttgac

SEQ ID NO: 191813 - DNA, 3106 bp, Cannabis indica
agaccctataagtgtttgtcctctggataggatgatatgtgttgtgtaaaccaaggtttaaaaaaaacctaatcagaaatagaggcattttcctcaatcgaatcacaaattggattgaggcaaagatatcgaaataaaaacattataataaaacttaacgatacatgaaaggagaagacagccaaaattcatcataaaataaaatatgaacttatttcataaaaattgacataataaagcacaaggtttgaaaatcacattgaagttctgattttaataaaacataaaatctagtagcctaagatagatactagattctaattagccccttaagaccatgttcgagttaacaccattttggtacaactttttcaccagtttgaagtaaaatctatctataatttttcaaagacaactcagtattaacataagatattacacaaaggaatatttagagactactttgtaaattcatttcactatcttagaactttgagtagatcctatgttttacttttgtaaatggcggtgtaaatcacatggagagtctactgatcatacttttcttcactatgaattcagagaaaatttatagtttgaaatcttgaacaaatttagtgtggcatgaggcatacctcttgactaagtagatgttttaactatgtttgatttagaagataaaagtcttgaatggatttaatgtggcatccaaaatgaagcaattgcttagaaaggtagcagaaatgattgtgtggccggctttgtggcttgagaataagagaagttattatgacaaaaaagatatcggtgagttttatgggattgttgtatggttatttaatgttttaaagagattttgttttctgaccatactacgaataggcactatcatgcctggtatctgatcatattagaataccatgaggttttgagtatatatttatacaatacaatcatgagaatgcccatcatatcatccaataacaaaaaaattaaaaacacaggtaaagcaacaaaactaaccatgcactatccagtatgtgaagaatattgacttaaatagcttcttaagattaggtattgtaaatcttataaagtaaaggataaagaaagtcaccagaaatattatgagcatataacagataaaccttatgatgcatgtaagctgtacattctaggacatgttatttaaaagctttttacacaatattggatgaatttcattggacttgcacaaataaataagctcattcaccctagaacaagatggaacttaggccagcttctccatatgaaactactaagtaaatacctacaatcacactgaagtttgcctaccgtttcatatatttaaaatgtttatgcaagaaaaaataaagttgtctaggcttcacatttttgttctattatgttgaactaaaaatctcattttgacactgtttgtgatgcaaatctgtactgtaaattgcaattgtagttcaaacacaaagtattaactcatcacctagagagagtctatcaactataaatttggtcaattaagtcagcacattctcccctaatatatttacattcagtcactgttattaatattaagtggttaataatatacgctcctctaacttcagtacggactacttcactggagttataaatctatgattcctagtgggagaatttgttgctctaataagtttattatgtttgctaattgttgttccctacatataattgtcgaaatggttgggaaatttcaaaatttacagctttgtagccatgctgtttaccatgataacaatcaaactcttttctagtcaagaatagaacgtgcagttcttcaatacaagcattctgtgtataattaatggttggaacaattcaaaacttatactaaatgatgtgattttttaaactaagacccccacccccatcatgtatgtggattgctaaaaaggacatgatattgaatataatgttttaatgaaattttatgtccagtcacttgaatataataataaaacacttatggttccatcaacatcctaaaaactttgggagggagaaaaatctagcatattgtagtgtaggtccttattaagcatattgtagtgtaggtccttatcaattcacctatcctcacaagctagggccaatggaaagttcatggaagttcctccaccgtgaactatacatagaactagcaggttcacgggagttcatactttctggttataatgagtcaagctttccttctgaattggtgtgttctaagttttaagtctgcagatcacatactattcatagtgattttaccatatctttatgacaaaacattttggcattatttggtttggtatggggtactcaaagaagcttgtacaacttcattatttaagactttgttagaaattatgaattctcacaaaatataaatgattttttgagatagtgcagttttgggggttatgtcggctgtgtggttggaaagaaaggatggtctttgaagttaaagaaaagtaacttgactatgtataacagactataatcaatttacaatggggaaggggatttgaagttggaacatagcaccactagggaatgaaagatggtaatattagctgctttaatgttgatgcagagtaagggctgattagactcgaaatattttagcacgtagctttatgttttggtgcagtgttacgtgggttgtgtggttggaaagaaatgatggtctttaaagataagaaaataaattgattgtgtacacggggggtataatcaattgacataggggaaggggatttgaacatagtaccactagaaaataatttattgagggaataagagtaattttttctgctttaatgttggtgcagtgttagggctgattagactcaaaatattttagctcctagctttacattgaaatgagttatttcttatcttaaccaaaaagatgaaagaagaaataacaatgacatttcaaatattaattaattgtcatatggccagctcctaaataacagaaatcataacaccacaacaaatagcagttcaaatctaataatgcatcaatacataatctgacaatgaaaccaagacccaa

SEQ ID NO: 191814 - DNA, 3526 bp, Cannabis indica
tttattttttctattttgggttttggtttaagggtcatgtggagttttttgtttgggacttagtttttggatcttttcaatttttttttcaataggaggcagagacaaaggctaaaaacatggaagaccagatttgtaaattgcagaggagacttgaagagaggaatgagcaacttcaagcttcaacatctacaactgagaaggtctttttgataactcaatttcttaaacttgttttagcttttgagatttgtgcttaataaatttttaattatgtgttttactttttgggtgtgtttaatttaaaacttttatactcatgattatgattcactaattatggttgctagcttcctttaccagcttggtcctatcttaatttgttttcccaatcttgttattttgaagttatcaaatacatctaattatatgtttatgtaaaaatatcattatactttcttttggatttttctcctttctttttggtggaacccatgagagaaaagatgaccaagtatttatgataataatataaaactattgttttccctctatttgagatattcaagcaacttttttgtcttttatgcataccataattgttggttgtataaattgtttcttattttaaaagttttgtgtagaagactcaatcaattatgtatttgttatttcaacttccaaatttcatgcaataactttattgtttctttgaaaagggatcttatatatgagattcccaattgcattagcagcatagaatagattattggtaaatggattaagttgccaaattttacaaaagttttgatggttgtcactagattaatagttctcatcattatctctaaatttagctttagttgaaacacttgtttaatttttttcccacttttacattagtggaaggtccttatcattaaatacaaactttctctcggagtaataattaattagatttgtcacaaaaagtgatcattatcaacaaaaaaaaaaatgttttgagaaggtggacattcttgaattagagaaccaaaaaaaatgttgaatttccaaaagtaatctgttgattcttgtaggtttattctagtatatattagtaacagttggggactttgcataattatttaattgtgtatacttggggaaaagttgtgattcactatgctaaatagttcttatagaaataccttttacaatatctatgtagttaattatgtatgtattaactaataatcataatgtgatggacataagtgcactcaaagctcatggatacactctaaattaattgatctttacatgtttggaaaacaaggtgaattttgtgtttacacaaaatgggtcttagaaaatccttacacttaatgaaactgggtgtggttggagatcaaatttagagagagtattgttcatagctcaaaaacatggctacaagtgataatttacccaatttcggaggtattgttcacaaagttttattcgatatgcttcagggctttaattagtatagtttgtataatgaatttgaaaatgattgtatcattgtggtttgtgcttgttattgaagtttcaagttcatcaataacttttagactgttacttatgaatatgtttgtctgaaatttcggtttgtttttttcgggtcatattgattatattttcatagattaaattaaatggtctaatagttgtagtgtgagataatagttaactgtttatgattgcacatatgcttgtagctagttcaaccgtgtggtttcgaaatttgtaaaattaaaggctgattgtggatttatgatgtagcccagcacttgaaggagttagatgatcttagatcaaagctcacagacactcaagcaactgcggatgctagtgctgcatcagctcaatctgcgcaaatgcagtgctcatcacttcttaaggagctagagaagaagaatctttcattaaaagagcacgagaatcgtgtaaccaggctaggggagcaagtagatattctacaaaaggaacttaaagctcgggaatcttcccaaaatcagctgcgagatgaagttatgagggtcgaacgtgatataatggaagctctttccaaaactgcgtcgaacaaggaatgtgaactgaggaagatattagatgaggtctctcctaagaacatagagaacattaataggctgttagttgctaaggatgaagaaatagctagactgagagaggaaatcaggataatgtctgatcactggaagctcaagactaaggatttggaagcacaggtaacaacagttcactcaatttgtcattaaggttctcttgtcaactgtttatttaccctttttccgattttatctaaaaacagttagagaagcaacgtcgaaccgatcaggaattgaagaagagcgtgttgaagttggaattctgtctccaggaagctaaatctcagacacgcaaactccgaagggtaatcatgccatagatctcaattctcaagacttttctatatgcaaattggttaaatgttgattgagatatttccatttaacatcattgtttcaaagttttaatattttgcattcttgtaacagatgggagagcgaagagacaaagctttggaagaactcagagaccaattagctgtgaaacaagttgaagcttcaagttcccaaaagcaaaatttctgggaaagttctggtttcaagattgttgtatccatgtcgatgttggtattggtagttttctccaagcgatagaaacaaacaaacaacaaatcggtttttctcgccttgaggaaaaaccgaaacagtcactgtataaaatcatctttaaaatcctttagttctagtcttataggagtagtttaatttaaggaggaggcaattttgcttgtagagtttatattttgtgcataattttggtagttaccatgttgagcattcaactttcaatttcaataaatgaaattgtcatttcataacttcttattaaaagtcaaaagtttggtatagttaactagttttaaatttagataattcagctgttcaagtgggtggcatccaatgcatggtgtagataccaattaggtggctttctcacataataatatgcttagagaatatctctaccaataccatattttcttattgaggaccactaccgacactaatatcttattcaaatttgatatctctatcatttcttacataaaaaaatctagttgttatttgatatcttaacaaacaagattctttattaacgaccatgtacatagtacaagttaaacatagttgaagtttgagaaacttggtagcactaaattattggatatccattcctttatgagcatgggctggtttttattttttctactctctttttctcttcttttccttttacttgttctttatctttttcattaaaaaaaaaaaaaattcagatatgcaaatggaatattatctaaagtgacatgtatgaaattagataccaatatgatgataatattcatatgatgttgttgagaatcatggggttc

SEQ ID NO: 191815 - DNA, 3909 bp, Cannabis indica
tctctctctctctctctagattacagcttgttcatggttaaagaactgaactttattccaattaaagtgttaatgaagtgaaaaagaagcaaaaaatgggtgaagaagaacatgggtatcttccatggccacctattggagctccactaaacatggaaagagatgacaatggaagaagctttgatagctctgttaatgcagtttcatttgggtttgtagcaactgctattttgatttccatgttcttagttatggctatctttgaaaaattccttagacccaattctccaccggctttagccccttcctccggtcaccggagaaatggtgatattgaaaatggccagttagggtataatggtaaatttgctcattcttctccaaaggttagaactttatatcttatctcattcttatcaattatgggtctgtctccattttttataatcagctctaaatttacataaaaattcaatcttgaaaagtgaaaacccccaaaaaggagaatttggtattttcgtaagaaatctttgacaaagttttttcctttgtgtttgtgaactttcacattggtcattttccattattgacagcttttttttccaacatcttttcatgtttaaagatgttttattttgttgtgattattgattatatctaagaattagaataagtaaaaagtataaaatcataaaaaccggatttaatcagaactccccggttaagcgtgtttagacgagagtagtactccttatctattgaaaaagaaaaaaaaatcaaaaaccaaccaacaaatagacttcaattcattcacatttggttttgtgtttttgaataatttttttttatgagacaaacacctttattatctttgtgtgaagtcattgcttttcaaataactaatgctgtctagtaattatgaatgttgttgtttttagagagagagagaggtcccattaaagtagttgtctgttgagtagttgggtatttggtcccaaacaaaattgggttttgggactgtttgtactagctctatcatgacccaccattgtgttttttggtcctttggttacatcactaccaagcttttatgatactaatctctcatggcctatacacacaaacacacctggtcaacccttctttgtaaattgtaaacatgtttcttaagtccttttcttcttatttattaaaactattttgccttcattttcttgttccaatccaattttctctactaatattctaatattgtttgttgttgttgttatggccttttttcatacttatgaaagacatgaagaactattcatttttcaagttaaatttagagccttcatttttgccttatctgaaatccaattacctctagtgaatgaagaaagctagttatggaaattgtttgaaatgagtttttcatttcatttcttactttaataaggtatgaactagtctatcatgtagagcaagacgatcagtaacttttacaaaatacttgttataatctcaagtcggttatatttccatagatatcgaaatccatggattttcgattctttatggaaaaagatttattgcttaaagtaaattggtatctcgaaaatttgaactttaatttcttggagccctcatttttgcctaatttgaaatcaattacctctagtggaaatttttttgagctaaatttgatgaacttgtaattcttgatcctcaattgtcttaattttgagctaagggaggaaagtttcatgtttatgaattgattttcgagatggttagttgacatcgaatgccttcgagtgtctatttcgacccgaagaactgttccttttttcgggtttgttttgtttttacaagcaaaattggaaattagccttatatggtttgtgttaaagttctttatgcaaatgtttgtgtttgattatttcccatatatttggacttttagacaacacttcttcatagcttttttaggtaagaattaagtaaatggattcatctattgattattttcctctagtggggtgttttaatatccattaaattttacttatgtatatactaattatcacttaagaaagtgaaaaagccaaagattataacatgaatcaccacaaaaatatcaaattattggctttacatttgtttattattgatttgcattattttctttccaaacaaatcattctatcaaggaaatccaagatcacattagcattaattatggataattatgtttatcaagtttgtgtttttaaattgtgactaatgacccactttattattagtgctctaattagtttggcataatttagttagtagatgaaataaataaatggctcattagtggaaatctacatacatagctcattattgtgtcaatctccaaataatgcatcttttagatcattttggtgcttattttattgtgttgtctaatccaattcttctcttaacccttgtagatgacattttactcaagtggaatatcggtgttgatgcccggagatgaaattccgacgtttattgctcaaccggcccccatggtacggtgtccacccaaacgcatttcatgcccgcaacatcatcaagcttcgtttccaaaccctccctcgagctcgtctagggtacaagttgaaaaccgaacgtgacaagtcctatagtttcttttttttttgtcgcgattttctcgaaattgaatcatgcttagagctttttgatttttgtatatatcattcatatgtattagccaggctaaatgcactttgttttttaccatgttaatttcatcatggttctttttagatgattcccaaattttgattttgtgatggattgtatgattttctccatcataatgatcaatctttcaatgtaaaaaaagaaaaaggaaaatgtaattaagctggcttattgtggtattagagagaggtagttccaattttaaaattttgtatttatttatttattaattttttttttttttttgtcaataacaattttattaaaaagagagtaaatattattttcaattttatcttttacaaaagttataaatttaatataatccacttgaagataatttctagcatgaacatgtataaaagatgtaattaattttattataatacctttaaattaaattattataaagttttattgtgataaaaaattagttgaagattttatttttaatattttaaaaaatatagagtttattttattatttaataaattatatgatccaatccataatttttataaaataagtaataaaatagtatttacacttacaaaaaaaaaaattataatccttgagaaaagaagtgttatcattctaatcatcttataaacattaacaaaaaaaaaataattataatccttgagaaaagaagtgttatcattctaatcatcttataaacattaacactgtttaaccatatacaaacaaaagcccaatttgtagtttggattaaagcccaattgtaagtgcccaatttaaaggtaggattgagcccaattattatgttataaattcattggtctcttagttgggtaattttcatttttatggtttttttggcaaagttcacaaaattatgttcttgtgggaaaattactccttatactaattttttcataatttcaattccttttaacttttcctataaaataactaattcaaaaaaaaatttgcaatagaaggttaacaatctcatggtgccagaagaaagaagttgggatttggaagtgatctccgatatcttcaatgatcgggataaggagttaattttgaagaccaacattgttcaggagtctacgattgatacttggtattggtctttggatctgcatggtgcttacactgtaagggaggcctatcgcttgctacatcaggctgatgtcact

SEQ ID NO: 191816 - DNA, 1264 bp, Cannabis indica
ttgtgaacaataacattacatttacactatacaacattgctagctagcgttacattccaaaagacaaagcaaaaaagttgcactactaattcactgaaataagtgtttgaattgatctatacactgttgattgattgtagagaaacgagaattaagaattgcggagaataatatcaactcaatgaaaaagaagagaatgaagaaaagaacccaaaatggtaagaagtagaagaattaatttttttcccttctttttttccccctaggatcagtaaaagaatacattctgaatttgacccatctgaatagagacagagactagcccatatcttcattccataaacatattcaaggctcaaatctccttttttttttttttgaatatatatatatattcgaaaagtacctgaaaatacttttaggttcaataatcgggcatgagttgactgatcttgccttcatcaagggccattttacgctctgtaattttcaaccaaatacaaaccccagtaaaactgaggaccaaactcgcgaacccacttcccaatccgatcccaacaatggccaaaactgacaaccctttatttttgaaaggcggtaaagggtatccataaagatctttatttccttcaaaggaactggcattgagtttcggcaaattcccacttcggttgctaagcatggaaggtattggacccgagagccgattgtttgaaacatcgaaagcggagagccgaagaagaagacccaattgctgaggaatctgtcccgtgagcaagttatcatggagatcaataacattgagataagcacacaatgtgagctgaggtgggattggtccctcgagccgattggaggagaggttaagtacagcaaggttgaccaagtactgaaggtccgaagggattggtccggtgagaaaatttgaagagaggtcaagggcttggagatttgtacagttggcgagaaacggcgagattgagcctcgtaatgagaggttagtgagtgagagcttatagattcggccattgttgcaggtggctccttgtaggtaagaggtgaaaccgctacaagggttagcaaaggtggatttggtccagttcttgagagacccagttgggtcttgtatcgattgacttaaatgggtcaaacatgcttcgtcgctcggatctgatgagctcaatcttacggcggcgcaggctaataagcttaccatcagcactgtcaaaggacccatcatcaactttctcaaaaaaaaaaaaaa

SEQ ID NO: 191817 - DNA, 910 bp, Cannabis indica
aattaagtatcgaatttcatataatataaaaaataatttaaaacatatcttataaaaatattagatgcgaatattcaataacagtactcctagcataatagaatattttactataaatgggataatatttgacatggtatagggtgtacaagaaaaggactagtatcttcatggcaattagcaagaaaaaaggagctttatattggaacacaatgaaacgtttttgaattaaattgaagaaactaactcaaaataaaccaatacacattcgtttgtaaattgtaataccacctaacaatttttttttctttttcaatatcatagagtacaaaaaccacctaacaattattttagtcataaggattcctaaattttttcaggagttctggaatttcataaccgagcatatcatctacaccttggatcaatttaggcttcagtttctcaaatttgtcaatgctgtaaccattcaagacctctctaaaatgctcaacatttggaaaatcaccaggcggcaaatgaaactctctttggacctaattagcaaaaccaaaagttagtatatgtatatttcttccacttatgaaaaccttctatctaggcatacataagagacataccttcgcaaactcatcttcaagattatcaataagccgttgttgcgtcttagctttacccatcatggccggcatctctttcttgagatgactaattatgtaagcatgcatcttagccgctcgggcacgtttcacaaattcattgatctgcaagatgtaatcagctcatttatgtgacaagtagaagattttgaaaaaagcataaaatacgtatattctcctgcaacacacaaatataaatttacagaaaaatattatcatacccgacggtcacaagccttctttggaatatc

SEQ ID NO: 191818 - DNA, 1522 bp, Cannabis indica
ttttttttatccattaattaaatattttgttaaaatctactcacttatgaattatttaatatactcttgtcttcaaatatcttctataaaagtgattatatcttaaaaaagaatataaaaataaaaacaaataaaatgaaataagtatacagtacaatttattttttattttttagcaaatgaacaaaatccggtgggctcacagcccgtagtggctaattacagtttaaatctgtgaatggcgatagcttacacgtgtgcgtgtacgattgttagcaagcatgggccaaacgaaagctttctttgaaacccgagagttgcagaaagcgcgtgatctgagagagagagagagagagataggatagagcggctgaagcattgcctcttgtcgcaccgactcatgaattttataaatgtattgctctattttaccatttatgaattttatgtacatacatattaccaatacagtacatgcatgtgtatataacaattcataacaaagtgacaaacaatagctgaactgtctagaatagcacacataatataaagctttaccagctgtaccactcaaagcatttattattattgcatattagctaggtccaagcctctattaatacccccttttcacttctccttcttcttaccaacactactatacatccttattatcatatattacaatgatgaagctttcctttgtagcttttttcctttgtgctcttctcctaatttcctcatcatcaactatggcttatccctcctcatcttcaggtaattaatactactatacacacataattaatctttatggtaatgtgttttgtttttggaaaaaatgtgttaatgtatgtttgtgtgtgaattaattagaggatggaggaggggtttgtggagagaaatgcaagaatcggtgctcaaaagcaggaatgttggatcggtgcatgaagtactgtgggatctgttgcgagcaatgcaagtgtgttccttctgggacttatggcaacaagcacgagtgcccatgctataaggacttgaagaactcaaagggcaagcccaagtgcccttaactcttaaaattttagaaaaagtcttaattataacctcttattataatattttagtcgatctttacgctcaaaattatagcggtatttgttataattatagtatcatatttcgtaaaattttaaaaaatttaaaaaagtttacaatgccgaaagataaaatttttgatatttcaatttaccgtgtttaaaaactttaaatgtattttagcattgtaaattatttgaaattttttaaaaatttacaagaataatgttgtaagcataacaaatatcgctacgaaaaaaattgtcgatatatgtttttgagcaggaaagttgattcggatattgtaataagaagttgacggaagtattattatggtgtgtatatttcagagatttgtgtgtactgttaggtatggtggtgtgtcatgagatcattcatgatcatcggaaaaatcaaataaaat

SEQ ID NO: 191819 - DNA, 929 bp, Cannabis indica
aaaaaaaaaaaaccttaaaattatgccctcagacgacatcaaacgaatacaaatgacgtgtcgtttcttaagtatatacatttattatgtgtaaggggtattggctttagcctagaagagaagccacgaacgatgaaggtgttaggcagactggttcggcgagccatttcataccgacgacgaagcttggaatctccttccaaacattttttattttctcgccgagattttgtatctgctacttcagcagcatcaaactcatattttaatcactctggtttcgcttccttgaaatcgcctccgcttacttcttccccctttccgaaatggggtctcttcgccggttagttgatcgtctttgcatctgggaaaatcgaaaaaattacgataattgaaggataaatttagttatgagtggtttaacgtatttttgtattctttcactctgatatgtggtttcttctttaccatgagcgaaatggggtctcttcggtgtttagttgcaacaatttaccatttctatctaaattaatcgacttttgtattcataaaagatgacttgggagattaagtaatttcttaatagcaatgaaatcgaattttgatttggatattgagattgtgggtgtgattttctcagggcaaaagagaagcatgtttattcagactcagtccacaccaaatccgtcatctttgatgttttatcctgggaagcctgtaatggaggttggtagtgcagactttccaaatgcacgggcggccttgaattcaccattggcgaaagccctttacggaattgatggtaagattgttttcagttctacttatgtgtttgtactaatctttttcgttttttaattccgggtatttgttttcattttgggccattttacttctccctgcttaccattgaaactgaaatcagtcgt

SEQ ID NO: 191820 - DNA, 1498 bp, Cannabis indica
atgaataatgtgattaattattgttccaattatttcaatttataaataattccttgcaaaattatgttgatttatttttaaatcataaatacttcctatatctgtataatcaggtccgcccagttaaaaggtttgtacaaattactacaacatactctggttaatttgcaagcaatcaagagtcaaaaacctgttcagtcaattggggacacctacaccaacatttataaaaatgcatgaaaaatactttggcataacttcttgaagaaaggaaaattgaaaattaaagtacatatgcattaaaataagacataaaaggataaaagtatgggtgtaaaggctacccgatcagttattttttgacaaaaataacatgaaaccaaaattaaatgacacttggatggctatgtcttaaggttatggcttgaaagccaaataaaagaaaaaataacagaacaagctgaaactccgtgggagtggctagattcatatcctcataagctacaacaccatcctagtcggcaatagagaagtcaaggtcctcatcgacttgctcttaatttccaccaatacccccctcaattggctcgttggactccttagtgtatttgggcctccttcttggccttcatatactagcatctgagtagcaaggcaccacgatcgctcaactttgacttgaactttttttcagctcaacttttttcgtagcagcctgagtagctaaagctttagtacgagagtacacaggcccaacttgaagattcatctagaaaacatagcaagttccatgaaatagtccatttagaacatataacgtatcaaattaaagataccttggtcatatctctaaggagtcctccaatcaaaatttctaatggaagcaaatctcaacccttcaacacctaattcacttcagctcgaaaatagtctcgatagctcctgaccacttcctccttcctcctcatctaaaaaactattagggaagatgttttcttctatattttctagtttagagggacaaaaggtagagtttggttcttctttagctcaatctgggcgacagccattgaagaaggagcattaataaccaaggcctcatcgccaaaggctagaggaggagatggtggagccagaggttttggctgcgccaagactatagggtctttcttctgagttttagctgggatttcctacccggatgcccctccaaacttcctcttcaaggcatcatttagtctagatgacatggatgcacagaaaaaaaaaacaattgattaaattctacaaaatatataacaaaaagaaaggtaacatcgttaaaaaaggtataccctaaacttctagaggaacatcctcctgaagcactattaaagggacgtcatcatccgaagagtctgctcttaactctacttcaatgaaatttttgccttttccagtgatatcttacacaatgggatgtgcaacctcaaggcgaacctcaatcggaccctacttt

SEQ ID NO: 191821 - DNA, 2518 bp, Cannabis indica
ttttttttttttgaaaaacaggaagaagctcccccgatttatgtctaaggcagtgcctctttctctttttagaaagaaaaaaaaataacaagcactttgtttgtaacgtgattgctttatttcaccagtatttggtttgtatcgttattactttattccacaaagtcaattaacttattatattgcctaacaaactaaactcaacaaccaaattgaggagttttcctatacggcatccaacataatcaacattagaaaatccaaaatacgcaagaaagaaatgcaataccaacataaaaaattcttttttagtttttgcaagaggacgatggtggggaagttaattttgtggtttttcttgaatatgtcaatacaatacaataagactacaactaattataccattacaatcaggtgtttggtaaaaaataagtgatggaatctgtctaatatctaaaattaagtacaaaaaaattaggatttatgtttgtacaactttcagcttaaccatggaatattgaccaactctcaccaccacttaacttgacttttggctctatatttttatttggacactacaccacaattactaaataaaatataaagatgttttactttgaattgtattagtaattgtcacaaacatatatatatataaatatatatatatgtatatttgtgattaaatgtataatctattttgtagttagacaatcgtcgaaacacacacatgaattactttattgaccatgacaactatgatcactttattgaccatgacaactattttgcagatttatcttttcattgtttttctttgaacaaatttcactgccaattttctttactcattttaagaaaagaaataataaataaaactacgaaataagttctgatgagaagaattgaagcccaaattcgatgaaagagcaaacaaacaaacaaaagacaacaaatctgcgactttagtcttctcttttctctctcctcattttcccctcaaccaaacagtctcaaaaagaaagagagatggatagggatgaacaatgaacagaattgagtggatgaactgtagcaacacagagccttcatgggttttcttaattagaagaattggcataattaattaattaactaatcaattaagtgatagcatacctcgagttgagtgaaaagacggaagaagagaacgagacctgtagaacaaatcgacagcgtcattgggaccgccgccactgttggtgggagcgttgagctccgtgggtctcgcctgctctcctccaatcccttccttccctccttccaaatccgaaaagcaacctcccatcttcttcttcggaaaacctaatcacacgcactctgttctttctgggttacccttttatttttattttcttgttgggtggttacctatttatttaaagtaaacctaataataataataataataataatataatctcacttggccttttcatttgccaagctcacaatcgcatttttgtaacgtaatattttagagtcataattgaaacttttctttctttcctccccagtttctcttatttggtgatctataattatatgatgactcctaaccttgctatatacgtttcaaataagtaataaaatatataattataaaataaaagactcggatcttttttttttttgaaagaacttgtattgcaaccagaagagaagatacaatgtaaagaaggttacaataaagagaagactcggatttgtttgtttttaaagtcatcacttcccttgtcaaaaaaaaaactcatcacttcccatttgaatcaataaactcactcttacaggaacatggttgtattcccgggaaagaacccaataaatggtaagtggatatattttaagaatattattattgagtaccaatagtttaatcttttacaagtgacgtcttataattagttaataatattttttaaaaattatttttattaagttatatagtatcgatatttacaaggtcggacggcgggctagatctgtgtgtagaacccatactttttggggcccaaaataaaaaataaagtttcagtaggtttttatttaagtaaaattaaatgcatcataagtcataaatattcatagtttagttaattaaagtgtatgatatattatacaattttatgggttagaatcttatgacacttgatatttaattacaccaatagcagtataatactaaaaatgatgctaagttccggtaatactttttagtgtttctcatcttttaaggatggcatgactagacttttttcatggtcaactcaactcaactccatctcattacattttatttacggtaccgtattatggttatgataaattatcaaaaagtaattccacatttgatgttgaaaagcaaaattccatggaaaaaatatgatgtagcgcacaagctgagcactatctaatatgaaaatatatgatattaattttagggtaaaaaataggggaattatttcaaatactgtttttt

SEQ ID NO: 191822 - DNA, 3707 bp, Cannabis indica
aaaaaagaagtgaaaaaccagaagtggggaacagttgaaatgaataacaataataaaggaataaaaaccaacttttgccagtacattaatcatttgaaaccaacaagactgagtaagagggtgttcagatttcttctatcatgaacttcatcttctttatattttttttttcattgtcactaattacttttgttaactgggtactctcttcaaatatttcctatgtatttgaaaacagaaaaaattaacaagtatacaaataattattgtgaccaaacttttcgacttagctagatatataaatacatatatatttccaaacaaataaagaatagtgaatcaaacaaaatcttcttcctctccactaggcatgaagtgttcataattgcattagtttcatatcctgcaaaataatcaaaaacctcttaatcataagctcatttatattatatggggctttaatcatatacattaaaagtaatcagaacacttaaataaagaaagtacctaatcatttgagtaggacatgagccaaaaaacacttgtaagtaactttgagatatgtcagaaaggctgtgtgtatgtcaaatgggttacctaattattctccgtactgattaatatttcttttctttttttttttctcttgggatataggtcatagagttaggatgattaaatgtacaatgtgacattatagttagaagaggagaccaaattaacacctgcaaaagtgataataaggaagcagttaaaacaaaacaaaggaaggccaccaacaacagcagaaccgagaaaggtaaaaaaaaactagaaaaagagaaaaagagatgagcttatatacctttttcggtatgtgggcaacggaatgtctcaatcgcccttgagatgaataataataaaaataatttaataattcaacaaagtgattccagcctgctcatgtggaccaaaatcaatggttagaaagagtagtggaacaagcaagacatctttgttgcttatggagttttttctttcctactttctttatacataaagtgaatatacaatacaagacacttttttttttatatataggattatgccaggcagccacgtattctatcttagaggtgggtttttacagattctaacaacatccatctcctatttgtatattgtaaaaagatattgcctaaaatgcttaaaaaggtcctaattggccatattgattgaagatgcatatgaacttgaattggaaaattggacttgaaagatcacaaacttgtgcatgtgagtagcactgtatatatgtgtgagcttttgttatttttgtgtctttaagagagagagagagaaagagagagaaagcatacttggatgtatattcaatgtgggacaaaattctgaatgtcatcttttagaaaaagctaagttcagtatatccatgtgaatatggaagcagctcctccacctcaattctggaaccagagcagctcatgcttttcttcaaacggttatggctggatacaacctcagcccaaaacatgccataaactggtctgtgatctgagaatcgtgattctccgcggacatatgataactgatgtagcccttctccatgccacaaaatacgatcacacctttcataaacaaagaacaaaaagtttgatcagcattgtgcataatgtgttacgccacattcaatacttcacagttttccaatttgagatatgtgatacgtgagaagatcttaccaagcaggtgttcgccgtttctcttttggatgcatatcatccccagcatatctgtctgaattagtagaatacttgtatgttgggggaaagtaaatcttcccttcactccatcctgcaaaaacacggccccgtctttgctctattcttaactgcacatagaagcatcaagttagaaagcaaaaaataatggtgagaagggcagggaagggaagtatgttttgaggatttagaattatgcctggtctctttctaacaatgccctccaattctgcatctcaactagggcctttgcagagcgataagagagtgcgattcgatagttcaaatctccaagccaaatgactcgactgcaaaagaaagaaaaggaatgtggaattagaaaatggaggaaatataaagtacaaaatgaaattaagtaactacttagaagatgcaatgttattttatatccatgcttagtctccataatatctctcttacaattcctttaaatttgtactccatgagtactatttcattgatcattgatgagcaaggaacttactcatggtcaaggatagtctcgggagacttctcatcgcctgagctgtggacccgaggaaaccttgtctttctaagaatttccatgacatcagaattccttcttagttcatcaccctccttctctccagaggttaaatgactacaaacaaagcaaaaggttgtttggtgcagtgacatgctgattgaaatggatccctgcaaaaaatcatgactatttagtcatcaaaggttttcaagggcaaaatacaatcagtaaaaacttgaagaaaagaggcattattagtcaattaataccttgtttccgaggtaacccattaatcctcttccaacacaagatactttcatgtttcgaacatgatccctcaattcactcctgacccaaacagtgagaaaaattccaaccatttgtttgcttgcaactaagcagtatcttgaatgccctcttttcctatatccctcctcattagatgcagatccaccataaccataggacattggagaatgtaacacagtacttggtgaatcaccagctccattgtcatcatcagatgaaccccatctggaatagtcactgggcctggaatagtcacttggccgatgaccccatctgtaactagattcaaagtcacttggcctgtgactgtaatcacttggtctatgactataatcacttggcctgtgactgtaatcacttggtctgtggctataatcacttggcctgtggctgtaatcacttggcctgtaatcacttggcctatgactgcaatcgctgggcctgtggctgtaatcactcggtctgtggctgtaatcacttggcctgtggctataatcactagacctgttaccaaagatcaccctatcacaaacactgaaccgccgatcaagtcgcggttgtgggatcgaggaatcaccatccattctccaactactagttgtttggaatgaacggcgatgaaagaaagatgagtttttctgccttgctgatccctcgaaatcagcattttgttctacaacaggctgtggaattggagaaggtgtatagcagccactccccccactggtcccaggaagattgttaagagttttccggataagagcaagccatttcttggcaggaccgttgtcttccgcaccaagaacattaccagcatttagtggaactatctcctgaaatctgaaagatagagcagcaaacattaatctctgtgacatgtttagaacactggcttaaaattagaaataagactctatacagacaatctagtcacatacccaagaacataaatgtcagcaggaggtgcagcatgaagccactcatctagtatttaaggttattcgggggagatcttccagccacattccaagtagcaacaaaaatgctgctctcaaaattgaaaaaaagtaaaagaaaaatcagttcacagt

SEQ ID NO: 191823 - DNA, 5520 bp, Cannabis indica
aaaatgtaaaaaaagaaaaactttaaactgtaaaaaaatttactaaaaatatagttcatgtaaatttcacaaaaaaaaaaaaatcaacacaactcaaaactgtaaataagtgttttgtcagacctcgtattttaaaaagcccgcaaaaaatctagtcgtgttatcccaacaattctatagggtaagctcgacacgtccaatatttttgtataatattttactcaaatcggcttaaatgctccatatttttacatttttattacaagctaactactaaactatttttgcaatttatagttttcatatttattatcaatttttatatatatataacgaaaatgattattcttcaataatagctcttttatatgcttttcattccattaagaaaatttacataggaatcaaatgtgttgtttgatttgtgaaaattataatctaaaaaaaattaacatgggaatcaaatgtgatgttgaattttgtgaaaattataatctaaaaagaaaaaaagcatcgaacctcctcacacaatattggaattaaacaaaatccaatatatcatatcatattatctttttcatatagcaaaatcctactcaattaattagattggagaaatcacattgtggccaaattgaaacatttttcaagaatccaaagtagagataatttaagtaacaagaacaaaatccatgatgcatatgcataagagccaagaaattatatcttcgtacactgcaaattataaaattatcaaagggaagcacaaaaatttcatcttcatgttcaaagcatacaaaaactaactcaatagaaattttatctaattaaaaaataaaacaaaacctcatgtgtcctccaaaatgttcgacgaaattaacgattggccttggcaaccctttcgatctcgtcctttttctttatcgcatagctgtatacaacaaaatggacaaaaagaaaaatcagttagtaactacaatcgaaggagcttgttcgaggttaattgacagagcacgtcacaaaaagtcgtcaattattacctgttggatgaacctttggcggcgttaatgagttcatcagccaaacattcagcgatggtcttaacgtttctgaatgcagattcacgagcgccagtggtaagaagatagatagcttggttaacccttcgaagaggagaaatatcaacagcttgacgcctgaccacaccagcagatccaatacgagtggcatcttctctcggtccactggttttacaacaaacaaaccaatcaaacatcaagacaaaatgtacaaaagaaacatttcaacacaaatgaaaagcattcaaatacctgttaacaactgcatcaactataacttgaattgggttcaagtcagttagcaagtggatgatttccatggcatgcctaataatcctcactgcaagaattttctttccattgttacggccgtgcatcatgagcgagtttgtaagcctctcgacgatagggcactgagccttcctaaaccttttaacagagtacctcccagcagtgtgaggaacataagttgcatgtttcgccggtacaactccaacataatcagcaagcgaaatgtcacttacctaaaggaaccaaagaaaataagttcagttaaacattttcaattgatgagaactaaagaaatttctatatgaaccccaataacagggcacttgggcattgaagaaacataaaactatggcttattaagcaatgtaagtaaattagatcaaaattcatgaaaacaaatcacctattcaagtacaaatatagatataagagactaaaataaacagggcaaagacttggaattaccaagaaaaaccataaacataaccgagaaagaagagttctataaatttcaagttatgtcatttattttgagttgattgttaaaacaaaaacaataatctgaaatttaaagcttatgtaaaggtgtacatgttcgcatttttgtgaatatattagatcaaaaatatacacatgtgagctaaaaaaacaatattgggcagaaatcataaacattaacgatgaaaagatcaataatgtcaaaatatctcagtgaattataatgattctagctttaaatctcttctaaacaaagacattctattagctataatggcttaagaatcattacttgaatacaaaaatgaaaatcggtattgaaaatcttctttcgtgaacttaagatccagaaaaaaaaatctaagggaaagaacagaacggggtacctgaacatcctcgaagctccaacgattgaaaagcttcacttcgtgttgctcctgaacgatcgcttcagccattgttagagtacagtcgccgacaccgtacaggccagagagagagagagagatggagggaggaggaggcgtctgcgttagtgagagagcgaagagagaagcaaagataagagtttggaaagttagggttagggtttggttagggttaaggttagggtagaatatttgggctgggcttcttcttcatttgggcctttatttcgtacaaggtccatattgataaggggagttgttttataaatatctgaaaaaaaatatttatattttagtgatttgaggcataaccttaagtttaattctaaataaatatctaaatttaatttttagtagtaatatctaagttataattttgaaacttttgtaggtacttgattcttaagtgttaagtaaattacacgtggcaattattgattagtcttagtcatttattttaataaaaaaaaattaatttaaatgtaccaataagaaaatgacacgtgtataatgatttaatatttaacagtgaggttctgtattaaaaaaatataatttaggtattattatcaccagaaattaaacgtagatatttatttgcaactgagagttaaacttaggtatttatgccgcaaattactctatatttttttttataatattcatcaaatcgcccaccctgtacaaaccgccagcaccacactacatagaaaatacaatttaaaatcctttgcggtacgattgtgatttttatttttccaaattgcacagtgcagtacgatttacggttttgaatttaataattacagttcaaactgcattgcactatatattagaaagttaccaatttttacaatagaatttttattttttttaagaacaaatatatgtaacatatgtgtacattatattattttttattaaaattattttaataattttttttatattgccaaaactttattagattaatttttgaattttcattatgattaataatgatagtgtaaaccgttcaaattgtaccgtgccacacagtattttaatggtgtaatttttgcaattttaagatctcacgttgcgattgcaatttgagaaattacaaaaactacgtacgcagtttgatttgaaaaaatattacaacttgcactatccgcaccgcaaacaccccaaaataaaatactccacatgtctctcagaatactttcacaattaattcaaaaaataaaatcattaatcaaaatatttgataattaaaatctaatcctaataattaattttatatattttataaatcaaatcaaatcatttcacttacccaatatataacatataatttatttataaatagagtgtgataaaaaaaaaatcacgttactataaaattttaaagagcataattaacaaatcgtatactataggagcacaatttgatatagtgtaaataattcatgagcaaaaatactaaattaagcatagttactcaaatttttcttttattatttatcaatacagatttaaaatttttaaaattgatatttataattaatttattttagtaactatcattacctaccttatataaaatattttagtatctacggtaagatcaaaactgataatctcaccaaaaaaaggtttatatatatatggtaagatcaaataattgtgaagtatttctatatatatatataggctatatgaagaaaaatgacctgtgtaatcctagtatatatatatatatatattatatatatatatagaccttaaaaatttcatgcaacgttggcctcatatgtaaaaccgccttacaaattttctatgtccttcattcaattccatcttaaaaatctcaaatctcttcatttcatctcaattttcagtcccaacaaaaaaaaaaaatgaaaatgaacttcctccaatcattttccctcctactcctctctctaattttcgccacaacaaataacatcattcatggttttcacgacgacggcgaaattgtaaggttcgagttgatccaccgaaactctcccaaactttgtggccacgatggccacaatgtcttcttgggagaaaaaccgaaaacccaaatggaaaacctaaagcagtttcaccaacgagatgtttccaggagggccatccttctggaaacatcgtcatcagtgaaactgcctataaattcagggtcggattatggaactggagagtactttgttcacgtgacgatcgggacaccggggcagagattcgtgttggttgcggatacggggagtgaattgacatggatgaattgtagatataaaaattatgagcctaaaaagaagggtaaagagcccatatttaaggctgatgagtcttctacgtttagaactgtgtcttgttcttctcgtatgtgtaagattgatcttgctgatctcttttctcttgccaagtgtcctactccttccacaccatgtggctatgattacaggtaatatatatatatatatatgtatatgtatgtgatcttctatatatgtatatatacgtatgcatgtatacgtatatatattatatttcatcatattgtgatgtgttgatcatatatgaacaaattaaaattggcttggttgttggttaggattaaaaagaggttgagagacattattgtttagctattcaattttatttattattggaatagataaaaaatattaaattcttctaggaattctaaatatatgacttgagataattattgtttttttaaaaatatatatatatatatagggtagaaacttgttaggtagagcatcatttttgtttctataactttttctatttgtaagaaattatattctaaacttttgtatgtgatgttgtataatatagttgtagtagatatttttgttagttttttagatttatgatcttaaataaaatatatattagactgatataaaataaaataaatacagttgtttgatacagttgtttgaatcttattttcggtatcttaaaattatttagaatttctaaaaagtagccggatgcctaatataaatataatttacattatcatataaatgaatttgcattttttataccaaaaataggaaatcctttttactattttttttaatttacattgtaaaaaataattaaaaataaaaataatataatttttcatttttttctaatgtattgtcattaattgatataaactaaataaataaaataaa

SEQ ID NO: 191824 - DNA, 1992 bp, Cannabis indica
gcaaaaaaaaaaaaagaatatattgctagtagatattttagagtatattaatatttttaaaatatgaatatccttattggtctaatttatttattgacgatttttctttattattattattattactgatgaatttataaattttcatttgatttcaaatatataggaatcgatatttacccacaagaataagattacgggtactgaacaccctagaatgctatgtcatatgtattattatttgtgctctaaaatctttcactcttcttttgtcctcttaggaaattcttaatttacaccatcattaatattatgtataagtgatactgatagatatatacctaacctattatttagagataattgtatgatgggcctatacaatatttatctatttctcccaataattcaaccaaccttaataattatgaggctattttttatattcgtacataaattaaacatgatatatagagagaggataaggaagaaacaataattaagcaagtgttattttcatgcggggcaaatttatgaattcaatctctaaaaacatgcttggacacgtgatccactgtcgtatctctgttgagatctgaactacattcacccaactctatgctacgagatctagagccaggattcttcaactttgagggttattatagtccacaaaaaaaaggctctcaaaccatcgaagactatatcttgaagatgaaaacgtataccgataacctcacagctgctggataactcatgaaagatgatgatatgattttatacattcttggaagacttggatctgaatgcgaatttgttgtggttaacctcacctccagatctgaagatcttaccctacaagaagtccaattcttgcttcaaaatcaagaaatgaggatacaacaaatttctgcagagtctttgttaatgtgcaagcaaatctggccaatatgaacttcaataatggaggcataggttcccaaacaaaccgtgaatatcatggttcaaatcgagggagaagaggcaactacaggggaggtcatggtggcaacaatagcaacagaaccatttgtcaattatgtggaaggtctgggcatacagtcatcaagtgctttcatagatttgatatcaactttactggcagtcaacccacctctacaccctccccaaacaatgatgactcattacaagccaacatcactcacacagactcaacatcaaaccagtcccaagcctggttcttggatacaagggcaactcatcacatggcaaatgacactcacaatttcaataatgccactgattacaagggaaaagccaaggtgataataggtaatggctcttctcttcctattcataccataggtcagggctacattaattctttttcttcaaaacatcccttagtgttgcaagatatactacatgtgcaaagtttaaccaaaaatctttaaagtatttcccagttcaccaaatacaataatgtcgttcttgaatttgatgttgttgttgtctcatcaaggacaagaaaatgaggcaagtacttcttcggctgacctttgtgaaggtctgtacaagcttcaagtccatcctaccaaaactccaactcaacctgcctcttcactcaatcctcaacctagtgccaacaatcatactaccacaagcaatcatgtccacgataagtctaccatttctactacttagcatcataggctcgggcagcctgttcactctgtcctaaataaagttctttctatagttgttcccaactctacatgtaataatttttttttttttttagtaatgcctgtcaaataggcaaactacattagtttagcttcaaatgtaccagtaatacaaccaagatgccttttgaattagttcttaaagatgtttggggtccatcttttattgctctaatgatggctataaatattatgtcatttttttttattgactacacaagattcacctggttgttcccatgaaact

SEQ ID NO: 191825 - DNA, 2552 bp, Cannabis indica
ctctgttttcgtgataataagatctctaagtagatgtagttccattaccattaattcacggggagtgaactactataattgttgtgttctctttcatttttttttgtttatacattagttggccactactgcttactatattgtacggagttgatcactttttagcgtcaataattatcatattagtaaaattgaacgaaaatagtcagaaatctttaaatttaataattttagaaactattaacgtcctgaaaaagttgaggaaaaattataattagcttatatttatttatttttaataaaagtgaattgatttattgaaattgattttgtaagtttttttttttttttttttttgagagaaagttttgaagttggagtctcgtatcttatcgttataaaatcactcccaatcacactgaccaaaataaataaataaataatcattccgaatcacagcaaattttccgatgtatgtatgagcaaatagcattggctgttgaattggagataagagtgagactgaaaatttttcattctcttaagtgactatctaatatctatgcctcccatactattattctatccttcttcttcatcgtactcttctcttctaaactctacttatctttcatacaactccaccccatattcccattcttccttactcatatcttcttccttcaacccaaaacctcaccacactaaacaaaccaattatgcttcacatttcatctcactcaactccactcaaccaaactcaaacgcagactccaagcttccattggagtccacttcgcgccccacctccattaaaatgcccacacctccatggatgcacggtcctctccttgttgagccccacgatgtcgtcgacctctcgaaatcggaaaacggcaagagggtcaagcctgaaaggtccagtggcgagctcactgataagttggttggtcgtagagggaagaatgccattaagaaaatcgccaggaagattcaaaagcttggggagaaagttgatatggaagaaacccagaaaggttctgaggaactgggaattcggggttatttgaaacggcttggcgaggcaggggattcggaaatgcgccggaaagtgccatgggagaaggatgagagctttgtctttaggagaatgaagaaagaaaaaactgttactgctgcggaattgagccttgaaaaagagttgcttcaaaggttgagaagtgaggcttacaagatgaggaaatgggtgaaggtcaagaaagctggggtgactcaagctgttgtggatgatattaagtttacatggataaaaaatgagcttgccatggtgaaatttgatatccctttgtgccggaacatggatagagctcaagaaattcttgaggtttggttttcttcatcattgcttttctcttctgcttttaaattttgtgtaaatgtactagacaattgtttagttaagttcaatcatcgttaggtaatatttttggaggagctaactgaatttgaccttatgatgagcaagtagataaaattatcttctcctagattagaggcctacatgtgtttatgaattgaccactatgatcttgattctgaattattcaaaagcacacgaaatatacttatgttgggtaaagggcgactctgtcttttgttaattgaaactaaatttgtacttcccgtggagaatttgagcaatactgagccttctttgtttcgattagttttggtgctttttcttttaaaatcgtaggtgtatgtatgttttcttggttctaaaattaattcacctaaattggcactcatttatgttaaaaattcataatttttgcgacgctgctgcattgtataatcttctttcaacagagcttttctttgaaataaatgacactgtttttccttggttgaaatcacaatttgagggaaaggttctaatttataatgcttatgtttcctttcctgtgttcttcaatttgttatccataacagctgaagacaggaggattggttgtatggagaagaaaagatactcttgttatttataggggctgtaactatctttcaacttcagaaaccaacccgaaaatgtatcctagcttttctggttatcaggcatctgcagatcatggtctcatgaacatgagaaaagggaaccattttaaggtcatctcaaaagaaactatcgtaaatggaaagttgagctttaaaagtgttaaagtgaagtctgaacctacttttgttttcgaaaatgatatcgatttccaaccaaatagttcactgtatgagagggaaactgatagattattggatggccttggacctcgctttgttgactggtggatgcacaagcctttgccggtagatgcagacctacttcccgaagtggttcctgggtttaggcgtccatctagacgttccccaccaaaaactagatcaaaactgacagatgaggagctaacatacttgagaaggcttgcgaaacctttacctactcattttgtccttggtattctcttgcctactttactctcttttttttttattattat

SEQ ID NO: 191826 - DNA, 1491 bp, Cannabis indica
aacttttaaccttcaaatctcccataaaaaaaaaaaaaaagtgtcaattttggatagtgccataaaaataaaacagcaaacaaacaaaactatatgtcaagtagatgagaagaggatgtcgacatggtttaaaaatttggcaaaaatgtcgacactgtgaagatgtaaagctggatagcttatatatatatacacactcatatatataaagttcacacaactgatatagcttctttctctcaatcacaatccaattctttcaaattccagttgaaaaagatgagcaaaaacgttatcactctttgctgtggaacacggttgttccattttagttctgtctttgtgttgagatcctacgcaggtttatattgtttccctctttgtttttttctcttcagtttgattatatacatgctttacataatacgtgtgtttatatatataatatataatatatcccatctctcatctgacctctctattgtcgttcttgtcgttatatatcaaaactgcaagagtgttatgtcgtttttagggaaaaaaaaaagaaagaaaaaatagttataatgtatatatgtattcaagttacacaccttacaaaaaaaactgttacaaaacacatatataaaacccagtaactatcttcaattaagcatgcatatgctctcattattcaccataattgttcatcaaaacaataatagtacattctatacatatataatatgcctagctagtactgtacctacatatgcacggacaagcaatattgattcgtacatatatatgctattttcttaccaattattgctatattattaaactggctaaatgtaatctgtctgaactgaacgtactcttcttttttcactcatcttatcaattttcatcattaataaatcactaataatgagctccattacacattacgcaccacaaacataaaaaaataatattatgtatataaaggcactgccacgtcccttttattttttaattaaatttatgcttagatattatattgttaatgtacatatatatcacgtacaacttagtgaaccaaaattgttagaaactagctaagctgttttgaaccacgaataataatttgtccatacatccatggttaagcttcttatctctattataagtaaaaaaatataaaaaaatcccactgtaacaatattgttttttcactagtactctttggaaatggccaaaaggtcaatatttatagaaaaataaaaaatgcatggtgtaggtaataaatttaaatattgttatccagaaaagcagtgatgaaaggcaatgtctgattcaaaatcccctttggacacccaaggtcttaaatataccacaagaaccatgtttttaggatagaccttatctctacaatccttcacccattccctctgtcacatctccaccatgaatattttgatttcactataactaagggaatccattactttatttatttattaatttttt

SEQ ID NO: 191827 - DNA, 2307 bp, Cannabis indica
gtctgcatacatgttatatctaaggaagatagttaacaaaaaaaaaaaaatacgaagttaaatgcaagaaacctgaagcttatacccttagcatttcttcctcttccactgtccagtgtaatcttgtccgctttctggagaattccatagttgggctgcatgcaggtagaaatatacaataaattagcagttacctttaaccacaaaactaactctcctagctaattttgatgcccagaaaatgttgaatgttcggaatgtattgccaatgactggttctagcaaggatgagaaattcccatcaacctactgaaaaatacacactaaaaacaaaaaatgcaatcacaacaacaaatgaagtagtttgttcttttttaggatatacacacctacattttaacgctaaacaataaaaatttaatcaaaagtaacttcattaaaattttaagagtttattaggaaatatacacctacaccagttttagtgcttgttgggacttttcggaggtagtatttttctcattaaaaagcaaagcatttttctttgtggtgcttttatggcgtgcaactgatttccatagcctaggggaagatctcttgggtaaagtaacattctcagagcatactgtttttccagctctttgtttgaaacgcctgtgacggttcacacgagattcagtttcagatttgtcaatcccatctgatgattctgttagtatttgctcttcatcctcctctacaattttagcctccctcaatagttttttggtggctcttttctcaatatcagcatcatcaataattacctctcctgcaatttcagaagtatccaaaatctctctttcctcattttcttcaacaattctctcatccttactatcatccattggtcctgaatcctcctcttttccatcttctccatcattaattgatggatctttggcactagaaccttgaagtttgttaatcctcactgctgtcccttccccacaacctacatcatcagcaccattggctacaaatgtgcttggctgaatctctttttcaatcactaacttattctgatcatggcaacctacttgtgcatcatccatttccttttcatccacagcctgactctggatttcaagatcattcggaaatggaacattctcattattgcagtgtataccaccgctagcactaggtaatgtatcacacgcattcctatcaactgtgtcactacagtcattttccttctccttctctttatcttcaccaactactctcccttcaagaaaattcaacaaggctttctttgctgccataactctttttctcgtctcaacagccaccgcctttgcacgccggtacttacaataagggcagtagaacaatcccaaatcatcaaaagtaggttcacaccccatacactcgtcatgaacagcaatcaagcagcctatttcactacaaaccctcacacgtttatctctacctttacatctaaaacaagtttccccttcctccaagctatccaattccatggaatcttcactccaactaccggtaaattgcggggtcatactcataccaccaccattcttaactgtttgaggactcgattcagaattcacacccctatcatcgtcattatcaccctcgcagaagaaaattacgggtgtgctttctaatttctcatcaccattttcctggttgaagagggattatactaaagtgagcctataacaatgtaatcaacacaaaaaaggcaaggagaaattgaagaaataccaacctgattgaggagaatagggagagccctaaacctagcaggcgtaagaacgggaagcctgggagaatgagaagacggcgtcgacaatggccgactcttacctccatggctcttggttttcatcaattccccacccttacaaattaataataaagaataaaaaaaagggaaacttgaaaagtagatagaaaattccagtatgaaatgaagggagtgagtgagaatgagtatgatatgagccagtcagggcctctttcaacaaattttctcttctttctcagaaattggattcctgtcctgtccggtccggggacgagcttctgatgacattttgctcttcataagcacacgacattatttacattatacgacatcacatcttccttaaaagagacaaacaacaaccccaaaccaatctccaaaattaatgtagaatttacaattattgtgagattttaaaactttatttaataaatatgacatgtttaaatttgtgtattttttatagcaaattgattttcaaatattttttttat

SEQ ID NO: 191828 - DNA, 1294 bp, Cannabis indica
acctaacactaaaagactgaaaagatgttgaagtgaagatttctggccgagaaccatggcgtctttctggtatttacggagaacccaaccgagctcatcgcgatcgaacttggaccctcattcgtacacttcatgctgaatccactttaccatggtgccttattggtgattttaacaacatcaccagtaacactgataaaaaaggaggccggccttatccatctaatctcatttctggttttcaagctgcaatcaacgactgccatctcttggatttggacttgcaagggtatccgtatacctgggaacgaagcttgggcactagtcgaagtgtggagattcgccttgacagagcattagcttccccaaattggcttgctgaatttactgaggtaactctttctaatttgggcttttcgtcatccgatcattctcctatttttcttgagcctgaatccgtaaattcccatgccactgcttaccattttcgttatgaaaatgcttggagtcgagaacctttatgtgcacaaatcgtcgggaattactgggagcaaaataggcagcaaaacattgttgaaaaattaaaaggctgtagtcaccatttagcagcttggggccgaacactaacaggaaatttcaaggtacgattatctcgaagtaaacaaaaaatggctgtgttaaagaattcagaggatgaatttgatgctgaaacttttgtggaggaaaagaacaattattttgaaattttagctcagcaagaattatactggaaaacaacgataccaaacaacattggctacattcgggtgaataaaaacaataaatactttcatgctgtagctagtgctcgaaagagatcaaaacaagattcaatatctgcaagacgaaaatggcatctggaggacttggggtaatggtattgacaatcttatacttgattatttctctgctctttacacaactaattcaaagttcttggtctcatgttattggcaatgttcgtacttctgtcactgtatctcacaatgaagaattgctccagcccattaatgatgatgaagttaaaaatgccttatttcaaatgcaccctgataaagcccctggcccagacggtatgggacctggcttctttcaacatcattggagcattgttgggaccgatattattaatctggtcaaagactttttctcaactggtgtcttgccttgtagcttaaatgacacaaatctatgcttgattcctaagaagaaaaatgtctctaccatgaacgagcttcgccctattgccctttgt

SEQ ID NO: 191829 - DNA, 2110 bp, Cannabis indica
gattttctttgatatctccaccagagttgttgctttgatgttccagcaaagccatgtcttcacctgttcgagcagatccaaaaggaacacgaaaagaaaagatgctcggctgtttcatcagcttgcaaacagagtagacaagctgcattgttaataatattatgcctgtacaacctatctttggtttttaatctgttctagattgctaaccacataataaagctgtgtttaggaacatttgttctgcaccaaactaggttactccacttcttcttctctgaaaccggttgcagcaggttgtatccacctaaaagttgtgaaattgtttaggctcatggtgcttttcactctatcccttgcatctacaatcttttttaataccagctgctggttgggggagctttgtactctccccttgcttgatataaacactgtgcacccatttaatccataggttgtcttttttagtagcaattgaccatacatgcttgaaaagggctgcttcattccatatggctgtgtttttgaaacctagtgcaccaacagatttggacttgcataaagaatcccaagctacattgccagctctatcagccactccttggctccataggatattcctgcagattttttcaatttcagcaatgattcttttgggaagaatgagaagttgacaccaatatgtgtgaattgtgagcaacacatgattgatgagaaccactctacccgcaaaggaaatattcttggaactccacactttgatctttactatcattttctgcactaagtcattacattcttcagctgagattttcttggcacatatgggtaccccaaggtatctgaaaggtacattttgcctactgaacccagacatatttagcaccctgtgaatttcttcttcctgcataccacaacaatacacagtagttttttgaatgtttgggaaaagccctgaagtaagtgagaaggtcttcagtccttgcaacatgaggtataatccttctcttcatctgtattctctattttatgtgtatattttgtttagtgttgtaacattatttaattcgtgattttgtcctttgtattatttgtcattgaattgtaattttgttggtttgatatttgtattaaagcacaacaattttccaacacactatccattttagccatgtgatatataattaatggctacaaaagttttcgaccggtagataataatagacactcctatcataatcattctctatattacttattctctactttcttcatgtgaatgtgttaaggcaaagtagtgtgagccattaagccatgggtcaaatgagtttaaaatcgccgtacgttctctctctcagctttcttctcctcttactcgttaccatttacttctcttcatcattcaaccgagaaaaccaactcatccctcttaatctttcttctcaccatcatcccaacaatgcttctatcaaaccacaaaccaattttcaaacaagttatatttcaccggcaccggcaccggcaccagccccttctccggcgacttacctaaacaaacagtccctcacaaaacatggcattactactgctcaccatttcaaagcacgtatattatttaatctttatatggtttatgagttttgaaaactagtacttaatttagtgctttgaagaactgttaattattattacatgtatttgtgtgagcagaataagagcagtgaggagaaaattgaagaacaattgagtatggcaagagcagctatacacaaagccattcttacaaagaattatacatctgaccgaaacgagatttacattcctaaaggatctatttacagaaatccttatgcatttcatcagttgagtatactttttatttttatcattattatgcattttttaaaatttattattattgttcatttaacatacttctactcatagttaattctttaacttggaaagttgtataaaaattaatgctacctttttcttttcttcgataatgaaaactaatgctaccttcgattggaaaaaaatgttattaatcagttgttgatattaatatccttggtatttccaagaataaatttattattattattat

SEQ ID NO: 191830 - DNA, 3281 bp, Cannabis indica
gttttttttttttgttattatttataaaataatttataaaaatacagtattttataaaaatttgtgtgagtaaaattataaattttattcaaaatctagtatttttttgttaaaagctcctatttctaatttgatgaactttaggctttaaaatttagttcactaacttcattcgcaaatgaccgaccaactctatctccaagtcgagacagacatgggtcaaatttattgggcttgggcctagggttgtgcttgggctagtctattgggctttccttgggacccacattatccacaatgacatcacagagagagagagaattgctataattttttattttcttttggtaaaaagagaattgcataattaaagagaattgctaagagaatgctggagattgggctgtcagtcaagtggctaaggtttatcgggttccatctcaaaattatttagctataagagtaataactcataaatcttatatattctattatcttcccacaccttagtaatgtaagaatctctaacatatcctcaaggtagctatgttttgcttaccatattagataacttgatcacaatcagtttatttttatgactcagtattcccgaattacaagtgactcttttagctctattttgttagacttttggtggcttctttttaactcactatcacatttattttttttttttggctctactttttgaatcagttttggaaagtatgaacatatatagacaatagtatagagatttacaacaaaaaattgttacaaaaaattactaatcaactgtagctaaccgaattgacttaataactaagttacacaattttactaataggatgcaattggttctcctttatttttctccaatttaatgccaccccatcttgtaataaatattaagtcgttaagtgttcagtgaatgacacttgacgggtcatagattggtctaggttaaaattttatttttttgattaaaaattaattaaaatatacatgtaataaataatcactttgacaaccgtaaattagtctttaattaaatgccaagttcatcattgtacctcatacgtgaacgtgatgctgatagggcggcttttatattatgattcttgcgttgcgttataatggcagttatggatggatatcgatatgccgatgagagatggttatacgtactgaacagaattaatagcgattaaatgcgcctttgatttttttgtggaagtaataatgctgctaatgcatgttctgattggatggaggcctgcttaatttatatatttgctaacttatccgttttcagtaacaataaacctcctcctttaactcccttgacaacatatatatctcatatgacttttggactttgaactttagttcatgaatttttaccggtttatgaggtttggagtttcttttacctcattatattatacactactagctataaaaaagattctggctctttcttagtttagactttagagggtttcatttattaaaaagattctcacttttggacattttaaatcagtagtgttgcgtttgaactggtcaatcattatactgagaaattatatagaagaaaatgacaagacaagtaaagttgtgttacttgaattattggcggagcttatccctatatacattggcttagcatgaccatacttaaattgacaagcactatggaacatgctgtgatccctctctcatatcacaacaacaacaagcttaatgatcatcttgatactcaaaatcatatacctgaaagttatggtaatccttttcttacaagttgaactactaaattaactggcactgagaattttacccttcttcttcttctttcttttttttttttttggtgtgtagatcaagatgaagtaaatgattctccaatcgagcaagtcaggctaacggttcccatcacagacgacccgtcgttggcatgcctgactttccgaacatgggttctggggattgtttcatgtgccgttttggcatttctaaaccattctttggttaccgtcaaaatgctctatacgtttcatctgtttcagctcaaattgtggttcttccagttgggatgttatggcagcaaaactaccaaacaaatcgattcggataccagttttgaattggtcattttcactgaatccaggaccctttaacttgaaagagcatgttttgatcacaatatttgctaattctggttcaaactctgtttatgctgtgaacatcatcaccattgtcaaggccttctacttcagggacattcatcctcttgcagctatattgttaacactaactactcaggttagttattaattaaattgacaaataatatcttataatagtaatatcagataacttggtcccaactaaatctctgtactaatattataaagtatataatgatggaatattcagatgctggggtatggctgggcaggaatttttcgaaagtttcttgttgattctccttacatgtggtggccagccaacttggttcaagtgtccctcttcaggtacatcttatgcatatgtacatgtaatttagttcattttctaatctattcctttctattgatatctctttttatctaatagggcgttacatgatgtagagaaaaggccaaaaggaggcttaacaaggctacagtttttcatattggtccttgcatcaagttttgcatactatgttgttcccaactatctatttccatcaataacagctctttcctttgtttgttggatatggaaggactcagtcacagcccagcagattggttctggtcttcgtggactcggtgttggctcgttcgcccttgattggtcaacagtagctggcttcttgggatctcccttagccacccctggatttgctatcgttaacattatggctggtttctgcataattgtctacatattaatcccaattgcatactggactaactcttaccaggccaagagatttcccattttctcatcacatgtgttcgatgccaatggccaaaattacaatgtttcactagttttgaatgaggctaccttccaatttaatcagcagggatatgatcaatatagcaaaattaatctcagcatcttctttgcttatgcttatggtttgagctttgcaactttggctgcaacactttctcacgttgctctctttcacggaaggtatgatttttagtatagggatttttcttattgtcctttgtagttttttacaatgaaaaaactctttgtttttgttttgttttgtt

SEQ ID NO: 191831 - DNA, 1823 bp, Cannabis indica
ttaggaaaggtaagaatatcataagagaggcatcttgttcagaattttttttcttctcataaccaagctctaagaactccgtgttgcacctaacaatatctgatgggatgttaatttatgctctttttctgtttagaaattatagtaaagtctaattctttcattatttctcttttggattgtcttttccttttctttttcttttctttgattttggatggtgtagtagaggaatgtttctgcgggtgttcttttgctcaatgtttgacatccccttagacccaaataagagcgatgatagataaagggttggagagttgaaatgataggtaaagagttatatgttccttgtaatcatcttttgatgattttaaaagagaatgtttttcatttggtatagaaaaggagatgagagattaagtcttatctgttgtggaaggatcaaaatggtggccaaaaacttttctaacgaactaaccccttcaattcactctactctcccacaatcattattgttaaccaaggaattgtgccttctatcattgcccctccactcattccatccatctaagtcctcctttgccaaatattgcttgagcttttgatggattaattgttgtcctagcaaattggagaagtgggagtggagggaagggaaattgatgggttttgataaagaaaaacttgtttggcaagaaagattgtaggtgtaaatgagaagtgcaacagaaatctcttgggctcaccatttttgatccttccgatgataaaaacctctttttttattttatttttttataatatatatttatatataccctccgaaaatgattaggcatagtaacattttatttataaatagttagtatttatcatttgatgtaccaaacagttcaagggactaagttacaaccacgtaggtaaactatcacgaaagactagcttccaaaagaaggttgcctgagtgaatatattctacaaactaaaaccacacttaataatgatgtgtaggcaattttatccaggttgctttttctgtgacgtcggtcccagtgaagggtatctgctcttatactatttgccacaattattgatgtataattcacttccaaaatactaaacatattagagggggtgtgtccatgtggatgtgggcagagacaaccttttaaggcatatatgggatcctaacagattgttaatcctttctctccccaaatcataacacctttatcctttctagtcttcttgctgatcgtaccttacaaacaagagagaaatagtgtttgagatgttgcggaaggatcttgagaaagcatgatggggtagtttacataaatcgttaatatgacgaagtagaattccatttcattagtaattttatccttgttaacgtcccctattaatttttgagctagtgttaatggaattacgtcactttctttccattgtaatgtatgttttttatgaaagaaatgtatttgaacaaatgctagagtttctctcgtgctgattttttgggtctggaatatgcaatcggtctttcaacattattttagtatttgtaatattataaactgccatgtgattttaagagctcattttgctggtcaatgcaggatgcaacaattgaacagctccttcctatttttctctctcttctgaaggatgaatttcctgatgtgcggcttaatattatcagcaagcttgatcaagtgaatcaggtccgactgaaaattaattagttacctagtgtttatgtttttcttcactattccacatcttctacctgcagagcacaatgcactatctatttattaaat

SEQ ID NO: 191832 - DNA, 1099 bp, Cannabis indica
cttgtttcaatcttttgatgtacatatgtatattttcttttttctataaagggttttagtgctattactgagtttttcttttaatgggggaaggtatcagaggctagtgtttaggcacaaactgtatcgacttcgtgaggagaaggatatgaagcctgagacttttgccagcctcgtctcagctattctttacgagaaaaggtttgatttttattatttttgaagaatctcacacaggtgaaaatgagtgaagaattaaggattttatttatttgtttcctctctctaatttaggtttgggccatatttctgtcaacctgttattgctggattgagcgacgatgataagcctttcatctgcactatggattcaattggagctaagtaagttaatcttgctacaaaaccagctaaacaaaagctaatcttgttcttgttgctgttattttgaagttatgctcggtagaggaaaactctatggtgttctttggcatgcttaagtgatttcaaatgtcataaattgggatttcacttatactgtttatcatgtttatctcacattagtacccattggggaaggtaggtatctttctctttttgatttgttcaaaataactctggttgagaggacctttaagcttgctgaagggattccatttttttgtccaagtctccattagtgaattgtggagtcattttggttcatgtcctttttgatcttgctctttctacagaggaccttttatccttttatttttaagtaaatcttgaatctcgcggaatgggtatattggtcagtttgggcactttgtatgtttgtatgaagttcccactcgtgggcttgtttgaaaacaaagtgtaatactgatgttacttatgtgctcaattttatgcagggaactggcaaaagattttgtggttgctggtactgcatctgagtctctttatggtgcttgcgaggcaatgttcaagcctgacttggtgtgttttttttcttagctttcctttttgtctggaacatttgatatggcagtggattttgttttttagatttgctttcatagatattaaaaatgccaacttttgagtcgaattttgg

SEQ ID NO: 191833 - DNA, 1234 bp, Cannabis indica
ggctgcaccattgtcgaccaccaacgtggacctttgctcacttcttttaaaaaaattagtcaattaaactattaacatatttcttgcacatttaggaaaccattgccatatttttcaaatggtggtgaaaatccaaaaaatatcaattaaaagaaaaaatagcaaacattcatatctatgtatacgtaccaatcaaacaaaaggaaaaaattgataattgatgtggccggcactttgtggtagttatattgatagaatcaaggccatatatgacagggacacctaatttcggcaaccatagatattttattaatcaagcctaattttggtgtaattattattagcaaagcaagaagtttggtatgaaagtacagctaacacaaactataaaaatgaacagatgttaattgattagaaggtagaatctgagcaagaccttatcttatgagaaatgctaaaaggctagtgtcaagcaccctcttacgtgtcaatatcgttattagtttaatttagtatcgggtcccatatagtttaatataataacttttagaaagtatcgctagccaattgcaagacgacacgtcttaaaggtactagacactactggtgtccaatagcaatactcttatcttattattaaagtaaacattagttcaaaaagacttggtcttaaccgaagcaagtgtcacaactatttcagattttgtgatattgcaaaagcctttgtgttaggtataaggctccctaattaatgtgcctacttaaaattcgctctaaactttttatgctttatttaaaaatttcccactaaaatctttttcttttcttttgaagtggcactaaaatcttaattgtagctcttttataacatcactgaagaatttatctcacctatgatcatctctccaatgaaaaaaatctaaacattcctctaaatttgacataaaaaaataactatatttgctattgtactctaaatcacaaacattttaatttatggtatacatttaacaagaaaataaaatagcattgataattatttataaattaaacattaaatttaaaaataattatgaaagtttatcattaattatcaatggaaaaacctaaaaaaactttagttattctgtgccattttttttttttttttgctagattattgtgtgttaactttaacacaattaaatgtcttgtgacaaattccacatcattttttttttaattaagatttttt

SEQ ID NO: 191834 - DNA, 933 bp, Cannabis indica
tattattagctacttatatatgtataaagaaaatgagtatttggttgtttcactttgacttaatgaaagcagatgagaatatttgattctgatatctaatggtatcaaaagtagttcagttattacttattgtgtcattgtttgttcattgattcctctttaagatttatataatagaactaaagtgattttgttgtctttagacaattattttcaagttttaacatgacttagtgtacatgtggacctttaaggaatgattcaacattcagtcaaactcatactaaattacaagcctttcacattaattatatttgatataatgatatatttgcgttaactcatttgcaactagtattttttaactctacacaaatacataacaaaataaaattaattgtgattgaacaataataatcaatacaatgctagtggaatttaatttttagtttattccttggttagattagataattgaagaaaaaataagaacaaatgttagaagagaataactacataagttgatctagactaactcactatagtttatatattaattggtttaagtctatgtaaggattggagttcaagatgtaatagaatttgtaatagtgtaaatgagagaaagctttataaattaggccagctaccaaagaaatgcaagccttcctttctgaatttttgttaaatattttttctgtataacgacaatctattgagcataacttaacattgaacgttcaaacacatataataaagtttactttgacaaaagtatatatatagccctcaaacttaatgcaactgttaatggctgatggtgttccttatttgtattgttaaagattgaaatagaaagctttgggtatatttgaaagggtattgcagtgtcagtatgtttttgttatgccttttagctttgttgcattgtaa

SEQ ID NO: 191835 - DNA, 599 bp, Cannabis indica
tttttttcgaattattttagtagtttagataattttaggaactatgtgtgagttatagaggttttaaacatgacattgcataataaactagctgagaaattctaaaagatatcagtagtctttagacttagtaatctctaacatatcagtggtctttagtattctctaacatatattggtacaattacgtatgtgtcctatataatttaaaataataacttttataaaatattactaaccaatcacaaaataacacatctacacaatgtcttattgtaatactccaagctaatctaagattaaaataagaaaaatacctttaccattacactacacaacaaaaagccaattaatataaatatttttatcaaatattatttcatataattacattttatcaaatatttgtatatatatcattatatacgcactgttaagatttgaattaaatctaaataaattgaaaaggtaaacatagagaaaattgcaatcctttgatgcaaattcaagagtttgctttttcaactaccattttgaaattcatgtattaattaaaaaattgcaagaaatatagaggtaattattaaatatttgttttt

SEQ ID NO: 191836 - DNA, 1664 bp, Cannabis indica
ttaatgaatataaaaaagaaaagtatttctcgaacaagttttatttttctatttgattttttttttaattagatacttacggagtcttgtaaaagtaatttaaaaataacttgtaaacaatatagtgcaaatataaaataaaataaaagtataataaacaattgtataatgttgttatgaataatgtaagaaaacaacagtctatacttgtgtaaaaaaaaaaatttcaaattcgtaaaaaaaaattaaaaaaattataaatctgcatttttgtaacttttatgtcatatttagttatttatgaaaaatatttgcaggttgtggcagagatggttgggacatttattttggtattctgtgtatgtgcaatcatagcaagcacccagaagattaaaggagatgtgggtctgttggagtatgcaagcacagcaggtttaacagtaatagttttgatcttctcaataggctccatttctggtgctcatgtcaacccttctattactatagccttcgcaatcttcggccatttcccttggcccaaggtacatatactttaacttaaaactaactacataactatatacatataaaccttgtcgtttatgacttgttttcttatcatctctacaaaaggtcccactttacatatttgcacaaaccgttggttcgatattggcaacatatatagggacgcttgtttacaacatcaaagccgatttgatgatcacaagacccttacaaggctgcgttgcagccttttgggttgagcttatagcaactttcattattatgttcttggtagcctcattaacttgtcacgctcaatctgtaagtaaacaatttctaaaaccatatgcattgatttccctaatttatatttatatcatataattttcatcttctttttcagatgggctatttatctggttttgtagttggtattgctattggactagctgtgctaatcacagggtgagttcaaaaattctactaacacataatgacaatttttaattatatgcatagggtgacaatttggttaaccagtatcctaactaacaccaaatccaaagaaaagatgtataaactaatatttttgtattgtgacagacctgtttctggtgggtcgatgaatccagcaaggtcaatgggaggtgcaatagtttcatggaattttagtgacatttggatatatattagtgccccaacaataggagctgtggggggtgctctcttatttcagtttctgagggttcagagtggaccttgtagcacagctgcctcaactcaaacttgcctactcactcagtcattaagctttagaccaacttaaattaaatttattcattaattaattatttattttatggacaaatttgtgtattgttgtgggaattccattgttgtggttgttggatgccatgcctaaatactagttcaatttaatgaagaaggatgtgttgagacaaaattttatgtgcttcggattattagacagaagtattgaactcattggaattaattgggtatatccatacaatatatattaacatttactcgacatagatttagtcgtgcccataacaaattaggaggcaattcaaaatctaattttgtcccgtgacaaaaaaaaatattatccctgcgtcatcactaaagagttt

SEQ ID NO: 191837 - DNA, 3302 bp, Cannabis indica
aagaaaaagaagaagaagagagtcaacttgtaaaggatatatttatccaaatacagattgaggaaccagattctgtatcccatttaccatgtcttttattcttttattatcaatctaaattaaatttggacacatcgtctcaatacaaatttttataattaacttatgctaagtaaaatgatgtgtcacaacatagttggagggaaagaaatataataaaaattaggacagaatattgtgctaattaatatttcagagaaaaaatagacccaaaaaaaaaagcccaaaaaaggagcttgataaagtaagaagagagagcgttgaacgagacaaagtggagacaaattgtttacagcacaatatttatttaagtttattagtaaaaggaaaaaaaattatctgctgtttttttcttcttcttcttcttttgtggaggtccattatatctcacctgctggttctatatctctactcgctgcatacaaagaggtggtccaatctctctttactttgttccttaaaacacttgtttcaattctttttcaaatacccatttcagtttacacaatattttcattttaaaaggttaaaaacatattctttttaaatttgatcaacgagttttagtccacccagtttcaaagatccaacatttttcacttggttcaaaagggtatgcaccttttgtttgcttcttaatttcttttgttataatatatcacctttggagccagatcttatatcatcttgtattaacacgctttgtattatttgttaatgatcttatttttctacaagttgttcttttttaccctaagaaaaagtgatagagctgttttgtgttgtgagagtttcagatcgattaatgggataagctaagtagcagatttgggtttgtatttgcttatactttttaaattttgataaatgggtttttctgtgtccctttctgttagttattaatgtcgaaatttgcttgtataaggttaaatcagtgatgaattgtcaaaatcacatactcccattttcacaagttttgatgttctcattttcttagccaaacagggttcttgaaattcttatatcttttttatttgacttggttttgacctatttgttttgtataatgttgtaaacaacaatgcatttttatgcatttatcttctttttcaatttggctgggttttgaacctatttttctcttctgccaaacaggtataaggttgaagaaggaagaaattttgggcagtgtacttggtggtggtgttggggtggggaggagagctcagatctaaaatcataaacagttaattatgtctttccttggaacccaacagaaatgcaaggcttgtgataagacagtttatccagtggagcagctatctgcagatggtgtttcttaccacaagtcatgcttcaagtgcacccattgcaaagggactttaaaggtacatttacattacactactcttaatttgcagctcaattccaattcattgttatcatatccttgataagactcaaatatgaaagttcctttgttacattaccttgttctcatgcttatatagtttcttccattctactatggaaatgcccatattaacatttgggctgaataaacaatttgcaactgtgcctgtgtctctatttgtccatgtgagaacttgatttgagaattctaaaagagaattgtttgatggactgaaattctgatgttaatggcaagtaactcaagaatttagaagttttattattgtagttgaggaatgtctaattttgtttcagctgagcaactattcctccatggaaggtgttctgtactgcaagcctcattttgagcaactcttcaaggaaactggcaatttcaacaagaactttcagtcgcgtatgtctttttcttttccctgagcaagttctttagctgatatttcttgttttttttccaccagatttttttaatttgccataaattttattttcaacagctgcaaagtcagctgagaagttaaccccagagctggtaaatcacttctacaatgcaccacatttgattacaaatctagttatatcattggttgcatcaaattctgaatgaagaaataacttcacttaatctaatatcccatggtgtcatcttttcagactagatcacctagcaaagctgccagcatgttctctggaacacaagagaaatgtgccacttgtggtaaaaccgcctatccactggagaaggtaggatgccaaaatctaataatgtttatctgttatcatgtcttaggcatatcctcttatacttccatttatctatgtcatggtctaaatcgctttcatacgatctctctttatgcttgcatattccacaatttgttttacacaattatggaaggaaagttatgctactaaagttcttagttctggctgagtaggagttgattcgttcagccagtgtttcaatctaagcatgaaatataatttgcttaattttgttgtaaatatagaggcattcttacgatctgtcctagcattagagtcgttaatttgtcaccgctgttgaaaattcgtatcttgaacatcaagcatatagtcagttcatagctgttagtagtttgagttccacttgaattggatttccctgtatgcaagtatgatgtatacactttaattagtcaggacttcggaatgtaccatcgaagtaagcacaacaagcctgtagagtacatatggcgattatatcagagacttgatgcttaattgaaaactttgcaggtgacagtggagagccttagttatcacaagtcttgcttcaagtgctctcatggtggctgcgccctttcaccatcaaactatgcagctttggaaggaattctgtactgcaaacaccatttctctcagctcttcaaggagaagggaaactacaaccatctgatcaagtctgcatcgattaaacgggctgccgctgcagcctccgttccagaagcagaagcagaagcataagctcatgaaagaaaaagaaaaaacgaataataaaagaaaagaaaaaaaagaaaacaacaaaagagaacttgtggtgtggttacaatgactttctttctatcgatttgagagtgttttcattttattttattcatctcaacattatgatgctctatttttacatgatggaatgtaggagtggcaaaacttggctcttctctttttgtcatgtatggctaaaggggtctcactagtgttgggttgtggtgtttttttgatgttgttgtatgggaatgggatgttgaaatccaacggttgtaaaatga

SEQ ID NO: 191838 - DNA, 1843 bp, Cannabis indica
agtagactcctaaaggttaaaaaaaggttaaagtaaatatcagcaatataagaactccatagaaaaaaaaaaattgctagtttttagataaatgaaaaagaaccttggaatagtagcatctgatttctgggcagttcgcaaatacagatcaacataatctaagaaggatttcacaggaactcggtttccatcaagttccactttgacagaactcccaaggcatccagccatgtcaaaaactctctttttcatcagtgcaaccacatcattttccaaatgagtcatgttaaacttagccaaatctggcttaaatgtcaccttggtccagttatcagtcgccttgcactttgtgattactggatcagatttcttccccatgttgttggtgaaaaccttcaaacaatcacaacaaaaaataccaaattcaaaattaaggaaattagcttaaaactatgctaaacaaaagttcaaaattgactataaagaaagcttttctgaaactcaaatcatgaaaatgaattttataaatgacagtttctgctaaaccctaatcaaaaaatgaaatgtaaaagcaaatcatttccaatcttggaaaaccttaaaatcattaacaccaaatccacatgtatgctaaacactaaattcaaattagctagctcaaaatgaaaacttttgtaaacaaattaatcccaaaccatggtttaactatgctgaacaaaaattcaaaatcaactaaaaactaaagcttttcggaaactcaaatcaataaaatgaatttcagaaatgacaacttctcctaaaccctaatcaagaaatgaaatgtacaagcaaattatttccaaatgaactaaaaatgataacttttccaaacttcaattcaagaaatagccacaacccatagttaaaagtccatacctgcttgtacttcttctgacgctttccatcagcagtctcaataacaaactcagttgagaaaatattagtgagcttagccatacccatttcttccaccagttgttttcttctccttatcatcatagttactactcgtcaacaaatgcccaaatatcatctcaggaacataaacctgctcctcttgatgaatctccacaggaacaccatcaccattgttatacacactaatactgttcatctcaacgtcaatctcaaccttcagactgttcatggaaggatccctctgcttattatcggcagcattaacaagaatctcatcaaagatcttgtacaaaccagggacgtagctaacagatcggctcaccatttcatcattctcgtacacccaaagtgtttgggtgtgcttttcaatggatccgatgtaggtatcgggtcggagaaggatgtgctcgagttgagacttcttctggtacatttcttcgatcgtttttcctcccggcggaggagcaatgttgacattgttgcttgactgaagagggcgtttcttctcgaccaccatggttagggatttgaattgagtcttcaaattactgaaagattcgttcttgagatagagaacgagggtttcagacagagaaaggagatgagagagttgagactttatatagttggagttaacggtcaagtggagatttgaatttgaattttgaacttcaagcgggatgttgtaatcttttgggccttgtttattgggccggcccaactttagacattacagatttgggctataatgtggctgaaaaatttgtggccggccctcaagagtttaatttaggaaaaggaaattttacaaaaatactgaattttaggtaaaagtctacaattttatataataactataaaacaatacaatataacaattaaaata

SEQ ID NO: 191839 - DNA, 630 bp, Cannabis indica
aacaaatttgctggatcacaggttttacatgtataagtagtgcataggcatataaaattgtaaaatctttacattcttgcaagcaaacacaaaaatcgaatttaataccttttccacaagttgcagatttaagctattttcagcaatccataagatacggcaaagaacattttcagactgaatcgctgctgcccaagtaccactctcactactccgaacacccaaactcaacaacctgtggacattataaatatattagaagcataaaactcgtggaaataatgtcattcaagaccaaaaaaaaagtatatatgaacactttttaacaatgttacatagaagcacaagaccgcagtggagtcattagaaaattcagagtttcagagaaaaaaacatatatatgactagaattcaacaagggcagaacagtggaaccacagtcaaccaagagtgcattatattataacttaacttcgccaaaatacggtaccatttcccggtgttatggataaaacatagaaaagtatcacaagaaatgaataaaaatttgtttcaatacgacaaaaggtcaatttggaatagattctaagtacctttaaagctgttatttaataagccatgagtcaaaaa

SEQ ID NO: 191840 - DNA, 3126 bp, Cannabis indica
taaatcaagtcacatctttttgctgttgctagctcatagaaatatcttatcaatttcttcatatatagtagtagtgcaagtgcaataagaatctacaacaatctacaacacaataaccgttaattcataccaattttgtacttcactaagcaaagctacaccaatttaattcccaaatgcataaagtctcaatagtaaatctccatcaaccttttcaacattgagctcctctaggtttgtaactcctttggttttgtgtagttccaaaccaattccatcaacgttttccactattagcttcacaagggattttaatggccggtttggcttatcttcatcggcgtttcaaggttctcttccatggagttagctttgttttttggtggcttctcaagccttcttattctcataaaaacttgtacgtattaaacaaaatatttgtatataacacaaatctctgttaaacataccataccataccctactaagtctcttccgaaggtaaccaaccgaaacaagaggagctgccacagaagcagggagaaccattagagcttagcctgaccccgccatagctaaaagtaagctcttcatcttctttgatgtttttggaagcaaaaaaggcgagtcgaggaagcaatgagcctgagcttctaaccagtgatgttgagagattaccgccatcacaagaatggtttatgaaccttgcaacatttcctactcttgtggcgtcgatattgagtcttaggcatgcttttccagatggaagatgctccctaacaaccaaaagtgcagaggaaaacccatcgcttgatgcgagtctgtcatagtcttgatgccgctttcttgcttccttggtagtcaagagctcaccttccaaaagcaaattcaagttcaagaaattctcataatttcattatcaacttaagaaagggaacaacactgtatattcctctaaaaatacagagttgagtgtgtcctcgcaacacagcatatatcttgtcagttttcaccattgattctcaaccaacacaaaattacactaagtgacccttaaacagctccaagagttgatcaagtgaccttaaatttacactgatcaactctcactcaatgttattattattaaaaaggaagttatttttgcaaatttcaaacatttctaattgttgttagctacaaagacaatgcctttagcaaaaccaaattccaaactcaaccatacataggagcactgtgaatcatctcagaacattactaccttaatcttgtcataatttcaaactacaaacttgatgtcgttgttagctacataggcaatgcatttagcacaccaaatcaaactccaaactcaacccaaaatattcatccatagcagcataaagaaaatcatacttacagcattttcacaattgattctcaaccaacacataattaaacataaacagagaaatcaaatacagttattttcatacaaaattctcttaaaaatccctactttaagctttataagtggaagaaaatgatattatacatatatatacctgcatattcacaaatgaattggcctttagaaatgaactgagcagagcacacacaccaccctttcctctcatctttcacaatcttcaacatcacagaaacccctctctgactcaaccgattcccacactccaactcacacccacaactcggtccacactcactcaccaaaccctccaacccatcaaacctcaaacaagggcagtactcaccatcttcacacctctcgcactcacacccgtctcccaacccgacccattcctctacgacccgaacattcgggtcgggtttcacagccgaagcggagccccaagattgccgattagggaatcgggatgatgggatttgagatgaggtgtagaagaagtatgggtataattcttcgtccgctgaattcgaacatgggattggaagattctcgaggttcctggaaacgtcggagatgcggcgaagggtgatggatttggcaatgcggtttagggttttggaagtgagtgaaacgttggcgagttctgttggggttagccatggaaggagtagttcagcgcattggaaaaaggaagaagaagaagaagaagaagtgttgggattgtcgttttgttgattttgttgtcgttttgattgagtgggttcattgattgtcgtcatcttattttatcacaaaactattatggttataacccttttatatggttttcttttttagaaagtcatacacaaaggggaacccctttgttcattgagttctccttgagttgacttttcatgaattttttttgcacttgaatgaattatctttttatgcttagtgaacactatttcacaagctcataatgataaggtaaacaataatagtctctataacattaaatattatattgattttatcagattatggatcttctttatttttgattgctcctgttgatgctccacattggtcccctcctcctgttgattggatcaagattaactatgatgtgaaagtgtggagtaggtcgaagtgtaccatagcgttgctcgtgatcatgcaggaactgttttgtagattgctttctagtctttgcctactctgatcccttgattggtgaagtgaaggcctgtgtgattggcgcttcaaacagcaactgagtggaagcattgttttgttatcatcaaaagcaattcagagattgttatcaaagcgttgagcgagaacccttcaaattggcgtattgataactttttcttatttgtaatatacttttacgtaaatttttttgggttgtattttattttttattgagactatgtaattttgccgctcacaatattgctaagtgagcattttccaagaatcttgcaagtatgattaatgtgtcatttatttttaaacatatcttatgtaatgaccaagaagtctaatttcaattgaacattgtgttttacaaaaaaaaaattggggataaaaatcttatttattcataaataatgtagtgtctttgttggtgagtaaaatctcctaacaacaaatataattttagattacaatctctcttgatagaatccatccttaagtgagtgaagatacattgagctcttctg

SEQ ID NO: 191841 - DNA, 3542 bp, Cannabis indica
gatagcaaataagattatattgaaatgggttttatttagggcataaaatcccaataggcgtgcatcattggactgcccttgcagcagtagcatcacgttgcaattcactgttccttcagtttgactctgctagtctctgtcaaagttgacggttatccagttctacatttggtatgtatctagtggggtcataagcatccgagtttgttctctctggttttcttccccatctacatttcccattcagtagggcttcttcttacattatagccttcttgggttgagttccctgtggttctttcccatggcgatgcactgtctcctcctttctaacattgttattctgcatattatttttcgtggtgggaaaatgttgaagctttttttcttttggggagttgcattttttttttagagtttaattttcaaaaaagagctctcaatgaaagtaccaaactgttaactgagatttttgttaacaacaaatgatgcctttttatgtattaaataaataatgaataaacaaaatattaaattaaaaagtatatatattagcaaaggatatttttacaagattttgtagttaaatatgcatagttcatgagtcactcttatttatgagttttcagattacaagatacaacttagcataaattctctccatcatgaaagaatcgataacaataactgtctaaatttgattgactcaaaaaaccatcacttttgatctcatctttcagcagttatttatcaaaccatctttttgctcgatatttatccttctcgcaaataacgtagatgatttagcgtacatcattaggatgcttctcacaattagagtgattcatttagcattcttctcaacaacaattgtcttaaatggagttttagataatttttgtataattcttataggcacacttcttcaaattatatctcttgtgcttcttgtgatgaaagcatttcatctttcaactagcataaccttcttctttctcgttgaacttatttttattaatacacttctccatttatcatgctctgtacgtggatgcagaaatctggacacatatatttggccacacatgctcgctagatttgcgagaacgtatcatgaggtaagcataaataagatagacacaatcgtttatagtagttcactctttgtatcatgctagtaatggagctacatctacttcgagttttatttctaataggatgggttacagaaaaatagctaagtgtagatgctctaatttctagagagatcaactagagagagaagctttgactttatgggcactttttcaaacttgaaaaatagctagtggagctctccttttataggaaaggaggtactattaacataataataaaatattccaaaaaattttgaaaattatatttaagctatttttgattatagatgacgatctaacgataaaaatgactccaaaggtcagtcgtcaattttgggagcttgatttatgtctgtgggactcactttgggtacgttgtagttacagtttataactctcttgaggacaaaattcagacttgatatcttcagtttgtgtttggagtgtgagacatgacatgactcaatagaacattagaataacttcaaaattcaagttgaattgagtcaatctgatcaatattgagtgagttatggccattttactaaaggttgctctgctcccagtgcgcaggttgacgtcgagtgccaagttaacattctagaacccaagttgacatgtgatgtcaacctggatgctaggccaagaaaaaatagtgtttgcaatgtacattttgaagcctaagtgatattttgacatcacttagtcagtttctatattctagtgaagttggtcaccagttttcagagatgttgctgttttgtagaaacaagagactcaaaactacctggtttctgagtaagtcactttgctggaaaagtaaaaatatgaagttgtgaatttgactattctgacttcatagctctcagttactatgaaaaactagatggatggtcgagacggaatcagaattggataaacagaacccatcacaccaggccatatgtcaacctggacgatgggtgctctttttggagctttgggaatgtcattttgatacattccaggttctagaaattgaatacgaggtcttcttccctatttttgacaattttggagagaatacttagagcagaatttgcatttgggtgatcaaaacaagcgcattaagttaattttcatcttgggcgttgggctcaattttgatgcccctgtgattgtcattttccccccaagttagcttgcatctctgttatttctaatgatcgaaaaaaatgcctataacacttttttggaaacaagattggaaacaacccaagttggtaatatgtcaacttgggcgctgggtccagttttagccccttagatagttctattttctccttaaatatacttgaatcttaatctttgacaaaaacatagaatatgcctggaaaactttttagaaaaactccttagaattggcctaggttgacaaaatgtcaacttcggcactgggctagcactaagtgtcaacctttgcgctagtgccttttttcagcctctaggttagtctgtttcttccccaaaatacttgtttccccattttgatgaagacaaaaaagatacttgagacagatttttagtatgatgcttggaagttgcccaggttgacaaaatgtcaacctgggcgctgggtgcctggggcacctagtactccgagtgcccaaaaattaaagttcttcgaatctgatcttgatgcctcaaatatgttcgtgacatgtctagtttatgtcttagtacaaagtttgacccattagcactaagaaggtctcgaaaattgaaaccctagttgggttgtcaacctaggcgtttggtgaaaccctaggcacctggattgatttccatggtgttctttcatgtatttttcagcttttgggccttggggcttgaatgctccataactttatagtacaaagtactgaaagataattagttggaaataacttggcgggatccaaatatccattccaaagctcttgaagtcaatctaggcgcaggactaggggcccctctcaagttgactactatgactcgggactattgaacttcgaaatattttttttctcgccacgggtcaaacattgatgtctatgttaccaggataagttttcaagttaacaatatgtactgtgtttcctgagtgagactttgttgtaggttttttgtcttgttcgcatattacttcatgatcagtaaatttgacctacacttttggtacaagacgagacttataaattctgagtcataagagtattatctgagacataataaacatcttgttaattcttcttaatacgcaagcttactaaacttcgggttccagtacacgtgtcacgattatatttattgctcaaaatataggcataacgatttcttactaggctttcatttttaaagttttaatgaggtcaattttttatt

SEQ ID NO: 191842 - DNA, 1546 bp, Cannabis indica
tgttttttcttcctttctttctccctttgccacttttaaatggtgggtctttgtactgattatagattattatctttgagcccagcccagcccaacccatttttctttttactagaaaaataaaaaaaaataaaaataaaaattgggatgaatgtgttttgaatccaacattggtatttaagttgctcttttgggaccattgcaaattagtccttttctttctttaattatgaatttaataagaaaatacatacatatttttaaattttgggcacttagagttttaaatcaaacttttaatttgctcttttgggaccatgcatattattatatttgttaaaaggaattttgtgcatgtcgagtttaaccataataaaatatgttttactttttctccaactatatgaaagtgtctttcacttgggagttgatgaatgaagatgaaaagaaaaagacttagttcagctaaccaaaacttagaagacttattttacaaaaatatgaatatttaaaatgaatacatataaagagagacagaagagtctagggtgggctatgtgattaattatgcaagctttaaaagtgtttggttgaagttatgtaaaccctaagtaaagcactaaaaaaaacaattcacaaaaatggttaaataatataatattattcattaaagattgggttggcaaaaaaaaaaaaaacaggctgttaggtatatatagttcaaaggcaaattgtggttagatagcttagataaaaaaaacccatttatggaacttgtttcatactctaaatttgttgtggttatttggttatcattataagaatgatttttttggtgactagatcaaaaacaaaaatcaccgcaacaaatatctattattgtgtgaaagtagcttttttcatgctatatagtttacttgcatgttaagctttatctttcaaaaagctaccaaattaataaaggaaggatttttttttctcctacagcctaaatgagacaagtggacttgctttacaattacttttttattttattttgtatacaatggagaatctaaccccatgtcttttacacatacaattacttttttattttattttttttacactattgtaaaagtcttttaatggtgtttttgatattcgataattcaataccattttattcttacaaaactgatttctccatattagggatgtaaatgaggtgggtaggatcacgtgatagctctccacttcaatcctattttatgattgggagcccaagtttaattttcttattcattttttttttagtataaagtaaagaaaattataccattagaaatatatttctatacaaactaaatattatgtattctaaaaaatatttatatttgaaaaatttaaataaaactataatgtaaatagggattcaagacgaagttatgttcttcgtccctaagtgtaatacttggaagaattagggatgaggatgagaatggatagtgtatatatgcttattcaatgactctatcttaaaaaaaaaaaactatactcaatctct

SEQ ID NO: 191843 - DNA, 4223 bp, Cannabis indica
ggcaaccattgttgaccactaagcaggtttatatacaatcatatttttctgtttggaattctgtcttatcaacttaaaatgtgccatgatttttcttttcaagtgtgaatgatctgccttgcaaatcatatcatattttgtggaatgtgttcttgtttcacaatccatttttagattacaacatgcattggtgggccagtgagtagttctttctgagacttttcagttgataatgtttactctatttcaggttcaatttagctttgggcgtgttccgcagtcacttgcagaaatacaagggtgtgttataaataacattgaatatttcaaggaatgacaaacctttcatagtgttctgttgtaataatctctatacttttttgttgtctcaggttggtgtgcgaagacatcactggtggccaagagactatccccattccagctacaaatttagttgatgaaccacctgttgcaccgacaggcaagtttaactattaaactagtaggtggtggaacatgaaaatatgtattgtttgcttaccataatctttattaaaaggttaataatcaacatatatttctgctgtagtgacagtttttttttttgaacaatgaacaaaatttcattgagaaagaaatttgcgttgagtacatcataaagaagagatcgaaaattcttcatcaaaattagctcaccatccaccctaagtgcgtgcgcaactaattcatgcatagccataatggtcaaatgatttgctttagtgtcagtttttggttcttgagtttactcatcattttctttccaactcggtttcacttttcaaaattatcaattatttcaatgcataagtgcaagttcctttgttgagtatgaattttgttaactttcagattacaaatacttgaaatctattcaaccagcaaacaatgtcaagcttccttccagtgctggaggatgcgattgtgtaggaagatgtgtggattcaaagacttgtgcatgtgctaggcttaatggctcggacttcccatatgtgcatcgtgatggcggcaggtagggattatatatgaactgtttggtttatcctgctttctgtttctcttaccttcaaattttaacttttctatgtttaccagactaattgaagccaaagatgtggtctacgaatgtggccctggatgtggttgtggacctgaatgtgtcaaccgaacttctcagaaaggactcaagtatcgatttgaggtatttattcatactgctaattgcttaactgtcatcgaagatattttgattgcccaaggtgctaatgtctaagcattcccggtttgtttgcaggttttccgcacaccaaagaaaggttgggctgtcagatcgtgggatttcataccttctggcgcaccgatttgtgaatatactggaatacttaggaggacagaagatgtagatagtgtgtctggtaatgattatatatttgacatagactgcttgcaaacaatgaagggtctcggtggaagagaggtatgtcttctgcatcgctagtgctttctcaataatgtgttcactaatttactcattttctttcaaaatccttacggattgtaattgacaactttaaattcagacaaattttcggtttttgtttaatcttaaaccagcggcggtcacgagatgcatctgagtctgagatcacttcatcagagaaacatgaagtatctgaaagtaccccagagttttgtatcgatgctggtttcagtggtaacattgctagatttattaatcatagttgcggacccaatctgtttgttcaatgtgttttgtcacgcccaccatgcaactgaaacttgctcgggtaacgtgttgtttttgcagcagacaacataccacctttgcaggtaaactcacttcaatccaatgctatccctattttatgttttggttggaatataaatatattttcaaccaaccattctggtgaaataactgtttgagaaatacttaaaggacaccactgtgtctaacactacattattactgatcctacaaggaaatgccatttcatgatttttttttcacttaagtcatgccattcccaatcctctttttttgattacctgaaaactgtactggattaaatttgacaggagctcacctatattataggctatgccctagatagtgtgctcggccccgatggaaaggtgaaacaggtgccctgttactgtggtgcggcagactaaaaaacggttatattaagctatagctgacttgtaagtttgttgcgaacaaacattttttgttctggtctgcagctgctgctgctgcaccaaccttaattaccaacaattgaacctttttgtatttattctctttttgggatgattacactaaaaaggtctcacatgtccaaactataatatataatgaaaatgattattaacatgaatgaagagaaattatattttcaagaatttggttcacttggattttttatgcatttgacaacaattgatacagtcgaaccttaagaaattgagtagattataaaataacaatcttaatatacacataatgtatcttagggtcctatgatatatttcccaaagcagtttcatcatctagttaaatttgttaaaataaacatcaaatctttcattcaatacaaactccaatccaatctttctttgcagcacaagaaagggtggtgttggtgataagttattagtcagtttttctaacatcaaaggtaaaactacaaatgctgaactgaaccgaacctatcaaatcaatcatccgaatctgacctcgccttcatccgatactggcgcccgggttttggagaattgttgctcttcttcctatcttccatagattcatcaggttcatcttcttccatagcacaaacatcactttcttcgaattctacagctgcaattggccgaacagcggccagtgaagaaacatccttaccaatcccaacttgttgtactaactctgtacagctatctaccattgcattagtgtccccacttttctttcttggtatgaaagtaacagatccaaagctttcaaaagctgctttctcgtcaagatcatcgctaccactactcgatttcttcttcatcagattaaaaaaatccatataagcttgcttgttagattcttcatcattcaaattgctcgaagaatcatcaaatgtataatgcgtgtatttagaaggattcctcagaaaatcaggaacaccaaaaccaaaatcttcaccttgaacagtgtcagtatcaccaccattaccattaccattgtctttacattcaggatcaaaccttacacgcttatgtgacttggaatccacttggttttctttcctcttcagaatcgatttagggtttgaaacattagattcagtgtccacttggttgatgttcttggctgcttcagcatcttccttgatccttaacttagctgccaagtgattcgcccgaggatctttcggtacttgtttaatcgaagtcggaagcacattgccggaatctatgtcaatcccgtaatcatcgatatcttctggcttttcatcaccaccgaccgccactttatcatactcgtcttcttcctccttcatcatcatcagaatcattaacaaaaatttcaatttcagaaacaacaacaataacaataaacaataatgatgaataatttttgctacctcgtaatcgagagtacaatccaaaccgataccagatttaacctcccattcctcgtcgttgtaatcgtccggcttcgttgagttaataatactcaacgatttgtcttcaacttcttcttcttcgtcgtcgaggtcttcgaggtcattctccagttcggttgtgtgatcatggttgggtatggagttggatacaggttcaggatgctcgggagtgtccttatcgcgattccattcccttctgactatttcttcatcagttaaacaccatagcgagttgagagtcgacgaaggcgtcgtagctgcaaaggcggtggaggaagaagaggaggaggaggtgttgagagagccgaatattttgttgactctgagtttgaaggagtcttcttcttccatgggaataggggattgagaaagaacagaaattaattttagggtttgtggggaagatggattgagattggtttggaagatgggtcggtcaggtcatggcgggtacgttttttgaccttccgtacttcgtttttc

SEQ ID NO: 191844 - DNA, 2178 bp, Cannabis indica
acgtagtgcgtttacgacagcaagccagtgagtgaggagtaggttatgacagtaaaatgggcagaccgtttattgacaacgtaacgagaggtctaggctagtaatgagtaataatgagaccccctacgatgagcgataagtgggttcagacattggtcactaccatgagcagagaggcgaagaccactcgtcattggagttgagcacggtttagcatcttgcatttgtgcccttgtaagtaagtcccgtgcatacttagcctgagataaatgcagacccgatggtgttggatgaatctcaatacccaaaaaatagtgaagatcaccaaggtcttttagagagaacttgacattaagagcagcaattaattcggatacaacagtggggtcactaccagtgacaaggatatcatccacatagactagaatcaaagttgtgtgtgtggaagtatgttgaatgaagagtgagtgatctgatttggagggtatgaatcccaactgaagaaggcattggtgcaatttgtcaaaccaggctctaggagcctgtttgaggccatataaggctttgtgaagcttgcacactagtggaggtgttgatggtatttcaaatccaggtggttgtaccatgtacacctcttttttaagatcaccattcaaaaatgcgttgttaacatctagttgtttgatgcaccagccacgagacaaagctagagttataacaatgcgtatggtcactggtttgacaacaggactaaacgtctctgtaaagtcgaatcctggctgttggtgaaagcctttggcaactagacgcgccttgaatttgttatgagtgccatctgagctttctttatgtcaaaaaatccatttgcatcctataggttctcggtctggtggcaatggaacaagtgtgtaggttgcattgcgaattaaggcaagcatttcatcagacattgcttgattccactgctctatttgtaatgcttctttgactgatttaggaattttgattgctacataagccttcggttttctaatgccagatttaccatgagtttgcatgtgatgtgagttgatcatgggagtttgagtaggaacagcaggtgaattttggggaagattagcaggaacagatgacacaccagtagttgatggaacagtagcaccaggaaccatagattctcgatctcttggaactgtttgaggcacaacatgtccagtcttttcagtagttgcttgtccagatgttgttacatcagtagctgcagctggagtaggtgcagttgttgttgttgtgaacccagaaccctgcacaggaattaaacagcttgcccaagttggcacaggtggattagtgattgttggtctctcattattaacagcaggagtgatagtagggattatagcagatgtgaagaagtctgtataggcataagaatcagtgtcaagtttgggaattgttgagaaaggaaaggatgtttcatcgaagatgacatccctagaaatatagacacgacccgagacatctaaacatttgtatcccttatggttgaggctgtatcctatgaaagtacaaggtgaagacctgaactgtagtttgtgtttgttgtatggacgaatgttaggaaaacatttgcaaccaaatgtttttaacattgtgtagtcaggtgctatagaaaatagagtttctattggtgagacatggtttaggacaggagttggtagacgatttcagagatacacagccgttcgaaaggcttcatcccaatacttaagaggcatagtggcatgagcgagtagagttaggccattttctaccacatgcctatgtttcctctctactaaaccgttttgttcatgtgtggtagggcacgggtgcctgtgcacaatgccaaattgttttagtagatcaaaaaaaggacgaaactcaccctcagtcaatttgtaagcatttgatttgcttccccaattgtagttcagattcggttttaaactgtgtaaatgttcttaaagcatcagattttgttctttagtaagtatagccaggtgaatctagaaaatgcatcaatgaattgaatatagtatctgtacccgttgacagatggagttttggcaggaccccataggtcagcaacaacaagttgcaaaggttcagtatacacagtaagggatgatttgggaa

SEQ ID NO: 191845 - DNA, 3326 bp, Cannabis indica
gaaccttgtactgtttttaatttcttcttagcaatttcatggctaatatcaatggcttttgcaagtggaatttgaaaactaaaagaaaattgaattataattccatttagagataacaaataagttacatatttttctccctttttacatttgattatgattatgattatgattattattccacaatctcacaggttaagatgtcaaccatcaaaaatccttcatcacaacctaaaaccacctaataccatattaaatacaagagaaaacagagaagcaaatcaactactattttgatcaatattcataagttgaaaacagggtatagttccaaaaaataacccatgtgaggtttggtttaatagatccaaaaaaatgttgtgttggcctaaggagatttgaataggagtgtacagagatcattaaagtatatttataaagccttaataaaggattcctgctaatatagagcccaagcaaaagaggacaaataacttgcttaaaaattggaatatcttgatagagaactgtttattgaggacaaatatttctctgtatcagttcatcaaattaataataataacaacattttccttcaaaaaaaaaaataataataacaacatttcatatgtatcatttgcttatttgagtgggtttaagttgagaattgataaaatacagtgttttcgtattgttattgatgtaatttaacattaaattttacctacttaaattaattattaaatagcatagcataacagtcaaatttagtatatactccacttcggcacctccaacatagcagcatttttaacactattttatcgttctagctacagtgaacgacatatatatcgtatagttaataacatttattttatatatatatatttaataattttgtttatgtacttttacaatgcacctcaaaaaaaagtgtactactgatgtattttttattattccagtatttagaaaaaaaaaatagattaattttttatagttgtggacgttataattatttaagatatttaataaaattttgaaaaattaagaataattaacaatataaaaaaataatattcaaatagtctatttcttatgtatataaaataaaagagtcacacatgtaacatattatttgaaccttattttcgacatgtaaaattttttcgaatttttaaaattttacaaagtatcttaaataactacaacatatacaaccatataaaaaatgaactaaaaaatttacttttatgccgaaacaaaagatgtatcagtgcatctcattccccctcaagataaaatcatggggttccatctcaaaaccaattggcaatgagtggagtagtccatattcttatatatggttcaattctctactatttattctatgtgggacaatgtctacaacatggtgtctcaaactatttgtaaagtgtcactttataatggtgttggataatactactgcacctaataaaaatacttcttaagctaagaaaaacaaaaatagatgaaaagaataaaagccaataagattgtaccacttaaaaagtcccaataaaatgatgatttatttgtaataacccaaaactagttcacattttcttttcctgtgattgaaattattattgttacccttagtcattggctccaccatacagtaaaatgatatgtgaacaatgctcatattttcttaagtttggtcccaaaattctattcgtcaaatactcaattgacatcctcttcttattttctgacagcaaacaaggcataataatttttaatgattcattgagtttatggtcaaagtccacatatatatcttcttcccaacctaatatgaggctctgaatttatagattgttaatgtaacactctaccaactctagaatttaaaagagaaacaagtttgtgaatacaatttttatttaacttgtctgagagacaaagggaaataaatcaaatacaaacagccaaagaaagagggtacattattatgcatagtaaataaaataacaattaagtgggaattcttgttttcttctatttatttatatcagacaagtctaataactaacttctttgacaagttcttctttatttaactaatcaaatttgtgagaggaaaaaaatgaaagaatgaaattttttttcttatgtaatttagtaatacaatgatatgttcactatctaagagaagattacactaagctaaggttaggtgtcaataagagtgtttagccaaactactcttattattgttatcatcatattaatttatttgggttcttgactttatttcttaacctttcttttaaattgttggagaccttttattaaaaaacaaatacatttatattgactttggcttgctttgtcaatgatattgtagctggtagtctccatagtatatcaaccaatcatcagcaagattctaaaactttcaataaacttgctgattcacacatattcatttgtcaaagatcaagaaatatagtcaaatgtataatcaaccataccactatttacacatcaccctctatcagtctagtagcacaatattatcaaaagcctttaattttgtagagctattaagtatcactaacagttcgtaaaatagttaattcaattcaatctgtatgattgaatttaatataatttaattcaatttataaagtgaagatatccatacttgtgtagattagattgaattggattagaaaattcaaaagtcatacttgtataaattaaatattaattgatatataaaaataatcgatctaataaaatctgaacatattcatataaaattttaaaatatatatataaaattactatttttaatgtaaaaaaattaataatatataatatgtttaatgtgtttgcaatatataatagaggcattttgaggcggaactctcttaatatttttaattgttacacatatgaccctaactaaaaaaaaattaagtggcaaaagtccctttacttatcatgattttgttacacctggcaacttaacaactaaaaaggctagctgcaacaaaatcataagtaaaagaatttttgtcaccatttttttattggggtcatatgtgtaacaattgaaaatgttaagggagttttgtcacaaatatttttatttattatatattataaaaatatagtgtatactattgttgaggaaagacctccactgtcggaccgtcaaggagggaggaggtcgtcgggtggagctgttggattggtggagggaggaggagggactaaaatctgagattgcaaaagagagggaagaagaaattagagagagagagaga

SEQ ID NO: 191846 - DNA, 1709 bp, Cannabis indica
aaaaaaaaaaacctttttctatcttgctgtttttgacttggcggctcttcattatttattataataatcaactctattttactttatttgttcttattttcttaacatttcactaaaaaattaattgttgataatcaaaacattttattttcggtggaaaatagaaagtgtcctcctttaaataatatgaatgggcaacgagtgttatctccagatgaaatttttcggtgtcgttttggttataatttgttattaggaaaatgtcgtttgttgtctagtgtagtgtaggtgtgaatagaagagcagagcatgttcctagatattcgcatcgctgtcgttttctttatattttgaatttttgttttgtctattttccaatcataaatagctctggtccgttctttgggtttcttcggattcgtctttgtataattttttttctctttctttctaaaacgaaggaaagaaaagtttcctaaggaaaaaagtaataataattaaatccgaaaagaaggtcccaccgggagtcgaacccaggtcgctggattcaaagtccagagtgctaaccactacaccatggaaccgtagatgcccatatcactgttcttagttttacttctttgcttttttactgttcttttagttagtattatagattttatgttatttttctgttctaaaattgaggacatatcgaaaactccaaagtgcccaattaattttagtgatttcccaatatggctgaattccttttcttttcttttttcctttttctttttcttaatgaaagggacatatttttcaaattttaagaaagttattgaacatgtttactctagtaactggatgtttagtgttttcgttggtatttttttttttttttttttaaacttttaaaacaattaattcaaagaaaaagcattcaagtatgaaaagaatatgaaacttttcttttaagcattgatattgatgaagagcactctagtactctacaattgacatagggttcttgaaggtggctctttgaaaatgtcaaacacaaacaaatgtttaatattttgcttcttttttgtgtttactcttgctatgctcctacttgaaaatgtgaattggttaaagtgtttgttgattcttgaatatgcaaccacgtgagtctgttgcatgtgggctccacgttacctcaaagtgggtctccatattcaacggcagataaataataatatgcaaaaagaaattcttcatatgcaaactataaaagaaaaaaaaaatactaattaaaaaaggggactttcctttttttctttcttttggcagaataagagcaccagatcgccaaagttttctaattgaactaaaattatttcttaattaattgtttatgtggtgagtgttgagatgagcttatagggttcttttttgcggtgtcgtgtttgtggtgagtaccaactatctagttcaggaatggaatccaacctcttctacttcatttcctttataataattactattaaaaatttgggaagagaatccatacttttcattctcttaaacaccaagaaaacttcacattctataaaataggctgtaaaatatatatattttccatgtatatatatgtgattgggatgtctttttttagtttcttttattcgattggtacatagagtaagtagatgatatttcttatcttatatagattactttcttcg

SEQ ID NO: 191847 - DNA, 1200 bp, Cannabis indica
aaattatagttagttttactggagaagaaataaaaagttctcaacttgtaaatcgaatcttaaagctggcacagacttggtttggcacttttaaataagcaactcatatgcatgttttttttcctctttaaaataattaacttcttctcatgggctattcatgtcaggttgtcacaactgatcattcgatgaacaaagaaaaatttgcagagaaaaccaatgcacagacaaacgttaatgaaggcatagcttaacaattaatttgtctaaaactatataactaatatgaaagtattactcacaaggataacagttaaatcatacgttgaaagattcttttctagtgaaggcattaatcagcaaaatttcgttgaattttcaatgaattaactatctatcctaataaaataaaacaattcgcatatatataatgatcaactttcaacaaaattacatgcaatattttcttttttaaaaggaactttcactatagtgaaaacaaatatataaaattgtaatattgtagaaacggtgtattgcatgcattataccacgttctaagaaaaaggaccttactttaaataataatcataagaaataggatcctgaacatggccattaatttctacatttcgtggtcgactgactatttttttcttccaaataaattagtccgtggactttagctggctataaaatagtcaaatctttgggatcgtgagtaaatgtaaatccattaatggaatcttaaaataattaaaatattgtaacaatcaatcaagaataaaaataacagtacatactgtgcagtggataaactaaccaagtaataacaagtcacataaaacaaaacaatagaaacatgtcaaagaaaatgattgcctcaattgaatagccagtgaatttagtaatagtacagtagggttgaaagtgatcatgcttaataactttttcataatctgttgttaaacaaaaatcaccgtgcacatgcaattatattagatcatatatgtatcggttaattacactaataaagacgtgaataataattaaatcactttggctcatcagggttgaatgtgaagattttaatcggcagattgcgttttagcttcgttaacttctttttcaactcggctgtgtattcatcaggcatgttagttagtttcaattctgagagagtggctaacttgggtaact

SEQ ID NO: 191848 - DNA, 1902 bp, Cannabis indica
aattacgtttggatttctttaagttttaaattatgtatggatgataattatttaatttttatgatagataatttttaattcataatgtgtgtagtaattggattattgttaatttttattttaatatttattaataatattaatctgaaaaaataaataaattataaacatatttataaatatcaatatcaatataaatatatttataatttattgtttttttttttataaaaacattaataacggcgggacccgccgctattaatgtgtcaccaattgaatttgacgcattaaataccggcggagatcacccctaatggtccgccggtattaattattaatagcggcagatgtgtcaatccgccgttattaatgattaatagagaccgggtattaccggcggggcaataccggcagaactccgccggtcatagcaaataccgactgatttgggttttaataccggtggactcttctgccccctaattattggtattgttgtagtgacaatagagaacgggtcaaagaagagtagcagaaaggtgccactaatgataaaaagtcttgggagaagatggagaaaacgagcagcgagagtgagaatccccacgttccgaagggaagtgggctgatcacttctgatgctttctaatcattcttcttttaattcaaaggacctttggggaattttctcaatggcaatgtggagagattaaaacagagtaacgatatatcatttaaattagtataattagagataattatacagttgataagtttatctaacaaaacggatatataagtacaataatgaataagtaatactttgtgtaattaaatttatatataaaaagaaagggaaaacacgtatgaattatttgtcaaaaagtttatacatatttattaatttatgtctaacaatgatttataacttggctgcatgcagcaaaaataaatgatacaaatcactttatcgaaccatatatatggtgattgaggcaaaaacagataaaatgaaaaattacgctgtttgattcgcgcaagaatacataattaattaataaagaaattaagcattaactgttgattattattggatggaaggcatgcatagaaaatgaatgagttaatttaattaatggctgcaagctgaggggttcatgtagccggagacgctgggtttgacattcttacaaactgaggtaagtttgccatctttgccattgtatttgagatcaatgccggagagcttgacatctttgcatccatatccaccgcaaacaagcttgataccaacaggagtggaacaagttcccttaatgttcttgaagctgatatcactaagcttgattttggatggcttccccttaaactgagagcacacaccccatgggcaatattcctggtcaatactgattggagtctcaacattgtccatgatgagatccgaaaaatgcatgtctcttgcaataccttcacgagaagcttgccatgtcttgatcctaactccatttgaggtacccttgaatgtgcagttcttcacgattataccttctactggttgttcattctcgtactttccaagacttccgatgctgattccgtggccaggtccgcatacaacttttgttatttctaagtctctggttccgtccccaattgagatacagtcatctcctgtttgaatcactgagtcggtgatggtcacgttactcgaacgcccaaggtggattccatcagtcgtccagctatcttttggtgctattatcttcactttcttaaacgttagattaactgctcctataattgcaaagtggaattgtttgctgtccacggatcttatgctcttaataactgtgtcgttcagatagttcattctaatattctgttcattccattcca

SEQ ID NO: 191849 - DNA, 1685 bp, Cannabis indica
aaagtaaccaatccaaaaaaacccattcattccacacttaattggattgaaaccaaaatatgaaatccacatttagtgcacatagaatgcactatgatcaaaataatacagattggattggatcaacccctactaaaaagcctaagtcaatacataaatctcaaaagaaaagataagaaatccaagcaaaagagcacaatttcccgcttccatcaatgctactgtttctgtgtcaatgacttttaaagtccttcaacttcatagatttaaacattatgaatttccaatcgagcaccgccattaaatttcagtttcaagtactctacatctcaacccaaatgagttagaaatatttctactccttcccttaacctggcagatgagaactatgaatcctccattgttgtttttgggcgtctggtgatagataagcctttcagtaggaaatctttcaaaaagtttttcacttcactttagaataagtatcttgagataacaattgaggactgcatagatgggttgtttttgtttaacttgaagaatagggttttaaggggacaaccttggcatttctctggtcattatcttatcctccttgaatcttctggaatggatcaaatcaatgctgaagatctcaaagctattcctttttgggttcaggtttatggaattccttttcaacggatgacgaaagagctgggtgaaaggattacaaattctattggtgaattctcagaatatgacttgacccgtagacgtgattttatgtctattagagttcttgtgccttccacaaaaccgattcttagagggattctattggatttggggaacggaagagacaacatatgggtgtcattttgttatgagcgactgataactctgtcaatattgtggttgtttggatcatgagaagagagattgtgtgactctaactgaattagtggaagaagggcagtatcctatccttcaattcaatgaggatattctgaaagctatagggattgatcatggaatgcccaatgctagatcaccaactattggtctgaatgggtctctacatcgggctattgctgatagggctaaggaggtttctacatctcacacaaaacactcgtttgtggagccttcacagaagaagcttaaaataggttcttttagtttgacactgtcttttattttattaatttatatgtcaaatttatgtcaattttataatttaaaggataattgtgatgaaatttttttgatataaatttctataggacaagaagaaagtgttactgaagagaaaaatatatttcttgtagaaggaattaatccaatgaatccaaaccatatggctaaggagacaagtgagactttttctccaagtaactcatccaataatatacagaaggggactatcaattaactaaaagggacgaaagccataaaagagaatcaggataaaccaacatttgaaggtggaaaataacaattgtctatgtcacaatgaaaggggaaggatgaatggagttgagataaatatctgtaatgttttattatcaatagagtcgagtctgagtctcacaaataactagctatatttaatttatgtgggtgttgtttatgttattgagtccattttgtttctatggcttattagtaataaaaactttaatcatcaataaaagtaataaaat

SEQ ID NO: 191850 - DNA, 1060 bp, Cannabis indica
cgttccaaactagtgctaatgatggtgaaaagtacatcaagaaatgttttgaagctcatgtggctgcacaacagcagccgacaaactttctctcatgttggttgattttttgaccttaatttcaaatgatgatgccaatgatgaaaaaattattaaagtttttgagatgttcagaacaattataaaaccaaaactagttggaaagataagggtagtagatagtattttattagtattagagttggaagagaattggttaacacagagatcatcaaagaagaatactggtactaaacctcacaaaattacagaggagtatataagtaatatggtcaataaattatgtgatcatatttttaaagtagaagaactcatgaaacgcatttatgatctcgatcaaaatgataaaacattaaattatgatgttttattagattttgtcaatggtgaattcaacaagtgtttgaaacaactgaatttgatgcatagagatatccagagttattattgggaacctcttataaggaaaatgatgctgtcaattgatcatgatgtcataaaagttgtcaatcatgattagaagattataattttaatttcgtttttttagtttttttagtgttttgttacatctttagagttagttcttttattagtgaggaaacattgatgtatgaaatgaatgttaccaaaccaatttctgaactttgaataatgagtacaatacttttggtattcattgatattatagtacaatatttgttttttaattagtttatacagtgaaaattcagtcaaaactcaaaaaatttatttataccacatattcttaaactatataagctccattcttgtacctttccatttcaatcaatacaaagtattcatttctctctaaacttccgcaactaataatatgaacaaaagtacaattgtaacaatatttagcattacactcaactgtcctgtaaaaactataaaaacactaaatacttttatagcaaatcaattgatttcataatttaataaatataacaaaatagtcttaaagcactttgta

SEQ ID NO: 191851 - DNA, 2164 bp, Cannabis indica
aacagagtcccatcagaacacgtccaattacaaaactaaatcttcacctacgactgccttccaaccagctaaacacaattatccaaaataaagttgcgtgttttccatattcctttggccacaggggaagcatgacagagcactgctccaaaagcaccacatcaatgaataattgcataccgtacaccaatataaataaatatatatttattcactataaatatcatatgaaaaaaaatacttgcatatagaatctcaaggctttccaaattggaacaaaaatttaacaaagggtcggtagcaaaattataaatctaatatcattcttttatcctataaagacagatgttgtatctcaggcctcagcttgaagtagatccaaaaaccaaaaaggactttgaaatatatataaacaattaggatcttagggactttaacagatgaatttatctacaacttctcaaaaactatcctttgcttggcgtatgacacccaaagcttctgcatcatttgccgtggaaggaatgtttaatatctgcctgatctctttactcgaagttcgaagaaatggattacatgccttctccagtttgagggtagttggaatctaatacatcaccaaatataaaactttcaatgcaagaacatgacttaaaaaagaaaaacatgcaaacacacacaaatttctgcttgcaaggaaaaaaatgttaggtgcattttaatttaactatcttgatgtaacttgcaaggcacaaacttgcagattacaaaatcagataagaactaagaaatatatcatatcatcctcaacaggaacacaataaagttttttccttttgctcaagaggaacataagcaagttggttttggagtacaagtggaagaaagtaccgtaggcaagctcttgttgcgaagatgagctacatgtgctgcataggattggagtgcctcattctcaggctctatagacaatgcaaactttgaattactctgttaaaacaagtatctgtagtcaggacaatgtgatttcttttgggttttttcggaaagaatcagggaaagcaaaaccccttaccaatgtatattcatgaccacagtatacatttgtgtcatctggcaaagatgtaatctttctaagggatgacagcatctgcaacaaagacactagccattttaattccaagtgaaatacaatagaatttaaaaaacagattattaggacatccacatattttgtatataacaaagtgccaagtttttttttcctgataagaaaggaaaaagttataactgcagaactaaaaatctatatttcttataaaccaatttcacactaatttacatagctatatgagaaatgacccactctaattcatcagaaaccatcttagacaacataaacgtataaactacaaccacgaaataacaacctgttcaggggttccttcaaacagtttgccacatgataaactgaacaatgtatctccagtaaaaattgccccagatccaggaaagtagaagctaatatgacctggtaagaaagcaacagagagattagaaacccggggctatattcctatatcaataaatctacttgagatacaagagaacatggctgaaaacatttactagaaataccccaggggaaagaaaaataacttaagtatatgactgctaataagccctgaaccacaatagaaaggaggtctaatcaacttatgacaaccagaaccccgttattagtttcaacttagcagcttacacagttttccatacattatgcctaagaggtttagaagagcaaaacaacaaaacaataagttctaagataaaaaatggtaagattaaagaaaaagagcccaaatagaaccaaagggcatgggggatatgttcttcatgaaaataaattgaattccattcacaccctggaacaagaaaacagctaatgagcaatgcagttatagcaataaggtgattcggcttcagtagtaatccaaacgctacaaatgatattcagactagtcaatttatggagtatgacctcgtgtatgaccaggagtctccataacatgcacctcatggcctgcaaacatccacttatccccatcatccaaaacaatatcaatgcctggaattctgttcctgtctatagctgagccaatca

SEQ ID NO: 191852 - DNA, 1033 bp, Cannabis indica
tttttttttctttttgagaaaatttatattctgactttaatagcttctttggtacgattggaggaataatgaattaaagaatgtggaaaaaggctgtacatctttattagattatttttgtttagtaaggtggaaaagaacgaaacagaaatatggttatggattgcaaagttccaaaaaaaaatcctttgttttgtagataaagaaatgacaacttttttttttaaaaaaaataataataataattaagaaatattattatatatttaaatagttaagaaaatattactcatctctttctttctcatatagcaaacaagtaaaatgacgagttattggaatacctattgtctgttgtattattttacttagtgtctaatcttagagtatttagcaattacgtagaagattaaattgaacataacttaatccaacaataaattgtttaatcattttcacattataatcagttcaatcatggtgcaaactgcaaaactagtctctactctctatcaattctgtttaaactaaatgtggatttggacagaaaggatatggctttattaatacaacttaccatcgttgtctatttggataattagtattaaatttaaagcacaacatggttgtcattgtcgtatgttagcaaacttgaggcaatctttctccaccaccgatatccatccacccttccatgacctccatttctcaatctcaatccaaaacaagcatccataaggaccataaccaaaagcaacgcaagtggagaaaaataaattatataaaacaaattttgcttcgactttttggagccgcaaacacttacttggccctttacatttccttaccttatcttttaatcgaaccccaaacaactaaaactaatattagagttatcttaatgtgttttacttgaacactcatttagagtctttattattttaatgatattaaataatttaataagacaataatacctcttatttgtattagagtactttttcactatttgatcaatcatacattataattt

SEQ ID NO: 191853 - DNA, 3758 bp, Cannabis indica
tgtaaatttcccaaaaataaaatattagaatgagatatttgatcatgccaatacgatttgttttcatttttaagctatatatatcatcaaattatacgggaagatatgaaattcacaatacaaaattagccataaccccccatcccatctaaaaaaacatatcctctactacttgctaggaagattgaattattatttatttacaatataacaaatttacattaattttttctaatccaaccttaccctccaattatatcatacatgtattagtagtgtggtgttcatcatcgtgtatgtcttttataattataacacaagttttatttatttatttaaaaaaaattaactcattttagattttatatattttgcaaaaattattaaatttattctctatttagttaaataataaattaaattatatatttttcaaaataatataaaataatactttgaattcaattttttttaaatataagtaatttgaaaataatttctaacataatgtagaaaatttattcaatcttatcataacacctagtttattattaaaaaaaaaattgataaaaaatcaacttggaatattattgtgtactatttaaaaaaatatatggtttaaaataatcgtgtttaaaaaaatataattttcttaaataaataggttataaatatattactcatttaaattttgtattttaaaaaattttaactttaaatttattcggattttgtaaaaagttaaaaataagcccttaaactcaatttaaatatttatgaatattattattagatttgggaagcttttctccggtagaggagaaagtgagaaaatacttttgtcatatgccaaaatattttgacaaaaatcgagtccaaaacaactaactaatggtattattaagcttttaaaacacataaaacaaatagataattgtacaaaatatacggtctaaattagtataaaccaaataaatattataaatgtcaaaatagttggaaaagaaaatttcgtgttcctctttggttgcatcagttgatgattatcatggtcttaattttttttttaattcatttcatttttttgaacaataattcatttcaaattttaaatcaacttctttggtatgatactggcaatttccttatatttaaaaagggtttttacaaaaatattaaattttgaatatttacaactatacagaatttatttacaaaaatacaatttttttgagattactgtaaaacaactaaacaaaataattaaaataattgtggaataattaaaaaataaccatgaaataataatgaaaacttaaccaaatacacagattttttaaaaaaaattctgccacaacaacaaaaaaaaaatgaaaaatatccctaaataaaaagtattaattgaaactgtataaaagctttctgcaattttttatttacttaaaaagttaggacatttaactaaaataaagtgattactttatgcgtttgtgatattcttttttttttttttttttttgtattaaggcgtttgtgatattcttaatactatatcactgctcgaatttcttagtgactattttgtttaatttagatggaagagttataacaacattaagttattttataataataaaaaaatagtcaactttaattaccttatttttggaagagtaatatttatcaataaacatttcctggtatgattcattatttaagaaataaagtggcacttacaaaatcgtcctttatgggatgttttacattcggctaagtttggatcttgggtttggcaaatatgatcttgtgagcccaatgtttactattttcatattccaattgaaaaaccttgaaaattaaatttcaatctatcaataataataataacataaataattccgttattttctaaacatagaaatatatacatgtagcatccacaacagtatcgatccaccaaaattaaaatttttagtaaagctacgagccaaggcacctgtatctatttaaatgcttttgtgccttcttaagtcttggagtgggctagatggagttgagcttttcttactgaagatcaatcattatgctttaaaattttgagtgctaagtatctaaaaggtaggcctttcttgaaatgtgttccttcaagaattttaatttgcggttctggaagagtgttgtgaagactaaagaaatttttatgcaaggagcttgtaaacttatttcggatgggaaataaactaatatttgggaagatttgtgggttatacatggtcgaaatttctatcctcaacatgttaacgctcggcctaagggtttggagaaagtggcggctttactaccaaacaatgaaaattaggatgtatccaaactccataacctttttgacctagaaacaaccaatagtatcatcaaagatggtaaatcatgtggtcaaagtagtgataagtggatatagactaaaaaactaaatggtttattctctactaaatcttcctatctgattcaggccttgaatcgtgctcctctatgcaatgctgctctcgttctgtggaataaattttggaattctaaaatcttggagcgtcataagctcctttggtagagcatcctctcaaatgctttgcctattcgtttcattcttgctaaaagaatacatattgaggaagtttcttgtcctatttatggagagggagaggaaacaatagaacatctttttctctattgtaacttttcctttcacctatggaggtcttccccctggagtgtgatgccagttatggattctggggcccgtgtttgggattgagttaaattcctttagagtctaaagtccaaatccaagagatgttcctttatgcttcgattgtggtagacacaatctggaaaactcgcaacgacaaggttcacaataagtctatatgttacattaaacattacattgactctatctctatgtgttacgcagattatggttcttatttgttttcttcaccggtgacagttattctcctgattggtttctccccgaaagattggaatcaaaatcaaatgtaatgttaaagttagttgcagttcaatgtgcatggtggctttggctagggaccacacaaagtcgattttgtaggtagctaccaacatgctcaacttctctgacccacttattggagaagttgcgacctgtttgttagctagtcctaagatcaacgatctctttgaagcatactttagtgttgattgagagtgactttgagacaattatcaacacgcggaagggaacttgttccagttggggtattagtaactatgtgcttcaatgtaaacatctttctaaatttttgttaagttgtaatttttcatttatttcaagacattgtaattttgcgacccataatgtggctaagtgggctttcaccaataatgtaatcggtatggtcaattcttcttctataccagataacatattatataatgatcatgagatttaactccatttagttttaatatatttatacattttattctaaaaacaagttattgaatccaattatatatacattagaatatacttcagaccaagtcaattatattttagttaagagcctataattaagtagtacactataaaaaaaaattaatcacaaaaaaatcaaacataatgttattgagttttaaaaaaagttgaatatatgagtggttggaaatctcaaaataaaagggtaagagaatatttaaagagtttttggattccatgattt

SEQ ID NO: 191854 - DNA, 1311 bp, Cannabis indica
ttcttttttttttctttttatatctaatgtctttaacttcaaaaaagaatttgagcattaattgagctcaaaaataatgtcatcaaaatttttgtaaggcggtcacttaatttaaaatgagaaaatacatattcttttattggcccaaaaagtgaccaaaactaaaaacaacatttcaatttcttcagtaatttattaacaacaaaaccaataatatcttataaaatttcttttaggtaacattaaattgttttattttttattaagatacttttatgtcatttttttagcaacatttttgttactttcaaaaactattaatataaagtataaattcttactatataatttcttagtaaaattaatgtgcataatatatacctaattctattatcaggactgaccagagggtagggtggtcggggcccatgcttcgggccccaccattttggaggctctcaaaaaattaaaattaatatatatacacagaaaaaaaaaatatatatcatataaattttaattcaataaatatcacagtaaatttacagctcaagtggtacccgaaaaaagatatggatgctatgaatcttattttattgaaatagatttatttatttatttaacataaaaatataatattttggagtaaatattaatatatatatatatatttttataaaattactctaatatataatgtagagtagtactttaaggtacaaattggtaaaaaaaaaataatataatttttgacacattattttttttttcttacaaaaatgctaaaatatatagtacttcagtagagatgttattagtaagtaaatattacattatcgagttaacttacatggcaagattttttttttttttttttttggttatatggagataaaaaacttaacattgatatttgtatcaaaacttaaataatatttattttaaaattttgtaaaaaaaaaaactcatttcaaatttcgcctcaagcctcttaatatgttgagacggccctatctattatgtttaagatagtgtatagtaattcgataagtttattttattaatatctcaaaattgctttattaaataaatgtcttcttagtatatatttaataactttacatataaaataactaaaagacttagtaattttatgtcattggttgatatgttgaattttatttaagtttaaacttgactaatttttactaacgaaattaacaaaaaaaaaagaaataaaaggattacttttgatgttggtaaaaagaaatatgtaatttaaaaaatatagattataatagtgtaatttat

SEQ ID NO: 191855 - DNA, 1079 bp, Cannabis indica
tctttagcttgttactttctacacgcaagatataatatatatgaatataacgtagaaataagagtgtggggttttgaattctaagttttggtttgaaccccaagccaatccaaagaaagaataaagtttctttggaaacgctgtgtgatttgattcaaaccttagtgtctactctctctcaaaagataaaccacattttttgtagtgttagttaaaattagtcatatctgactaatactcagttagaaccagtacacttgttattgttaaagttttaatcttaacagttataagttagattgaaatattactgtctctctaacactcttggtattgcctttaaataccaacttcttttacaatcaaagacaacacttttcagaattctcccttcctcttttaaattctctctctacagaaataaagttatataactcaatcttcttgtgacttcatagttgttggtgattattactactctaacaccaagtgtgaataaatagagattaaagccaaagacaagcaactgatcgaacctcgttatattgctgtaatttaatttttattttgtatattttatattttattttcttaatttgttggttcatgttattgcactagttattatttttttgttctgattgttttcgaggtaattaaaacacactttctctgttgcagcaagaatatatatatataaaaatatatatatatatatatttatatatacatattcgccccatgatcaattgaaataattatatataagtgtgataacacaaatgtgaatttagatatatatacttttatgaattaagatttaaagtcaatttatttgacaaatttaaagtttgtacatgtatacaatatatatgtataatggcataatattatgggtgcagccataatagaatatagagaccgtaatttttttattgttatatattcatctaaactacttacttatagtaagcaagcatcatataaacacagtatatactataaatcgattcaattcaatgagaatcgactaatctaattataatcgatcgccaaatattaaaaatttaattgtataa

SEQ ID NO: 191856 - DNA, 2519 bp, Cannabis indica
gttatttttcttgtttttataggacctattggagactgagaatcttaatacttggttttttccctctgccttcaaatttcatgtagtgtcactcctggttcaaaccatgacttccttagctctgtattccgggtggtgctttcatctccagtggtatgaatttaactagcttgattgcaagggatacaatattatatgtatacctatttatgcataattttcacgcccctctctctcattttagtaatcagctttttgttcagacttcatatcagtagaatccatttatgatgtttgggcttacaaattatttccttaattttttctactctgtttgtgagtattacattaatatgggaagatataggaaatgtttattatggttttaaaattttgattggctttttcttgttctttctgtaatttgacaagatgagctcaaggaaaccttcattcttttggttttgtaatcttgttatgaggtggccagaaatggaggatgaaactatttaggttgaggtttttacttttgtaactaagggaaatggaatcatatccttcttgattgccttttcagattttgtttagctatttttgaattatgggatatgcagatgcctgatatgatcgttgactatgatatgtcacgaaggagattctctgttgtacagcaagaggaagtgaagggtgtttcctgtgaagtagatacaaaagaaatttttgacttcaaacatgatggggaagaaatatctcagtacagtgaatcacagacgtggaaggaattttctaatgcatactgctgtgaaacaaaggaagttgtttcctttgatggcacaagaattcctttgactattttgtactctcgagcagcctggcagaagggccagtcccctggtcttttacaaggatatggagcatatggagaagttttagataaaagctggtgtacaaatcgcttgagtttgctcgatcgaggttgggtggtggcatttgctgatgtccggtaatttttattattgagtcgccatagattgattgataataagtttactgataggagtgtaccaaattcctaaaacatatgataataattatgtgtttgtttaattgttcaaaaaaaaaaaattgtgtttaaaaacagcagtgattgctttggttcttagttattgtaattggtatgcttctgcacttgactgtttatctaatgacttttagagaaaaagtacaagttatttgattggccaccatcatgttagatgctatattagtggctatgttctcaaccgaaacagtaattttgtagtgtcactttggataattgtacttgtgatatttaaaaatgactggtttatattggcagcggtggtggcgggaatagttcgtggcataaatctggcagtggtctgtgtaaaaaaaactcaatatacgattttgtttcgtgtgcaaacttccttgttaacgaggaatatgtgaataagcatcagcttggtgctattggatatagtgcagggggtcttctattgggagcagctataaatatgttcccgaaactgtttcgtgctgcaattttgaaggttgatttgaactctctaaagaataacatccctttaatgatattctcaacttctattgatgatcgcttaacatagattccatttcttgatattgtgaattatgtcaggttccatttcttgatatatgcaacactctgctagatgataatttgcctcttacaattctggattatgaagaatttggtaatcctcagatacagtcgcagttcgagtatattcaaagttactcgccctatgataacatttcgcgtggaagttgttatccttcaatgctcgttacagcttcccttcacgactctaggtaaattccttttgtatattctgtcatttataaattaaattatagaatgaagaatgctttcaaatacttgttgcatattcatttaatttttagtcatatttattaaaactgatggaaataagtaagagaagagaaaacaataactctttctccttcctttccaaaaacatatcacattacaaattttcttcttgttatagattagtaacaggcttgttaatttgttcataattacctctttatcattgtaattttcagggttggagtttgggaagctgctaaatgggtggcgaaagttcgagatagtacatgttctacttgttctgatttggttatattgaagacaaatatgagtgggggacattttggtgagggtggccgatatgctcaatgtgaggaatctgcttatgagtattcttttctgttaaaagcaatgcaggtagtgaaccatgatgaataaattaattattgatttcgaggataataataataataataactattatcattcgagtacacaggatattttgctcttaaattgtgattttttcttttgggtagagttttgttccttgaatttctttttaccaaagttttctcaaactaaacaagtctttgtaaatatttctctttagttacattct

SEQ ID NO: 191857 - DNA, 1977 bp, Cannabis indica
ttaaatcatttagttgacaattttataagtgtctacattatcttgtattcataatactaaaagcttatagaacgagatatgagaatgatatccatttttaatagccaagatataaagataatgaaagcaaaattgtctacttttagttttctttttaaatacaaagtgtaatatataaattctaaaacatagatcaaaattgtcattttatgaactattacatttatttattatcaaatttatattattaaaagtaaactatacggtaatagtagttgttttgagattatatatattagaagatatttttttgtgcacttttttttatacaaaaaaattatataatgacttaactaagtctttttggatcaagagtatcaacaagaaaatgcctcccggagaagatatgggaggtccacatactcccggaggacagaaccatggcaaagcacctccaggagataccagaccccatttgaatagtcacctcgcatttaatgccgcatgggaggagacgtattgaaactgccataagcattaagtctgacggcgtaacccctctggtgcagctattacgctatgattaataagcctagtgacgactactttatgagggatcacatcagtcaagaagggataaaagattatatccacctaacccctaagatacttagggtataggctatgcatttctcattttcgtatctgctgggaatatgtgcccctactgaaactacacagaaagacaagtagttcggctctaggggtcaccccaaaatatattttttaagattatacataaaaaaaaatactttaaaaattatttgatataattttattgtctaattaatatttatgtatataatttaaaacttttataaacaagcgaagtataatttatttactaattacaattaatcaatactttctactgatgcccatacaaaaataataataataataaaatacttactacttatgatttaattgaataagaaaacaaattaatcatattaccgtgtttcttattgacaagctgttttcattattgtttttttaaaaaataaaatagtcacttttgtcttcactcacatcccaatgagatattctaagcaatatggttttgctcgcccaaaactactactaaaacagtgtctagttttggctgccagctttatcccaataccaaagtccaactcactcacaaacctcatctctttctctctatataaagaccataactataagtacttttaactcagatactcaacaaaacgaacaaaataattctattcccatttttgccaaagaactttcccatttctacaaagaaatatttcaagaaagcaatatgagttcaacaagcagagcctggattgcagcagcaagtattggagtagttgaagctttgaaagaccaaggtgtttgcagatggaattctgctttgagatcaatacaacaccacacaaaaaccaatctcagatcctattctcaagccaaaaagatcccagcttcgcagtatgtgtctaataatttcagggatgacaagttgaagcaatctgaggaatcacttagaacagtcatgtatttgagctgttggggtcccaacaattgaggctcttttctgctctttttattttataggctttgtgtagcttattgattcaatttttaactaaatagatatatggctttaattagatcacttgcttaattcactattgaagtttactgatcttgacttggaaaccaggctatggaatatactaaagttagcaagacagtggagcctgataaaatgtgacatacaacttatccaataattccataacaaataggcttacatcttaaacgaggtgtcaaatgaaattatctaagtaattaagcaacaacaaactgatgtaaaactaaagataggcagctagcagggccaagttcaacaaaaactaatgaaaatgtacccaaaaaaaaaaaaaa

SEQ ID NO: 191858 - DNA, 1694 bp, Cannabis indica
tctctctatgtatatatatatatggatgtatgtatgataagcacaatttggcgatttctatattgtgatttgtgtttatgaaatgggctatcattatttttttcttgttcttggaatattttttgttgcttctctctcttgattgtaatatttccaggtagcctggtgatagtattcttgaaaagatatcctcaaactcaaatttgttgattatattgctatcttttgtattactatgggtagttcatgctgacatactaacatgtatgtgctcagttaggatattagatattttagctccgtaatctcattggtgtgcactgaaaattccataccttgatgtgcatttattttgattaatagtggcaattaccaattgaaattttgattagaatcgggagctcccagctcaagaaaaccaataaaacagtagccaaatagtagaaaattgctattggaacagagaaacaaggttacaaactatgggagcccttaggcccctctgatgcaaagagtcatactcgattcattgcataccccactaactctttacccacctctatatatactgtccaacaaaccctcaaaattactctcattacaatgagtcacacactcttttatttactgtattctaccacaccccactaataatgggatcgaacaaatttgttttcatttcttgaaacaagagtgacactaaattccaaaacaccttttgtggtcattgcttgagagttagatggttgttctagatgaatagtttaagtcattactaaatcatgggcgatttgaataaattgaaaccgaaataaaatatagacaacaatggtgcttcaatacttttattagcatcgtaattaaagaatatttttattactttgtgaaatgcaggggctgaagtggctgttctttgcatcacaaaatctggggaagttttaaattaccaggcattcacaaatgaaaagggactgtacacagtggcagagacaatgcccgagagcgatcgctgggatgcgtgcctggctcgacctatcagcagcttccatgagcactgcactcatcttggtgaaggcagctcaggagtaaagttcagttattctcatccatcaggttactctcaccctgtcaggactttcgtatatcgacctccaagtgtccccacatactgtatttgaaatccttagactccttccttgtccttgtgtatacatatagtcaaaatatgagcttgttttaggctgagtagtgaaaaaaaaaataagatttggcatatatctataacatctcatgcatctattgtttgttttaagcttgagacttagcactctcttttaatcatagtatatatacacagtataactttgataaattaatattcagttaattaataatcttgatcaaattaacactcgaaatgccattcatttatacagggtttgactgtatattaagcacatatactagattgaagatactgtattatgttgcttaaacaacctaatttgttccattccaaacatatgtatatatatatatatatatatatatatttacttttttttctaaaccaatattgacaacttaaagagaaagaaagaaagaaagtagatagttagatacattagacatacatgcatgtaattaactgttgtgtccaggtcacgtcacattctctcttatctcttcactac

SEQ ID NO: 191859 - DNA, 3957 bp, Cannabis indica
gatctaaaacaaaacaaaaaagagtaatctcataaagtagagccaggcagaatcagcagagcaatcctgccattagctccaagccatcaacgccgaagaagccacgaaagcatgaccaccaccctctctatgatcgagaggaccccggacccatgcaacaccagataccaaattccttaagagcaaaaacactcatcactgcaccaattgccccaaagccctttgccctcccaacaactgtgaacctcaccacacaagagaaccaaagttgccatccaagctaccccatgttgtgaaacaagaaaagtccgagcttctccaccacaaccacccaccgagaagcccaaaacagcccaccctcgacgagattcacaaaggaagagaaccctcccaagtgagatccacatagaagctcgagccccaccaccacatccacatcgacatcccaggagtccaagcaacacaccctcaacgagatccactaagaaatagagccccacacaatctaggagcaccaccaccctatcgaaggatggcgtgccgacaacaccccatgcatgaacataaaccctataaaatttaggagaggcaagaatttcatcatcgttgatggtattttacattccattccaaagtacatagcagctcattatgattaatgatgaattgaatatggtggttgattaatgacaccataatcattatcatcattccttttcactttttccaaactagcaggggttgtggttgcataagtaatactaatgagaggccctaagtagcccttttcaagttatttcaattccattaagcaaaaaagttgtttctcttcctagaaggaaaagtaaacaaaaagcttttggactcttaagagtactaatggtaaaaaaaaatgcatcaaagtgtgattcattaacttttatgcaaatttgtttgtttgttcattttaccttttcgaatgaagctttagatatccttttggcttttgattattagttaagacttaagtagtcagatgtgactttgttaagatttttcatgttattaaactcaattaatatatacttagtgggtaatccaccgccggccgacaaaaaatcaagcgagccgttcccctaactctctagtagtagacaataatataggctttagttaaagatgaaagtagtaataataataataatacttagattctaacaagcctttatttttttttctcctaatctttctaatgatttagtaacatgaccgaccaagtgggcagtaaagagatcaattataatatttgtattaattaatcactactatattggtcgtgcctctaaagccaaagtaagactttattaatagagtttttagaccaaaaaggtcctaattgtgaggacacactcttgcaaaagatactgattgtgataacaagacaagttgtagattgtttatatgtatagtattagttaattaggatttttgcttctgaagtttgacatgtactaaatcgtgtttcttgaactttttatgctgttaaaaattcttcctgaactattaagatcgttggatttaagaattttcgtccaattttaataacatatgcctaatgtggatgaaagttcatgggacacgaatcacgattcggtatgtgtcaaatttttggggtagtaggtcacgatttgatacatatcaaagtttgagaggcacaatttgatacatggacgatcactacgttagtaaaattgaatgaaattggacagaagttctcgaattcaatattcttaatagtttaaggggaatttaaacggtttgaaaatacatgtaaaagttgagagctaacaaattctaattagcttaaaatatatcttggggtcatcaatgatttttggggtttaattgttgcaaatagtaatagtgcctatttaaattaaaattgtagtcatttttactaaatttgtttatttttttggggatttagttgtaaaaaatatttgtagattttttttgatatataattatcaaattaaaataaatatatttaattttttaactgtgctttttattaatggggctgtaccatatgatgttagtagtagtacatacacaacaattattatcactattcattttgttgatgatgatcttaacaccaactatttaattttattatttatgattaaataactttgaattgaatagtgaatacaaacaaattaaatgtttcacttgttatgtgttgactcgatctattcatttttcctttttaatattcgatgctttagtgttatttatgtaaatagttagatccactaattcttgacaatatattattttacctttattgaattggcattagaatgaagatggtatattaaagtacaagtacttgatgctatgcaccatggctttcattaagatgactaaagtatttatatagttaatttgtttatgtatagtaataatgattaccatttcattcaaactccaaattgagtattactatctttaaacaagttaatcacttttaacttttgttttactttttaattattttgggttaaaatatatgtatgtgaagtcgattgagatgacattaaactgaaatagcaatgataaattaaaggactactttttgtgttcacatctttattattattatgcctatgaccccccctttttttttaagcaactttataataacactactactcttcaacgtggtagtgaaatttgtattttgcaaaaatttggcatatggagaaataactgatcttgtatatatacacatcaccaaaaataataataaaaaaaatatatatatattttttttaaaaatgattgattgatttgccaagcacaaggccaaattaagcttgtgcctgtctatatcttattttcatgtgttttctaataagaattcttatctcttgatccatcatgttcatgagcacaaacgaaccctatccttgaatttgaaatggcttcaccatgattgatttgctcttgacataccccaaaaacttgtaacatccaataataccaaccattactaaatagctccctttagtcagatcgccctccactatatacacatgttacaatcgaacactattgcaggtttcgattgaaactcacaactcgagtcacgtaattgtttaatcgggttagtcagtaccctataaacaactgccaagtagcagttgttgtagccttgtagggtcttgactaatttggtgcaaccacatgactcgggttagaaattttatttgggactaatgatttttttttttaataagttatatttaaatagtagagaaaataatagaccatcatcctagtccaattaaagtaacagtctcttataattaatttggaatgtaatatagttgtaagttgaagaaaataaaataagggaaagaatatatactttgtaaatttataagaacaatttccatctacaattacagtgttattagactttaggaattttggagatggatggtgactgtcaccaattattaccatttgatcttttcccatctttctggtgatggtgacttgtttcatcatctatatatcttttcaacttatatatatatttatatttatacttatattttggtgttatcccacaacactttagcacttgagattttatgaaattgatagcttaattaagaccttcatgtatgaaattgaccatatataatttttaaatatttttccctttcatatattaataatcttaattaattaatagctgagttgtaagatcaagcaagttatataccaattcaaattgtttgtgtcaaggataattaaatttcaagctttttattaaactcggtgttaaaaatttgtgcttttttcttttcttaggatcgatatataaaaaataagcggatcattccatatattattttttaattttttaattttttttttaatttttacggtttaagttgtgat

SEQ ID NO: 191860 - DNA, 3879 bp, Cannabis indica
ccttaaaggactcaggctttatgagttacttgacattaaaagcactgatatgtcattctgtagtttgttaatcatatactgtcaatacggtcttaagtttataactagttcctgcaactggttcaggttcacggtaaagactagttaaattcattgatgaaaactgaaagctaaaacatatgatttgtaacttcagcatccacagtaaataaactctcattggaaagcagttcttagagggaacatacctgcaatagtatatcaccaagcctttctctagaaatccctgtaccaagaattgagccgaggaagtcaccatgagaataagattgaaacccaaagtttcctgtgatactggaaatacaaaaagaacataaataagcagagatggacagtatttaaataagaaactaccaaagcctaaaattttgtaattattacttaacctcaatgctgccactatgtctggatcacttgttagtagttctggctgtccaatggaaatccggcagcgttcagcctagagaatttgacatattgatgaatatatggatttcagattcaaacaggtaagtgctccaaggtcattcaaactaagctacaagagaagaaaagaaaaaaaaaacccttttgataaactaagcaaaccaaccagttctagcaaatagcaattgcaattatagacataacagttaaaaatattgcaagattgagtagaatctggtaaaattaaaataacctgtggatatccaccctgagcaattgcttccacatcagcaagtttttctaatgctagcattgactccttcatcactggaggggtgagaaaatttgtatggacaacttctcttcttgttgatgctcgtctagccttaagtagaaagagagaaattgttcaaatttctagatttagctaacatatcagcagcatctcattgactttttcaggttgttttacataatttataagaattttttcacaaccaagatctcactgttaataactagcaaccaatattgtcaaagatgcgataaatttgcataaaaaaaataataattataaagctttacactgtgaaaagaaacagagtctttaactacatcattctatgatagccgaaaaaaaagaccatagaaaataaagaataataccatctctagaatatgcttcacttcttcaacagtgtttttatctgccactccattgagtaaaacatcaacgtcgttcccctttatagcttgtggtatgtggcatattcctgaagctatatcacaaatggttgacttttaacttgtgaacaattcaaaaaccagttctccaattaatatacaataaggtatctaaagccaaatgctgattctaatgtgtgtaaactaaaacggaaaggtataacacaaacgagttcttaaatacaaattccaaaacttggataaaacttgttgacttgattttccaagtgtgtgctttgagaagcttatttaaagttgagcagccttctatacatatatatagataattcatatattgtcaagaccaggctacacaattaagggtgcaaattctcctgcgaattggccactctctcgttttctttatcaaccttgatactgttatattacgaatatataaatatcaagtaaaatgagtatgtatgtaatcatgtacctgaggaagccaaaggtgtagggagaggaggagagaagagggtgcaataggaagatacattctgattcaagtgaagggaaggagtgagtttgaaagcatgtgaagctcttcttagcaaggtcggtaatttgaagctattggcagccatggctgaagggccgttgctcgctcaatcgcccctgggattagtttgggttggaaatgcccgtgtccgcggtgttcttgcctttttgttcgactcattcagtaaaacgacattctgttattaaaacgacacacattaagtaaacgagacagtaaacttaaaaacgataacaaacgaccgcgcaacgcagaaaacgacaatataacttacaaacaagaagagcaacgccctaggtgaaaaagcgacaatactttatagagaagaagactaaacgacaccacttgtagaaacgacaatatatagggggaacgacaataattacaaaacacgatagagattgttttttttcttttcttttttgattaaacaataatggccaaaaaaataataataataaataataaaaaaattaatccttcttggtaacactctttaaggtaacaaaaaaataataatgtaacactcttcttaatgtgacaaaattccgtgacattttttaaaaattatattaaaaataagaagttgatggtaactttttggtgaaaatatggttaaataactggaatcaagtacagaaataacagtcaaactagaactttcattcatttcatattcaataatccaaactctattgatttgattgatcacattgtcatgagctagtttccaatcaaaatggaacaacaactgtgtgccagaggacgattaatatcagctaaggcaatcagtatgccaggacacatcttttaacaccaaatggaatgagcccaaaatcattgcccataattgaaatcagtacaactctcatgaaacctctcccatagtgagtaccactcttactctcctatgctttttttttctgataatgactctcctatgtttttttacttacaaaaaaatctacctttatatatttatttcaataagaaaaaggtatattccttcttttttgtaaaacgtaaatacacatattattgcaagaagaagtaaatattgatgtttatgtaaaagaaaaagattataagtatttttgtaaaaaaaaaacctattgacaaataaggcccaaattcaagaaagtggcgaccaataagcaacgtctatttccaaattcaaattcaaatctcttttctccctcctctcctttcctctcctctgactctgatcttgatctgagcctgagccatggctaccacgacgaactcatctctcatcaccccaaccaaaaccccatcagagaaatcccaatcggcaaggcaccacaaacggaaccataccatgctcgaatcatcatcgttgtccaagtcccggttcgaggcctacaatcgccttcaggccgctgccgttgctttcggcgagaagttgcctattccggagattgtcgccctcggtggacagtctgatggaaagagctcccttcttgaagccctactcggcttccggttcaatgttcgcgaggtcgagatgggcactcgtcgccccctcattctccagatggttcacgatcccacagctctcgagcctcgctgccgcttccaggtactactctttgtttgaagaaatgtagcaatgattcggtgaggttggttgctcctgtttcaaagcaatgtcttattgctttattggtcattacaaaaatagttatttttatagtttttgggatgttctagggttttaatatagttttagggatttcgacaattgagtacctcgatcaaacaaaaagaaaatttgagtttgttgctgtaattcctctataactgaaaacggcctttttcttcatgggttctagaatgacttgtttttaaaatgaacaggcttcaactgtttgtgtgcaaataaattctgtttagtatgattcaagtaattgagatgttagactaatcacacgagatgttggcctgaattattataaacaggatgaggactctgaagaatatggaagtcctgttgtgttggcctctgcaattgcagatatcataaagtctcggactgatgccattttgaagaaaaccaaaactgctgtttctcccaaaccaattgtgaatgagagctgaatatgcactattgt

SEQ ID NO: 191861 - DNA, 1147 bp, Cannabis indica
agaatcctttttgtttaattaatcacttaatatgtttttatttttcccataatctgaaaaaaaaaaaaacaattttagtttaattttaacagataaaatattaaagaattttcctgtgataatggcattttagttaagtaacttattaaaagacaaaacaaaatatcttctttttttttttttttttttgcaaaggaagttagtaaatttctagaatttggattataggtgtaggtaggaaattaatttaggattgtgtgttgcttattataataagtaagaatgaatgacatggtcaaatttctatttgaagaaaacaagtctcatctcctcaaccctcaacctcaagtagcatgaaatagcccaaaagccaagagatgactataatttcagagacttaggcaccacgtgtaagaaatcaaatcccacaaaacacatgaaaccaggtgaccatgggctcttgttttttctccggaaccccgaaaccaatgcctcaacatcatccttaatctctgctcaccattcataacaaaccacatatataaatatataaacactgttcaatacaatattgtgaaaaaacattgttacaatggctcagcttgatcgctcattattacgacgtggtgaaactactactcctaaaacgccttgtaaggcaactatggaacagttgctccgaggtataaaattactaataaataattataatcaatgagacaattcattattttattccaacgtttagagtttaaatttgttgatgcagatggtgatgggtcttggccgtggttaccatcttcatcctcatcctcatcctcatcctcatcatgctcttcgtcttcaattgcaaggaatcatgatctagaagaagatcatgggcaccatcaaaagaagtcagttctgtctaaggtgaaagagaaggctaggaaacttagacactctctaagtgctaagaagaggcataatgaggatggcaacaccacaccctcatggggtgttagcctagaagactatgtagatgaagaagaagaagaagaagaagatgcagaatatcttggtgccccaagtaatataatctaaactttccctcattatctttatccagcttacatgaatttccctccaatttttgcaagaaagacga

SEQ ID NO: 191862 - DNA, 2083 bp, Cannabis indica
ttttttttttttttttcaagtaacatcgctaataaaagtgagtgtttaaaactgtctactatagttgaatattcttgaactatcgtttagtattcctgataatttaaaacaactacaaaattgaaacgagatgcttttaaaaaaaataggcaatggttttacagcgtcggctatactgtaaccgatggtcacaaatttggacacgcagtccagtaatgctagttcttttcaggagtcatttcataatttctcaagcaatgccaatgccaatattgaagagatgtaagtttattatgcttctccaaaaatggtaaaatgaccttagctgtatccagactcagcagccacgaatatctcacaccaaatgagcgaatttgagcttccaacaacacttatcttggaaaaaagtatgttcacatggataatgacacaagtttgcaaattcaaaatattggtcaatccacttttctttctccctttcattcttagactcttgtgttaagtgtttcccaattttttcaagtgaatggtatttctttttgaatttcacccatttcactatgttgtcaaggatcaagttaccttgaagattttgcatattgggaaacttgacaaaggtcccttcaagtttgactttaattaactcaacattcttacttctcaccaagcagccatcctctagctaatatatcacttttgtgtctaatatgcaaaaataatattgtaatttttgtattttgtctgaacaaaataattctttttctttatggcacaaaagatttgggcatccccatcttgtaatatcaaaattaataataaaaatattaattcttatgcccaattatgtgttgcttattgttttggggagtatcataaatttctataggtattatatattagttttcttgatgtcttctctaagcacatttggatttatatgttgagaactaaaaatgagactctctcttcataaagtatcttgtcccgtactcatgaacaaaatagagtgattgagcgcaaacacatacatatagtggaaagtgggttgaatctcttagctcaggctaacatgcttttaaaattttggaatgaagcttacatgtctattgtctctttcatcaatagaatccttcccctcagctacacaatgtctcatccttaaaactcttattcaatgtcaaaccaaattactccatgctcaaggtgtttgggtgtttgtgttacccaaatttaagaccttataatataatcaaacttcaatacaggtctcgcacatttattgggtatagtctaatgaggtaaatttggaattcgaaagcctaaagttctaatggtttctcttacatcaaaagtgatttaaagcacaatacatggtgatggtatatatggatcactgaaagtgggctttgaaaaggtcatttgggccaagttttaaaaacacattttgggctttcgaaactaaaacatttgggccaaacaaacatttagtctgtgtgacataaatacatgtatggagaaattgttgtattatggtaaccaatgacatttttaatgagtgttattgcaaaaatacagatttaaatatcttcgaacttgtaattctatttgttcattaatttttactcaaaatatgcctaggataatcatgtatggagacaagaggtaattttcgaatatatattgtgtaatttactaatttttatgcactcaaatattacacacagtaactttatcatttttgaaccaatcatatttttttttaaaaaaaaacagagtaatatttaactacatattttgagtaaatatgattaattatgttgtgttgtgtagtggtagagaaaacaacatatgattcgttgtactactcagagattacacatttcgtccatttttaaaaatactattttttttaataataataaatgaaatattcccattaaaaatgattggagatagcaaaacttttggatttttaggaattgtttcactttttttttcttcatttacacccttatgtgcaaaaaaatagagttgtaaaattgtaataagcaaactttagggagtaaagtgtaactatttttat

SEQ ID NO: 191863 - DNA, 3806 bp, Cannabis indica
aaaaaaaaaacaaaaaaaatcaagaactcttctccccgtcaataaatatttgtacaataattttctactttcatctaatcctagttatttgacttattattgcaatatgaattgctcttgtggagataccattgacagcatgattctataacatttgttaaatatgctacttgcttaacgaccagcttccacatagtacaaagatcacatagtataaacagtaccataatgttggtagaaagaagatttatggatttcctcatattccgtgttaactaaatatatatatatatgccatctgatgctaattgcactaataacttgtgtaccattgatgattatattgccatttttaattattttcttatttttacaattgcagaatcgaagtagaatcgttacggcaaacaaaaatcagcgttgttgtttgtgcaccaaatcattccaattactgaaccaagcatcttcaaaccctaactgacatacttcgaattcctcattaatctcacattcaaaattggtactctccagcgagccaaactttttgtctctttgtcttcgcagtcaaggagccattttcagatgacaacaaagaaggctctagagaacggcgctttggggttattcggattggttccctagtcaccgatccaacaaggtgaggaaaattgagcttagccttggctcctcgaatctcgaaagccgctttgtcataagccaaagccgcatcctctggcatctcatatgttcccagccaaatcctcttccccttctgttttgggtccctaatctccgcagcatacttcccccaaggtctcctcctcactcccttaaagctaactttattccccttattcttcggttgcggcggattcgacaaacgcgccaccgcaatcggctggtcatcactgctctccaattcagagaaatcttttgttgaagagccctcgtcagagggactccatccatcgataactgccatgtcttctgtggtgtagtcctccactttaatatgcagattatcagcatcagcaaagaaattgttgctaaacttcaaagtatctggagagtcaatacgtgtgatgagatcttcatcacaaaggaggtgtatccttatagcctccagaagatttaaatctacagaatctgagctactaatcagtatagatccagacatcctatatatattgaatatttgtagtgttctctagaagagctttcttttttcttttttgattattgagagatgaagtgctttctaataatgaaggtactacttcgagtatatatgtttttggttgtgtttgtgattgtgactgtacaattataagaagaaatggttatagatgtttaatagaggaatctggaaagagaaacacttttataatgtttgattgcacgatgtcagtcatgtttcgagaaagctgcacgtgtgaacttttttttattctactatttttagtcacgtgtcaaaacggttgaattgacatttccctttattttaataccttgttatttgctaattttctattataaataactatatagagaattattaaaaaataatattggttcttagtacttttttggttttatatgagtgtaataattttaaaaaatatcactaactaattgtaagacgtgaaagggcattagtggtgcctagcactattagtccatttaagtatcgggtctcatataatttaatataatagcttttagggagtatcgctagcaaatcgcaacgcgacatgtcgcaaaggtgttaggcaccactagtgcctaattacaatgctcgacattattggtgtccaataacaatcctcgtgtatataatataaagagatagaagataatagtatataaaagtactattgattttaaaaaatattttatcatatattcatagtgtcgtggcaattttaaaattggatttatactaaatagattgttattttaaagaacagccttcaattttgaggtctcaatctatatccgatcaatgaattcaacatcattttttctcgcgtaaatacctttttgtaccatgtgctttgtaaaagttactaattggattctttattttgttaaatgacaaaatggatcctgtatttttcaaaataatacaatcttgaactgattttttatcaaaataaaatttaataataatccgatctaaaagtgttacaacaaaaatatttaaattttctgtatctcttcgtatattaggaattgtcttcaagttggttatattaaaaaaaaagttgttaaaaattaaactcagggtcctattttgactattttggaaaatacaagatccattttgtcatttaacaaaacagaaaatccaatcggtaacttttgcaaaatacatgttccaaaatagtattttctctttttttctctcataaaacatcaacatcatttaaactaaaacatttttttttcattctatctaatatttgttgagtttttattaatttctgaactttttttgttgtcataaaaattttcatgagctaaatatcttcctaaatttaattacattatgctattttttttaaataatttgcttacataatcattcttcatgtatatagttacagttggaggatctatttaataattatttactactcgaaaactaatttattagtattaaatatacaaccattatataacgtgacggtaacttctctagcacaacgacgaacgcgacggttacttgtctgacgatccgactcacgcctcttgctccaccaatcgtcgcgctgaccgtaaaaaagagggagatcttaggctatgttaaatctttggtaagatggagggagagaataatggactagaataattaggaaggagaatcaagaaagtgaggatctttatgttgtttggatatgaagtgtgtggaagttgatcctctaaaccaacttattatccaactcacctaaaccaactaacttaactaactttctgttatgttagttagttagttggtgctatccttgtttgagttgggcctatatatatgtctagtcttttcactttaagaaagaggtcaagatagagaataaaagagaggatgagagagagttgcttaggatttctaagctgtgagttctattcttgaagagggtccagaacaagggatgtactcgggttggtagagagaaaactgtgactgttttctctggtgtgtttcgagtaccacagggctgagattgctctgaatcttgtaattgtatcgatactctcttattccacatattaatgaagaattggttatgtttctcagctggagtatggccagagatcatgttgatctctaggaccggaaccagaataaattcttgtgttgttctttgtttgatttctggttttgattcattatgttgttcattagtttgtgttcattattgctgtcaaagttgtgagtttattgtaggttttatgattgaattcttgatgttattgttgctggaattacaacaaaattagtgcttaggttcaagatccaattgaggaagtcaagaatcaagattcaatcaagactcatctacaaccagtcatgacaggatcagcaagatttgaacttgaaaagttcaatcggacaggggactttggcctatagaaggaaagtttgaagggaattcttgttcatcaaaaagttgccaaggcattgaaacccaatgaagaactcactgacaagttgcagaaggaagaacttgaagatatggaggaattggcatattacactataaaatgtacttgtgcaatacagtaagaaggaaggttcagaatatgaa

SEQ ID NO: 191864 - DNA, 2443 bp, Cannabis indica
tatatatatatatatatggaaagttttataatagtgacttttgttgaaactcaacacatacttagaacattctaaaattgttgagataaattaagtgttctctagcaataaggttttagaaagaaaaaaaaaaagcctaaagaaattgcacagtgatctctagcaaacttttagttggtcaccaccgaccaacaccatctatatctatggaccgtaggtctgttatggtgtgtatatccaaaggaagcaagtcacaagtcttaggtgtgttgtgtagtagtgaatgtgttctaagtattctaaagagtttttaaaaagaaagtgtccccaaagtgtgagtgttgtaaaggtgtctagtatgaaaataaaagtgtgagtacttggtgtattgtggtatagtaaagagtattcaaggcttagtatatttacttttctgataataaattaattacgttttcacatgttgtagtgtgcagcaaatggtatcaaagccggatcaggttcattctaaatcaatgctttgttgagtttcttaaagtaatcgtgtgtggtttaatgttacaaagcttgcatgatgggtgaccttcaagagattagtagcattaaaaaacttaacaattaaaattgcagtacatggtcaatgtaaatctccactgccaagacttatgggagatctttggtaaaaaggaggaaggtttagaatgctcgagtataagcccatctcaacacgtatggaagctaagatgaaattatgtgcttatgttgggaaggacttgcaatatggagcaatgtatcggtaatggatggggagtctaatctaccttacattgacttgactagatatttcttacgcagtcaaaatagtaagcgaatatatgcaacatccaaagaagccacttttggaagcggttcgatgaatgttgaggtacgtcgaagataccattagctatgttcttttctaagaaaaaggtggcgaggttaagatcattggcaagtgtgatgttgattatgcttgagatcatgatatacgatgatcaactacaaagtatgtattcaaatttggatctagagtagtatcttggtatatcaaaagacaaccaacaatgtcattgtcaatcacaaaagtagagtatagagtagcgacaatggctaaagaaaggacatggttaatgcaactaatgaaggatatacaccactttatagattatgtggtgcctgttcattgtggtaatcagtctgctatttgtttggcagaaaatttagtgtttcatgcacgaacgaagcatgtggaggtgcattatcatttttgaagagaaaaattacttcaagaagatctagagatgcaccaaataaagtgtaagatcaagtaacagacttatttactaaaaggctcaacacaataagatttcagaaacttaaagaacaactaaatatgaaaactcggtgttgagggtgagtgttgaaagtcaacaccctactttcaacattctagaaatagaaatataatattgagataaaataagtgctctacaacaattgagctttagactaaaagcccaatgaaattgctagaaatttctaacaaacttttagttggtcaccaccaacaaacaccatctatatatatatggaccttaggtcctttgtggtgtgtgcaaccgaaggaagcaagtcacaattgctagatgtgttctacattgtgtgtgcactcgggaacgtgctctaagtattccaaagtgtgtctaaaaataaagtgttgcaaaagtgtgagtgcttcatgtattgtggtatagtaaaaagtgttcaagtcttgatataattactttttcgataatgaagtaataaacaattagtggatttgctccctaacttttgtcactagtattagtttaccccctcaattttgacatggtattagtttgccccctatatggcaaagttagtattgtttaaccccaactttaacattgttaaatttaaacacaaattaatattttttatgaacataataatctttactatagttattttcttattcaatttgtaacctaaaaaaattaagattatacagtaattaacaagactatgttttatatatatatatttttaagataataatacataatttttataaaaaaaaaaatatttaataataatgtttgacaaatttaaaacatgtaaaatactattattataacagttttatattttattaatattaatttagatgacaattaaatattattatataatgtaataaatattactatttatatattattatataatgcactttcatattttatttttgaaagaactattcgggttttttttaacaatgcaaccttttttttttaacaagaacaatatactctttttattagtataatctcaaattatttttctttgttatagatttaaaaaagagtgaatatattttcac

SEQ ID NO: 191865 - DNA, 1104 bp, Cannabis indica
gtgattagaagtagctagcacagaatctatttaccttttgaatatggaaacatttctataaagaggagcatatagttttggatcattctttacaattggtgcattctcaatctgtaatgtcacagcctgcaattcgcgctcagttgcagaaggccatttcgggatctgcaatacataaaaatgaagaaaaataagcacaatttgaagcactatcttgttcaaacacaatgccaaagtcttttcatttacataccactgaatagtatgaggcctgactcttaaccaacaacttgttcatatcagacaccgaataaacatccaacaccggagtctcaggcttcttagtaatcttcggggctgtgttcgtggaagaggttttccccttttgtttaagctcggtatgcactggctcaggactttcctttttcactactaaagaggtgttggaattatcttgaggtggagaaccaacagaaaaactactatttgtggtgttgatctttccatgatcaacatcagttttgttatgtttttcgaaatccaaggattcttttggtgtagaaccagagattcttgtgtcattaagctgagttaagtaagtgtcatttgagtttgaagcattgtaaattgagctattattatgatcaataatcttatgattaggtaataaatctccattttctttactttcctctactaatggtaccttaacagaaggaaataaagatggaataaaaataccatatgggagttcaaagtactgaaaaatcaaaaccagtgaaaacataaccccaataatccaaatcaatctcctcgtttcagcttgacatttagtgaaaagtttctgacccattttcactctcaatcaccttaacatacctgaaaaaagagaaaatttcagtgacaatacctaaggcacttatatggggtttagattcagattatggagaaattgaagaactttaattcttttaaagaatactaatttaaaaggtgggtcaaacattggtattttaataaaacaacattcaaactaagaaaaaaaaaacagagtgaaatgaaatcaatgcatgatttgagtaagttgttgaccaaaaatggcag

SEQ ID NO: 191866 - DNA, 3362 bp, Cannabis indica
ttagacctagagtttcagatctttgggtcagttttgttagtcgttgagcattatttttgttatgttgtattttgtaaatgtttgaaaaatagatttgggatcccagagtttataaactttatgtatttgtataattagtaaagtttatgtttattataaaagtttttgttaaacacgattttgtagtaaaccttttgattagtaaaggttagaacagtaattaagaaaacacggtgatatgcttaaactagtaggtcgttacaatttggtattaaaatcgtcaagttgttctctgaagatcgtcaagatatgtacaatcatcatcagagacaagctcgactcacggttcaggaggaatcattgtcagtaactgagtataaaattaagttcgataagctcgctagattggcctcgggtattgtacccactgataccagtaaaaaataaaatacttggtatgacttaatggccatattaagaataatctaatgatcactagtggcgatactactacctatgctcagatggtagaaaaggatcttcgagtctagggtgttgtagagttcattcaagagccccaatggactcaaaatgtcagtggggtcactgctcctcctacttccaattttagtaggggtggtggtgattcattgtatgaccagaaaaggaaagcttcattgacatcaggtggttcaagttagagcaagaagtttcaagggaactaaggtcagggtggccctgaaggtcgttacactttttcggagtgtccttgttgtaagaaatatcatatgggagagtgtaacaatagagcatgcattcaatatggtctcatggggaattttaaaagggctatccccaattgaataaaaaagaaccaaagaaagaggcaaacccgctacaacttgggtgtttgccatcactcagttcgtcggtaaggctagctagtcaggtgtgataggtcaacttcttgttaacaaatctttttattatgtattatttgactctggaccaacaaattcctatgttgatgctagagtaattgataaactaggtaggccttatgatagttatgagttaggatttggaaccgtatttcctagcgaagaattagttatctccaaaaggtggattaagtctatgtcatttagagtggttgataagttaagtgctgatcatgttgagctagtcatagcgaactttgatatcattctcagagtggattttttgtctaagtatgcggccaatattgattacaagagaaaaatggtgactttttagcctgagggtgaagagccatttatctttgtaggatcaattccaggaacttgaatcccaattagctagatattgaaagctagaatcctattgtaagatggatgtataggattgctagaagttttaatagacactaatagacccaaaatagttgggcctaaggacatcagatgagtgaaagagtttctagatgtttttcttgaagaattacctgatatttaactgcagtgggagatactttattatatattgacttggcaccgcgagcggaaccagtttctaaggcaccacatttgaaggctttaatagaactcaaataattgaaattacaattttaggggatgtttgatcttagatttacctgacccagtgtattaccgtgaagagctccaattttatttgttaagaagcaagatgggatgctttgtatgtgtatttattacagagagttgccaatcatgttgcccatgatttagctaattatactttggtgcacaaaattagtacagtataaattgagattatacctccttctgctcgtcaagaaattttacttcatgcaccgaatcctatatagtgttattatttaatgcaagatttctgtttaaaaaaaaaagttcaataataaaaataataattattcataattaattatggcttgagatgatgagtaacgtaagtgtggatccttgctgctgattttgcatgagacgtggccttcctctgcagcggttatggtggagcagacgccactcctcgctcgtggactatatttaataaaatattgatttttctttctctctcttaataatcatgggaagaagagttatactctcaacttcatgttaacttctacattcgaaaacacaagatacaatatctttttttattttttttttacggcggtgttcgttatgcttacaacattatctctgtaaatttttgaaaaatttagaatagtttacagtaccaaaaatacgtttaaagttttttgaacactcgtgataaattgaaatatcaaaaactctatttttgatactaaaaactattcgaaaattttaaaaatttacaagggtaatactgtaactataaccaatgctgctatgaaaaaaattgaaaaaaaatatttcggcatataattttagacgtagagattaactaaaagattgtaataaaaggttgtaacatataaatgtttctagaattcatcgtatatatatatttatatattctgtttcgatatttttaacgacgaccatgacttctaatattggcaatagctataacagatgtttataagtctaaatgaacacattgagtgtttacttttgaattattcgacgtgattggtgtgcatggattatttattcagttacaaatttatactgaattttgaaacttttcatgagtgtggtggtagtgataccgtctgctatatataataatatatatatacatttattgtgtatagactaagcaatatgtcagtacagtttccaagttaaaaaaataactcacctcgtcaagattgccattcttatgaatgttttgatacttcagcagacaccagttaagttaattaggattttaaatttggtgtactgactactgaggtatgagttactcaaaaataggttggtcacagtcaaaaaaaagtgatctaactttatctccactaatagcaaaaataaaagaaagctataaactataatcactactccatgtcatacttcactttatgcgcacagatcaattttgcttcaaattaaaccatagcagtgtttgtttttgggcagagaattcatgagatttctacaataatatttaatttgagaaaattttacaaaaacaaaacatactattaaaatttaatattaatgtccatgtcggttcaaatagtttcactcgagccacgagttatgtataagtctggaaagagtttgtttgttttgttttgtgttgtttttttttttttaatttaatgttaattttaaatttttaaattatttttttttcaaaacaaaagaacatcctagttttgacattactcagaaagaaaatttggaagttagataaatgttgctggg

SEQ ID NO: 191867 - DNA, 1393 bp, Cannabis indica
tctgaactttgatggtcacatggcatcaaaagatctgaactttgagggtcacttggaatcaaaagatcatgattttacaacatttgaaggcccagaagatacagaaaatgctgttagtaagtgtgatgcccatgaaactattgctcctttggagaatggctgcctttcaagtgatgtggagatgcaacaggcaaatttgcagcttcatttagcatctattccagttactacagagaacagtcatttagcatctattccagttactacagagaacagtcatttatcatctattccagttactacagagaacatctctgcagataatggggtttcagcaccatcggctgttgttgagcatgataaacctattcctctagctccagagtgctcaaatggaaacaatagtgcagtgggcggtccaatcagggtggaagaaatacacaatggtgttgttatagatgaaagaactagacacaccggaacaaatgtacaattccctcaatctcctggagctagattggatgaaactgttgcatctcctagttgctcccaggtgaccacagaactggaggatcctggtcgtcagactttgtcaattgatgttgaaactcacaacatgggagaatcatgctctcttaacaatgcattgttaacaaatgttgtttgtccacccgagtcacccgggagaccagaggttgtgaatgttgaaggtcagacctctcaagagccaaaagaaacaaatactttgagtcattttactcatgatttcatggcatctaataattatcctggactccatgcctgcactcagaaaggtcctgatatgtcatcttttggaggtaaaattcagcctttcttcccaattaccatctgtgattgtttgtgaactgtaggaacatataaaggagaaaggaggagtttgcaatttatatgacttaattctgttttgcaggtaacgagagccattcaattgatcttatgagacaggagactggaaataattttactttgagtcattttactcatgatttcatggcatcgaataattttcctggacttcgtggctgcactcagaaagaacctgatatgtcatattttggaggtaaaattcagcctttccacccaattaccatctgtgattgtttgtaaactgtgggaacatataaaggagaaaggagtgtttgcaatccatattttgggattgtctatttaggtgcagtttatatgacttattctttcttgcaggtgaccagagccattcaattgatcatatgggacgggacacagtaaataaacatcttcctgaacctgcattatgtgaagagactccagttgaccgcagacagttgaatttagaaatgcataacgtggcatctcgtgatattcagctaga

SEQ ID NO: 191868 - DNA, 5562 bp, Cannabis indica
ccctttttgcacgactcccctttaaaggtttaggtaaccaaaatgccacctgatgttcgtttgccacatagatggtttctgagtttccacaagttctgagtatatggtgaacatggactggtaaactttgctcttcttgacattattttgatctctcccattgtcgccctttctcttgttattgtgcacatagttattggcggcagggggttggctaatgttggttttgtatgagtggtagtcgtagtagtggtgagtggagtcaattgtactgaggcaagaggtaggtttttggctatccttgcctcctcaatattgatgacttctgggctctcttcataaattttttggtggtggggacacttcttccttagaggctatcccatagtaaagaccaatgagttatgcctgcccccagtgccacgagtctcccactgtcatcaatattcttgaccttggtcgctttgatgttgaacttattattgtaggcttttagactctcacctggttgttgttttacattggccaaggaagagcattcaggtttttaagacttggcagcacgaaattcttttttttaaaatcacttgacagtttgtcccaagaagtgattgattgcttcttgaacttattgaaccatgtttttgctgatcctatcaaagtcactaagaacaacatgcacttcagatctgcacttacttggcttgtcctcattaatgtattgaaatcactaatgtggactcctgggttagtactttcgtcatactttgtcatagttggcatcttgaacccttagggttatggtaatgccaagatgtgtggagcaaaaggctcaggctcttcgtcagacttgtatcccccaactttcccgttggcgttcaacatctgctgaattttttattccagtgatgtgattcttaggtcgtttatcacgggagcaagaacattaggactggttggtggaagagcatttgcgttaaactgaggcgcatatactccttgttgtgtcagaatgtcatatggcgcctgataaggatactctctttgtccatgccccttgttcaagtggtctctcaaatcaggctatctcctttagtttagatggtcccagagattcgagtttgttgtgtcaagtggggggcatcaaggatgttcctcatagtacgaaggaggagcattgtcatgaacgctcactgatcgactctttgaatcagagcgataactatcctccatgaaactaactgccctttgttgtcgaggccctcgaggcacatgcccttgctagcaaagtgaaagtaggtggggggggggggggtttaccacaattaacccattttttaatatcaaatagcaacttatattaacatttagaataaaaaaagattttaaattcgcccaaacatcattgacgaaagagaattaaggtggcatttggttggaggtaataaaatggaatagaaataaaacaattttcattctattcctttgttttgttacattttaaagtactggaatatcattctaatggaatagtctttctactctcttggtagaatgactattccattttaaaatggaatgaaagactattctaacgcaagatttgaaaaaatttaataatttttttttatcaatttctttatacattttaaattttatattattcaatttctattctcattcccattctgatttatttttatcaatttctttatacattttaaattttattttattcaatttctattcctatccccattctaatttatttaaattcttatatttttattcatcctcaaatgtcacttaattagttagcatcatcattaaattcaataatttgaagatatatgcggcaaaattgccaaggcaataataatcggatggttgtcaaattcattaaaaagaatatcttcctcattaaatttgtagcaaaagatgaactatactctttcactattgtatacaacattttgtttgtgtggctaaccattcatatcattgattgtttgtagttgtaaagatattctgcatagatctcaattgcttcatcaccatattctcttgttataagcaaagtaccgggagttgaaaaatggtttagggtttctaagttctccttagcaagtaaggtttatttcttatatttcttcagtttctggattctcttgcttttgattgaaaatatttgttgtttcgatatttgatttgtattttttggattggttatacttatagtagtgttgaaacgttttgaacacgtatgcacaccaagtgtttgtcaaaaatctccaatgaaggtttttcttgtgcattgagtagatggctattgtctttaagtcattgtttattctgaagtagttttggagttattctaagggaaactgatttatttagagctttattatctatatgacagtaagatttagcaatgatcaatgtggccagtagatgtataaaatattaatgtgtctcagtgttgcaaagtaaaaataaaagaactatttacaattttttgtttttaacataaaaataataaatcaaatagtaaagaattgatgatcaatcacaaatttttttatctctgttttctttttccacatatgacttcacaaaccaaacaaaaaggaatcatttttttctatttcgaaaaatgattgcaggtactgttgtcacctctttgggtttttgaacataattttagtttattgattaaaaacaactagctaaaactcaactaaactataaagacccttagcttttctagttctgttttgatttggcaaaattttttataaattatgtcctagtttataacctttcaaaaggaaaggattttgtgacatttattggaatatagaatgcttggatacaatcatgctgacttttacagctaaaaaaaatgaaattcttatatttatgatgaatatgaaagagttaaaacagttaataacataaatatgtcttttgtttctgtctccttgacttattgtgtctctctttggttaatggttctaggccatggaaggaaattcagcgaatcacgagaatgataatgaagaagaatatgtgttactcgaccttgattctgtttccgggcagctggacatcccacctgatgcgccatacgttctctctgtaagtttttcgcttgggatttcttttaatggattattgaaaattaaacttattttcaattgatagtatttttatcatgttattctcttttttgttttacatctagtcttgattattagttcctgctacttgttctcactgctgattattataatttgattttgactgcttgtatatatgatactagtctttaagttatgagcaaatgtggccgtgttggttaaaatggatcacttctttgggaaaatcttttctatgcttaggaattattcttgtatagctgtatatttgaattctattcaaagattttaggagagtagttaggcttattctcctttttgttgtaattatttattttcctttatagggagctttgtactcaatatatactcagtttgtgtacaaagaaaaaatataagacaacaattacccaatattgtcttcatggtatcagagccaacgttttcctaaaaccccctaacagcttctatcctaagtcccaaatcaatattgccatatctcaaaactccaatgtatctgccagcacccaagccaattccatcactgttgaagccaacgttaagtttgatgagttgagtggaaaaatcattggaaggctgccgttgcttccaattgatgaagtattttcggaggttagaagagaggagagtcgaaggaacgttatgctaaaaaagaaggtaattgggaccactgttgaaggcttagcactggctgttggaggaggttacagcaagaacaattcatatcctcttaaatttgatgaataatcgccagtttggtgtgagttctgcaacaagccttgccatacttgtgaaacttgttggaggatccgtggaaaacctgcagatcggaagagcaagactgagagatcaggttgtatccctattgccaataaagttgagaccaatcttttcactaaggagcaaccgactcatcttcatgcattgttgaaatccaatttgaactcatctgatattctttttgcttctattgcacaattaggtaatgaaatacatgccttaaactgcctttttccatcttatgctccgtggataattgattctggagcttttgatcatatgataagttcttctaaattctttgattcgtatattccttgttcaggagacaaaaaagttaggattgaagatggtaatttctcacctgctccaagaaaaggtctagtaaaattatctaagggaattagatcttaaatctgttctccatgttcctaatcttacctataaccttttatctgtgagtaaattatcaagagattctaattgttttgtgactttccatgaatctaaccattttttttaggaccggagttcggggaacacaattggcagtgttaggatgattaatggtctttattattttaaagataatatttctcagaataaaattactcaagggtatagtagcattagttctttttctgttcatgatcaaataatgatttggcataatagattgggtcatcctagtttctcttatttgaaacatttatttccaactttatttaaagttttaaatcccttttctttttagtgtgaaagttgtttaatggtcaagagccaacataaatcttatattaaaacatcttataaatcttcaaaaccttcttacctctttcatagtgatgtttggggaccttctaaggtaacaactagttctggaaaaaaaatggtttgtgacttttatagatgactatattcgtctttgttgggtatacttaatgaatgaaaaatctaaagttgagctgctgttttcatattttcacaaaatgattgaaacccaattttaaataaaaatcaatattttaagagctgataatggaatagagtattttaacaacatcctcggaaattttttggaagaaaaaggtatcttgcattaatctacttgtccattcttgaacaaaatagtagtgatgaacggaaaaatagacatttattagaaatagctcgtgctatgatgttttatatgaaaattccaaaatatttatggggtgaagccattcttactgcatcttatttaataaataggatgccctaaaaaattttacagtatttgaccccattagaaaatctcaaaagattctttcctgattctagaattgactctaatttacctttaaatttttttggttgcactgcttatgttaacattcctaaacggtccaggtctaaactagatcttggggctgaaaaatgtgtctttttggattatccccctaataagaagggatacaaatgttttaatcttggattttcgttttaagaaaatccttattctccaaaagtttaattcacgggagaatgtagcgaaccaaattttgggatactgtggaacttttaccaaaaacctattcttgatatttcaagtaaggaaactagt

SEQ ID NO: 191869 - DNA, 1520 bp, Cannabis indica
gaaccggcagcacatcagagagtctagcacaaagcattttttagatgcatttgtaaagagtattacaacaagcaattggcctaaagtcaatggcctcttttggattctccactttagggacaagcgaaattacagtttcattaaggaaagtaggtaacttcccattgactttaacaatttaactatatttgctaaataataatctaaagtaaaatgcacccttaaaacacaattaaaaaagaaaaaaaaaaaacacaactaaacttaaaattagatctagatagtagaagaaggatcttgtcttgatgattgagtgtgagtgcggctgggactctgaccagaattggcgcttgtaggtaatgttggaggctgaaattgaaagcctggtaccaattgttgcatctgagaagccagctgagcaaacatagcttgttgagatgccaacatagcttgttgggatgccagttgttctccttgaatagcgacttgttctttgagaacagtgatggctgtgtccttctcacgctcctggataatgcttctcacattgactgctcgattacctccaattgctttaagcctaggcattgacccatatcctttgtgataacgggatcggggtcccaagacttctgtcataatctccaagtcttttggctgagccacttcttcaccatattcagtagatccagcagactcgccagtggctgctgctgttggtggttgagaatctcgtatttgtgtcatagcatcctaaaccagaaaatagaaaattactaaatatgataccattatgcaattaacataaataaaatatctacttacaaatttctctgcagcatactcgttcctccatcccttttttggtttacaatgaagttgttgaaaagtatcaataacactaggtagcttaccagttagaggatcagcctaggggaaaaattttaagagttaccagatagttataagttagattgataaataaacagaataattctgaattcttactccatcgtacatatgagacacaatcgtcttagagccatgccccccttcaaatggtcttcgttttcgattttgggagttttgagatgaaattttctgcaaaataaataaataagatattatttttccactgaaataatacttttgtatggttgttataattaaaattacaatatagtacatgtgcttaccttctggtcctcagaactaaaaaaatcgcagagaatgttccaatcttcaggagcaattcgcttgtatggagtgctctttggggcttcagcattctcctctcctcctaactttttccaaaaacatttcatctcatacctccattctcgaaaagccttcatttgcaacctctcgatttcatccatgacaattttatcgtcgtgtggataaacaaactttagctataaaaaaatatagattaaaatatgtgtacagtaagttgatatattagctatattaaaatgaataaaataaaaagtattgggaaaacttacatccagccgaga

SEQ ID NO: 191870 - DNA, 3951 bp, Cannabis indica
accttaggatttcagttttgtttttccttttaaagcctaaacttctttgtaagaacagagcaaacacagcaaattgcgggaagaaaggacagagaagaagaagtgaagagaaattaggattttttttaatttctatttgattacctttttattagggtacatagttaatgtaggccaaaatattcaactttacgattaatttttaagtaccaaaaattataatggcacatcaaattctcttatgctacgttagctaataaacgactaaatattaaagtacgtaacacaaaaggaggaatattgctgtattggttatatattgaggaaattttttaataatctctatattttagaggcacaaattagtaatgacataagttcgaagataaatttaataattattcaaataataatgaaatgggaaggatgcaaaaatttgaaggaaaaaacataaatgacaaaagttgatggagatcaaaataattcaagtgaaaattcaaataattggccatttgaaaatttaaataaaaatttgaaggaaaaaacataaatgacaaaaataaatcaagtgaaaattcaaataaattggacatttgaaaatttaaataccctggccttacataccaatttgagactttatgtctaaacacaacctctttcatacaatataattatataaataataataaaaagaagacatcctaaaaaaagaaaaatttgtgaaaaatgaaaatagtattttctttttggggcatagaaaatatgcgataaatcggtccacaacaaaatttccaagaattagagaaggtaaaaccaaaaactttctatagaagaagttcgacttggaaccaaccaagaaaattaatgtccttcaaaaggaagaaaaggaaaaaccaaagaaagcaaacgtgttactgaaactaatacaagggtagaactggaaattgagaataaatagtttaacgggaaaattatatggcggcaagagggtcaactttccgtcaaaccatataaacacctccgtagctataaatatccccatgaactctataatattaataacccttattataataataatgcaaataaaatgaccagaaagaaatcaggtccccacattcataatttatttttatttttggtactaactaaccaaatcatacctcctccatctcaactctcatttcaattcactactttgttaaccatttttatttttaaaaataataataataatattaataccagagagagatgttctcaaaaaggtacatcaataaataaataaataaataagctgttttattttttatttattttttaaaaaataattatacaccgacgtgtacagaaaaatacagtacaatactctttctctttctctttgtttctcacactaacactatactgtctgatacagtgtgaagtttctctctcctatagtttctttgggcttctctctctttctctgctactgctactacaatacaagccgacgacaaaactccgcgctggcaaagattccctcttcaccctcccacacaatctctctctttctttctttctttctctttttctctttatcttcttttcttctaaccctaaaaattttccccagaaacaaacgctgccccactgtctacatcgctatctcaatcatggccgtggtttacttgatctacccatcataactcaccctcatctctcttttcaaccggtccgtaataataataaaaaaaattattagcttaaagagaaagagaaaaaaaaaaaaaaaagataaatgggctgcgccagctcaaaggtcgatgatctcccggcggtggcgctctgccgagagcgctgtgaccaccttgaccgagcgattcaacagcgttttgcctttgctgagtctcacatggcttacattctctctcttaaaggtattggtaactcattgcaaacttttgttcagcaggagttagctaattcttctggggctcctccctctcctaagcttaatcttcctcctcaacggaaaggcgatcctgatgtaagtaagactatcaaagcttcgaaatcgccgcacaatcacgacaattccgatgctcatctacaattccactccgattcggactcagatgattcgggttcgcttcaccattcggatcattcatcgcctttacacagtcccggtggtatgtatggttacatggaaacggatcaaggaggattgggctcgtatggaggagggtttttaaatatgaattatatgcagaataaagctacgccttctgtggtctaccagcagagacccctcagtcccgagatcatacaccatgtgggtgacgcttctgcttcttcttcttcttcatattacccttatcctaatcctatgagcaataatcagaatcaatatccgtattatgggtatgacaattatgccagtgggatgggtgggtattatggtaattcttcgccgcctccttatggggctatgtcggctggagcttcccaggctgtggcgtcttcgtctaagccacctcctcctccgccttcaccaccaagagcttcggcttgggattttttgaacccatttcaggccgaggacaagtactattcacagtacacccctagccgagactcgagggaggtaagggaagaggagggaattcctgacttggaagacgaggaatatcagcacgaggttgtgaaggaagttcacggtgatcaaaggtatgctgcagctgatggtgggaagcatgccaaggcggcggccgctgcggctgttgatgacaaggttaatgaaccagaggtctcacattatcagactaggccgcgtgaatcgatggagaatgaagggatggaatatgaggttcacgtcgtggaaaagaaagttgttgatgaagaggagaggtcgaaggaccgcggtggcggggctgcattcaagggtcgaggtggttatcgagatgtttttgaagcggtaagggaaattgagacccagtttcaacgagcttcagagtctggtaatgaaattgctcagatgctcgaggtgggaaagcttccgtacaaccgtagacatggtatgtaaattcctttattatttttaattttttaatagaattcaggctattccggttttgctagctcgatctcgtgatgaagtctgcctttttcttttggtgcttaataatgtagcattacaattgttcatgatgacctatgattacggcaaaccaattcaaaatgtaaaataaaagtataaacttgggtgaattggaatttcagttagctgcattgtttaacttactttcaactatattttgaagcagcttccaagatgttacacgtgggtactcaatctctgtcggtaatgtcctcacagccgtctacatctaaggctgcagagtcctcttcgtctgcggctgctcctgcccagttggactttgaggaagaattgcggaccacgtcaaaaaatctttcttctacattacataagctgtatctttgggagaagaaactctacaatgaagttaaggtatactgttttttgttcaagcccacgatatattgacgttattttatcatttatcagggaaccctctagtatcttactaatctttagactactttcacttggtttctcggacaagaacatttctcttcatgctttcattcatatcattcttttgagggctcgctctagattggatgtgatatcattggatattttttagaaaataattaaagaagaatgataggaccataggaattatcatttgcagccagaaaaaagaaaagattgatagagaattattttatgtctaattatatagccaaaggaaattgtattggcaagaatagtgttatccaaatttcataacctgattaaattatctcatgttagttggattaatttaggtacttggatttttcttttcaatttgctctctaattacatgactaagaaca

SEQ ID NO: 191871 - DNA, 1169 bp, Cannabis indica
aaaaattgttattgtaatcttgtatcttgagattttttagtgtttactaaaatatccattaaccaaattgtcttaattatttgatcaaattgtgcgttgaactatattagaaatgaaattggttctgtttcttgaaattttgaaattttgattatagatagtcaaattattagaaatttatagagaaactgaaaattctggatagtttgatccgaaaattctagtggacagagggaaatgataaggataggtatatgacattgatcaattgggataaaatttgtcgtcctaaggccatgggtggattaggctttagaaagatggaagacatgaataaggctttgttggccaagttagcttggcaagttgcggcagatttcgatactccttgggtgaagtgtttcaaggcgaaataatgccgaaggaactctttctggagtacagagatgaaaggcaatgactcagccacttggaaagggatccttcatgcttgtgaggttattcgcaagggtagtcttaccctggtggggagtaggggacgagatagacatttgggaacaaccttagatttcgtggatgaattttgaagagttctcggccttaatgcgggaggcacgagtgcgattctcgatgctccaatatgtagcaaatatttccacttccaatggtgattggaacaaacacctgattttggagatttttggaatgacattggcacaagaatttgtgggatccagagattacctgagcaaaattcggatactctgatttggaagcccgcaagggatggtggcttctcagtcaaaggtgctcacaaagcttgctcctacttccaggatcaagaatccgaattggaccaaaagttatggaaatacatttggaacgagaagattcattttagactctcggtcatgatatggcatgttttggttggatgccttcccactaaggaaaagcttcacttagtgggggataaagtttgcccactgtgtgactcagctaatgaaaccagtatacatctcttttgggagtgtccttttaccagggcactttggttcggaggcccctttccgttgaaccttgacaattggacctccgagtcgctgcctgaaagagtgatggaagtcctctctatcacaccgacgaatcttcgacatctctttgttaac

SEQ ID NO: 191872 - DNA, 1842 bp, Cannabis indica
ggtccatgcaatgcactttattaacaaaaaaagctaccacctagtgttgagcatcagagtccttaaccaccacaccacatcaacaaaaatgtgagggttttccctgctgaggcatttcgaaaactctaaagttgttcccgcagatgcaaaaatcacactcaagaagacatagtgtctaacttcactccagtgacccttgaaatcaacatcaatatcattacgaatgatatgcaaatgcgggagacacttcttcaggccactaccatcaaggaatgtgggaagcaatatccacttcaccacatctctacccggcaacagttggcacaattccaatcaaatgtcccagttacttaaaaaccaaaggagtttcgtcatagcacgactaccaaacaagtggcccaaaagaaatacctctatcttattgcaaagaacacataggccaatattattcccaaagataccaacaagtcgagcgccagtggggagaatattttggtagacctttcacagaaaatgttaagcctaggatgtagtttagatttctacaagacaatcaaaggttggatccataccagcaaacttgtccgccttaaggtttttaaagttcgacttaattaatgctataaataccatccctattaggttttccaaatggccctgtcataagcaaaaaaggattaggaagtaatagatcatataaccctcgagtaagcctcaggcataaaaaatctactaacctcctcacatttcctttcactcatgtctacattcaacaaactagtcacagtcaaaggctgagaaactagtgcgttgagatcacctttgtgagccgagacatcataataaagaacccattcaaacttccaaatattcaacttagactctccgctgattgaaaatgctgagttgctacatataaaatcctttgcacacctaaaaacctttaaccactggggatgtcgtaccaggtagcaacgactcccaaaagctacaattcgagaaatacttccctttaatcacacgactccgtaaagagtcttgagaattttccagtaaccaacaaagttttgccaagaggcagaagttaacatctttaaaagtctgaaggccaaggcctccacaacatttcagggttacatatattatccctcccaagatatcaaagataaatatcaatctccatccactctccctgtccaccagaaccgatgggttagccgctctaactcattcagaatcgccacaggaagattaaacactgccatattgtatatgggtaaagattgcacaacactttgaatgaacacagtgtgatttgcttgagatagaaagtttgggtctccatccttgcaactgactatacactttgcccaccataaacttgaaatctttcttacatcaatttcaaacaaataaagcgttccccaaaagcctttcatctccttcgatggccccaaactcaaaaaaatctagaatatcatctttagtcatgtactcagagttgttagagaagtagactttttattttccaatgttgatcttttgactcgaccaaccacaatagcattcaatgtactcttggattgctctcatattttccatgaatgctttaacaaatataagagtgtgattagcatacattaggtgagtcactacagcactattagaggaattaagatatcctcttaaaaagtagcgtccttaaaccaattaaagtttaatttttatttataaaaaattaaatctctaataaagtcaacaaaattagttaaaatatttaatataaattaaataagttgatgtgtcaaactttaataggtttaacacagtatgagacaccaa

SEQ ID NO: 191873 - DNA, 2615 bp, Cannabis indica
aaattccataaaatttgtaattttctaaattataaatctactgaacaaaattcttaaaaattctatctctagataaaacttctccagtttcatggattaacaagttgcagaatctctaaaagaatcggcaagaacactttcattcaaattatgacctgcaaaaatatatcaaaagtaaactgaataacgaataaaaaaccaagactggattgcaagagagggatagctaaagaaaacagcatgagctgatcaatacctataaaaactatcttgtttatccgagtttcttcattcttccaatcacgagcgggaacaatctcatatatttccttcacagcctgcatttaaaataatcatcatttcatgcctaatatattatataccaataatacacacaagaaaggccatattttgatgggcattggattgaactagatttagatttagataacttttatcaagtgattttgttatgaaactgacttatattttagcactttaaggtgtctaaccggacatgagatggcgctttatgagtgcaataaaaaccatgggtgcctcttaacaatagtctatgaaactagaaataataataactataaaaataaaaataaaatactaatccaactaggggacattttaatccctttgaaaaactttaggtgattttatcctatccaattctcatcttcacttattccaatagtaaataagcaagaaaagcataacttcacatccaatttgtcttctcctaatatgttgttagcaaagaatcaactcttgatacgacccgagctgcctggcaggttattctaagtatatggagtataaaataataataataggaatatactgatctaagattgaagggaaatctgatattgatattaaacaaacaagctgccacaggtttcgagagcctggtgtctctccaattgatgctgaaatcaataaccagatcaagcatagacacactaaaccactcaacacaaatatataacgctcacaaagccaaaccaaaagccaaaacaataaacacacaataaataaactagagaaaactgaccacccagccaattaattctattgagacccgttacttctcctagcataggtgtaccaagggtctaacagtaatataatcttactaccggtgacctaaaagttagcctatgacaatccaaatcttcataaattaatgaagcatggccaaaaaagcattgatcttcagtattggtgttctcaattctcatcatactgcctcaagtgttctaattattcacccaatcatgttatgtgtagaatgcaatgaaaagacatttaagaatgaccctctgccaccaaattattgcagcaccagccaaatattataaggtacaacaaaagacagaccaccaaaagaataattttacatacagaatattgagagacatgagatatttctctgcaaatgcagtggtggcattcaatatgaatatttacctgcaaagtgtgaagctgatcggaatttttgacactcaaaacccctttgcaacgatatacatccattccatatttcttatcccaaagaatctcctcaatccacaggcgaaccttcaatgtcattttttcataaggcaccaataagtaaaacgtgccatgacataataatgctgagatttagtagaggtaagtaacacattatacctatatacacataaatcctcaataaattatattgtacttttttaggacatggatgcgcttcttatgcacaaaatagtgtggataagctagtaatttacttaaggaatcaatattttgtggagcaataaacatatttatacacagaatagtgtgtgtcacaatcaagttattttaagaaaaaaaaaccttatcaatatcaacttgttggtgctcagaaatgcataaggttcgcaccccactatcatgcagactttgggttgatagagcatgacttccatccgcagtccttctaatcgggtgttgtgctgagaaggcaaacttagcaaaattagtttttgagaactggagatgaataatttagttagcagattgaaatataaaaactaactgtagcatcataggcccggcagtccaaaatcttggacagatcaacttgacagcgaactgtagggatgatacaagcaagtgcgttaatattgtgtatctccttctccagttcatccaaaacacccccagacccctctggagaaaccaaatcaactttgttaagaattacaacatcctacaaagagcaacaaaacaaataagactccagaataagcaggcttacacctataattctttataagagtattagatccacgacgtagtactgttgtggagaaacagaaatagctaagatgcaaataatacactaccagaggcatacagagttggtcattatgataatcatatgcaaaactagaagaccattgcttttaatgaaataatatgacgagtaccgcaaatgcaatttgagaaaatgcttcagcaaatgaagatgaactgtgtcgctcattcagctgaaaccggaggtttttggcatcaacaacctatacaattatgaaacaaaaattaataagatatgaaaattgttatttatttttgtc

SEQ ID NO: 191874 - DNA, 2493 bp, Cannabis indica
gcaaatagtaaattatatctaagagagtaaagagaatttagaagtccgattagtcacactaactagtttccttttcttttgtaaatctaaaactaattaatgtttaaacgaatttcgattacttctggtcatatacattcggtttcctttattttcccacattacaaattgatcggatacgcttcaatcttttcacatataataatgtctaacacataatggcttccctaaaaaaatgtaatttaaataaaaccaacccagtactctgaacaaatatacatatgaagaaacatgatcaacaaaagaaagaattttccttaaatatttcatgtagaagagaagcgttcttttggatctctatcagaggatgagtaaagaagttttgtattaaggccctgatgatggtggtgatacttgggagatacagcagccaatattacaatgccgcttagcagaaccaagccaagtcccaagccattgacaacaatggactccatacatcgcttacacaagttcctcttcgtttgtaacaatgtcaccttctccaaaagccctgtttcggctgtcgccaccgccagcccatacgtgtacagaccaacaaacacgtcccacgccaataccttcctcctcactctccgcaccactcctctgtgccaaaagctcataaaacccatcatccactgcatatacatagaacataaacacacaaaataattataagggaaaatgttaagatatcatcaagtctaatctattttttatttaataactaatatatataatcgctaactacactaacttcactagtattagacactggtgtgtaatagcattataatatcaattctatgtataaaagcagcctatgttgaatttgtgttttaacaacttttttgcattgggctttgaaagcccatataactgcaagtatccattgagcctgcttatgtgacctacaactacaagtaaactaatcaaaattgatgaattattagggtgttgctgaaacgtgaagtatccagtttaatcaaaaaaactattgaaaaagacatcatctcttcactaaattaatatttgaatctaaaagagtaaatagtgtaggaggatgtgacaaaaggataagggaccacaattgcatttttctcgtaaagtatgctttcctaaatagtaatcataatttccacacaaaaccactgattaaaataatgccaccagtttctcgagaaacaaacaactttttagaaattggaattggaaatggaagtggaaaatgaaaatagagaacattaaggtgaagacttcagaacaatgtatagtctattatatatacctgaacaccaaacaaggacatgcaaagcaagcccatccaagaatggagactatagaaattgccaacaatccctctctccccatggaactttgtccaaattccaaagatcccagaagctaaagccactccttgaagacacaaatgcactgatttcttcaaactcgttgagccaggcaaccatctatggaccaatatagctgagaaagacaaaccaaaaatgaggaagaacaaaaaaaacacttgtttatttgaatcaatacaaattgggcatctaggtttattataatattattaccttctccactgatgagaatgaagccaattaccataaataaaggatgaagaacctggcaattattaaaaagagaaaaaagagtcactaaagaaaagaatgaggtggagagtaaaacaagagaagagtagtgggaaaatagatacagagtagacgaaatagtcgttggaggcagtagcagaatgtggaagaaagctggtgttgaaagctaaagcccaaaagaggaccaaccctgcaaccaaaaggccactgagtctggccaagaagagaagaggaagtagtgtggttgagcttccacttccacccatcaaaccttaatcttaaactattttgtctttctattctcctatgttcactttctctttcaccgacagtcgcttttttcttcagatctctactctactactatacacactggtactgttactcaagcatttgaatagtactgttgttatgaattaatcagacgatttagactgccacgtatactgacaatattatatattatatacattgtttaagctaaaactaaaagataccatctttttcttgttttttgaaaaataatatatgtagtggtttttggtcaataatgtcaacctcattctttaacttgagaaaataaataaacaaagaaaactgctagtatgctaaaccatggtgatgggtccacgagtaaaataagaaagcattttgtcaagttgtgttggaatatataatggacatccatttatgtgccaaagcgaaaatgaaagtactatttctgaatgaatatatggatattcactagtgaattggctaattatgtaattatatgcttcaataaagcttttcacaacgtcgttggcttgtcaagaacttttactccata

SEQ ID NO: 191875 - DNA, 2352 bp, Cannabis indica
gttacattatgttataactaaaaataacattatattagtcgacaaaaaaattctacattatatgactaaaacattgtcatttattttagtgctccatggtgcaaagtaactatcaaacacctcaaaattcatagtaaggttagatatagaaacacatattacacccacattaatacattatattgcataatatgaatgatgtataaatttatatatacaatcattacacctttagagtgggatcccattatttgaattgtgtgataatattgagactaattacacacattgtgtgtaagtataatattgttagatgatgaagttagcattaatcatatatattaattggcacacaatactataaaaaaaattacaagtagttatatataatgaccaaaaatgaaaaacaaatatatattagttcaaaagggattctaacttattaggaggctgcatattgaaaggaaatgtatgtggtcagactatgcctaaaatttcagtactaaatttgtgattatataggaataaatatctatacgtcttttacataaatggaaaagatattaaagctgaaagtatcccccaatatatataagatataatatatagtacacactgcattttaattgaacaatgtagttagaaagttagtttgttgtgaataaaaaccatatataacaaaagaaaaattaatttaattgatcttgaaatttgattggttaagagtgaagttaatacacatcagcattgattttgacgtttaatgaagtagaggagacacacccaactaattatatatatatagcattgctatttagcaccagtattagtgtttaacattttttaaacgtgtcgtctcgagattagttagcgatacattctaaaaactattacattaaattatatgagacttaatatttaattgtattaattacgtaaaaaaaaatactaaacaccactaataacttttaacatttttgttatatagatataatgagaagaaataaggattaggaaatccctagaactgaaagtatgagttgtaaacccttaagtccacttggtgggtgccacgtcagaaaaagctctagtgggacccacatgaagtttgtgaatgtaccatgaatggtactagtaaatagggcttagctggtgaaaaaatcaaaaatgtgaatgtggggtgttacttgaagataaataataatccaaatacggttaaatatggcaatatagccaatagccaatagggtctgcaaaaagcttttaagggatcaagttaatataaagtaaaaataaacaactggaaggaatcaatttctttccttttttatttttaagagtgttgttatattttgatcatatataatcatattattaagtaaattataatactttttacattttttttttaaattatatattaatattttatgcaacttgctgagttcgatggctctctcatctccctatataaatagcttaacttccttcacttatgaccacacctcactgagttgcgttatatgagctaagagcacttctcttaagaatatcaaacactttattaggcaagagagtttggagtgtgtgtagtgagaaatatatatataaagagattttctcaatcttcttatatattattattaactccttcaaatttcattcaagagatttatataacatggctgctcctcaccactacctcatctttgcattcggtctcttaggtattttatacataaattaattatatgagcatgtatatatacatcaatatatatatattcattctttcactcgatcttctataattgtattattagataataatgtatgttgtaatgtacgtagtgcaaatatttttggatcaaaactaataattattggaaaacttctttttttgtatattttgtaggtaacatcgtgtcgttcatgatgttccttgctccaatgtaagaagccctttaactatatttattattatatataatgagataaattattagtattcatatatattaacataaatttggattttatgtatatttttacagcccaacatttcacaagatttataagaagaaatcagcagaagggtttcaatcgctaccatacgtgattgcactactgagctcaatgttgtggatatactatgccttgcttaagaaagatgctttgcttctcattactataaactcatttggatgtgtcattgagactatttacattgccttgttcatcttttatgctcccaagaaatctagggtattaaaacttgatccaccgactattcatattttatttaaacattattaatattgagatcacaaaaaattatattatattatatat

SEQ ID NO: 191876 - DNA, 1905 bp, Cannabis indica
aagctctttactatgctgtgttttgcacataaatttgtgaacatggcactgtcaaattgggtaccgttatctgagaccaatttctggggcaactcgaacctacatatgatattcttaaccacaaaattaagcaccttcttggatgttattgttagtggttcaatttctgtccacttggtgaaatagtcgactgctaccaccacatatttcacccctccatttccccttaccgtaactgattgatcaagtcaattccccatagagcaaaaggccatggactccacatttatgttagttcattaggtggatcccttgggatatttgtaaacatttgacatttttcacacatttgaacatactctggggagtcctagatcatggttggccagaagaatccttgtcgtagtatcatcttggacatgctttgccccccagcgtgatttctacagaatccttcgtggacttcttccatcagtctttgggcttggtcttgatgcacacatcatagtaggggcattgagaaccctctctgatacatgacaccatctatgattaggtaccgagcgacctttcttctcatcttctttgcttcatttctatcggtgggcaatgtaccttgttctaaataagcaactatgggcgtcatccatgattgtgtcgtatcaagtaagagtacctcttttttggtgttgatgcttggtttagacaggtcttctatcggcatgaggttagctttgtctatctttgcactcgtcgccattcttgccaaggcatcaacaatagtgttcttttctcttggtattttttggatggtgtacctctccagttgggcgagtaggtcttgtatcttgctaaggtaagccatcattttctctcctcttgctgtgtactcacccaaaacatgatttataaccagtttggaatcgctataaatatttaagtatttggccttaacctcctttactagtcttagaccagtaattaatgctttgtattctgtttcgttgtttgaggcacggaagctaaagcaaatggctgtatggattcattgtccctcatgggttattagggtaatccctactcccgattactgatttgtagaagaactgtcaacttatagcttccaagtttctctttcttgaccttgctcttcctttttctccgtgtctagactatgtgattcgagtgagccgctcgggttaagactttgggtgccaatggttgttaatgaccggcctccctcttacactcttgttgcaatttcaacatcttggaccccggtacattcagctacaaaatctgctaaggtctaccctttaatagttgacctcgatttataagttatttcatattgtccaacctctattgcccatttaaggaggcgccccaatatactagatttttgtaacacttggaataatggttggtcagtgagtaccatgatggggtgcgcttgaaagtagggtcaaagttttcgagatgctaaaagtacgcagcaggttaacttttctataagggggtatctactctctgcccctatcagccttttgcttagatagtagactgggtgttgtacctaatcttcctcccttactaagactgtgttgagtgcatgttctgtcactgctaggtatatgcttatctcttcaccatctaggggtttagaaaggattggaggctgggatgattgttgcttgaaagcttggaaggcattctcgctttcttcatttccattcaaattttttcgttgccccttaagatgttgaaaaaagggacacatttatcggtcgactgtgacgcgaatctactcaaggctgcgattcgtcctgtcaagctttggatgtcttgaatcttagttggggatttcatgttgatcaatgcttttatcttttctgggttagcttc

SEQ ID NO: 191877 - DNA, 2590 bp, Cannabis indica
tgtacagagataatattaaactaaaaatattgatggtaaaaaaagaagaaaatattgataaataaaaaaatattttgatatgtagtttttgggacgaaaaaaaaaataaaatgcatttcgttatgcattataagttttgtttgactttaatttaattaaagtgtaatatgattcgagtttagtttgatcaactttaaataataaccgttaaatcaactcaatcatgatcaaataattatagacataaatagaatacattctctcacttttgtgtaatatctcaagaaagacacactttgtatgtctttctttgttttcacttttctccatggatttgaggaaagaactaaattgagttttttcttaaccttgaacaggccaaaatatcccaatgtaatttaattacttcttatacaattgattagttgacctataaaatatatatttatagataaattatgtgtacatattaaacaaactatatactatgtattttttaaaaaatatttttatagtactagacataaatgcttaagcttaaatgtaatcttataatagataaacaaaattattttaaaatgaaaaaaaaatagtggagagccactttagaagagagatttgaggtttatcaattttgagaggcaccaaagtggctagtattactaatgatgtgctttagctattttttctaatttttgttaaggtaaaataattaagatccgtattgaattacactaatactaatactacacctcacaaggcatttctcatctcgaaactaacccaaccaatgagcacatgccacatggcaaatgacttaatcaccctcaatatggtagaacttactttttttgtagtaaaaatttagttcaaagatatatttgggtttatatgagagacttggtagttatttctgttatagggtcaaaagttgaaaattctcacgtttataaagaccacatgtctctttagtcttaacaaactaacaactgtcactcttagtctcttcacaaatccttattaattcacaaatttctctctttcaatcaagaacacgaaagaaactaagtagaaaaatcaagcactgaagttagagactaagaaatccaaggtaacattacttacatacatatttctcttcaatgatttttacttgtatttgttctgttttcacaacttcttctcaattgggcaattttttttcatctagaaaaatcatcaatggcgaatcgaaacaaaagaaatattttgtaccttccaatccattctcacatgttagaaatgaagcaactcattcaaaccatgttagaagatacgaatagtttgaagaaactaatcaaagatatgataattgatcatgattatgtcaatcctttcaagtctacattcgtacaaattaaggcgaatctaagagatttcgacaaaaattgtttcgagttcaagaaagaagagattcaaagatttttttctctaaagatcaaagaaatgaggaagaaattgataggaagtgttgagataaaagagaaagttaagacacattgggtgcgaaatcgcggtattgaactctctcattgcctaatcaaattcttgtggttggaattgttaatgaatcaagatgaagattcaatttttcagaatatagattcttgttggaacaagtaagtatttttagagagaatcatcatcatgagaatgaagaatcttattctttaaccaatgattttttcatgtctgcattgataataggaatgttaaattttgataaaaagaagaagaatgagattgagatatcatatgagaaaagtgaaattgatcaattacttggtttaattttgaatgaaattttgagtcttgaagttgttttcaattacccaagtttatatccggtggtatttttgcaaagctcaacatttgatggtatttttaaaaagattaataaaatcaatgcaaattttgtgcatgtacaagatgtaaatgtcatgtcatataaaaaattgggttctcaaattgagaaattgtgggagaatctagagcttccaagaactgaatcgatggctattggaaatggtgaaagcatatttgagataaaaatgaagttgttaaggttgaattacatcattgatataatggaaaaggatatcaaaggtgttaagatgcttgaagaacacatattacttgttgaggaagttgaggtttttgaggctgaaattggaagactagagaaacatgtggaaaatcttaaacagaaagttgaagattttggtgtgttgatggagtgtgatatgtcaccatagctattatatgttttattactttattagatcttttggattatgatgatgtttattagtgactaagttgtttttcttggattatgatcttttgaaatgaagagattaattttttttttggtcaatttatcatttttttatgtttgttattattatatttgatggaaattttcatgaccctagttggtattatgagaatgtatttaaatcaataatgagaatataagcaaaatttgatactttattagttatgagttttgacagaagattaactcattcattttcacttggaaaaagaa

SEQ ID NO: 191878 - DNA, 6743 bp, Cannabis indica
agagactcatcaagataccgttgaaatgggaagacgagatgaaacgattccctctctctggaagaatattaaatctccctatgaaatcaataactagaaacaacatgttacgactggctacgatggcgggagaggtgatagctattcagaaggaagaagtggcaaagatagctttgaatgggaatttttggttcaaagtgtggatttcaattgaccaaccactttgcccgggattcttatttcctagtgctgaaggcaaagtttggctaccatatagatatgaaagactcccattcatgtgcttcaattgtgggagagtgggacatgatttcaaggcctgtggtgaacaccctacaaagatcaatacaggagaggatcaaagttcggtagcctatggaccatggttgagatttgaagacactcctattcgaagtggagacaggaagccacaactggagaagatggaagcccaatcagaaaaacaaaaacctacgggagaaacgtcatctgtgcaagagattaatcttgtgcctactattaccaataggaattctcagaaactgcaggtaacatcctctaaccctctgttatcttatgattttgagaacctaacacgcaggattaatgaccaaaacacggggatcaatggtggagaagatcgtggctctggttcaaagaaaagggcagatttcgaggccttcttaaacagggaagcgaatacgaatctgagtttgggcaaaagagttcactgggaagaaggtggaacccaacaggggctggatttgaatttgaattttaatgaaatgggggaagaatggagagaggcgcctatctctattggtacagaggatgaattggggaactcgggctctaagagggataaaagaaggaaaattataccaaagagaaccaggaaggggactatcaatgcaaatcctccatctttgagcaatataacagacatggaaacaactaaggagttgacagggaaaaggaaggctccgggggacatttctagtttttctgatttgatctctggaatgaacttgaaagcggcgaacccagcgaatctgggtcgccgagagccatgaatatcttattttggaatgttcaggggcttgggaatccctggacattgaagaccctttgctcccatgttcaagatcatcatcccgggatgattttcttgtccgaaactagacttaatgagatcgctatggaaagaatcagaattgttctgggttttgaaaactgctttgtggtgccaaataagggtaaaagcgggggtttggctcttttgtggaaggacacctttgtggtgagtattaaatcatatactgtttcccacatagacgctcttgtggaaaatggtatggggttttcttggcgttttatgggtttttatggtagtcccgatccgagaggaaggaagtcttcttggcagctgttggaaagacttcgtgatttaattcagggcgcgtggctttgcggaggagactataatgagattatgctagaaaaagagaaaaaagggggaagtaggaaacctgaatctcagatgaatgaatttaagaatgcgatttccttttgcaaattcagggaagttcaaatgaaaggtggggattttacttggtgcaatgggcggcaatccaacctcgtctttgaaaagttggacagagtaatggcaaacccggagtggtttaaaagctttagatcttcaatggtgactctccttccttggtggaattcggatcaccgtcccttgctcttatgtgcggattccaaaccgaaatggtcgacaaaaacccctaggtggaaatctaggttccattacgaacaagcttgggctggggaagaagagtgtaccaaaatcgtcaaatcgatatggctggataattctaactggggctctactcatggtataaggaagagaattaatcattgtggcgagatcctccatgattggaacaaagataaaaaggcagagttgaaagctagaacaaaacaacttaaaaaggacctcaaacatctgtccagctcggttgaagatgaaaactggagtgaaaggaggaaggttgaaaaggaactcaatgttatggaagcaaaggaagaaatgttatggagacaaagaagccgtgctttgtggctagctcatggagaccgtaacactaaatatttccaccacaaggcatcacaaagaaagaaaaagaatacaataatcggattatatgatgataagaagaaatggtgcacctcggacagagaaattgagaatattttggtcagcttctattcgaaactcttcactacttcaaaacctaatggtgacatgggtgacattctcaatcgttgtgttcccaaccggctctcttaccaagataatatggatcttcttgaggagttcacaagggaagatgtgagagaggctatacaacaaatccatcctctcaaagctcctggaaaggatggtctcccggggttattttatcacaaccattgggaggaagtaggagaagaggtgattactacatgccttgaagttctgaacagtaatgcagattgtgattctattaatgatacacttctttgccttattcccaagactaaagagccaacaatggtgggagaatatagacctttaagcctatgtaacgtcctctataaagtgatctcaaagtgccttgctaatagaatgaaacttagcatggataaggttatctccgagaaccaaagtgcatttattaaagggagacaaattcaagataacgccattctcgggtttgagagcctccattgcttgaagaaggggcggtttggaaatggaaagaagatggcccttaaactcgatatgtcaaaggcttatgatcgagttgaatgggacttccttgaggtaatgatgaaatgcttgggttatgatgaacaatggatcacaaaggtaatgaaatgtgtaagatcagtcactttttctattctgctcaatggggaggctcggggtcatattgtgccggattgaggtttgcgacaaggagatcctctatctcctttcttatttctaatttgctcggaggggttatcttgcctaataaatgaagcaagccgggctaataaactccatggacttcgattcggtaaccttgagaagaagttaacacacctccttttcgcagacgactgcctcattttcatggaagctacggaagaggagggtcaaacaatatctgaagtattgaaggtatattcttccttatctggtcagtgcattaattttaataaatctaacctttgtgtgggcagaaatatctctaagaatgaaggcaaaagactggcgaataacatgggggttactttcactgaaaaccattccaaataccttggcctcccagcttttgttggcagaaataagaaggaagcctttggcctaattcgaactaagatttgggaaaagcttcaagggtggaagatgggtcttttttctcaagccggtcgtgaggttttgattaaatccatcatacaagctattcctgtgtatctcatgagtagttttagactaaccaagggtcttataaaagagattcaaactcttatagcgcgcttttggtggggatctactaaagataaacaccaaattcattggggaacttgggagaaactttgcaaagataaatggagtggtggcatggggtttagagatttggaggattttaatcaagctcttttggcgaaacaagggtggcgattggttataaatccggacagcttgtatggccaagtgttaaaggccctatactttccaaattctgatttcttcatggctaaaaccggttctgggagttcaaatgtatggaggggaatcatttggggaagggatctgcttataaaaggtttacgatggaaggtgaaggatggttcaaaagtgagaataaatgaagataaatggattccaagaggagccccattccgtctcagatctcgggttcaggttccagctaatacgtgtgtaaattacttaatcaatgaacatggaaactggaataaggaatacatagagaatcatatgcatagtgaagatgtcccttgggtattgggaattccagttaattcaggtggcgacgaagatgagattatttggcattataccttgaatggagattacacagttggtagtggttacatcctaactcagaaagagaagcaagaaactgaaacttctaataaaaaggaagtgcaaaactggtggaaggaagtttggcaatcgaacttaacccccaaaatgaaaaattttgtttggagagtgtgccacaattgggttccagcgaaaagcgagttggttaagagaggtatcaacatagatggaacttgttcgggctgctggaacaaagttgagacaatcgggcatgctctgtggtgctgtccaagactgaaatcagtgtggaaagctgctggtttttggcatcttttccctgaaagcctcgaattaatgaaggacctgatggaatttctgattttcatgaggaagaagtgcactaaacaagagtttgaaacttttttggggataagttggatggtttggaaccacagaaacaagaaaatttttcaaaacaacaagaccccattgaagacttggatcccgtgggctttggatgttgttgctcataccctggttttaacagcaaaggagcagaagacgaagaaggaaaaggagaggctctcgtggcaggctccccctcctggaactttttctttgaattgtgatgctgctttgaagatggattatgaaggttttgctactgctgctgtcattagaaacgagaagggcaatttgattgcagccacagtttgtttctatcccggttatactactgttctgatggcagaatgtttggccttgaagatgggtatcaagcttgttcaagatacagattctaaacctttcatagccaattcagacaacatcactgttgttcgccaaatcaattccaaaaaagctcccagagccgattagggtcaacctattaatgaaattttgtcttctaatcttctcaatgggtgcatgggaattcgatttgtaactagggatagtaataaggttgctcactctttagctaagtgggctttaaaacaaagatgtaattctttttggtcagaggttttaccctcttgtgctgctgcaattttaaatgcagaaaagcctgaccggttgtagttcttttgttggttgaataaaattttgccttacaaaaaaaaaaaaaagaaagttacaaccaaaaattaaactagtacaactaactttttaaatgtaaattattttgaataaaaaattataataaatttatttgtactaacataaatttatttattatatcttaggttttttttttaccatttcataatagtttcttctttgtatttttacgaaattctaagtagaaatttcgattgcaattaacggagcaacttaaatcgcaaccaaaatctgtatagaaacccacatagaaaccacgggagaaactaccttaaaaagccaaatcgtaaatttaaaaaaaaagttaaaaaataatatatagagcaatttttctatatttattaaaaatattttttttaaaaaaaattaatattataataaaataaataatattaaatctttaattttgttttgtttacaatatatttatattttcataattttatgttaacaaatcaaatcacgtcaacttagaatatttattttcttaaacaacttaaaaatttgtatactaatattttattttcaagcgataaaatataatttgaaaataatatatagtatttttaattacttttttttttattaaatgcacataaattaacacttttaaaaaaataaacaaaattattaaaaataaaaattttgtattataaatttttatatattcatcattataataaattatattattattgaaatatttaaaaatttataccattttaaaatatataatttactaaagagaattgttaaaaagtatacttagtggctagtattttttttttaatattatataattattagtgtaattaattatcaaatctcatataacttaataaaataaattttaaccaatatccttaccaaacactacttatatatacattgatggtctgttgtttcctaaattactgttaagtaatttttttttttttgccataactcagctgtaggctatagccagttagagccgctttttcttagggccacaactagtataataggagtgtataattgaaaagcgaatgatttaaggtgggtccaaactccaaaccgcacgattgaagggaagggaccgaatgagattaaaccatgtcaccctctattatattgccgcctattttggcaaacacaagtcaaaaatcatatctagaaaccaaagtatgtaatgttgcctttgattttcaaaacctcgtgaaaagtgtcttaaatttaggtgaaagttaacttttctaaggaacataatgacagtaataagtgctacaaattagagctgtaaaatattaatatattaaatacaaatatttatattcttttgggccaaattaactctccaagggtatttcattaaagaggaaattacactctatactctttttatattattctcttttaattttactttctttttaaaatctatcatttttaccttttttctaaactattgtaccattttgcccctgtcacttcaagatactctccatgtgattctcttatg

SEQ ID NO: 191879 - DNA, 2854 bp, Cannabis indica
gttggattccctctttcaaccaattatcccgagccatcatatccctaactgtgttgcttctttcataaaagacaacatgacctgggatatcaatcatctcaactagtgttatccttcctatatcgttcaagacattctttccattcccctccctctatttcccacagaagacaatctcatttagaaatcctcaaaattaggaacttactcggtaacaggctaccacttaagttattcgaatagttcccctcctgacatcccttcctctttttctccctcgccttggtggaaagctctttggcatctcaatctcccttccgaactaaaacactttgcgtatagagcttccacatccaccctaccaactaataagatccttgcctataggaagataataacccaatcccctttatgtgtctgatgtggtagagaggttgaatcagttcctcatgccctgttcttttgcaagagagttagaagagtttggaaatatacaattttctatcgtcactttttcaaatactatttttttcatgaaattatttttaatattttttctaacatgaacaaagaagaagtggagttttttctttgtatatcttggtttgtctggcataacaggaacaaggagattaagcatcaaacaatggatcaatctcatgccatcctcaacatcgctgaaaactacttggcagattacaaagcaataactgctattcataatacaccctctccagaagccaagtctaatgccaccgtcacctggactcctcccccacatggccttctcaaactcaatacagatgtggcctcctcgaacaaccacattaaagctggtcttggtggaataattcgcaacagtaatggaggagttgttgctgcgatagcttctcctctacaaggggaggagatgctacaatcctcgaagccaagtccattctcaattctcttcattggtgcatagaagagtactttcctcctcatcagataaaaacaaactgtaaagctatcacaaaagaggatctctctctgtttggaaatcttatcaagcaaattaagttggttttatctcacttcctcaatgtctcgattactcatatgaagcgcactgctaacaatttttcccaaaagcttgctaagttggctttggagttagataaagctacaatttgaattggagataattaaagaatgttgttagaggaatttagacaacaccaaaataaataatataataaaaatataaacagaaatgtgtgagtaatcaaactcgaatagcgagtattcaagctatgaacacatagacgtactggaaatataaagaacacaaggaaatatagtggttcagtcagatcacggtctgcttagtccactgttacaagggttttctgtcttgtccatttcatgttggatcactcatttatatacaaagcaagtgtcctttgattacacagcgattgatttcattatcaatccgtttgtacattgaatataacatttaaatcaataaaaaacgtaaatacaataaatgaagaacagtttcggcccaattcactaaatacaacaacgtatgcgacttctataatatgagttgcctgctcatattctcgcataagctcgcaggcttaagatgcacacaagactagtcgagtcttgggatgtttgcgtcctgttcgaatcgcttatacagacatcctgcagtaagtcgataacttaagatatgcgagtccttatcgggttatcgaggttgttaggtcatccgaagcatctcgctgagtacaaaagcgatctttacttcttcgcaggaagacctttatagtcctcgcatatatcttggtatatgcgagtcttaacccaatcttcggtcctgcttcatgcaagctactcgaatgcgaatagacactgtcaaggtgacatcatcccgctgagtctatttgaagcaaggctggcactcacgaggtctctcactgacatctcagccctccttgaggagagtgagtctacaagtcatttttataaaagtctgatgagtttctaggtgaaaaattctccctataacaaagaaaaaaaaccatcttttgtacacaattttttttacaagggcaggagacacgttgaatgaggtggtgttggaagtcaaacaaaatgaatgtcgtttagagcataacagacacagccttagaagacaagactgagggacagtcggacatcataatcatcacatcatttttctcgatgaaatacacttcatccccagccaagaatttgaactttcaaataaaacctcccatttttatttattcgagttttcttgttgtcccaaccaaacctcctctcttccaagttccaccaaccaatcatttgaactcaatcaaacaataattcacaactccaactctgaactcttcctaatttcgtttctctaggtaaaagcttctctctaaccattctccctctactctctccatttttgtatacaaatgttttatgtaccatgaagaactagttccgctgagaccagtgctcaattttggtatgtataatacattctgttatatgaagtttctgttttagggtttcctttttagcaccgaatcaaaccaaacccatccctgttttccattgttattaatgttgatgtgcagtgtgtgatgcaatcctgtttctcctgcccttaatttagagttagtttaggacctaggattagagctccaattaagtaattatattttaattgtgatgtagttttcagttttcaaattccactttcctgttttatctctgttgcaaatttaactaccccacaagactcttatatattgctaaatcatagccaattaggggagacgacatt

SEQ ID NO: 191880 - DNA, 1312 bp, Cannabis indica
tttgggtctcttttagtatttgcaatgttaaatatgctttcttttgtcagtcgaagttaaatatgtttgtaaaaggaattatgtccaacattttttcatttatttttccctaggaatttcgcttcagtttttttttttggtaaagattgctttcaaaaattgcgcaattggctacatatcatttgtgttaggcatttgtttcatcttaaaacattgttgaaagtttaagtttgtgatgacatcagttttctctttctaatagattcgtctgaaaacgttgctggacttttaagtttgtgatagttttctctttccattaggtgaaagtggaagatattgaagcctatgctccaaaggatttgctaattgtcacaactggctctcaagtaagattatcttcataaactccacctccactgcaaaatagatttcaatactatcagtgagcctgttggtgtttgtaactgagaatgctatttatcaggcagagccacgtgctgctctgaatcttgcatcttttggaagcagtcattttctcaaattgaacaaagaagatttagtcttgtattcagctaaggtaatggaactaaatttcatctctaccattttctaacttgattagcactcaaattttcacttctgatcataaaactacaaacttaccaataaaatggagtgcatttctccgatagtctgaatgcatttagagattgttgaattcattgactgtttaattataccgttgctttcttttctgtttttacttaaggtgattcctggtaatgaatctcgggtaatggatatgttaaaccgcatatcagagattggatcaacgatagttatgggtaagaatgaggggttgcacacatctggtcatgcctatcgtggagaattggttagttcctttgcatctcaattttaaatctttatatgtttttttttgttaatgtgttatcatctctagtgagcctgcaatgaaatttatgttataacttgatgaactgtaagtctgttactgttagaaactagttatgtaaacttctccccctctttttaacacccatctgtaactgctgagaaaaacacttgtatttttatttgattaaggtagctggtagttaagcaccatacgtccgtttactgtgttttaattattcctagtgtaaaggccgtagaatttgattttcagtttacttgttaaacgacaaaaaaaaaaaaaaaatttaactcttctaacagtagcatacatttttattataaaaatgtgcatttgtttcttgtttttatcttatatacttccaatggttttgaa

SEQ ID NO: 191881 - DNA, 2076 bp, Cannabis indica
tttaccctaagatcttgattaatcatccgagattcaaatgtaagtccctttagattcgaagataagctccccttgcttcgattgagctgaaatccctttcctatgactctgaactccctttagatgaaacaacctctattatcacttcatcatagaagcttgaactcttcaaccaaggaggaacctgtaagaaacaaagaagaagaagaaaaagatttttaccctagtagagaaaaacttctatcaaagaatcaaatgagtgggagttagttagaatattcaagaattaactatggataacaccaactcatacaaaccccgactttgacagctcactaacctataaaccaataatatgtctaagatattttaacataaaaatgctgatctataaagctaacctataaaccaataatagacatattcaaatggaactactgactgtttaaatgacaaaaaattcataatttgacaaacacaaaaatataggtggcgtttggttgggagaaatgaaaatataggaataagaatgggaatagaaattggaataggaatgaattaaaatttaaaatgcataagaaaattgataaaaaaaattattagaatttttaaatcttgtattagaatggtctttcattccatttcaaaatggaatagtcattccaccaaaataatggaaatatcattccatcggaatgatattccaataattttaaatacaattaaataaaagaatgaaatgaaaattattatttattttagttcttacaaatattaatttcttaattgtaataattgtaaatgtattagtaaagattgtgacgttactcaaattagatataccatcatttcattacgtttgtgtattttatttttttgttcttaaatatttttatattaattcctgctgatatattgtttattttattgaatctttcggcttgtcttttttaagaaattttacatgtaaagagattgtacaggggatcagtattggagaatcccctaaagtaaactagtaatctttttccgtttaattttttgaaaatgaaacagataaaccaaaactatatgtttttattttatctatttttattatttattagcctgataacccgcggatggttgctttctgaaaaagaaagaaatcgtctattaaagacatcaacttagaaaaaaaaattctataagaaaaaaaaaacagaaaagaaaaaagaagctattggcatgaaagagcagtttcattaaattataaaaacattaattaatttgctaattcattggcgtaactgtagcttccgtcactactatatgaatatgatgacatccagctttcccgccacgtggaaataaacgaaacaaaacaaagagagagagagaaagacacagctctttcaaagtcacatgttaatgccatgggaagactttgacaaacaaataaaaattgacatcactcacagctcatcatccaaattccaaaccattacccatactaccaccaataattataatgcagcatctaaatatgttaatggcattacctatttaccaacatgctatctatcaaaataaatattaaacttaaacatgagatgatgagacacaccaaaattcatatgttagcacttttcatatgataaaacaacattaaatctctagaagatttaaattttttgttaaatttgacataaaaaaaaatgagtttgtactatctttagtccactatttataattgtgctccaatacataaaatataaaataaggataaaacaattaattcattgataatcatttaatattttattgagaatctacaaatttattattttttattcttttattatttaaataatgataatatagtaaataaagtaaataaaatttagtaaaaatcaatgaatcacaacaattattgacattatagtaaagaaaaagtagcatttattgtaggctaaatttggcacaattcaccattagaatatagtttttttagatttgctaaaatataacaatacactacttttttgccactctactaaagatgctcttaaaatccttttttttttttttaaaaaa

SEQ ID NO: 191882 - DNA, 2843 bp, Cannabis indica
acccaaatcctgacccagaaccgaacccaaaccgagatctagacctggacctagactcggactagaagtcgaaccccaacatggacccagactccaacccaaacccaaacttggaaacggaaccagaactagaactggactaggaccaagacttggacctagacttgggaacaaaactagaacaacagatgaacccaagcctgaaccaaaaccaaaactaggacctagaccaaaacctggacttgagaccaaagacatgaacccagaccaggatctagacccagaccaatacctcaacccaattgggacctgcaccgaactgagaattgaacccagactcgaacatagtccaaagatataggacccacaactgagcatacactgggaccttgaccgagactcaaaccaggaccgagacccaaacccaaacctagtcctgaattgggacgtaggacccgaatttggatggggcacagtgatgaaaacactaaggcatgagaaacaagttaagtcccaatggcctggtgacgagggcgtgagccaagagattcaaataagaactcacaacttagtcaaaagagtttcaaaataagaggagaccgcaatcaacaatgaaggagaacaaagatttgtgcttctcatcaaagtagactcaatttagacccaaattgagctgatcacgtttttcaacgaatttcgcagctttcctttttaattttgtttcctttattctatctttgttttatttggaaaattttctttcttttggtttccttttttcttggttgtaagtttgctacataaagccttgtaaacactttgcaaaatcaaattaattttgaataaaatttagagaggttttcttcttgagctcttgagagaactattcgaacttatcaagaagtattccttgtggcattaaacctgacttatcaaatagatttccacaactatttatggcatcttcctttatacaacggttcatgcttaactaagcattgggtcgcggttccacttccaaatttcatgaattcatagagttttccatacttggtgtcaggtttcatcacaactaatggtgttgtttgtatcaggttccaaatgatgggtctagatcctagtcccagttcgggtcgggcctcgagttaggtccttggtcccggtcttagtctgggtttgagtctcgtgtctcaatctaaatctgaggcctaggttttagccctagtttgggggcccaggttctgggtctgggtcccccatctatgtttgagtcctaggtgtcgggttcgggttcatctctcgagttctagtttgagtccagctcctagtctgggttcgggtccaggtcggacattgggtcctgattctaattcgggtctaggtttgagtctaggtcttggacttgatcccactttcgatcttgttttaggaatcgggtcccaagtcctagtcttggtccatgtccttgtttgggttctagtctaatttggggatcaggttaggtcctgttcttgtcccagctcgaaatccaggtcccggtccttgtccgatttaggtttcgattatgatttggggtctgggttcaagttcaagtttgagtccaagtttaggttagagtctgagtcctagtataagtctaggtttgagttcaggtctggatcccggtctaggtttgggtacgggtacgggtttgagtttggatcccagatccaaacaccaactacgattcgggtccgagcctcgagtccagatctgaatcttcgtcttgggtcccgatccttttccattttgggccctgggtcctagttctggtcctagctctgggtcaggggtcaggtcccaagtccacggtcgggtcctaggtcccagacccagttcttgagtccaggtcctccatctaggtctagatcataggtcctagactgggtgcagacttaggtttgggctcaggtcctgggttcaagtcccccattgaggtccggatcctaggtgtcggttttggcctatgttcgagttttggttcagatcgcgagtccatgtcaaagtttaagtcctggtccaagttcaggtctaagtttaagtttgggtccaggttcggattttggttcagatcgtgagtccatgtccaagtttaggtcctacaccaagttcatgttcaagtttaggtttggatccccggtccagctccgagtccctgttcgagtctgggtcccggttcgggtctaggtccaggtcccagtctaggctttggtctcgggtcgcatgtgacggtttaggtccaagtcccagtcagggttcttgtctgggtttgggttcgcatttgggtccaattctagacccaggtcctggtcacaggtacgggttcaattcttggcttgggttcaagttcgggtctaggtctgggtttgggccgaggttctagtttcagtcccgttcatgggtcccagtctggttccggttcaggttccaattttgggtcccgggtacaggttttgttcaaggttcgggttcatgtttgggtctaggtttgggttcggggcctggtacttattttggtcccgttcatgggtcccggtctggttcaagttcaagttcaaattttgggtcccgagtccagacctggtcctatgttcgggttcgggtggggtcccgatcccaattctgtggcctaggtctcagtcctagttttggggcccagttcccgggttcgggtccaccatcaaagtttgggtcctaagtcccggttcgagtactggttcgggtctcggtctgcatccttatccaagttaaggttcggattcgggtcctggtcatggtcacagttcgggtcccgagtcacgggt

SEQ ID NO: 191883 - DNA, 1496 bp, Cannabis indica
ttcatttttaaagtatatttttttaaaaaggtaaatggaaaatattccattttagaagtaactctgtactgtgctgactaatggattgaatttgattaaaaaattcaaaattcgtatttgtgtagattgaatgttgattgatatgtaaaagtaactaatccaatccaattcacacatatttaaaaaaaaaaattaaaaaattatatatagaattaaaattttaatacaatgaaattagtaatttaagctctttatagtatggaggaccactaattaaactctaaaggcatgctcactacaaaagagttatttgaataaataaataaataaataaatatttatacattatatattattttggtggctttttggcatcattttggatttcaacttatatgtcacattttgaagttagagaatcccttattataataaaataaaatcccatacttttcaaagacgtcacatttcttcaaaaagccattcactacatgctcttattgtttcttcaaaaattatttatttttaatttttaattgttttttaagtgttatttttgaagaaaaaaaattaggggggccatgacaccctctctgttattgtctattatactagttgctataattatttataaatatacttatatagctaagaatatatatatatgcatggatttatatgaggtatgtagctagctagccataaaattatctttatgcactttctttagtttatgtatgtcatgtcattatgtgaatgatcttcttaatccaagttgcatagaatgttgcccataataatgacccttctcatcactttttttttgttcaagtacgtatgatatcaaaaaattatagaaaaactaaataaaaaatacccataacacacaaccgtagggcttaccctgaattttaatgggctataaaaaaaaacaaatttaagctcttatttagaaaaaacattcgtggatagaaagttgttcccgtctcagccttattttttatttaggtggaaaatttccgccctattgaaagcggtactcgtagagttctatgcttacgggttaaattttcgatcccagcataattatattttaattcaataattattataaaaataattaaatactcgtatatatgtaagacatcatacatattatcaataatcttatcaattatatattacacattattattacaaataatataatattaactgtgaaaataataatcagtaagatgtttctagttttatctccaagtttccactttgtaattaactgagaaagtctttattgattgatgtgtatttttgcattatattataaagaagatacgcattataatgatagtcttatttgctaacactatacctttgtttggatatgcattattctactctcatggtgtatattttgagaagaatatccatctcagaatcttagtggaatataaagatgagataatcaaccaccctaatattatatatatcatata

SEQ ID NO: 191884 - DNA, 2914 bp, Cannabis indica
ttatttatttatttattatttctctgtttactaatttgtcattttctttttaagttttgcagggtaatagcctcatgagaattcttaatgtagctgctttcgcagtatctggatatgcttcaactgaaggaagaatttgcaaaccatttaatccattattaggggagacatatgaagctgactatccagacaaaggccttcgatttttctctgagaaggtaaaacttatagttaatttgcttaagcaaatatgaaagtgtcttctatatctcttttatgcattcctagtgtaatgcctctgaaattaggaaatccataaggaggtcaaagtatttagagttagaaaagatggaagttcaagatttgttcctttccttccacttggcccatgggtgggggcatagagaggggtgtttaaggggtaaaaaagcagaaagagcggataatgtggacacaaacacatttaggagaaatttaaggcagttcttatctatgtaaacatgttcttataaatagcagttaacctaatacttgtaaattcttatttttggtctcaggtcagtcaccatccaatggttgttgcttgtcattgtgagggtacaggatggaaattttggggggatagcaatttgaaaagcaaattctggggtcggtcaattcagcttgatcctgttgggattttaaccgtgcaatttgaagatggggaagtttttaagtggagtaaggtgaatggttctacaattatctattatttgcagcctgatgtctttgatattattatattattgtagctcatctttgaatggactacattctcaggttacaacatcaatttacaacctcatattgggaaagttgtattgtgatcattatggtacaatgcgtatagaaggaactcatggttattcatgcaagctaaagtttaaggagcagtcgattattgagcgaaatcctcaccaggtactttccatgctttttcaactgattttgtgggtttcttgtgaacctgggtgctgaatcgattttcagttttactaattgtgttgcttttaacatgctaaatggctttggatacaggttttgctggttctttagttatattgaaataaactctgatatctgttactttttactgaacctgtgggcgaatactagttgtgttgattttattttacttttgtatgtgtttgttctcttgtttagaaaatgtcgcttgaaggttaggagttgacaaagcacttgaaattgaaattatcttttactgttatgaatttcatttaaaatgaattaattggagaaaactgcaaatgaatcttacaaaatcttcctatgcattttggcatgggaatttgattgtgaacataacttgattagaagatattttttgtttacttttctcagggactggtggtacttggttgcaattttagttggttctttatcgtcgtttgttctttcttttatatttgagaaaactagtccatgttctttaactatgaatagaaaaacaacaaagataacaaaacataacaaaagggagtattacttgacttattggagtatgcattatagcttcagtttgtggattaatcttcttctggtacactgttttaagtattctctatttcattagtttctaatatgtccaaggatgtaaattaaaaatgaagaaaatgtgaagagtagtataacgtttgaatgccgtactggatttgaaatcaaatgtacataaacatgtttatgtatatgtgtacattttgagcatttttctggattaacttgtttctaagaaggtgaaacaactacatatattttccggaaatagtaaaattgaatagaatattagaatggattaatgaaatgctaaattttatgtgaagtttagatttcttttgctaattgttttttcttcttgtcatttttaatgctgatggttatgtttatctttcatttttatcttcgaatcaggtacaaggtgttgtccaagataagaatggaaagacagtggcaacactatttggaaaatgggatgagagcatgcattatgtcattggcgactgttctggaaagggaaaaggatttgagtcattgtctgaagcacatcttctctggaagaggagcaagctgcccaagtatccgacaagatataatttgacgcgttttgccatcactctgaatgaacttacccctggattgaaggtcatttcaaatttcattaactcccgtggttggaaattctgctgtggagctttgtcttttataattttgattttattaagatgatactatgtgggtgttataatctgcagttacattgaaaactgaaaagacactgttgtcgggatggaagtttgatattatatatgacttgcaggaaaagttgcctccaactgattcaaggctcagacccgatcaaaggtatctagaaaatggagagtacgaaatggctaattcagagaagttacgacttgagcagagacagcggcaggtaagttattgatttcgttccttttgttgctttaatattttgttgtgagctttattagacatgatggataaatatcgatgtttgtttgttcactcaatccaaatgcaggctcggaagatgcaagagagtggttggaaaccacagtggtttgctaaggataaaggaagtgattcttatcagtatgctggtggatactgggaggcaagagaaaagggaaattgggattcatgccctgatatatttggtcaatttcattctgatcaaatcgttgaataagctcattgcattcttctggctttcaccaattcttttctgtttttttttcctcgccagcttggctctgtttcaaggagttgggatgtaaattagatggtagacttctgtagctaataatgataaatatgaaaagaaaaaggagaagaaaag

SEQ ID NO: 191885 - DNA, 1609 bp, Cannabis indica
aaaagaataagagggaacgtttttattgaatattgaaagaaagaaaaaaattacatggttagcactaaaagaagcactaatactagattgggaatctaaatacataactaatgaattaatatgtgtaagtgtatcttctttgtaatgaagaacgtgttattcttttagttaaataaatatataaaatgaaatctaagtaatacaacgtgttgtacttttttatattttccaaaatgaaaagataaagatagatgttaaggttaagcaactaggccttgcaacagctggatttaatttaatatatatcaacatttatattttatgaggactaagcaaaataaatttatatattttttaaaaataaaagaaataaagaaaatcattttcaatctttaaaaggactgtttgtacagtggaataaatcaagcatatgctgtcaggattcttctgattggttggttgtacacgaccgtgcaatacatatctttttctttcttggaatacacctttgtgataattcaatcctaaattattggactcaaatttttatgttttcttctaaatggcttttcgttcttaattttactcttttcttttcttttggttaaatagaaaaaataaagaaataagagtctaaacttaaatgtcaactctcaactaattggatttagactttttatttttgtgtcatttataatcacatatgaaacataaaaacatggcaagcacatgggaccaaagatagcataatacataaggggtccgtaatttggtgtagccaagcagaaaatgacgattttttcacgtgaaaaagttacttataatgactaacctcttcaccaagtctaaattcattattattattttattttttcaagtgggtgaatatttcacaattatttttggtatttaagtcgcttgtattgcacaaactagaaaattatacaaaagctgagatatatacctccaacctcacttttacattctcaaacaatttgtgaaataaccaccccaactcttggtggctaataccatttaattctgcagataaaattccattttagaaattatattgaatttttctaattatatacatcactaccatatcccaataagctgcattcttagccctccaaatattataaacaagagcccaaattacttacccaatacactccttttttgaactcgttcatcttgcttctctttacttaagaacgtacaccttcagctgaagaaaatctggtgtaatatgaagccaaatttaattcttgataaaatatagacacaacttgttgaaaaagctcttaagaaaaaaaaaagacacttgttgaaaaagcagaaaaaaataaaataaaattgacttgtttaatatgcaaaattaatatctatttcattatcaccgtaccgaatcactgacacaacaaaatatttttgtttccaatccaattaatattatttaatatcatttcattatgtaacttacaaatacaaaacatgtgattttatgaggttcataatgtcgaagtttgcatttctctaacttttgccaccagcaactgtcatttttggcgtatagctaaccatgtataataatatcattacctta

SEQ ID NO: 191886 - DNA, 1043 bp, Cannabis indica
ccaagccgatcgagggacctcgacaagctcctcctcaggcctggaaatctcgtcggacccagcttcgaacctggccccgaagtaaaatgaatcttctctttctaactctcttttcgacattcttacatatactcggtctgcttttaaattctggttcagggtttagtttaattgattattctgacccaagaattcttggttttgatttaatgctaaataatttttgatgattttcttttttggggttgcagctgagggaggaccttaaggagtatgcgaaagtgttggtggtaggggctggtggattagggtgtgaactactaaaagacttggctttgtctggttttcgggagctcgaagttatagacatggaccgcattgaggtctccaatctcaatcgtcaatttctcttcaggttctttttatcttcacatggtgctatgccaattgacataacacacaagccatttatgtacaggaattactatttgtttgaagagaaatgctaaaaggaaccagtagtgcctaagtatttgatcccatataatcgaatgaaataatttataaggagtattgctaatccatttcaaggtggaaggtgctaggcaccaatgctcttgtttgaatatgttgactatgcaacaagcaaatatgagcagtttttaaatttttattattattctttatcatcgttgatactatatgctaacagactaatcttttcagtttatatgcaagtatttagctggaatttcagtttctagtaagcatgtttaccttagtagtccttaatattgtagactcgaagatgtcggtaagccgaaggctgaggtagctgcaaaacgtgtcatggaaagagttagtggtgtgaatattgtgccacacttttgccggattgaagacaaggagctttccttttttagtaattttagtattattgccctcggtctcgattctattgaggctcgaagttacattaatgccgtagtatgtggctttctaggttggtaacttaacttcctgattttcatctcttggtaatg

SEQ ID NO: 191887 - DNA, 1133 bp, Cannabis indica
tttttcccttattgttaagaacttgtttgacgtaattatgataaattaattatagaaaaataaaggggtcatttaattttgtgctaaatctgaaatatggccactacagggtagagattgatgatgcttgtttatgtggaccaactataaaaaagatttttatagatatgaaggttgatgaagtgaacaaaagaaatatgaaatggtcaatttagctcaaatttatggaatcaaattcttgaggacttgcaacgcaaaagtaagcgaaattactcaatgaatcaagttaagaaaaagttcaatagattacttactaagtatcgcaagtttaatgagctatgaaaataaactgaatttggctggaatggagcaacacatactgtgggtgctccagaggaaatatgggagaattatatgagggtaagaattaatttagtcaattttttttagaaaattagtcttaaaagaagttgataaaaatagttctcttttttattataggcacactcaaaggtggcactcttatcgcaagaaaggatgtgatcattattgttggaactaacttttagtaagtctactgctagtggtaaattccgatggtttgcagctttaggtccaccaaacaccgatgatgaaaaagaaattaaaaatcaatctgagcgcataggcctaaatgacattgacaatagcgctagctgtatgggcacacaacttgttgatgaattttttagaagctaaacaaaaacttctataacaagtacagaggaaaatgctaaaagataaaaatcagaacaaagaatgttgaattgccgcttggacacaagtagctaaaataagagttgagacaactttagccaaagctgaaaaaaataatgatgcaattgaagggagaagtagagatgatgagtttttagtcacaaaatgtatgcaagtacttaaggaatggaaggagtaagtgatgatgcctacatgaaagctgtagaattctgtttggagagagacacttattaatatgtctactcttttagcttggctagataaattagtttaataattcatgttaggatatttgataatggtgttgagttctacttttatgtgtcattgacattattataatatattatactaag

SEQ ID NO: 191888 - DNA, 2149 bp, Cannabis indica
tcacgattgatccattatgtaagctgctttgacagaaattcggccttttgattgttacttccaaaaaatctgatccgagaaaggatgagaatttcaggatatcaagaacacgaggtcccaattcagagccaaaaatctgcatttacaatctccacatttccatttcatttccaattgacacatctgctagattggtgatagtatatctgttacctcttagttgatgcataaaatctgcaaattcttgataatccatccaagggatccatggttgagtccagaagttgatcgattctcccgaggctgcaattgacattgatcccttttgaataatttctctagcttccaagatattcctccattgtatcgagtcactgcacttggccttaacactccagaaatcctcaaatttacagtatttcttcagaaggcacgaaacccatggtctatcttgtccattggcaaggaaccaagccaatttagccaacaaagctctattcatatcttcacaccttcttaggcctaaacccccggaagctttaggagagcaaatgttgtcccaagccttgagagctaagaatctatctttgtcaacatttcctatccaccaatatttcctcatcaatgcatctagttggcgacatgtagagataggaattttgctagtggacatagcatagatcggcatcgaggaaaccactgactttagcaagactaaccttccggcatatgataacaatttcattttccaaccatctagcttgcccaacatactgtctttgagtcgtttgtactctgctactcttcttcttttgaagatgaaagggttcccaagatgcttttcttctccattaacatgattgatcttgagaacccttagaactgtatcttttcttccagtgttcaaattcttggagaaaaacaccccagacttagctttactacacgtttggccagacatagcctcatacgaagatagacaattgatgatcacttcagcctctttcacatttgctcttgcaaagagaatagtatcatcagcaaacataaggtgagaaattggaggagctgactgagagatcttaattccatgaatcaaaccttcatcctctgccttaagaagaattctcgatagcacatcttgacataggatgaataagaacggggaaagagggtccccttgtctcaaacccctctttggcaacaattttttcaacggaaccccattcaataggaccgaataagagactgtactcacacaggacatcagaagccgagtacttttttcattgaaaccatttgctttcaagaccttttcaagaaaaccccactccattctatcataagccttgtgcatgtctaatttgatcgccatcaggcctccaatgccctttttacgctgaattttatgaatcaattcttgtgtgaggatggaagattctgcaatccatcttcctcttataaaggccgactgaaacggggcaattaagtcttccatgagagggctcaaacgattggacaatatctttgcaatgattttgtaagaaaaattgcaaaggcttatcggccggaactgatccatactcattggaaactccaccttgggaataaggcaaataaaggtattattgattctaggatcaatagtaccaaactgaaaagcttctttaactgtggcacaaagacaagcgcccactatatcccaatactttctgaagaaacaccccgagaaaccatcaggccccggggctttcaaaggatgaagattaaacaccacgcccttgatttcttcgtcagttgggatcttgactatgtcttcattcacttggcagggaactcgcttcattactaagttttcaagactaaattcttcaggggaaagggaagaagagaaaagatcgaaaaaatgagtatttacgacccttgcaatgttgcttctgtctttccaaattcttccttccttatcccgaattgcccaaatattatttctccttcttctcaccacagtagcagtgtgaaaatatctagtatttcgatcacccaaagcaagccaagtttccctcgatctttgtttccacatgctctcttgtttagcccaagagaccgacagctgggaatgaagtctcgcctcctcttctttaaaagtatc

SEQ ID NO: 191889 - DNA, 1528 bp, Cannabis indica
agcatgccacatacaaatatactcttcttaccatttaatttagactactctgctataaatattattagttaaaaaatgataagtttcattaaatgtgttctcaatttctttagagtttcctataaaagattatgtagggcatcacttgagttgtggacaaccatagaccatattaatctaatactgtcttttagtgcagacctttgtatgtacgggcagcaccatgctgttttagtggtgggccaaattatttttaccatcaattattttcactattccaattagcaatctagctaggtcggctctccattattattattatttaataatataaaaataatatttcccctaatcttctctctcaccaattcttggtttacaatttttaattattataaaaaaaaaaacagttactagtcaagtatataaccataaactaagtctcctcataattgatttttcaagtcaaaatgaaaatcttttaaaaaataattattccaagatttgttttgaagttgtggcaatagtgtataaatttccgcgtgtatgttcacaagctatccatgatcagggcttttatttcagagtattattattaagcattttaaggtttacaagaccaaattaataaataaataattttttatattatttattaaattaaattatggaagattcgatattaaattatactaatatatattaatatgttatattttgtggaatttaacattttaaaaaaagtaactttttaacatttttatttattttatggctgagtcatatttcaaatcattgaatacataattatatgtttacttctctaccacgctgaagttgattctcattatcaaactatttttcatatataaattttgacattatacgctcaaattccattttatattattggatgattttgtggcatgaaattgagctaagtttcactcattcatataaaatcccaaaatatatatgtaaaaaataaaaaaaccaaagatggtgaagctaaagaggccgacaaagtagcgagcagaagacaagtgttttcttctccaataattaataatattacgtgggtgcacacgtaaatcatatctacatatctataattgttaaggaaaacaatggtttaattaatactaaatattaccttacaaaaaaaaaaaaaaattaatactaaatataataataattaaaaaatgtaaagcaatttttgtggtttacttccacacaatggccttgatatcttctttccacataagaaagagggagagagagtactaataaataaatataaacaaataaaatcgaattattgaaatcattatatataattaaacaaaatttgcgcttttataatcatctttagacaaagagacagtttttctaaattgctaaaagttggaaaaagccaaatgataaaataaaataaattatactagtttttttttattatttatatataaaaatatatagaaaagaaagagtagcagatagatgcaaaatcagctttcacactctttag

SEQ ID NO: 191890 - DNA, 4332 bp, Cannabis indica
gtgtaataggagctgtatggcataggagggcgagccttttttgtgcttaacatggcacccgtgggttgctatccagcggttttggtgcaagttcctcataatagctcagacattgacccctttggatgcctaatttcatataacaacgcagtagtttcctacaacaaattactgaaggatgccctaagtcagactagaagctctctcccaaatgcttccctcatctatgtggacacttactctattctactagagctttcccaccatcctacatctcacggtattcattatttaaaggttttgctgagtggtctctaagtaccacatcaagcatttattaattctaagctctaactactttaccaaccaaattccttataaaaaaaaaaaatcaatcaatgtagtactattacaccagtttagaacggcattagaaacgtgttacacattcactagtaacgtgttacaccttctctagtttttaatccaataataatcatagaaggtcacaataataataaggtctctagtttttagattatgaaagtgtcgtgtcttgtgatttgagtttaccataccagttcttggtttttttattttttggaaacagggttgaaatatggtacaaaagcttgttgtgggcatggtggtggtgcgcataattttgatcctagagtttactgcggaaacactaaggttatcgatggccgtaatgtgactgcagaggcttgtagtgatccgcacaactatgtaagctgggatgggattcatgcctctgaagctgctaacaaagtcatcaccaaggcaattctaagtggctcttattttgatcctccttttcctttgtcccacctttgtgatcttcaaccaataggttaaccattttactttattccttcgtcactttaaatcatttcatttgacaaagttaagtgactctagtagtggcaaatacctatatcttcaaatcacatcaatcattcaaaatattatttaaaattttaaattaaaaaagaccttgtgggttgacttatctgtaaggtaagctcctagcgtattgctttcgtatgctaacgtgtttaatttcgtcatctatattcaatgctgtggaaactacttaaaacactattcaaagactagcgctagcaactctatttactgtagtaattgattattattgctgtcaaaggcaagccctttttctttatacataagaaaatttgtatctatgcagattgggttgagtttgttcgcaagattcttcttttatttctttaaaaaaactcaagagattctttaatttaaaattaatagcataactaaaggtgagaggcaaaaattttgttctgttgtaccaaactcatattttgtctttttacagattttatatatacaaggctaggctagaaaatgttacattattggcataagagccaaacttgccggcgtcctcgcaaaaaacacatgtttgaaacttgggatgtgccaaaaccaaatttcatataggctcctgaatagaacagaattataataatactagtaaaaataaagaaataagaaagtgtctcataataatagtaatacaaaaaacgaagaaattaaggttgacatagaatgagtgaaataaatatactgtttctcttttcttcctttgaagtgtggaagaatgtactgtacacatgaaaatgaaaaagaagaaaagaactcccaaaatgtatgtatgaaaaataaataaaggtcaggcaacataatcatgttcaatgactggttgggttctaaccattggagcagaaggcattttactttttccaacactaaatgtgtcaaacaacacaccacattcagattgtttctccatagctcttaatctcctgtcccttacaatcttaaaaacgacagtggaaagcaaaaccagcaaaacgacaccagcaaaacccccaccgaatcctgtcaaccaccatttcaaatagaccttgtgccttgccttagacggtagtggtgaagtagttgaactaatggtggaaaagagaacagagaagtggccctgagatgtggcaaagcatcgatttggcacggtcatgctctcgatttcatagcttccatcgtcactaaacttgacacattttagaggagattctttcaaatctttgtcaattttcttaaactttatcacaataggctttttccctggctggacacttagactgattctttcatcgcctactacaaggccaccgggggctttagctggagaatcataaacagagaacccaataataggagcaaccaacgtataattaggcactttatagtatgaattagaccaattgcctaaattttcatacactatggctattcttctggcttccattggaaaggctgataaaactcgtggtggcacgtaaaaagagccgaattgacctcctctgcgccttaaacttggtgtcctgaacctcacaaatctgagttgcataccggtgaagttagctgggagacgaatcttgtaattaacagccgttgtaactctcactacagtttttgaggcatagtcgtggaaaaagttggccaaagacttagagtcatgacgatgaagaggatgagaagaataagaagtggttaaagaagaagcggtagtagtagtagtagtattagttttcacaacaagtgattgtgacaaggagataaccaagatgatacaccaacttctaggaaaaaaagaacaaccccattaaatatcaacccaaaaaactctatatctccaatctctttggttcaattcttgatttgcattcatatgtttctgaccgtacaaaaacccattaaagcttttgatatgatgaaacttccccatttatcgtgagagcataaaacaatttgtccccattcagaatcaggggtgtacggtacgtatttgagaatgaaataatgcaggctcaggaatcgtaagataactatgctctcttatttgatataagactttgagagtatgctagaaaatgacatcacaagagaccgaatcctgctaatataatactttcgtctcaatcttcttggaattttccgggaaaatgagaaaagctagggagtagaggtgtgaggaaaatggttgcagaaagctaaaagaacatcattacattgtacaagtagtgttattgttatataaaaaggaaaggaataaaggttggcatgttagagtggcactaccgaaataagggtcctattatgagttgtatttatggttctttctaattttattcctcttacgactcgttgtcagttgggttgggtagggttagttagttggtcattcaaagaagacgtacgtgtgattttatttatttattattattattatcatattgttaattactctgagtctatgaaaaaagctccaacgaagacttaggagaggaatagtcacacgagccagacgaaagctatggagcttcatgtatttgtggctattttaagcaaattgatttaatcttcctatccttcaaaataataaaccaaaaatactatggtcaaacgaaccgaaaacccaaacagaaatcaaaatatatcttagatttgtagtttgttttcttttttgttacaaactagaacagaaattaaaatctatggtaaatttattgtttgttttctttttttgttacaaattggaaacagaaattaaaatctatcgtaaattcattttttgttttcctttttgttacaaattagaaacaagagattaaaattgctctttagctgttacaatgcataatggtttagctttgtgatcatgaaataattcagtttattagtttttttattattatttaaaatgagagttgttaaaaaatattatttgtgcatggcattatttttggtgacactgctatttgtataattaactattgattctatatatcttttaagtcatatggctaactaatgcacaatgttctttcttatggcatgtttactaataagtaatgggaatcaatagtaaggtaatcattcccttacatttgtttacttgcattattaaaattaggaaagggagaagttgattaaataagggagaaaagaaagggagaacttctcccaccaattttgtaaggaatgccattaagggtaatggatttttattatttttattttatttttaatattaaatatataatgacaattttgtcctttaaaatatgtcttgcaaaataactaccatataatatagtttaacttaaaagggctaattagtcaatttaagcattccgattacgtttcctaataaagtaaacaagataaatcacaactattccatttctaaaaaattttaagtaaact

SEQ ID NO: 191891 - DNA, 1165 bp, Cannabis indica
taaaaaataaaaaataaaaatgcctaaagcatggtttaaacttttgatctctacataagttactttaaccattaaactaaagctaatactctattattaaatacaatttttaattataaatatatattgtacttaactaaaatatatatttttttttcgactttttaaggggctattgctcccttgcctctatgtgagtccgcccctatttgaaatcaagtctttaattagtctaagtactttattaatgaagaaactaaacctataaattgggtgccgcaagtaataaccattattattcatacccatattctcacaaagtatcgattattttttgattttgaaattgtacattgaagtaaaatttgagtaatgatcacttgtatttgagtcgttacgaaataaatgtgttcggatgatatgtttaataattatgttgtgtttgtatttgaatttttaacgcgtttaataattgtgtcgacatatttaataattgtgtcctcacaatagtgcaaattaattatcgtaaattttatatataaaaaaggtaattgtcataataatagttttataatcatttatcgtgtcatgtcgtgtttatatcgtaagtcgtgtttatatcgtgtgccttgctaagtaacatgtttgtatttaaatttttgacacatttaataaatatgttggtatttgtatttagtgtttactgtaattatgtcatattcgtatcaataatagaacagacatgatatagcaaattaccaccctacttgtaagttgtattgatcaatggttagtgatgtagtgcgacaattatatcaaaataagagactataaaattcaatataacatttataggaaacacacaacatatcatgataaattttcaacatcaagtcttctatgtagtatatatgtataaataataaatggttagtgatgaacaatgggtattcatcaataaatatagctacattatttatcgcgtatagaaaactccaacttttatgagcatttaattttcttctctctttttctttttgaacaaaaattatgagtgattcttatatccctcgataatcactaaataaaatataggactaaaacataggttgacataaatctaaagattagagatgtttacattgcaaagatagataactaataa

SEQ ID NO: 191892 - DNA, 1083 bp, Cannabis indica
taccttcaaattttctttctaaatctgaaaggcacttctctaccatctcaagacttatacccttagaatggacctgcattttaattatacaaactaatttccatcaggatggcctcaataaaatggttagaaggaacaaacgcagcagaactaaatttgtaagtcatcgttgaccctttggccaatgacctgtgagattgttcactcactcaatcaaaaggctgaaaggcaacagaattaagtaacaggtatgatttatatatatgtgcatgtatatttatattcccttcatataaccagacaaaagatgtataaacagccacctcaacaagagatctctcgtaatcatcaaatgacttcagagttctctgacccctttcagtagaaagtattccctgattaagaaaatcaagtatgggatcagttaataattacatcccgaaatcaccaaaaataaaaaaaaaaataaaaagaaatagaactacaaatatgcaccagaccagacaaataaatattttatttgtacaactattttgataattgggacagccaaacacaaagattctcattgcttttgttttaccaattattgaaaccttgctattgattctgacacttttagcaaataaatcattccgcaaattgactgacaatcctggtactctgaatgtgataaagagaggcaactgtttccaaatgataagcctcctatttagttcacataggaagctctagactattatcatgttacttatattttctttgtatttcttatggcaaggatagtttgaggtttttgcttctattatcaacaaggcagtgggattggagagactgttgatctattagtgcagtgtgtgtgagctaaggaaattatctggaatattgtaattgagaactgctcttggatagttttctagcctcttgaatggtatatttgttttgtccagattcaatcaaagtatcagaggttaattcatttactgttgtgtatatcatctaacagattaaggggaagaagaaacataactcaccgagagcttgagatgcagtatcgactattttaacagaatcatccagcag

SEQ ID NO: 191893 - DNA, 1997 bp, Cannabis indica
ttttttttttaaaaagtgtgttttgcttagtgtacaatttgattttttaagcctttcattttatagtgaaaaaatattatcatgcaactcagtattctgtactgtgtgcttcagacatcaaatccaacatgggcccaatctttcctttttccatctgaaagactcaaagatttgtctatgaaaaattggaatcaattggctggatcaggtcctgttccatggcggcaagcccctagcttatttagttcgtctattccatcatctgaaatacattcaagggttccttatgaagttgacatttcaagtgcaataaataaacttggtaacggggaaaggatatctggttgttcgttggacaagagaaaagttgaggatttatctgaaagattacataatggttccctgaagcttggtgcccaagagatacatgaaaatggcatcacaggtactaattttcatgctactttagatgtagtagaaagataatggtatatgtatgagctgtcttaataacggtctatttgtatgaattgtcttacttttgattggaagttatagtggctgtcaacatttgctttatacgtatttatacaggaagaattgtgatgatcaaattagttcatgtttgagtatgtctcaacagtcttcttctgtaaaggaggatccatctcctccccaatttggtttgcttgtacccttttccagtacaattgaaacaaatgaccaatttgtggtttctggaacaaatttgcggccaaaccctcctccttccttgtcaaaacaatttgttggtaatctacaaaacggggttgacccatctggtgaaactcaaattcgcaatgcaaggcctcgggcagatgcccgaggaagaaatcaattacttcctcggtattggcctaggtttactgatcaagagctgcagcaaataactggagagtatccttttgttttattttcttatttttagaatttagatgttctccttggaaagtttttctaggaatttatatttgtccatgttattatctgtataggcttgtgttatgtgttctaatatcagcatcccataagccttaaccagatttaagttctaattctgtaatcactccattgtttgagaaaatgttaagtgcaagtgatgctggacgaattggacgtcttgtgctgccaaaaaaatgtgctgaggtgagttttaatgttattaagtcgaatgtatctttggttttatgaagtgccaaaaaaagaaaaatatcttcagttttagaggcctgagaaatgttaattataaatatgccaattagttgaaagttgaatacatttttgaagacctgctggtgggttagatgggttagttaaatattagggatttgaatttgataattgatatgcatcattaagtcatgagaattttttaccatgtatgcttagagttgaggcctccaagcttgattgaattttttatttggttttatttgtaacctttgtcgtctcctctcctccactgaattgctcttgtttttctgtcaggttaatcttatactgctttgttaatatatgtagcttgaaaactcaattgacatggacatgatgcatatttgactattggcaacacaaaatgatccctttggcctagtattttcactaattctctttgtaggcatatgatattgatatgtttttatggaaataatgagtttttcttgtggcaggcctactttcctccaatttctcagcctgaaggattacctcttaaggtccaggatgccaaaggcaaggaatggatatttcagtttcgcttctggcctaataacaatagcagaatgtatgttctggagggagttacgccttgcatacagtccatgcaattacaagcaggtgacataggtaatcaactgctgtcaccaggttaattcttgaattttgaagcatggagttgattgttacttctgaatatggattagtggcactttaatattgatttagctcatcgagcaccc

SEQ ID NO: 191894 - DNA, 2175 bp, Cannabis indica
aaaaataaagattaaagaacttacgcctttgcagtaccaagaatcacttttatgcgagcttcccaagtaagggtaccatgattgcgcatggcgccatgtagccattgttcaaggtttccattgttcacatattcataaaccaacatcctatgcaatgcaataaaagtcagtatactcagaaaaaaaaaactttataaccttaagccaaaggtcaagaaatatagtcttctagtatgaatgctaaagattataataaataaaaaagggatgaaattgaaaagtaaatgaacacctgtgaactccttctatgcaatagccaaggagacgcactagattcttatgtcgtacatgccctatcgcttccacttcaactctaaattctttctctgcctgtcccctgcgtaaaccattaaaagtcgtatgagttattactcttaatttttagactaaaaacatggtgctttgaagtgtatcttattgagcttacagattgttaagaagctttttcacagctacttcagttccatttataagtttgcccttgtaaacaaccccatatccaccctcaccgagcacattgtctgcagagaagcgatttgttgcgaattcgaggtccctaagggtaaaccaatggccccacccgaggtgtgaaacttctggcaagccaattaaaggagaagctgtaacaatgcctccataagttgatgagtgctgctgcttgcggacacctccagagcttccttcttcccctgattgcgagctacatgctctatcatgatgataaaccgagctgcattgactcatgttatcagtatcacttgttttgctcatccctaagtgaactaacatcttctctgaattcttatcacttggtttatcatgaactgtcacaaacaaactatcctgtcgatcattcgtactctcggccccaatcctatcaaccttgatatctttggagatatttggaatttggctgagtgaaaacttgtccagtgatctcctagattttctccgaaatgtaacccatatggaaaggaaacaaaggatcaaaacaataaatgctccaacacaaatgccaatcaaaacccataattttaaaccgaaaagtgatgtcttctttgacaattctgcattcaaagaatccccagacgccatagctgatagatacccttgatattgaaacacagagcccaatcaggtgttctaagtaccaggtccaaagaactcaacacatttccaccttggtgacagaaaacacatacacttttttctcagagaaacaaaacaacaataattataaacgaagttagagattatgcataactattacttattgctacccagctaataaattgtgctttgtttcttgtcaaaacaacaattattaattagaagaaagaaagagagcattatccttttcttagcacataaatcccacagtaaaaggaatctttccaaactgaatttgaagaaattagatttgtgcaacttgcaacacacaacagcaaatccatagaatagaaaaatacatccaaagggggaaaaactgtagttgtattatatttgcattgacatttcaagaagaatttagatacaatgtatagatatattagaaaaataatgcaaaaccaacatatatttatgtgtgtgtatatttattgtgtatacatcactgtgattaaagaaacggtataaattccacattccaggtaaaaaagcaaactgttatccaagaaacattcacaagcaaacaaatcaaaagttaatatgtattgggaaaagggaaaaagagaaatctaagagagagcatcacttatgattcaagtaaaagacccaaaaaagaggcaaaatgtgagtcatgttagcaaatgagattacaaagaaaaaagtggttcaaagaagaaagcactcacctttgaatagtattttgatctaagctaaccaccttgatcttcttccttgagaacccagagaattaaaggaagagcttcttcttgaaccaaaaaagactcaataagcatagataggccaatgtagacctgaagtaatagaaacccaccaaaacccagatgcctcaaaaggcaagagtcccagatgagtagtttacaagtaggggttctggcctcaagtgggccaaaaccaattcagaagagaatgatattaaacaataaatat

SEQ ID NO: 191895 - DNA, 5465 bp, Cannabis indica
ttcacatgttattgagaggttggattctgctctctagtttttgccagctttgcttgtattagtttgtccaagatgggggggctctaaggggtattgggtcaagacaacgttctgccgcagccacaattacctgctcaatgtgacaacttagtaatagtattctagttgcagatttcctgtgcagtatttctcaagtaggagtatttttctattttacctcatcgagtaaaaagtcgatggcagcttcatcttcaacgatttcctttgaaggattccttaggaactgaatatccaattgaatttgctggaatccacttctattgaaggtttgcaggcgtacaaattcttgcagactcttgaggcccagttttacaatcattgatacaactgactcctgcaatttgaagacaattttaggcttcctaaacaatttcacaaaattgttaattacatatatacggacagaacaaaattacctgattgaattcaacttttgtgaaaatttcaactttttgtttgaatagttttgcgagatgcgtctcaagaagctgactcctagccctttgggtatttgaccggcttaatttttcctctcgcaatggattgctccgagatgagtttgtgcttccattgctgtcagtccgacgatgcttacgaagtccttcaggtaaaatctgctttacttcatttcttatagcttccaactagcgtggtaacaaaaaggagaacacataaactgtcgtgcaaaacatgctacacaacacttgaaaatggaaatgtaaaggtcagccatgcttgactactagtctaaaaaggaaagtgaagatctactaacctcgtggagaaataaatcaacaaacatatgaacttctctgggctccttgtgctgttaaaaatgcaaagataatagaaaaatcagagttaaattactgcatgctggttactttctttcaagtccataggcaaaatgcctcaagagtaacctaaccttgatccaatttggtgtattaaatctcttcttcaagagtactgataccctctgagttctcatctttatatactgaaaggatattagcattaagtcaaaatgctcaaagaaacatctactttctaaaagcaacatgcaggccaataacaatagaagagatcctactaagccatttataatagattggaataatctcaaaagactgaatatatcaaagcatataactcatacaaggtgcaaaaacttttcaccagttgaacgaaacattctgcaaatttctcctggaacaaaggcaggtccatattcggagcctctaataccacctccagaaaaggaagcagctatttcctgaaaattagatcaaatgccaccacaggaaccagaagaatgagataaaattaactaaaaattgatgttttctaacactaaacatagaattcttggccatatctccttgcctcagtgattcttggaatggcagtttgttcaatgaacagagaaagctgagccagcactagtacaagaccagccaagacttgatcgtgattagatgaattgtttctccctgaaagcaagaggaagcgatcatcaagtttcctaaagaaatcttgaaatccttcctgtacccaatcaacaatccagtccttcagtttaactagtagctctaactcgtcatctagaagttggcggaagtcctgaaataattgggtgtgaaatataggtaagctagaaagtgcagaattattaaatacacagcacagcatgcacgtacacttagcgtaaaaatatctaaacaatcctattagatacatacatgagaacaaaaaacaaaagaaagaaaacatacttacagaagaaatctattttacaagttggaaacaaaaatataatatgtacactaattggtcacttatttacacccatgatccagaatgctaaaagaatccaacatatttatatagatcaactattgcatccaaggtattttataaattaccagtaagacatccatactgccttgaagcacttttttctgctggcctccaaagcaacttgcaatgaatccttttctaatccatctttttggtcaatacgggatttagtgagggtatctgccatattgtacagattaaagttagacttgatgcccattcaaataaattaaacttagaaccttaagtctccagataagatgcagcaacagaatatttcagcacaaattgatttatttttactcttctttacttaatacttgattgttaagaataaatatttaacaatgaaatcctttctatctaaatcaggtgattgtctacatatccaacataataaagtagtcttattccattatgaactatgaagccactaaaactattctatccttgattatcaagattgaaagttcgacaaaagataattcctgctatctatatcaggtgattgtgtaaaacttccaactttataaagttataccataataagaagctgctaaaaatccttctgttctttcccttccacttataatttgcacaattcatgttcttttcaaatatttgggttttaagtaacaatatagacacaaaaagcaaatgaagactgacaaggcagaaattcttaataaaagatatcaaggatctaacaaaaactgaaaacaaatgggttttaaatacattggatttaactatagaaggaactttttaatatcctgacctgagatatcatgtagaagatgagaaaatgtatttgcaatgtactctttaacaaccacccgagcagtctgcaaatatgtatacggttagtctgaaactttcaacctgtcctaaaagtaatagattggtttctattttaccaagaagattttcagcagccaagaaaatacatctgaagttagctttaaacaaagggtaaataagacataatgagagaaattcagaataaaacctccagacagtaatcccccataacagcctcctgaatcacatcatccatcaaaagaacatctgtccatataattcctgcagatggcattttattaagcatgatgatcacttttaggttgcaaatgatgggcaaccaacaaagaagaaaacttccgaacagcagaaagcttgggaagagctaggaagaaattatcagacatgatgaataaacctagcaattaataatttgttattcgggaaagtaaagatgccctctagaagtctcaaagaggacaataagcaagccaaagtccctaaaattacctcaaagaaaaatacaagtatgtggtctagtgtagaaaaactacaacattccatgacaaggattataatactagttcccagtacacaaatccaataggaattcgcttaagcatattttacaaagtaaatagactaatgaagggttcatcaattggttgaattattatcctaaaattataaagggggacgaaaagaagggacagaggttttcaaatattcatagtacttacgaagaacacgtaacagatctgctgaaccaatccgattcctcacatattgctcagtggtttgaagatgcctaaaatataacaaacacaaattacattgcatcaggaaaatgcttcaaatcttttaaaaaatatctcataataaattaatttcttacttggtaaccaagtgttttgcaagtttagtaagctggtcatctgaatcaggaaatattactctatatgcacggatagcctctgcaaactcacgaacagaagcctacagagaagtttagatatcagtcacacaactacacaaaacagctgctaggggagacaagtaaagattcaaaaatataaactaataaagtgcataagcataaatcagttgcatgccagatgctagtcggagaaagagcctcagttttgaagggtaaattagcttcccggtcctagataaaactagctaacaaatacagttgccaaattaagttttaacattggactacacttatgcaggccaagaaataaaaattccatggaaggatgttgaaatataaaataaataaaatcaaatagaaaggtggctttattcactatcttctttgtataacctaatcactctaagaccatcttcattggaagaggtaagaattgtgctatatttggcaaaaaaaattacttaataaaatatttgaatcaatttttaatattgtactccaatggataattgtaaaacttgatgcaaaatttaatattagttaatgcttttaatatataaataaaaaaaattatccttaattttattataagtaccccaagttttgtttttataattggcgtaaacccatttttttttatcgaggtaaatacacaatatttgtaaaattgtaatttttatttagtttcgttaatagagatttcgttttgttttattaaaagaagatttagacataacacatgctacatctttccgtccaaacttagtgatttagaatctgagcctgacatgtgtgttgtttaagacattaacagagtatctgtactgacaaaacttgaggaaaattacacttttgctaacattgtgaacttatgccatgccgctaaaaaaaatcattgggtttatgccactaacaaactcaaaattttgggtactatgtcactatttatccttttattaatgtaaaaggtttataatataatactatacttaaatataataataaaaaaatcaaaaggacataaatgtaaacaaaaaaagtagtgcatagatcatctccaacagatggtgtatatattgagttaaatttggctcaaaatatgagaaaattagctctccaaaggtgtgctaaatttgatccatgctaaaagttgtgctaaatttggcacaagatatagcatgtgccaaatttagcacacaataaatgcaactttttcaattacagttttgtcattgatcattaataagctttaataatttttttttaataacaatattgacattagttattttttaaatatttaattaattgatgctcatcaatgatattttactttttgtcatgatttgcaacataaaatgctattgtgcattggagcacaatagcaaatgttgtagcaaatatagcatttgcttattttttttgtgacaaattaaacacaatatttacatcttacattgtagatggtcttatatttgtcccaaattttacaatagtgttccaatgcattaggggtaaaattaaccttttttgatagaaatgtgtaaaaaaatcaataaaaacattaaatttttattgataactctactaaatatataaataaaatgtaaaaagttattaattatattaatacgtgaaaaagaataaataaaaaagtgatttattgtggtgtaaaatttggctcatgctatattttgtactaaatttggaccactttatacactactattagagttcacttttatgaagatgggctaaaatatgcatatgcaccacacttttagcactccattggaggtgctcttat

SEQ ID NO: 191896 - DNA, 1571 bp, Cannabis indica
gaacatcaactctttctctccaatttattctccttatgatcatggagacaaaaaaaaaagtttttgatgatttaaaacttgcacacaaaaaagttcaactaagacactaatatatgcacttcgaacagttaatgattttcttaggttttcttttcacaatttttttatatttaaaacgttaaaatttacataaaatcgagttcaacttgatgaaaactcgatgctcctcgtttccaactcgatgagcctgtctctttaaaaaatataataataaaaaaactcaattaaaagtcaatgctcctcgatgcccagcttgatggggcctttgaatcatgattttcacaaaaaactagataaaaactcgatgtcaactcaatactccttgacaaatcttgatgtaatttgttaaaaattcataatttgtcacacgagtgtctttttgaggtaattttttttaattagggtacttattttatctatacttaagagttgtgtatatgcacttttgagaagtataaagttttaaaaaataacaaaagcatctcaaaacatgaggtatttgttgaattttttggagtacttttaagcttcccacttcccaaatgtccatatactcattttcaatgtgtaaagtttgaacaaatgcccaaattaaaaataatcacttcaaaaggacacctgagtcaaaaattatgcattttaactactaattgtatcgagattagttgatgtgcacaatttttatcgagtttttttttttaaaaaaaatataattttatgatcctatattgagttgggcattgagttttatttttttatttatctttattatttaatgaattcattattttaaggccccattgagatgacatcgaggagtatcgtgcaaattttaatgtttttgactgaaaaattggatgagatatagatggtgatgtagttcccatactccataggagaagagagaggagagggagagagcaaggaaatagttaagagaaagtgtggctgtttagagaaatgtactttaggtagaagctagaagctgaatcatgcattataatattttttagatagagagattatatatgttgaatatttttgttatggaattaatgtcatgttaaggatgaaatcttgtattcaaatttaattatttatatagttatatataacttagaacaatttgattaaattgataaacaattattaatcaaatttaacttgtgtattatagaaaacacatgttactaaacttgtgttatcaaaacataggatactaaaggagtatatagtttcttctaaaaactaaactaaatggttaagatcatatatactctacataatcacccttgaaaaatatcttaaaattaaatttattgtataatattggcccatctagcttatgtgatgatatcacattatatgtaaggtcagcgtatgcctagctagggcttcaattttttaaaatattattattatttttctaacaagaattattaaaaataaataacaaattttgtcattgagtcttagtatgtaacccatgcagtatatgcagtaacccactt

SEQ ID NO: 191897 - DNA, 5629 bp, Cannabis indica
atcaaaacaaggatgtgtgaaagaatggaagggtggaggcttaaacacttatcaaagattggtaggatgactttcattaactctgtagccttatccatgccatcttactctatgtccactttcaaactcccaaggctatcctgcaaggaacttgattccctagttagaagattttggtggactggttcggttgacaccaatcgcttcctcgctgttaaatcttggaatactttgtgtcaacccaaacaaagaggaggtctcggatttcgacgctttgaggatataaataactctttacttgctaaactagcatggcagctggcctctagagataatcgtccttggtgtcttgctttaaaagccaaatatttcccgagggagtctttttggagtgtggagggaaaaaattcagatagtttcgtttggaaagggattttaaatgctagagaatgcgtggcccatggttcttgctcaatcattgtgaatggtgaaagtatagatatttggtggcaaccgtggatcccttggatgaattaccaagaattcagggctgtcatggaggctgttagaaacatcgcacctggtttaacttgtgtggcagaccttatgtatcgcagaacgagaagttggaattgtggttatctccggtttctttttgggaatgagttgggtgaccagatagggaaaattcagattgtcaagcatggagatgaggacttcttgatctggaaaaattctagagcaggcactttctctgttaaaggtgcctattgggatgcacaattgcatagattcggagaaggtaataaattgtggagttggatttggaatggtaaggtccatccccgtcttagcatgatgctctggcgtgtctgtgccaatgtattgcctactggggacatcttcagcccgactgtcagcaacgattgctgcttttgtgggtttactcgtgagagtcctatccacctttttgctagatgctccttcgcctcagccctgtggttcgggtgtcctttccctgttcgaatagatagcattcaagataacaatattgctggtttgctggttaatttgtgtaatggagttgaagaggaattaaggtgcaaaatgctcagttgtttcgcaatcttgtttgatacaatatggaacacgaggaacagaattgctcacgagagaaacttcatctggagtgtcgatcaagcccgaagagaaattcataagcgcttctctgaattctctactgctgtagtgtcttcctcttcggaccctggtgaagtttctacccctgctgtgtgtatccccatcagaaccaacatggtgattgttgtggatggatccttctccaatggtagtttcggatgtgcagctctggccctttgcaacgactctgtcgactggttttttcgctcctctttcggtgtgtgcgtcaatgctctggctgctgaattggaggctattcgtctcggtttcagttgggctaaggacacaggctgggacagagttaccatcgcctcagattccttggtgttggtcaaggctttcaatgacttgaagcctccggattggcagctctctgcccagtttttttctgttttaaacttgttgaattccttttcttctagttctgttgtgtttgttaaaaggaacaatattacttttgtggacgaacttgctaagaatgctagacattcacaaagcggttctttgctctgtaaaggggagggatttccccctgtgaatcccactctcttttggttttaagtcttgaactgaggttctttttacaaaaaaaaaaaactaaaaaaaaaataaaaataaaaataaaataataataataaataaataaacgaaaatacgtgtgagacgtggcacgtgcgagttttctcatttataaggctcgaagttagtctggacctgtaatctgctgcagcccccattcctagggtttcatttccgcatcggtgcaaaaccctaatttactgtgagttccctacttttgtttagagttcgaagttaataataatgtagtgagataatattgccggtcaagtttcatttggtgtttcaatttcgttgtctttttaagttgttccgcttgattttctttcattaggccgacgatttaaggaaagcaatccgagtatcaaaaatggtggccaccaagaaaacagtacgatgagaccttctttttctgaataatgattttgtatttttgtattatttgttaatgttttcttatttcccctttaactggagcctcactgtaatgggtttatttggatttgtagaagaagacacacgagagcatcaacagcagactcgctttggtggtgaagagtggaaagttcactctggggtacaagaccgtgcttgagtccctcagaagctccaagggtatatcttaatttgcctttttttatcatttttttttaaactttgtagtgtctgtttgatcagttatgaattgggcttcatttgttttgtacaggaaagctgatcattatctcgaacaattgcccgcccctgaggaaatccgagatcgaatattatgcaatgcttgccaaaattggagttcaccattacaacggaagtaagtattttgtagtgatttttctttatatttaactacttgttatgtattgtaagtattattttattttggctttcgttcagccagattcaattttgaatgattttgatggccttgaatttgttggatcatttgggaagagtgttctttttttttttcttaagtagagtagacaattaaaaattatttcattatttggtatctgttttcagtctttaataagttttgaaaagtgtattatgagagtggcttaatttggggttcataggctttcaagttagatatttgtaagaatctttcatcattgtatttacagtactagatttagattatggaaagacaatgatttttctttatcaaccttgactctcacaaggtatcccagactagtactcaattttcattgagagcttaagataaatcttctgatttcatatttttatgcatctgaattttacacattatgctattgaactgcatgtatatttctaatgtaattttttataatgattggtatgaagaaaatgactttttgaagtctgagaaagatctccatctctgatattctcttgttattttgatgtttcatagacaatgtggacttgggaacagcctgtggaaagtacttccgcgtttcttgccttagcattattgatccaggtaattatctacaagatgtggttgtgttattagatttgaattttaagccattggtgtggaaaattgatggatttgtttgtcctgcaggtgattctgatatcatcaagacattgccaggtgtccagtaaactgttctagttttgcgatctattgcatcgccatgagtaaaattatcaccatttcatttccttttttcttggaatttttccttgaggattcatgaatctattactgttcagttttggtactttcagctcgcatatctttattttgaaaattgttaggctctctatttgaattttggatattaattaagttatagttagtagcagtacccatcttcatgaatgttgtaagagttcgagattacaccattttctattgctagcaatattacaaaaattcagccttttcaaatattgctaaattgttttgaaacctcacttttttgtatttaagtatgtttgaatatgactgcaatttcacttcaacttaaatattgaagttgaataatcttttgaacacttggatcctctaataagaagaggcctgaattgtgccgagctatttcccaaaataataaaataaaaacgccatgctaaatgggtaggataaaaaaaataaaatatatgttttctcattctcttcaaatttgcttatcataacgtgttcattcaacaaaactatagagatcaagagtggtcattacagaaaacctctgtaggaatgtggctcagttgtacacagaagcaattaacatcaaaatgactcttgaaaatcctcactagtattcctctagttgggaggacctcgttgatgataaaacatcaaaagatcttgtgccgttcatgaattttagtacgccaaaggttcttccattgcttgttctgcaatgaatttgccttcagcacatgctctttggcgtgggtaagactagccgacttagtagtaactttgcccaaaactagcaatcttgcatactctcatggtcatagatcattttctgaattgcctgacatcctccacctcaaacatctccattaacttagttgtattctattgcataattccaataattagaagtgaaacagttcagagaacttgatcttttgataaaaaagaaaacagaggaaaaaaggagaagatgatgatgaaatacaatggctcaactaattgttgaaagccttgaaaacttttatatagcaatcgattatggttgttttacaattgaaaaagacaactagataaagctaaaccaaatcaaaattggttagagaaaacaattacaaaaacagaaagcgaatcttaactatttaactatttttctatattcctaacatctcccctctagtgacattggggaactgaagtgtcaacttgtttgctaaaattacaaattgaggaataggtaatggtttggttggaatgcctgcaatttgattgctggagtctacatatcgaatgtcaagatgctgagcaataacttgatctctaaggaaatgaagatcaatctcaatgtgtttggtgcgagcatgatagattggattggaggccaaagaacttgcaccaagattatcacaccaaattataggacaacaggcaagaagaacttgtaattcactaagtaaggattgtagccaaatgacctccgttgttgcaaagctaaagatcgagactcagatttcgtgcttgagcgagctacaatgctttgcttattggaacaccagttgagaagattactgccaagataaatacaataactcgatgtagactttcgatcatctaaacagccagcccagtcaacatcagtcaaatcgagtaattggagtggaatgaagaccaagattcattgtgccaactaagtaacaaaacacccttttacattcagcccaatggtgtgatgtgggagctttgacaaacttactgagtcgatttacagagaaggcaatatcagaacttgtaagtgtaagatattgcaaggcatcaaggacacttctggatagtgttggatcttcaagaggggttcctgcagcaagagtcaatctggcactggaacacataggtgtaggttgaggcttagcatcaatgagattagttttaaccaataaatccttgatgtatttgctttgtgttaaataagtaccagttgagttttgaaacacttcaaaccctataaaataatgaacagagcctaactgttgaaaagaaattgatgatgaagatctgagataactttggaaatctgagtttatcttcacatgtaataagaatatacatcgacatacactaagagtagaagttagttgccacttttctttgtgtaagacaaacttgtatttgcctttagaattttgaaatcctcactgaacaagagctaca

SEQ ID NO: 191898 - DNA, 1973 bp, Cannabis indica
aaaaaaaaaaaaactaccaaattaaattttcttgtgtgaatcaaaatgcatggacaactcactagtacagcctgcacaccattacataccactttaatgtacaaaagaaattaaatacaatatggcaaataggatggaggaaccaatttaggagacaagggagggcaaacatttccctgaaacaatagctgtttgactatcgtctattgcacaggatggaactcaaaaatttcaattcaaaaatgccaaaaaagcggaccgggaccgtctgacatttctagcagctgcatgttattgttggcacaaacaagcccattgcagactagaaaccttctgttctcaccaataataaaatttacgatgaaaccgaaggctggggggtgactaagtccaaatcatcttgagcaatagcttaatcacttgaaatagtcaggttgtaggatcgtgaagaaattcggagatgtcccgtcttcatctttctgcttccattctccattcccttgaatgcaccatgatacttttggagataatggtgtgtacaagtctgcaggtttacatcattcacaaaaatgttcacaatttcgaagtggaaagtagatgaacatcacacacatttaagggttgtactagagctacatacttctttctcaaagagattacaaagtacaaacaccattttctaattctaatcacatatttaacgaaagcttgttatatgattttagcatcatgcaactcccaaagttttctactctaaaatgcttctcccattacagcaaaggccgtagctttgccatggaataaaactatatgaactattataccaatgcgcaattaacaagatataactctgttgcaaatagattctacttactacctatttgtattgccctatgtaaattgaaacttctctatttaaagcagataaaggcaggttcctagggaatgtcatgataataaatttaaaataagaattccattatataataaagaagtcacttgtcagctgggcacaaaatttacctacatatgtacatcatgctaaattaatttctaaaccgaaacaacacgtgaaataagaacaggcaacaaaatttcaatttaaagaagagaatctgctttaaagcattccattcttctccatgaaaaagacaacagataactaaatattgaagaactgccattatgaagtcaatgtctacctttattaacctttcaatttaaatttattacccttctaaatttaatgttatgaattctgaattcatttctgtaattcattaacgttttaatttcaagctagaatctaccattcaaaaagaaaaaaaaaaaatctagagcataaggcgagggggtttaaagtgtttttttttccttggaaattgcttcttcctgccatatgaactgtcgtttaaatggacggccacatgaaaataaaaaggaataattgttgcataagtacccaaaattttgtgtttgtaacaggcataatcccaataatttttcttttagcagcatacttacccaatgttagtacaactttaatttttatccagcttcgtcaatacaaatttcatttggaatttattaaaagaagagttagaagtaacccatactacattttttcatccagacccaaatgatttagaatatggatcttacatgtgtgtcctgtttaaggcattcacgaagtctactgacaaaactggacgaaaattgcacttttattaacattggatacttaaatcgctaaaaaaaattattgagtttataccgcttacaaactcaattctttggatatttatgccgctatttacctaaataaaaataacaatatttatttttatttttgggacaaacaaaagatgaacttttgacatctttgttcctagttttaaggttgttccactgatttagctaattaataataaaagcatggctacagaccttaaatctgccaatgttagctagtt

SEQ ID NO: 191899 - DNA, 906 bp, Cannabis indica
tcttttagaaaataattaataattttgatattcaaatttatatatattttttctttgaattgagtagtttattaataaaagtgtcccataatttactgattaagagctgtagtcaattgttttaatgggtcaaggccactccgtttcaatccaatcgattgtttaaattatttaacatatgtctggtagagagacttatttaagtcacgtttttaaattatatatatgtttttgaaacatttttaaattatattaaaaataatgtaatgtagttttgttggtgatttcaacattgtccagctagaaggatcataaggcagttgaagtaactcactatcattcaacaatgtagttttgttggtgattacatttttaaattatatccaacttgaagtggaattgtaaccatgactttgcctaattctcattatcattcaactaactgactccatcactggacatccatcttttactttttaaaaatagtagtcaataattttttagtaaagagtcaatatattatatctcctatatataaaaattgattttgacaagtcattttgttattatttttttttttgaatgatcttatttttctctttttatttttttctctgattttttttttataaataatttatataatgtcttttttggtaatttttttttattattcatagaatattattattttacatttttaagtgttcagataatatataatattattcatcatattatttagtaaattaaaatttatgagacttaatattaaaatataccaataacggtatgtcaccatttatagtactagcacctcttttaatatttttcttattaatattcactttaattataatttttaggggaacgtttttttaaacctttttatttttttaaattttt

SEQ ID NO: 191900 - DNA, 5329 bp, Cannabis indica
gcctgagtattgagagatgaaaaaaagagttggaattagggttaaagttttagtttaggcattcagaagaatataaaaaagaaagaaaatatttaattatttaataattaatattatgtggactaatgaaaatttgtcatgtttacgcttgtggacatgtgggtaatccactgtggcacttaactgagattttggatggaagtgataaagagcaaaacagaataggggttcaataggttttgccgttgaaatttggtttatgctgttaagtgttaaaagaaaaaaaattaagtgatttggctgccaatatctccaatataaaatatgatcttttaatatactgttcatctacaaatgcgatacttatacatttaatatcttttcttctcaaaaatactcttacatttcaagaaaatctctctgtctaactctctcactctaactaagtcctgttttctccactccaaagccctaaaatccatgtgctcaacaacactgaaacccccgaaatcgttacccatcactagagttctcaactggctcattttccacatttttttgtatttaatgatgccacgaaacataactaaatattgctacatcgtaaaatatcgctaactgtctctaatttacaacatcgctaaatatcgcaaaattacactcaagtcttcaggatgattagcgatatttagcgatgtgatgtgtattttttggtctcatatcacaaatacatctctaaacatcgctaaatacacaaaatatcgcttatcatcataagctggtctatcattgcaaatacatcgctaaatattacaaaaaactagaaaactagaagaaaaaaatgcaaaaaacaagagaggccgtgagagaagacgatagcgaggccttgcaactggagttctaagctgtgttcgacgactggtgttttgggttggggttcaatgccgaaaagtgagagagttagagagagaagtttttttcaaaatataaaggtatttttaggagaaaaatatattaaaagtatagctatactatttctaattgggctgtatattaatacagtatattttacatttaagtatactaaatcaaaatttttaatattaatcaataaaaataattttttgtgctaaaaatagttatttcttataggtaaaaaaatgtagcttgtaggggttgggcattgtgcagaaattattttattaaaatcataaaatgaagcataatattttttaataaaattaagtaagtttataagtaatttcgtgttacttataatgtaatttttataaataacatagtaagattatattttttataacttaaaagtaacttttttacatagtgctatagtatttttttagttttcatcttttttaattatccaaactcaaagtttatatttaagattatgttctttccaatagtatttgaaaccttcaaaagttgtatcactaagtcaggcattcatgacgtagtcacctattccaccaaggagtatgctcattggaagatcgtcaccaccatggaagtttacagcccaaaagaaggttggtctctttatgatttcaaaggttgaccaaccaaagaaaatagtttcactcttgtttgggtcttatccgtcgacatcgtgaatcgcttttggaaaatatttgttggatttttgaccaatggcaagattcttatttttttgcttagaaaccaaactgctttattcaaaatgcgataaaatcctggtgagcacttggggcctcacctcccaaaaactgagaaaacccttacaaggattaactaatctccatttagccaaaacatgagcagagtaattcttagttctaggaatctaaaataactcagtcgacaatttagacaacaaggtcaagatcttagagaaaaaaaaaaggctacagtctaatgaggtgtcaccgcaaaaatcagagcatcaataacgacttggcagtcggacaaaatttaagcttcccatattcccaatctgcagagaactttgactcctttgctaattgcctccagttcaccatgagtaaccgaaaccatgagaatttcggtcacaaaaagagccttgatgccaccaaactcataccaagccacaaccccaatagctccaacaccttctgtagtagcaaagtccacattaacacgaattctcccaggtctaggctgcctccaacgaactgcaagtcgatatgtagcagaagcctcacttctcaagctcactggcaccttccaatggttgtggaagtcatccacaatcttcttcttcatgtcaaaaaacctccacttgacattgttatgaaaatttgcattcctaaagaaccatagattgtgatagaggacagtggcatagagagagaactcctccctatcagtcagctggttcgaatcaagataggagaatgggtttaggatccaactcacaacatctttctccaaactcagagataactcgtcaatttgaatactccatttgctatctagccacaaccctatagatataggacagagcgaaaaaaaaaagtgagaattggagtcaccattagcctccccacacaaaaaataggtgcccacgggattcccaaaaatacagctagttctcaatccaaatgggaggcaatcccagtaagatttccatagaaaaagtttcaaacggtcttgaaaactcaacttccaaagcttagagcctgcttcatcatccaaaaccaatgcatccttatgcatattcttaaagggagccttgatggaaactccccattgggactagttctccaaactagcctatcatcatcattgaattcattgaccctgcagttcataacagcaagagtcgtatttggcctaaaaactcgattaatttcaacataattccactattttccattgtcagacaaaagatcaccagttgataaattagagaccacacaagggtttagggcacctacatccatatagattccatcaccacatgatcaatcgatatgccacacttgaatagtagagtctctccccatcaaccataagcaattgtcaataataaattgtttagttttctgaatcccccttgccacctgagacgcgtgacaagggagattgctactctaagaacttgaatcacatcagtgttttttgttcaaaacatgaacccaaagcacatccttattcttcgccatcaaccaccccattttagcaagaagacaaatattaatatcacggaagctgcatattccaagacctccacagtttttaggtttgcaaatggtaccccaattcacaagagctaagaatctgcctccatccaaattacccgtccactaaaaatgtctcaccaaagcatccaatgtattagtaatcttccctatgatcaagaacacaaccatattatacgacagaattcaggataacatacttttaattaaggttgttttggcagcctgcgacagtaacttggctctccatccttccattctatttctcactttgtcaattatgaaattgaaatcattacaacgattccctttcacaaacagaggattaccgaagaagagttctttaccatccataaaatcaaaacccaggtacttggccagagtcgcaccatgttccacctaatagttcttagaaataattttgtttgatttggtggagccattgatttgttggccagaccaatgacaatacttctaaagagcctcccaaagattttccacattctacatattagctttgacaaagaacatagtatcatatgcatacttcaaatgagacaccatggggcaatttctcgagactttataaccttcaaccaggccctgccgctctttctctaaaatcaaacgagaaagaatcttagaacacaaaatgaaaagatagggagatatgggatccacttgcctcagccctctcaaaggaacgaaagatttagttagacccccatttaggagaacctgaaaactcattgaagaaatacaatgaagaatcatacccctcacccaatctccaaaaccaaaagctttgagcacaagatccataaaacttcactccaatctatcataagccttagatatatcgcacttaatccccacaaaagcatttttcccctgtctcttgcccatatcgtgaacaatctcacttgcaatgatggaattctccacaatccatcttcctttcacaaaagaagattggaaagggctgataatattctccagaactggacgaatcctattagccaaaatcttagcgataattttataactcacatttcataagctaataaaatcatcaaacttgcaagcattgcctctttttgggatcaaaacaataaaagtatgattgatttctttagtaaacttaccacacaaaaaaaactcctgaacaaagctagtcgtctcccttccaatattggccctgtgatctctataaaacttagctgaaaatccatccagacttcgagatttcaactaaggaatatcccaaattacttttctaactcccccaagagacacacgactccacaagagtgaaaagctcctcatctatctcagggttagtcgaattgaatgtctctaagaatttgcttctaaagaaatcagccataagatcccggtcctcaatccaatgagattcatcttccataacagcccatataaaattccttttccttcttaccatgatagatgcatggaagaagcaagagttacggtcactgttcttaactagagttctcttgatttttgtttccatatagcttcttgttgagcttccacttcctcaatttcaagcacaaacgcactttcaatttggacattctccaaagaaggagcacggttctgatcacagttctgaacctcaatcagtaactgttccaacagctttaactttttcttgtaaaaaccatagctctccctattccattttttcaaagtcgttgccgtcaaatgaagcttaaaacaaagaatgaaactatgatatctagaaatatcaaagtttcaagcctgttgaataacaacttcgcatccttcattcttattccaggcatcaagatatcagaaaagggctttgatcggagttccatctatcaccgtattccgtactaaagttgcatgatcaaagtgtctgatagatagatttttaaaacttgccttagggaactgagataaccaatttgttgaggaaagcacccgatccagcttttcacgaacaagactgttccaatcctgcccattagaccaagtatacatcgcacccatgtcctcgagatcaattgctccacaatcaaacataaaattaaggagattatgccccctctctctctctc

SEQ ID NO: 191901 - DNA, 2262 bp, Cannabis indica
tttttgtaaagtgttttgtagtgggtaaaataaaattaattatcaagagaaattaacatgcacgctgccattcatgacagaagtacatacagggcaactacgaagtgtggacccacacaaagtacaaaggcaaagatgcctacatggtaacaccaacaccctcgattctctcaccccacatttccggcacatcatcctccctccaccgccgtatgccacgtcatcacacccaccctctcttccggttacctccgccacgacgtcgtttcgctttccaacttgacccacctcgacttcttcgttgtcgtttagcggttcccttccgaaatcgttgctcccacaacacgactcggcgtcgtcggccgtgtcgacggcaacagcctcggggttgtggttgtagttgtcttcgctaacgttggccaagaggagttgttcgaggtttgagcggagcgagttggccgtggcttcattcgattgagccaagtctttccataactgattctctatacagaggcttttgactctctcttcaaggacccaattgtattttgtcattttgataatctccatatctttttctgtgagtttcttcttcatctgttcttcgaacgctgccacaagcattctcgcttgcagattccgttggtgttccaatattaatctcactttttccgtctgtgaggatcgagaaaattacattagaaatcgccagaagaaacaaaacaaaatagaaaaagtagcaaggaaaaaaaattacatgttgggaaatgaagcaattgatatcggaaggatgatcatggatctgggggcttgtgtctcggttgagaaaaggagattcaccgggtaatttacgcttttgagaataagaaaaacagtcgctcatggaatctctcgatcgttttctgggagcaggaacattgtagtaagtgatcacactatcggccctgttcatggaggacttcatatcccgaataggcgattgatcgcaatataataaactttcaggaattatcgccgatgaatccattctagtattgacgtagttcatcattttagtagattgaaatttctaaaccaaaagaaaaactgaatcagttgagcaataataaagaaaaagcgcagagcgcaattgttcaaaactatatgtacatataaatatatatatatatatgaaaacactttacatacctaacgagaaagattactggtgtgggaaacctaatatgaaagattagtattgtaggaagctgcaactgccatatgaggtaggtaaacctttgcttttgctgtgattatgttccttttgctttctcctttctcgattttgaaagacgagagagagtggaaatcgacagagaagaaaaaaaggtgaagatgtaaaagaagaggctagtggcatcgcatgcaattcaaatgaagtgaattggctttatattcaattattttctcgcttattaatattaacaataaaaaaaagaaagtcaaatcttccagaccaaacgaaaaaaaaaaggtaattttccaaataaaataatttaaaatactaatgagaaagaagagagagagagagagagagagtaacgttttaggaagcataactgctgcagaaccaaaataaaatcaaatttaataatactcgattggtttgtggcaaaaatgtaaatatgtaaagtttaaggagtataattgggaataaaaataaatttacaggatctatgttattattatattattttctgttttagtaaccgacatgcatcttatctgccacgatccgatgcagggtggcgattccttgttctgccatgtcatcgtcaaccgtacaaagttgagagagattttattattttctttatttttaaattaaaattagaaaattcattattattattattggtcactgtgtacggataaacaggcaaaagagtaaattgatttcgagaaaggaagtggaaaggaaaaaaaaaaaaggaaaagttataggttgaatgtatgacagtgtgttatttagtgcgggtgaatctacgataactagggttagtttttctttttttttttttctttttactttgtgtcttgactcttgagggacataactatgttaggttataggtgaaatatagagtataaatatatgtgatatttaagattttctttagcgtttctactattttcacttaaattcaagatagggtaataaatgcagtaagatttttctttttaactttctatgtttggttttaagataataaatgcatcgtg

SEQ ID NO: 191902 - DNA, 4645 bp, Cannabis indica
tacattattttattcaaatataataattaaatcaaattgaatgtgtagcaaagcaaataactagagccgagccgagttggcttgagttgagacacagtcaaagttttcagacatttccaagtcaaaatcgtcgagtttgactgggcatcctaagctcaagtgcagtttttagtaaattcgattctttatgttacatatatttaccaaactaccctcatcattctatccaaaattccaaaaacttcccatgtagtgtctctaacgacgatagtgtacattattttctgacgtatttgccccttaagggtaaaatcgtcatcataacagaagattattttgtttttaattattttggtaccattataaatatgaaagtcctgtaacgtaggttgggatacgacgaacttaactataataaattttattttttattataaaaagatcaacggctggcgatcaaagaaggagaattgtttttaatgaaatgacgaaactaccctttgacaatgaatggattgattcattccattgaggttattttcgggaataaaagatctcctgcgtttagctgtactcgaacttcaactagtttcggttgtcttattgtcaaaataaaattaaaaaaaaaacaaacaataaaaaagaatttgtttttagttggcttctagaaggctagtgtggcaacatacatccaataaaaaagtgccacgtgtttagtggttgtagcaacgagcaggtcacttttgccacctgattaatacgacgtgtcggcgattatttctaaccctgaaagataggtcgttgcaattaccatattacccttatttatcttagtatttacaccctaacagtttttattgtgtaagagtgtaaatcggttagtttgatcgggttaccataaatcttagccaatccaatattaatatgggattacaaatatttaattataatctgcttgattagaaattaaaaaagttttaatccacttaataattttgtagtttagttagattaacccattcaaactaatctttacattttttttataattattattgtaattttttgaacttaaataattaaatttaaaaaaataaaaatatattatttatattttaacttaagaagatattataattttaataattaattgtaaaaactttaatataaaataaatataattgagtaaacataaaatatttaaataaatattaatcaaaagataataaaataataataataataatatgatttagatttatattttaattttaatatccaaatataataaaaattattaactataaagttaaatactgtaaagaccaaactttaaatacaaaataatttaactaataaatatagtttatataatatattatatacactttcattaaaaaaaaatgtataaatcaatttaattaaatttactcgggttaattgagtagtttagaataatttataagccgcttaatatatttatttagtagtttaaatttttattgtattaatttaaattgtattttttttattgatttattcagtttaatttaaatgatttgttcgagttacactgtttgtgaatatttttgaagacctctaatatttctataatttattttttctattttaagtcaagatgacataatcattcagtattatacttacaattattatccacaataataaatgtttggcaacaaatatctagtttaagtaaaaaaaaaaatattattatgaaatttatctatatgtgtgtgatacgtaatgattgtgataatgattgtgatgttacatttttaaatgactgaaataatatggtcacataagataagtatagaatgttattttaatgtttttgattttattttaaacaaaaaaacagtttgtgtatttttttttttctttgtaataaatgattttgtattgaataagagtatactttacttgtaattgaaactaaatcatctagataaaaagaaatacaataaatgaaaaattaaagagataatgaaagggtattttcgtaataacaaaaacatctgaaatttgttttggacattttgggaataaaaaaaaaaatcaaaactttctctgtacatctctaaaaaaaaatattagtttggagggaagtctctgcgaaacaaggttggacctctctctctttctcttttctttcaatccaaaaagcaattcacacgcttaaattaattaaattaaaaaaagaaaaaaaaataccccattttcatcgtcttcttccttgaaaaagatctttcttttcaatccaatttaaataacttcttctcttccatttcatccccaacatcatctttcttctccacccatctctctgtcttgggctctacgcttctcaaggtgtgtcctttctgggaaattccaattgggttttcttttaattgttttgtagtgaattgggatcgaaaaagtttggattttgattgattttgtttaagaacgatttatgggtaattgttgcgtaaccccagctggagtttcatctccagataggaaaaaaggaaagaagaagaagcaaaacccatttgctttagattatggggctaatcaccatgttagtagcgggaacaagctctgtgttttggcagaaccaactggacgtgaaatcgagcttagttatgaactgggtcgggagcttggaaggggtgaatttggaattacgtatctttgtacggacaggtctacaggtaatacttttgcttgtaagtctatatctaagaagaagcttagaacatcggttgatattgaagatgtgaggagagaggttgagatcatgaaacatatgcctaaacatccaaatatagtaaccttgaaaagacacttatgaagatgataatgctgttcatctggttatggagctttgtgaaggtggtgaattgtttgatcggattgtggcaaggggtcattatactgagcgtgctgctgcagctgttaccaaaactattgtagaagttgttcaggtaagaattttttgttttcttatttataattttgatgttgttaatcagatctgttctttgaatttttgacttttttgttgctatttgatcttatgtttgaagtagtagttttgttatatttcatctgaagcttggtaaaaaaagatagttatttttttttttactgaattagttttcctgacaattgatattgagaagatgcctttttgcaagtacagaagtatttaatgaaagttcaatgaatcgatacttgtacctttgttcaccaatatggattcccaattcacgagattctttgcaaccaaatgcttttattcttcacctgcttttgtagtctgtaaaaatttaatattgattgaaactggtcacgttttctatgcatttggttgctttatcttttcttccagttgtgtagtggtagtgactcattaatcttttggtttttgcaggtttgccacaagcatggtgtgatgcatcgtgatctaaaacccgaaaactttctatttggtaacaagaaggaaaccgcgcctttgaaggcaattgatttcgggttgtctgtcttttttaagcctggtaatgtgtttgtcaaagctaaatttgattgcattattgcagtatagtatattttatcaaaagttgcttcctttggaatacttttagctgatttttttggaatttatgcaggtgaaagattcactgagattgttggaagtccatactacatggctcccgaggtgctaaagcggaattatggaccagaggttgatgtttggagtgctggagtaattctgtacatcttgctttgtggtgttccacctttttgggcaggttggtttcttgtctcattttctttccattgtaggaactcggagaaacatgtttaagaattgcatcgtacggtctccctatgcatgaaaattatgtgcatggcatgattgcatcaacaaaagctatcgtatatttataccattagactcgtgtttgtttccatttggtgaagttttcttcaaggaacattgtaattttggtgggattgtaaatgaaaacgtttatttggaagttgatatttagcaagtttggaaagaattattaactttctactttggaaacttgtgtgtaacgtttaattctaaatctgattacttggtgtgcagaaactgaacaaggagtagcacaagcaattatacgatcggttttggattttaaaagagacccttggcctaaagtttccgacaatgcaaaagaccttgttaagaagatgctcgaccctgatccaaaacggaggcttacagctcaggaagtactaggtaatgttatacttaacatttaagtaactaacatttacagagctaaaaattagagtaactaacaataagatcctatctactaaactaaatgcagatcatccttggttgcaaaatgcaaagaaagctccaaatgtgtctttgggtgaaactgtgagggcaaggctcaagcaattctctgtaatgaacaagctcaagaaaagagctctgagggtaacttttcgacatatttatttatagttcaatttattatttttggtgggatattttcagatctcttgttcttcttagcatgtccttttaaattttaacaattcactcggtgatgatatttatttattttga

SEQ ID NO: 191903 - DNA, 2423 bp, Cannabis indica
atttatttgttatattttaaattaattttaattaaaattataattttgatcaataaataattaatatatggcattttttagaacaataatggagcagttaaattaagtacctacagactaacaagaattttgagcttggggttgctgtcacaattttttaagattgggaacttaccttcattaaaatgaactttttaaggacttatgccacaatttaatattaacatgtgatattttaaagagaaattaacggatctattaaaaagaagaccaatagacttacaaaaattttgagtttgaggactattaccgctatttttctaagttaggaacttgtctgtatcaaagtaaacttttaaggacttttgtcgcaattttctctttttatgttactttgtagttatccttttgttatttccatgttgtttgttaagctttttttaaagttgtttttttagttgtctttttattttactgaaacatagtattttgtaatttaaaactttaatacagtatttttgaaaacttgatataataaaagtgtaaaaaagaaaaaaaaaaaaaaaaagagtgtgacagtaaaaatgacaaaaaatggacatttttgtaagataaaaaaaaagtattttctagcaacgaggtcgaggtcgtgtaatgtggccaatgaatttttttttctttttttttttctgaaaaaacctcaatgccttaaactgaaactaacttcttggtgagtacatggggactgacctcctaaatacaaagcaaaccagtacaattaaaagccaaaccccatttagcaagctaatgggcacgaacattacagctacatgaaatccaactaatagaaaaattacaagctgaagccaaatgaacaaacatttttttttgctaaaaaataaagagttattaaaaccaaaaatcaaattccaatctggagacttaccctccaccaacgaatgcaccagggtgatataatccaagaaaaattcacctccttgaaagtgaaggtcatgagcaagttcaacactgaaaattaaagcttccaattctccatttaaggcatagacataatcaactttctttgccacaaaagccttcacattcccatcctcatctttgaacacaactgccacaacactccattcaaaagccagataagtaactctctccaagaggggaaatggagatgatccacgcaaatagaccacttagaggggaactaaagggttttggttgtaacacactaaatcaagaaatggaccacagagtcactattcatctcctcacctaagaaacaaggcccatggccatggtccttgccaaaaataccttgaagcttcgaaccaaatggcatgatatcatgacataactccacaagaacaactttaatttatcatgaaacagtttcttccaaagaagagaacaaacaacatctttggaagaaaaatgaaaagcattcatatcccattaagttttttttgagagagaacatagtctacttcaacatagtcaaatcagaagaaggaagaatattcaagtcacagctgcgaacacaatcagctacaacagggttaagctaaccgtgcaccctctcaatacaccaatcattaccctaggtcatccaacaaatcactgaacaacaccagatatttgggaattggattaagtataccagcatcaaataaaacattatcagcacacgaccattgcgcatgccacaagtccactgaggagtctttgtcgataaaccaaacactattcttggctataaaatgacgggtaaaataaatacccttagccacgaaaaacccagtcttgggaagatccgtagagataaaattaccattggcataatacttggcattaagaatcaaagcccaaagaacttccttatgagattccacataccaccccaatttagaaagcaaataaacattgatatcttttgtgcgtcgaattcctaatctgccccaagactttggtttagtaatggagtcccaagccatttggtgatttttgctgggacagatagtgtaaatagggatcgaagccagactatttttaatgagggttattctagcaacttgagaaaggagtctagtcctccacctttcgatacgattacacaccttctcaatcacataactaaaatcactattattgttccacgaaaaagcaatggagtaccgataaatttctcctcacccttcataacctcaaaatccaaaaaatctaatatctaattcttcaacacatcattatagtttttagagaacacaaatttagatttttgagcatttaacttttggctagatcacccgtagtaagtttgtagacaatcatcaattgcttaaatattgcaaagtgtcatccacgtacatcaaatggggtgtaggtggtccattacaactaacatttat

SEQ ID NO: 191904 - DNA, 3455 bp, Cannabis indica
actttattttttaagttacctatatttattattttaattcatgtttttttaaaaatatatataaaaaaattccgtaaaaatgtttaaaaagtgtgatttgcatgtgtttgagctcataatagatcattgtaacaattgggcttggttcttatttgggccttagttcgaaaagcccataggcccaatgggtgtaggcagtggccgtggcagccccttagccctaaattgaatcgttcttcgttcttgccctttttctcatcatcgtcttcttcttcttcttcttcttcttctctcaataatctccgagattgtgtcgtttcctcttctctccgccgttccctaacgtctcttccagttgagttttcatttctatttcctatgaattttggttatttccttaatgattttcatgtattgttgtactaagttttagggtttttttttttttttttatttttatttttataaaggaactatttttttttggctgttaattcaattgggttggatctagacgatgctttggttgcaatttcttcgtaaattccttattttgattttgattttgtttttaggggaaagatgtttagaattgcagcgaggaagttctcttctctttcaatcgctccatggaggacgaaccaggcggcggcggccactgcctcttcaatagtccctcgttatctcaactccgataacgattcttcttctcagctcagatctttccctttcactaccgactttcatattcccaccagaggtttgctttcttcttttctagggtttttctttttcttcagtatcatgctgaaattagatctagtgtttgggtattatataaatttgtatattgaaaatacttgctttcatccaggtattgtggatttcaattatatttatgtatgtataaattgttaggatgcatatcaatttagaacgtttgccatggttcatataaacacgagcaatcactcttttgcaacactttttactgttattttcaatgaaaacttacatgtatcagtgaatttttttcacactagcaatgttaaatactaaaatttgcataatagtctcatttaatttattctatgctatcatgatggtcgttttgcaacaattattatggttgttcacagtgtaattcatggtcgtttctgcaaccatataaagttattttgctaataaaattatttgtaaagttattttgaaggctatttttacaaagcattcttctcttatcctctccctttatcttgatgaaatctacattaagattgctagtgatgtttctaaatgccattcgtgtttagtttatttggtataagtttgctttgacttttcattgatctcttatgcaaattattagcctttttcgttttaagtcttacttttgcaagtgatttttcgaaactaaactttgatccatataaacacgagcaatcactctcttgtaacacttacatgtatctaatctattacgttcatgaatttcttgtttctctctccctctttttaactatttaatttagaaaatgagacccttttgcattgacttttcattgatctcttatgaaaattattggcctttgaagttttacttttgcaagttgaattctgaatttaaactggcacagctcatgattatttctttactttttgaggttgagaacttcatatttatatgctgcatctgcatttggtttttcggtgcctctttaaaacaccttaatcttaccgttaggagataccgaaactcacaattctcaattaaccattagttatttcatgaagctctaacataaacatctagttagggtatacctatatagaaataaaattaagaagtttgtaaaattttttccttctaaaatatgcttgcagctatatgatatgtttattactgaacttgtttgttcccaatcttgcaactttgttgcatatactttagacatcacttgtcgttacaattactgtctatctcagttgttgcgctggttgtttattaaacttaaatctctttttcttggacaatagtgaaacctgcatcataaagattgatcaagattgcattttttaagttcgcaatgacttttcatagattcctagtacaactcattagcctattgattgtaagttttatgattggaagtcattttctgaggataaacttttctctagttcaactcatttcaagttttatgatgaaagttttttaagataatcaaatgcgaagtatagaaaactcgatgatttgcccatattaatggcttctgctgtaatttgattggttgcttcaggttttgcttcggattcacttaccccatcaatggaacacgatagcttaatctcggacattccagcaactgttgcagcggttaagaacccgacctcaaaaatcgtatacgatgagtacaaccacgagagatacccacctggggatcccagcaagcgtgcattcgcctatttcgtcctcacaggcggtaggtttgtatacgcttctctgattcgtctccttgtccttaagtttgtgctgagtatgtccgccagtaaggatgtgcttgctctagcctcactcgaggtcgatctctcaagcatcgaacccggaaccaccgtcaccgttaagtggagaggaaagccagtcttcatcaggcgccgaactgaagacgacatcaagctggcaaacactgttgacctcggttctctccgtgaccctcaacaagatgccgagagagtcaaaaaccccgagtggcttatagttgtgggggtctgcacgcatttgggctgcattcctttgccaaacgcaggtgacttcggtggatggttttgtccatgccacggctcccactacgacatttctggaagaatccgtaaaggaccagcaccatacaatttggaggtaccgacatattcgttcttggaggagaacaaactaatgattggttaagcaagcggactcgatttgtagaggggtccttgtttattttgggattcagaattttttgttctgttttaaagttcataaagataacgtcgaagatttgtgaaaaaaaaaacgtcttttttcaagtttgaattgataatgtaactttatgtcgatgggattctaaataagttgcctagcttttgctgagcaagaaaaatatgttgaatttttgcttattcattattctctttaaaattaaacacatttgtcaatgtcattctcctagcctagtgaatcaatgatataattattattaacccttttgttatatatatttttttcaaataaattatttgagataatgaaatctttacttggttatgattgtgtttgtattagagtgattggaagtaactgtgtagttacacatgaattcataatattttgtataattttcttttagaaattatagtaattggaattccttaattatctttaattatataattatattgatcatttaaacata

SEQ ID NO: 191905 - DNA, 1103 bp, Cannabis indica
aaatggacaactggcaagcaagctatatttacaccagttacttatacagtatttaacacttgaaagacttatcataatatagtatgaagtgtaactaaggtatcattaaacaatagcacacatgtacaaaaattatagtacatattgtttttttgttactagagtcaactcttggtttaaacacaacattagaagcagtgtaatcactaagatgcccctggaattacacatctgtttcttccctagaaaactctataggaaaagcaaaaggtagtctttgccaatataacaatcacctttggaaaaagatattgctgtatatggtactcgaaatatgattatgaatcaaagccatgcacatggaaaggataagtctttatatgaagagagttgtccatttattggagtattagttgagtttgagacataacagctggtttatattactgtaaaaagtgaattgtgccaaaaattggagagtaaaaaacagagaggctggagagcttacaaaatataaaaaatactggtgcactggagacagttataggaagcaggtgaagcactgaaggaaattttgtggaattttgatgtaccattaaggggatagttctacagaagcctttcctagtggctcaatttcttataaatttgtaagagaggcagctagggtaggatctatctaaatggtgctccatatcttttgggtaacattgtttcatttgcggctattcattgccttatggtcttctgaaatttattgacagattaccattgcatttacatattggcgagaaggatcacttatcagttgcaagtatcgagacatcaacaagaagttttggcaggttcttttaatcatccttaaattgaatattagtataagcatcatgtgtaaatttaaatgtctgctacgtgtatatgtattcactaacataactgtatttataagtaaacacatgcgtacattgttttaaatttactttttgaaattaatactttaaaacccttaatacagtattttctcttaaatgtttagtgtggttcaattatacatgcttatacacttgattgaaataattgtaatatatatatcgtgttcactt

SEQ ID NO: 191906 - DNA, 1373 bp, Cannabis indica
cataataaatgtaatttcctcaaaatttaatgaaaccaaaacacaaatttaagaaagtactaccattgccactgacagaggcaagcatagtactgcagcagaaagcagttttccataatcaacaactggatcatggcagcaagtgaaagtggaaactcaataaaaaaatatcctggagacatcaatttacagctgctgatcaagatagggatccttaggagttcttggagaagcaatatactcggtaacacccgaagcataagttttcaaccaggaagtgctgcgagttaaccatccagcttgtgcttgctcctgtacttcaagcatacttttcctttcttcttccactagtatgtcaagccatctcttagccataaaaactttgatagcttcaaccccatcattcactacctcagatggaggaatcacaaggggattctgctccaagttgagtttggtcaagctgtcaagacggccaaaggtatcgggaagtgcatggatttggttgttgctgagatcaagttccttgaggttggttaaatcaccaaacgtttctggaagttctgtcaagtcactaaagttactgctcaggttgagaacttcaaggtttgttaacttcccaattgcttgtggaaggccacgaatctcgttgaagtgagcatccaaacagcgcaaagatctcatctcacaaacagaagttggaagtgaacgaatcttgtttaactggattgaaagtctctcaagattaaccaattcataacctatgtttgttggcaagtatgtcaggttgttgtagctcgcatccagctcaaccaatgacctaaatcataagatgcacaaagaaatatttcaatttacgaagagcaattaaagggataagagtgagataataatgcccttccttttataggtagagaaaaagaaaatttacctgcagtgagcaatggtgtcaggaagggcacttagcttgtttcctgaaacattcagaatttttaacctctgtaacaagccaattgagtctggcagtgacaccaaaagattagaagaggcattcaactcctcaagattctccaatccagctattgaatcaggaatgaactgttaaccaaaacaagaacaaatcagaaaacaatccctttgtactgttccaatctcaattacaaaacctataacccttatagtatgctccctaacctaaaaaagatgtaactaaattgaataacataatagaaccacaaagggatcaagtgaaagtagcagaactattcaattatcattccataaccatattagaataatagtctaatacaacatcaccatgaattcatttcaatgaaacaaaacaaaggaaatcaaatcaaggtctttcaagg

SEQ ID NO: 191907 - DNA, 4999 bp, Cannabis indica
aggtgaaactatatctatggaagtttatcatttgattggttgaacatttatattagtaataatatcgttttagaataatttggctttataaagttgcatgaatttgttgtcataagcttggatgcttcttttacttgaaccaatttttttttctttagtttcctgattagtatgagatggttttttttgggttttaacagaaagaacttattcaatttttctgtctttcagaactttgcatttgaattttttcttatttgagaagtagatttgtttgtggcataatcattttagataggtgaaactatatctatggaagcttttcatttgattgcttgaagattcatattagtcataatattgatttagatcaattcggcttcataaagttgccagtttgttgtcaagagatggtttttttggggggtgttaacagaaagaacttattagattttctatgttttcagaactttgcattgactgttaaggttgtttggggaatggactggctgtatttgaccacagtcagtctttgtgaatgatgttcagtgggtcaaggagtgccaattctaacggtgtattcaagtggagtggcgagatcaaggtcagtcttctttgacagcagggttacttcacgatgtgcctcccgagattgaattatctgcttatggaaggataccgagtcctggtagtgagagtccttcggggctacttaatggtgagagtttgaatgtggaacctattgctgatctcgacctgttctttgaaaagctttacagttactattgtgagaaaggactttggtgtataatcataaaatgggtggttgagcttcttagcttgggtttcaccatttgtttctctgggtttttcttgttattcgttgattggaatggtcttcgtaatgcaaaatgtggaatggatgcaatagaatctggaataaagccatgtgatcttgctaaggaagctcttcatgcacacccattaacccctctaacgctttctaaagctgttattgtcggttatttgggaatattttccatttattggatcttttgtttcttgagatttttcgctcagttaagggaaacccttgacatacgtcacttctattacaacaggtgcgtttatttgtgatttacaaccttttttatgtaccgactctttcgtacttaaaagaaaccgattaacacaatattgctgcagccttcgtgttacagacaatgaaattcaaaccatgccatgggcaacaattctcgaaaaggttgtgcaattacaaagttcagagcggctttgtgttgttaaggatctatctgctcatgatgtggtgatgcggctgatgcgcaaagaaaattacttgatcggtatgcttaacaagggtgtgcttgcatttcctatctcaaagtgggtgccaggtgttggtccaactgtcaaattcggtttgaatggaaagcgacatcgtctcatactgacaaagacccttgaatggactttaaattggtgcatcttgcagagcatgtttgatcggtatgttgaacattgaacaaagaacttgttgcatttcacatctttatattcgtgttgagatttggaaattcaacttatgtgcacaagaatgtttatcatattattttcgtgttgagattattttcttctaaagccatagaattttgtgaaaaaaacctcgagttgtttctctcattggatactcacatagtatcctcgccttaggatattgtaccgaaaatcttagttctcttgatattatcaacataagaaatttgccagaccctcttgaacatctttaatttgaatttactgttttcagaagatttatacattatgctacattgcttgaaatggaaaatcgggatctgagttgtaaatcccagattgtaaacatagaagaggacttagtttgctgaaaacttgtagttgtatgtgtacatttcatttcttattttcttctttgtttatttgattttacagaaacttctgtgtacgacgggattttatatcaaatcctagtaccttgaagaaaaggttgatggtagtaggtgttgcaatgcttcttctttcgccgtttatagtaatattcatgctagtttatctcttcttgaggcatgctgaacaattctataatcatccaagcacagcatcatctcgtagatggtctaatttgtcaaagtggatctttagggaattcaacgaggtaacagtaatttccttttctacacgcagcgttttccctagcataaattagcccaagcttgcactttcagtgaattagattagagatccgtatatggtgataatgaatttctctctatctcttaggtggaccacttgttcaagcaccgaaccaatagcagtgtgatacttgcatcggactatttaaagcaatttccatctccaatcatctctattattgcaaagttcatatcttttgtttccgggggctttgctgctatactgattatcatcgcgtttctggaggagtctctactcgagggccatgtaatatgctcgtggttgcttgagataatacaatgtatcgttaatctttcttctgttttttaactgaaatattttgcagatatttggtcgcaacttgctttggtacgctgctgtttttggaactataaccgctattagcagggctgctgttaccgatgaacttcttgtccttgacccagaaggtgccatgtctgtggtggtccagcatacacattatatgccgaagagatggcgaggcaaagaaaatactgagatggtccgcatggagtttgaaactctgtttcaggtattgttatattggattttcggttcttatgcttcacaaattcttgcaagtagccaaatatttttcgatttagttaaaattatggtttatcatataaagatctcaactttcaatgttagaacagtttattaatgatttttctttttcttctatgtattttgcagtacactggaatgatgttacttgaggagatggcctcaattttcctcactccatatttacttctttttgttgtcccacaggtatttattcttgatcatcgaaaattatattaacccgtaatatgttttggtcgtaatatgatctatgttttgctgtctagcgagtggacgacatattagagtttattgcagatttcaccgagcatgtggatggcgtcggtgatgtttgcaggtgagtattctctattgtttcaacatcttcatgattcttcagtgagcttttatcagtttttggttttgacaataacgatgacttttcttttctcggtctttatgatctacagcttcagcgcctttgattttcaaaaacatggcaatagtaactatggatcgccacacaatgcaagtcactcccagaggagttctcaggggaaaatggagaagtcattcttgaggtaggccataatttctgtatcaaatcaagtatgatttcctcgaaattcattcttgtagaccataatttcggttgcagctttcagagtagctatccttcatgggaaccaaatgctgaagggaagcaattcctttcaaaccttagaactttcagagagcgacagatgaggcagggacatggaaaccgacttccatactctcccgcgagaatgtggcaaggcaatccaacatttagagatacgccacaatatagtcaaggaacgggctaccatatggggtcgctctggctcatcgacgctgatcaaaagtctcacccttatcttctcgattggtattacacttcacatcctcaccaccatcgaactaattcctcgagagatatcgaggaagcaattgaagccaccgaacaacaatttggtgattattggtctccacccaacttgagacaagataatgctagatatgaagttaacataaacttggatcaccaaacacaacataacactacaaggggtgattactttgtgcaacaatatggctctaatctcggggcatcaacatcggcagcgttcttcagggagagtgacatcgagaatcaggaactcgggaatttgacacttccaaataggactaagtggtgggatagagatgcacaaggtctacaacaaccacaagcgagttttctcgagcctcctgattttaaccgtcgtgattcggttaatctctacgataactcatcagatagaagcacaaccgaagaacaagaccaacaacaacacttggtggactggaggaattctcgaaagctatctcgaactacatacatggatgatttagatacagatggcattagtcttcatttcgatgatatttttagcagacctcccgaaaccccgagaatagatccagaagcctaaaagctttgaatggcctaaaatatgaaaatataatttgcatacctctagtttttttgaagaggttgttgcttttaggtaatatggaaatattcatggttgttttttagtggataattgtgttaaaaaagaaaaatttattgattaggggaactaactctgtggtaattcttttctgtatataaattcatggttcttggctattatagtatttggcatagagttcatctttgatttgggaatctcacccctaaaagtgtacaaacaaatttcaagttagtaatcaatcaagttgaattctcattctacttttgtacatatttctgccttaggatcttgttttccatttgggtttttaatttttttcctttttggtggggatgacattattatattaggtcttgtttggctaaataagtgctaaagttgcaattttttacagagaggattttttttttctttcctttttttttttttttgtaatttgtttagtatataattaatttactatgttctactagtcactactactatcaatttggtaagtacccacttcatattttgtacttggtatttcaaaattgaatctgacaaagtgacacatgtggggtaaattctgtttggaaaaaagtaataattaagacttaatactcacttccaacatttta

SEQ ID NO: 191908 - DNA, 3310 bp, Cannabis indica
tttcatcaatgttagactttttaaaaaaaattgggtaaaagtccttacatccaacaatctaaataattcagggagcatttttaacgaccttaaaagttcaaaggacatgatttggtacatgtcaaagtttagggggcgaaaatactaattagcctatttttgaaagccaaaagaattatgctgtcaatgtgatctaaaagaagtaaagaactcccatgtatatgcaccccatccttatggaccatagctatatatatgtctgtttctgaaaaccaaggtgacattttctttttgtccttatagtatagaatcagtaataattatttcttattgagtgagtgccttaacccaattttctatataaacatatttattataataacttagcctttacttgatcagagattcatactattattatattctaatacagaatcacataaagaatgttggaaaaatataatatcaaaacactaaagagtgtaaggactacgtaccttcaaataagttgtgcctcctgcgaatgtaaaagccaactaaaattaacccaccaactaatgcaacgattatagccaatactaacacagctttcttcaccttacgaccaactcttgctttttctatgattagtttgaaacagagcagaacaaaaaaaaaagcaaacatattatgaaattgaaagaacaaatacattaaaaattaaaactaactagttgagttttgaaatgtgtacctatttctgatgctgacactcgaatgaaaagatcttgtccacctgatgaaaactgtctaatatcaaataaatctccaaaccaaagcacacaaccaatgccttgtttaatatctgagtttgtataagcagtgcaagagcaattgctcaagcatttagctctgcactcccttagattcacactcttattcacccaagtatattgagtatcaggcactttcaagccagaaaatcttaagaagccatctttttctttttgatgacaattattaggaggagaatctctgacacatccttctgaccagtacatagctttccaattttcttcatcctttggcttaaaacccttcaaacattggcatactggattattggttatgacacattctgaatttggtccacagaagccatagttgtcacattggtctcttggaactgagttataaggcttccaaattctctctgcttgtatccaaaccatgcgttgacgaacacttgttgtttgattcatcacaattcttgaatgactgacttgtctttgaggtagtaaatgtagtaaacttcatcatcattgtacacaaacgcgtaatcgaaaagcgggtttggtctcaagtcaggacttccactgaaacttatgccattccaagggccagttcgataaaattttgaagacccttttagaatcattggttcagggtacgtatgttgttgctgattaagctcaatcccataagtaaaatctccattacaagggtcatcgaaactcttccatgctgctaaacgccttgtgagatttctcctcaagtcccatcccaatttcattccgggcacagtagtatcggttggataatcaaaactttcccacaaataattctctgtattctcatctttctcatccctcaaaaccaaattaccgttatccaaaagctgcaccaatggttgttgtgctggtttcaatgaattggttgaccacatcacactctgattctgccccaaaagcacaagttctcctttatcgtttatagtcaatgagccagatgaatcgttgatgggtttacacctgtttgcaacccaaataaaagtttgaactgggatgttcatataccaaattcccagataacgattctttgaattgcctggactaaaaaatcccagttcaaagtttccttctttggaaaccaaagttgtgttctctctcataaaatttgatgatctaatgctatcaactaccgtagaagaagttactaaaaatgaaaaggagttgaaaaagcaaactataaacattaaagaacagatccccatcattagtttctacctcttgatcgagctttgtgaagacgatggaataccagtaccctcttcattgagctttgtctttctcgcatagtttgactattctaagtaatattgtctttagtgcttggactataaggaaaaaattaatctaaatccgttgcatatattgacgagtactgttcctttcataagcctattcacatgagtttcgtcaaaggaagaagaaaaaaaaaagatctaatagcagaactcgtgtggtttacaatagagttttactggaaaaagaaaaaccacattttaattaaattgttctgctccacatattcaaggaatttccatttttgctcaagaaaaagtttcacggccttaatcttaatcagtattaattttgttgtggtaattaaattgatcagtgagtactaatgctatgctcttttttattatattttgtagaaaatgtgcgccgtagaacgagtcttaattaatttgtgattggacagggacacaatggtttttagtagcttattgtatttactgaaaaattgaaagggtcgtttggactaagtaccagtttccaccacccattttggaaattaatttttagactccgtgttttttaaaaattacaattcgtaccctaaagtcaaaatatttttaaatatgacccaaataaaaaatttgttatacttgcacaatattagctacaccccaaaattataaaatcattttatcctttggtttaaaatagacaatttaaaaagtaaattattttataaaactattctttttctaaataagtagttaagtattgcactccaccttttgaaattacagaaattcattaattaagtttactatatttccatccaaaaaaaaagtaaagtttgtctatatgtatatatattataggattgtatatgcagtgatattgtatacgaacttttatgcttctctttgtcatcttgtttctccactattattttcttgaactggtcttctaactcttttgttcagtttcgttactatctgcttccattttttttttccaaagtgcttggtggttgttaattttcttagccattggagaaaataaaagagagaaagaaagagaaagagaaacagagaagaaggagaaattgaagaaagaataaattcattactgaacaaaggaaaatacaccagcttatatacaagagccaacaacagaatcaaactagaaagagagagagagttagttagagtagttacaagcgataacaaactaacatctaactacctaactaa

SEQ ID NO: 191909 - DNA, 1352 bp, Cannabis indica
tttttttttttttagaaaaaacaacgtataccttaaaacttatttaaaggaaaatggtaaaagcaagagtgatttttagacatacccataagaccattcactctcaataaaaggtccaatcctaaggcttgcatataggccttgtgcttgaatttccttaatgaattttacaaggtcttttcttccactaaaatcatactacaaaacaaatccatttgcaaaattaattagcatagcttgtagaaataaatttatatattttttcatttatgagtatgtgtgtgtgagatagaagagagaataaagagggaaataaaaatcaacatatgtttattttcatttctttgtatatgaaacagttaaaaataaattccaaaattgtatgttgcaaaaaaaaattaggaatgagttcagcaaaataaaaaaattggaatgattgtattttttataatcaagtgataaaaatggtcatattaatgtagtaaaatttcctaaaaagaaaataatattgtagtaataaaataggccttaatcaagttatttgttaatttttatttttatttattttttttaaaaaaggctgtcataaaaagagaaattgagaaaatcaaaataacaattcccaagatattatgtacatggaagaccaaccaataatgaataatgattaattagaaagattttagtaattaataattgtgagtgacctgtccttgtttgggttcatggatgttccagaacacatatgtctgtattacatctaaacctccttctttggctttaccaatcagagaatgccacatctgcacatcaacattttcatatttttataaagaaaaaaaaaataagcaatattctcattatcttatatattagtgaataatgatgcaatcacatatatatgatatgtttatagttactttttataattcttgattttcatttttggaaaaaatctcaatttctgaattttaccaaaaaataaaaatacattataaaaataaatctattttgaccaattgtatagagaatggtaagtatggactatgagacattataaaatgttttatttttagttataacaaaatttatcaataaaataaaaaaaaaaattatgactaattatatatttttatgttgtggctaaaaatattattaatcataaaaattaaaatagtattaatcatacttgttgtaacttaaactaaattatttagttaaacttaatttttgttgtaactaaaaatcacatttaattataaaaaatttataatgttgtgactaaaaaattatcattaaaagttttttttttttttttttaagtgagaacaaatacattatcaatatatagg

SEQ ID NO: 191910 - DNA, 1104 bp, Cannabis indica
atatctcaatttctctctttgacttgtcattatcgcagaggactataatctttaaagcaatggaaatggaatcttgtgtcccaccaggttttaggtttcatcccacagaagaagaacttgtgggttactatctcaaaagaaagattaacgcactcaaaattgatcttgatgtcattattgacgttgatctctataaaattgagccatgggatatccaaggtaatactagcatattcaaacaaaatctataatatattaattggactttttgtgtatgtataatctgtgattaggaaaactcaaatagaaataatggcacaaattataaagagaattgttattgagcttgtgcagcttacatgaaattataggagacacatgtataaaatctgatcattatgtatagcaactattttatatatattgaaatatatatacatatcattattagacattaatggtggctattacctttatacattaatttgccattgataagttatattttttaaaaattattatattaatgtatatgggattaatacttaattattggaccgacatatacatatagcaaggtctggacatatagatatagggatttgacgttttgggagctataggaatcttgaaagaagaaaacaacaataaaggacacttttagttaggaagaaactgagaacgcacacataaacatcactcttttatttagtcaacatttgtctcacaaaaacttcatttttttctaaaaaggtatatagttcgaacatgctatattgtttgttaatttattcatcgacactgttttatatagagcactagatgataatattatataaatatatatatatatatattaattgagtttgtacgtccgtactgcagctcgatgcaacctagggtacgatgaacagaatgaatggtacttctttagtcacaaagacaagaagtacccgacaggaactcgaactaacagagcgacggcagctgggttctggaaggcaacaggaagagacaaagctgtgctttccaagaacagaaatcatgggatgaggaagaccctgtctctacagggacgagctcccaatggccgcaaatctgatt

SEQ ID NO: 191911 - DNA, 2420 bp, Cannabis indica
taagtaaaaacaaactaaaaaaaaagctagaacaacaataaaaactacatgtacatagtataaaatataaattacacagttaattttaaaaaaatccgacccacaaaaaaaaaaaatagaaattttcgtaaaaccccaccaaaaccccacgtataaatttatattatttgctccttattaaaatttcaagtaatataattagttcatatatattattttattaatagtaataaacattaaaaatttgtcttggcagtttcttataaactaatacatttaggattcgttttgtatgtcgtattacaccgtattgtattatatagtattatattgaattatattttatgcaatattttcatgtaaagctatatttagtattaacttttatagacacctaaatatatgatattttagtataaattaaattttaacatagtataatataaaatatgatatataattcaatttaatataatatatataatacaatataatacgatgtaatacggcgttttaacgagcctttaataaattatttattaattaaaattttaaattaaattctgaaatcgaattttattacttaccatattaattatattttccaccaattaacatttatatatgtacgtagcaacgtaagaacttgagtacacattacatagtaaaagtaaaaggcatgtactcaacaaaattataaagaaaaaattataagagaaatagaggtaaacgaaatggaaaaaaaatgaagattttaattggaattatagtaaaatgtcgtattaattttcaaacaaataagagcatatgggctcttagtcaatagaaagatatatttatatggtaagaaaaaaaattaatacttatcaaaataataataataataaagaaaaaagtaaaaatattcattactagcataatattgtttatgcacttggaaaagatagtagaaaaccttaaagtagcacctatatttacttgatgaaaatgaaaaagaaatagaaaattggcatttggtatgagattttgatttaatggtggtaatattaatcccctccaataaggattaacattacaaatttaaaattaggatccacttggaacacaaactttttggttataaaaatttaatttagttagatcttacgtgttaaattaaaatggtggtaatattaatcctttctaagatttaggtttcatattctctccaagcttattctctccaactcaaactcgcataataaacaccccattaggtggcatatggttggaagaaatcaaaatataggtagaataagaataacattccaatactttcacataaaactaaactaagaaattaaataaaaattgttttccttccattcaattctatttcgttacctcaaatcaaacaccatctaagagtttatgagttggaagtgtggtatatctacctgaaaaaaaaaaaatagtatatcaactaaaattttactatttacatgttatattttgatataatattgttgattgattaactaaatattacaaaagttacaagtttgttactaaaaagataatatttaatctaattgggattgttatattatttataaataatataatatatagattaaatatgtgtattaaattaataatatgtaacatattacaatatatattaattgtcatcattttgtaacaaatgtgggagtcacttgttattatgagtaacctcacaactagaaaaatgggctttagaggcaatttttcggggccttcgccgtcagttttagcaaaatttgctaccgacagtgttccatgcgacactatagggggagcattaacacacatcataaggagaccctatgtcatcagttattatgacataaccgacggcatagggggtcctattgtattatgcagcctttatggcgtcggttatttgttaataactggcgtcgtagtgttttatgggaccagttattagcaaataaccaacgttgtattcaccccaaattttttggtgcatttttctggtgaaatctttcctgtaatttagactagattcgcgaagcatcttccatgtacatgatgctatcagctatggtaagtgcaatagagtttaaaatctaggatataaccaagttgttgcatttgatccaagaatcataattctcatcatcttcatcaggtttaatgaacttgatcttattcctcgccagtaaagccaccatcttcgatcgtcaccatgatctgtagttgtctgcaccaataagaatctttggaactagtgatgaagaagcactgtcaccactagatagataataaagactttgtggatcaatggtagggaacctgttgttttcatcgagagctgcgaatcgattagattgatcagcagcttcattgttgctattacttcgagtatgagtattttt

SEQ ID NO: 191912 - DNA, 1856 bp, Cannabis indica
attttttttgaagaaaaaaaaaagtgtatgcacccaatttatttcgagagcactttcaaggtataaatttacacatcatttaaaaatatattattttattttatttctctttcacattatttttggcactcttacttctaaaaatacttcaattatatagcactcctcaaacactattagttaaaagacttattgtgaaagtcaaatctgataattaaatgagatttcaaatcttttattattttggctaaacaagtatttatgagatacttaattggtctaactcatatttagcttgagatgaagcaaacacatgtttatgaaatattttattattttacaaaagatcaagcactcatgcatggaagcaaactactctcatgttaataattcatcatgcacaattgaaaatagacaaaaacctcatgttttgaaactacttttaaatatagggaaagagaaaaaaaatgtcatggactatctaaattaataatctcttgtgtggttacttcttttctaactaaattatgataagctttaatttgctcttcataaagagtctcccatccatttgcacacgaatggtgatacataaaccattctttagtaataggtggtattggacaaccagcatgcatgaacacctgtagataacaaaagataaaataatgtaaaacttcataaaatataagaaataatacctgatgaaataatttattcgaaaattaaattgtaatacctgaataaaatgattattattgacaaaacctatcgtaataagtttatgtagatcagtcggcgaaggattcgatctaagtggaagaaatgtaaacgattgttgtattgataagtgcactaagacaacattataacgagaagctataatatgtcccatatctggcatgatcatccaatgattaacacttggacgactatcgaaacatgataaaatacgacataaatcgtccacattgtcaaaacaatgaccatatagtctcttatagtcatttctatgatgatctaattcgtttatcaagtctttcctaacttgcctccagttgtcttcacccatgtccaacaagcctgcaatagctcgaaaaccacaatttccatcttgtgccacatcttttattacttgaatatatggtttcaactcacatggtaatgaattcatatatgattgtgaatatcctgatgtgttataatttactcgtataatttctatctccaaatcagaagaaacacattctcccattttgtgaactctatctttttgtcttgcattgccccttttcctagtttttgaggcattagatttgcttttttctttcattataggaagcatgatattgcactttgacacatttaatggtatctttgactctttcttagtcaacctccttgcaaaagaatttttattaatatgttttgcaaatgaatggttatgaaacccacacacaactttaagtatccaatcatttgttactgatttttgtccactcaaagaaaatgggcaaccacacttttttgttagggttctcttttttctttgagttttgtttacctgtcgatgactaccacttttctcacaggcaaatgtaattcttgcctttcgacctttacctgaatctgatcttgtaattacaatattgatttcgtgttgttttcctttacttttaatccattcaataagagcttctctggaattgaaaacctacacgaaaatgtaaaataaataaaatgaattattaaaatttgaatatatcttcacatttaaagggaaaaaataaaaaaaaaagaaggaaattatacacataataccatatcagtagcgaaaatatcactagaatcaaact

SEQ ID NO: 191913 - DNA, 1720 bp, Cannabis indica
ttataatatgggcatagaagaaaaacagataaaatttggtgattctgatactataaattatcaaagaaaaaaaaaacaattgacgacgtgtttaataaaatagataaataataaattgaattataactataattatgctaaagaaaacatgaggtaccaaagactccccaataataacaataacaaagcaaagctacacatataacaacttgccactttactattactattactattactactgctactgcaactctttcacttgcattctcaagcagaaactgcctcactctcttctctctttatattctcttctttccccttcagatatagcttctctaactctgtgtctttcccatctctatctatatttctatacaccatgaacccttctcaagaatctgtggaacaggggatatctcaacaggtattctttcttcctccttttcttgcactctgtttctaactctttactccatttcaatttcctcctttttttttctttttcttaataggcttcttgctttcttttaacattttgcttaatgggtttgtgaatgtcagtctttaagacattacccgaagcttgcattcttggaagaaaagggctatggccttatgggctagaagctcttttcaaatttgatgtggttttgggaaacttcatgttatgtttgaaatgagcaagtcatgtttagtgatgggttctcctctctgtgcccatctttattttatttattatatatatttatattaacacatatataattgtacaaataacaacatgttggtacatatggggtgtttggaagggatggagtaaatagcattattggtttcttttgtttgcagagaaaaataaaatgctgttgtttggcatgagagattattagaagtgattgagaatagggattacattctttcttttaattaacctaattagctgcttatcaacaaatcttcattctgtatcagaacttgaagagagtatcatgtacaactgtgctgacattagcctatcagagtcttggagtggtttatggtgacctcagtacctcccctctctatgtttacaagaccaccttctctggaaaattgagccttcatgaagatgatgaagaaatttttggggttctttcatttatcttctggacttttactctcattgctctcttcaaatatgtttttattgtaatgtcagctgatgacaatggtgaaggtaagcctttaatttatctcatccgagtactttactaagttgtttttttatttcatgattgagctatgagtgtgactccagagagtagacatatcactatgcaattttctgggagagaactgagtgttatggtcacatcaacttttctgtgactcactcctgatttccaatcatggcatggttggttctcatcactttgccaaaaaaaaccaaatgggggttttgagaaaagtgggggggacatgattagaggtatcttttgtatttgtcttctttttgtaatgacttaatatactaatagatttaatcgtatggggttcttagttttagtattacatgttgtatcattgtgccaattagttgtttcaattcttattatgatgacatttagcagagaaatctttaggctttagctgattaattatttcattttgtgcaggtggtacctttgctttatactcacttctatgccgtcatgcaagattgggtgttctacccaat

SEQ ID NO: 191914 - DNA, 1380 bp, Cannabis indica
gcatcaatagaataagagtatttatcataaggtggcgtcttacaaatagttagtgatatttcattatcataatgaataaattaaattatttgggatttaatacttaattctaccaataacaacatgacacttaaaacatattacaccattgatatttttaagagttctcattaataaaatgagattgaagctatcatattcaatatgcttagatgaaagataatggaaaggaagatgattccaaattctcatctctaaaagggcaaaaatggtcaagagacacaccaagagaatgaagactttacttggttggaatctagtgatgacacacccctaagatgaacattttagccttaggaataacttgaatttctacaaagaaatagttttgctatttgtttgttaaaataattctaaaatctattttaagtgaagatattaggtctttttttattttatttttttataatatattagtttttctctcattaaaatgacttagttaaaatataacctaaaatagtaaaaaattacacaattttgtcattatcatctttaaaaactattacataaaatattgtcttacatcatgtcaaatattttaaattaacactattgttattataatcattgtttgaacaaaaaataattgtaaatatgaacaatttgaattttgtttttaaaagaaaggacaagggtgtaatttcatctattaattttgataaaatataaggtacttaagttataagggcataaaatacagctctcacaaaattggggtttattaataaataaatcttaaaaagggatcatttgtataatacttatttttgtggtggtgggtttggaataaaaaaatattatgtttgaatggtttttttttcttttctgaatatgtttgaatggaattgattagctgtatttactttttgtttgggtcctgaatcatgattaatgttcacttttatatatatattttttaattattaaaaaaaatgctagggtttacacatatatatttcccccttttttattgccataatattaaagaaaatattttattttcctatttatttgtttccatccattttttaaatatatgttaaatggttttgggttttgtgttgtttacctctagaaaggaataaattatccaaaaaaatcacaaaattataaataataaaaataaagcatcttgtgatgtttggattggtacccaatagactttatcaactactttccatcaaatttatactttaattcactttttttttaataatatatatttgccaatgcatgcttgcatttttatttaatatcattcattacaatctaaaaaagagaaaaacaaaatacctaatgttacttatttttttttct

SEQ ID NO: 191915 - DNA, 1426 bp, Cannabis indica
gaaagttttttagtttaatttttgttttaattgtagttatttaatattattttaaataatttatagtgctaaaaataaaattcaaataattatatactacgcgtataaaaaaaatcacacgcaacaaaatataaaatttcatcaattacaacgcattacaactttttcaaatatttatagatttatattaaatatatctgcaaatttaagcaacaatttggtctctcccactaggaaagacttagtgggttagttaatgatgaagaaacatgtatggagttgataaaataatactcaaattacctgaacctcctaaattgggatataagtctaaacctctcattatatacgataattacttaataaatgttatttaagcataatgaatattatatattatagggttattaattagtatagtttagttagttttaagcatgatcttatccctacaaaaaaaaaaaattatcataagggggtaacggcattaggaacgacttaatttaagtcatctttgataactatataaatcagggatagggacgataataataaattgtccctcataattttctttttaacaagatgataatgtacactatgttgtcgctaatattttttttttttaatttcaaaatgaatatttagaaaaagcaagatttttccctcttgtacatcaaagacgacaattgtcgtccctagttcacattaattaaaaaactaatgtaagtaatcaaataataaattttaaaatagtttaattgaaaactttgttcaattgaatgttagttttagaaaattaataaataaatagtaaatggatatttaatttaattagcatcgatgtcacatatgtagcattttcaaatgttacaaatgttcatgtagatgatgtcatacttgctccagagtgcatagatgatgtcgcagatacctcagacctcgtagatgccacatatgccatagaagcctcagacattgcagatgctacaaatgatgctgacacggcagatttcacagatatagcaggcattgtagattatactaacgctacatatacaatagacatcttagatgtttacgagggtgcaattgttgtcgtactactcgtagatgccaaatgttactcagcagcggactcgaggctagggttggagatgatggtgatgatgatgatgcgttcacacattttagatattagttttattatttcttactagctatgaactctcacatttattttagttattagtgttattattttcttagaactcatttttctagtatcaactcttatatgaaatgtgttcttatgacatttagtattaactctttcaatatttaatatgaaacgttttcatgaatttgtttaatatgaaaaaattgatgtttaagttttttaatattaaattcaaataatatataa

SEQ ID NO: 191916 - DNA, 7037 bp, Cannabis indica
tagctacttaattaaaaaaaatacaccttaacacgaaaaaatgcaaaaaaaaattaactatttttgtcataatacttataggtcgaattgttattaaattttattttaataacaaaatcaattcaggatcctatttgtactattttagaaaacacaagttccattttattatttaacgaaacagaaaatctaatctataacttttacaaaatttaaagtctaaaataatattactcaaagactaatgatactaacttcataagaatttgaagatttaaatgcaaaactttgaagttaaagaccaaagtgcaaaaaatgaattcagttggaaatttatgattgcattacatatagttcaactttcaacaaaaatggtataattattacaattatataaatacattatgccatatattttcaccactattaaaaacaagaaaacaataattaagtacacacttaggcctaatttgataagtcatataagaattttattatattaaataataaataacattgtttgaatagaacattgtactatattaattactacaactataaattttaataaaatatgagtcatatcatttaatacataacaaaacacgtattagcttataatatttacaaaaggtttgaaatcaaccaagccccaacctcgaaccctaaatctcgaactcagaccgaaacccagacatggaccccaaatctaaaattggaccccgacccgaaaccaaccctgaaccctgaactcaaactcgaacccagaaccttactcgaacccctaatcgagaccaagaccaggaccccagaccttgacccgaccctgatcctagaccttgacccaagacccgaacctcaaacaaggacccaaccccgaaccttgaccttggaccccaacccgacccctgaaccaagtccaaggtcccgggcccgagagtccagaccgtaattgagattggggtcgagtttatcgtaaagaatttataattttacataatttataagtacaagtcaatatcaaatatagcattatattaaataatattaatacaatacaatatattacagtgtaccaaacaaacccttaaagtataaacacatatctatcaaaaccatatactaaattagaaaaaatttattttacttgatatggaaaagctatatatgttcaaatggtacaagtataaagtctcaatgttgattgggaaagtaatagttaaacacatcatcatgttaatgttaattgggaaatgctaaaagatattaatggtagtatctaacaccattctatgtatcaatatcacttatttgtataattaaatatcaagtctcatataacttaatgtaataactttcaaaagtatcactaactaattacaaagtgacacgtttagaaagtcttaagtaacactagtacccaatagcaatactcaatcaattgttaagaaaacaaaaaacaaaacaaaaggataaacatgattaaaagaagcaagtaaaaccagttggggatgtttaaaaaccagtaaaatcaacactaacctaaatttctgctaaataactaaaagggcaaactttcagtagcaaaatgaaggaagctaagcaaagagtttgaaattcaagacaaaatgaaaaacacaatccttcaagttttgcattaaaaatcatcaacacaaatttctgaattgagtaatcaatcaacagattccaaatgacctgtaaactgtaaaatgtaatctctaatcaaacaaaagaaaagagattaaagaatctgtataaagaacaaacaaaagaagaagaaaatattatgaaaaagagatcaattccataaatatttgcagtatgtacaaagccgtataggttacaacctcatatggtacaactataaccctaatactacaaaactacttcaatgaatggttagggggggttacactacatcatcatctacaagtacaacttcaacaaaaaaatgtgcacaatgaacaacaacatcatggtggtatacaacagaatcaaaaagaagaaagaaaagaaaaagtgagagaggatataatgatacaacaaatacaaatgatacaacaacaactaagccaaacaacaaaaaacagaagtggtgggggaggtaacaacagcaacatcctcagataaatcctattacatgaccatttttcaagcaacaagttccgaaaaataatctaaccatattcgagacttcggcaatttcaagccataaccatcatcatcatcgtcataacattgataagtttgtttcttcttttttttctttttttcattttttttatcaagtgctaattagctaaaacataaaggtaaagaaagctaagaaaaacttaaaagcaagagagtctgcttctaaatactattagggtctggcacaacacctttcgttctcctttccaatattgaagctacgaggtcccttttcgttgtagtggaaggctctcacagttccctgtgtaacggctttggttctcgaataaggaaatccatcaagctaccaatcaataaataagtcaattaagaattgcagcagttaaccaagattagcatgattctaaaaaagtaaagtatgcaatcatatagcgaaagaatatcaattaaaagtaacaattaccaaatataagcataacaccaacaaacaaagataaaagctaaataaacccaaattgaaatttcattaactgatgaaaaaacaccagtctcaaaatcaaagtattacttaaagagttgaattattaaaagaacaaagttcattaaagtcctatctataaatcgtaacgacgaaagttaatagttgatgattttgtgaatggagataaacagtagtaaatcgtaaatttaattgacatatttaaaataagcaaacagcttgagtgtgtgtgtgtgtgtattgctcgtgattcaataggtacgaaattaacagtatcagcatacctaattacaaaatacacaactcattcgggattgctagaaaaaagaaaatagaagcaaagcctagagcacagcataatattcaacaaacatccaaataacaatttattaccatgctatgccaataaactctactcattcaagcagaaaatcactttctattcagttaccttttctcatgcaagaaccaaacagtgcttccatgtaagagaagcaatcctgagactgaagaattgtaatgaaccaccactgaacgaacgggccataagacatcagttgaaaaagagtccaaaatagcactgcaaacccccaaaagtttctttgctttcactttcttctttttaaaataagaattatctagaaataagaaacatcaaagcagttattcggaagtgagcctccgcctcttcccataatcagcatcccttgatcttgatcgatgatcatcctcttgagatacccgtcctttgttgtgagtccttgatgaccgtcctctttcccactcatcatcatgttcagtttcacggtctctgtacctatgatggtcagcatatctgtccctatcttccctatgcctatcacggtccctttcacgttcgcgatcacgagaacgttctcgatcccgatcacgctccctttcccgctctcgaccagcgtctctatcatcacgatgtcttctttcagaccagtcatcatgacttgtatctttttctctaggcacatccctctcataagcttgatccctatcctcccgataccttctatcagaagacccagaccagtccctctctgaacctctatctttttccttcatgggattgggccagcctcctcctctatcatgactaacctcaccatattgatggtcagatgcagcttcttcaccataactagactccgcagctcttcccccaccatgctcttcaccaccaccccatccacccatgctgggatcagaccacattcccatattaggcccatcaacaccagctgttggcatcattcccattccattcatgggcattccccttccgaaaaatgcaggattaacgtgcggggcaactccaggcaaaccaacacctccaacaggagggaaagaagacaaaatcccagaaaatggcggtgttggggcaccaggaaagcctccataacttcccattctacccatgggagcaccaaaagctggatcgaaaccctggcccatcattgactgagggtgcaataaaggaggggttgcaccaagaccctgcccaaagccatttccaccatttcccattatacctctaccactcattcctccacccctgtttcgcatcggaccaacaggacccctatttcccatattctgagcattaccccttccccaattacctctcccgaaacctctattattattattagtatttgtattattatctgcaccttgataattcccaccagttgcaatgttattcccaccaggtttaacaccagtatcattaggccttctagcctgagcaacattagtctgagtcatctgttgattcctgttcacttgagcctctcccattctcttgacactgaacggggacgcaaatgcaacaagacaaggtcgaccattaaacaaatgcccattcatcccctctttgcaggctgtagcagcagctgggtcataaaactcaacctgacaataccctttagacttcccacttgccttctcatcgaaaaatttaacctccttcacttgtccatacttacataactcagactccaattccgaatcagttgtccaccaatgcaaatcaccaacaaacaaaatagtcccaccacctccacctccaacccctaccccaaccccaactccaccaacaacattgtttcctccaaccccattaacattaacgcccacaccaggttgcctcatcataccatcacccaccatattcccaacatttccaacaacaccaacatgaggtggcggaacttgttgtggcggcggtggttgctgttgttgcagctgctgaggttgttgttgctgttgcggctgctgaccaataacatgaaccccaacactagtattcccactctgttcctcaaaatcattcatcttactcgacccctgacctaattcaaccctcatcccacttccaccacccaccgacggccccgatccaacattaaccttcaaacccatctcaccccctctaaatccaggattttgattattactattactataaccctctcctccaactctcccagcagcaaccctagctccaacatctccaccaccagtaccctcaccactaccaccaccaacacccggaatcgaaacagcagcctcttgagccactaaaggagcttgttgctgttgttgttgttgctcaatcttcttctcctccacaacctcattcccaaaacccgaatcctcattcttcctcatagactgtaaaaaaccctctccaacatttacatcattgtaaaggtcctcataatcatcgtcttcctcttcctcacccaagaaaccctcatcagccacagctgagatcgcttcgttacgatggaactgatccatctgttcccctccatcttcatccattctcaaatttataatctttctttctccctcagctaaaatattatctaatctctacccctatatgtttatatataaatataaatatatatataggtctagaagtgaaagtgcttattcgaaatcaaaatcgaaccattgcatatcgaaagaatcgaaacctaaaacaattccagaagaataataatattagattgaagatcttaccagaaagattagagtcttctgagttcgagttcgagtttgagagcgagaaagatagagagagagagaacacgaaaccctaatactgaaaaaagttatgagagagagaaagaaagggaatgaaatttctgggtttatttatttaaataataataataaaaaaaaaatattgagttcgctagaaattactaacgtgcgccagtgtgcgtcatgtacgtgtactgtaattttggtttttttcttttacttcaactaaacaaggatgaactcactaaagaatatttttaattaaagataataattaaagttttaagtttgtaaatattataaatttaatgtttatttttagcggtataagtatttaatatttgtaaaattgtaatttattaaatctagataaaaacatatggtatcagttacttctaaatgttcttttaataaattcaaaactgacgaaactagaagaaaattacagttttataagtattgggtaattatgccgctaaaaataaatattaaatttatgcggcttacaaatatatttgaaaaaaaatgataaatatagtttgttttataaaaataattattttaattttttaaacaaaggagttgcaataattttttttatttttgaaaaaaaactaaaatatagtagataattataaggggtttttttattttttatattttaaaatagttttttttacattaatatatatataaaaaaaaaaaaaacagcgaggccttaaatcgcaattcaaattcaaatcgtaactcaagcaacaactactagaacaactcaaactctaaaaaaaaaaaaaattaaaaatagtatataaaataattctcctaattataaaaaaaaatagttacggtcctttattataggaacgaggtgagagaaattaagtaaatactaaagtgcaaaagaaatgttcgatttatttttgtttttaaaatttcaccatgtttttttattattttttttaattaaaataaaaaatatataaataaggcacttgttaaaatttattttaacaaaaaaaaagtagccaacttcattgagaatgtcatttattaacaaatatgattaattagcgaaattttactctcattataaatgtagttaatttaatggaagaagctcatgtaaaattataagcgattttatttgtgcttaataaaactcaagaaagcataactaagtttagaaaataaaaatctacaatcatttagtacaacactcgtaaaactttcattaataacaatatagaaaataataaatataaaattttgagtttct
